(19) United States
(12) Patent Application Publication
(10) Pub. No.: US 2008/0034453 A1
(43) Pub. Date: Feb. 7, 2008

(54) Annotated Plant Genes

(76) Inventors: Nordine Cheikh, Chesterfield, MO (US); Jingdong Liu, Chesterfield, MO (US)

Correspondence Address: ARNOLD & PORTER, LLP, 555 TWELFTH STREET, N.W., ATTN: IP DOCKETING, WASHINGTON, DC, 20004, UNITED STATES, 202-942-5000, IP_DOCKETING@APORTER.COM

(21) Appl. No.: 09/371,146

(22) Filed: Aug. 9, 1999

Related U.S. Application Data
Application No. 09/371,146 is a continuation-in-part of application No. 09/304,517, filed on May 6, 1999, now abandoned.

(51) Int. Cl. A01H 1/00; C07H 21/04

(52) U.S. Cl. 800/294; 536/23.2

(57) ABSTRACT

The present invention is in the field of plant biochemistry. More specifically the invention relates to nucleic acid sequences from plant cells, in particular, nucleic acid sequences from maize and soybean. The invention encompasses nucleic acid molecules that encode proteins and fragments of proteins. In addition, the invention also encompasses proteins and fragments of proteins so encoded and antibodies capable of binding these proteins or fragments. The invention also relates to methods of using the nucleic acid molecules, proteins and fragments of proteins, and antibodies, for example for genome mapping, gene identification and analysis, plant breeding, preparation of constructs for use in plant gene expression, and transgenic plants.

### CROSS REFERENCE TO RELATED APPLICATION

[0001] The present application is a continuation-in-part of application Ser. No. 09/304,517, entitled “Annotated Plant Genes,” filed May 6, 1999.

### FIELD OF THE INVENTION

[0002] The present invention is in the field of plant biochemistry. More specifically the invention relates to nucleic acid sequences from plant cells, in particular, nucleic acid sequences from maize and soybean. The invention encompasses nucleic acid molecules that encode proteins and fragments of proteins. In addition, the invention also encompasses proteins and fragments of proteins so encoded and antibodies capable of binding these proteins or fragments. The invention also relates to methods of using the nucleic acid molecules, proteins and fragments of proteins, and antibodies, for example for genome mapping, gene identification and analysis, plant breeding, preparation of constructs for use in plant gene expression, and transgenic plants.

### BACKGROUND OF THE INVENTION

[0003] The present invention is directed in part to aspects of plant biochemistry. Plants exhibit differences in their biochemistry to non-plants (see, for example, Plant Biochemistry, Eds. Dey and Harborne, Academic Press, New York (1997)). Plants also exhibit similarities in their biochemistry with non-plants (see, for example, Plant Biochemistry, Eds. Dey and Harborne, Academic Press, New York (1997); Biochemistry, Stryer, 4^{th} Edition, W.H. Freeman & Co., New York (1995); Principles of Biochemistry, Lehniger et al., Worth Publishing, New York (1994)). In addition, difference plants can exhibit differences in their biochemistry (see, for example, Plant Biochemistry, Eds. Dey and Harborne, Academic Press, New York (1997)).

[0004] Several web sites and database contain information pertaining to biochemical pathways and regulatory pathways. Examples of such web sites or data bases include: http://cgsc.biology.yale.edu (the CGSC maintains a database of E. coli genetic information, including genotypes and reference information for the strains in the CGSC collection, gene names, properties, and linkage map, gene product information, and information on specific mutations); http://www.labmed.umn.edu (the University of Minnesota's Biocatalysis/Biodegradation web page provides a search engine for compounds, enzymes, microorganisms, chemical formulas CAS registry, EC accession and microbial biocatalytic reactions and biodegradation pathways primarily for xenobiotic, chemical compounds such methionine, and threonine); http://wit.mcs.anl.gov/WIT2 (this website provides a functional overview which outlines metabolic pathways for organisms such as E. coli); http://ecocyc.PangeaSystems.com/ecocvc/ecocvc.html (this web site provides an overview of an E. coli metabolic map); http://www.biology.UCSD.edu (this web site provides information on signal transduction in higher plants); http://geo.nihs.go.jp (the Japanese National Institute of Health Science server provides information particularly on cell signaling networks); http://gifts.univ-mrs.fr (the Gene Interactions in Fly Trans-world Server provides information on gene interactions, mostly centered on Drosophila gene interactions); http://sdb.bio.purdue.edu (this web site provides a data base of Drosophila genes); http://genome-www.stanford.edu (Stanford Genomic Research web site provides information on for example, Sacchromyces and Arabidopsis); http://www.psynix.co.uk (this web site provides illustrations and computer models of various cytokinins); http://www.sdsc.edu/Kinases/pk home.html (this web site provides information on the protein kinase family of enzymes); http://transfac.gbf-braunschweig.de (the GBF web site provides information on regulatory genomic signals and regions, in particular those that govern transcriptional control); http://www.gcrdb.uthscsa.edu (this web site provides information on G-protein coupled receptors); http://www.biochem.purdue.edu (this web site provides information on secondary metabolism in Arabidopsis); http://home.wxs.nl/˜pvsanten/mmp/mmp.html (this web site provides a flow chart of metabolic pathways); http://www.genome.ad.jp/kegg/regulation.html (this web site, the KEGG regulatory pathways web site, provides pathway maps, ortholog group tables, and molecular catalogs searchable data bases by enzyme, pathway, or EC number); http://capsulapedia.uchicago.edu/Capsulapedia/Metabolism/RepExpMet.shtml (this web site provides expression information); http://www.zmbh.uni-heidelberg.de/M_pneumoniae/genome/META/ALL_META.GIF (this web site provides a graphic of metabolic pathways and the ways these pathways interact); http://moulon.inra.fr/cgi-bin/nph-acedb3.1/acedb/metabolisme (this web site provides information on C. elegans metabolic enzymes); http://www.gwu.edu/˜mpb (this web site provides information on metabolic pathways); http://www.bic.nus.edu.sg/pathwaydb.html (this web site provides links to biological pathways, such as metabolic pathways, developmental pathways, signal-transduction pathways, and genetic regulatory circuits); and http://www.scri.sari.ac.uk/bpp/charttxt.htm (this web site provides graphics of the metabolic pathways of diseased potato).

[0005] Illustrative pathways are set forth in more detail below.

[0006] A. Photosynthesis

[0007] 1. Biosynthesis of Tetrapyrroles

[0008] The biosynthesis of tetrapyrroles such as heme and chlorophyll as well as a number of other tetrapyrroles such as siroheme, the cofactor for sulfite and nitrite reductases, cobalamin (vitamin B12), and the chromophore of phytochrome, can be subdivided into three major phases; ALA synthesis, porphyrin ring synthesis and synthesis of final products. The pathway is conserved among species except for the synthesis of 5-aminolevulinate, also known as 5-aminolevulinic acid (“ALA”) (Porra, Photochemistry and Photobiology 65:492-516 (1997); von Wettstein et al., Plant Cell 7:1039-1057 (1995)).

[0009] The first phase of the biosynthesis of tetrapyrroles, such as heme and chlorophyll, is the synthesis of ALA. Yeast, fungi, mammals and some bacteria (the α-group of proteobacteria or purple bacteria, e.g. Bradyrhizobium japonicum and Rhodobacter capsulatus) biosynthesize tetrapyrroles via the single step four-carbon (C4), or Shemin pathway. In this pathway ALA synthase (E.C. 2.3.1.37) catalyzes the condensation of glycine with succinyl-CoA to generate ALA.

[0010] Plants, green algae, cyanobacteria, most eubacteria (e.g., E. coli and Bacillus subtilis), and archaebacteria biosynthesize ALA via the three-step five-carbon (“C5”) pathway, which includes glutamyl-tRNA synthetase (“GluRS”), glutamyl-tRNA reductase (“GluTR”) and glutamate-1-semialdehyde aminotransferase (“GSA-AT”). In plants and algae, the C5 pathway is localized in the chloroplast. The formation of ALA via the C5 pathway is reported to be the rate-limiting step in the biosynthesis of heme and chlorophyll (Kumar et al., Trends in Plant Science 1:371-376 (1996); Tanaka et al., Plant Physiol. 110:1223-30 (1996); Masuda et al., Plant Physiol. Biochem. 34:11-16 (1996); Hungerer et al., J. Bacteriol. 177:1435-43 (1995); Ilag et al., Plant Cell 6:265-75 (1994)).

[0011] Chloroplastic GluRS (E.C. 6.1.1.17), also known as glutamate-tRNA ligase, converts glutamate to glutamyl-tRNA (“Glu-tRNA”) activating the C-1 of glutamate in an ATP dependent reaction (Porra, Photochemistry and Photobiology 65:492-516 (1997); von Wettstein et al., Plant Cell 7:1039-1057 (1995)). Glu-tRNA is reported to be the first intermediate in the C5 pathway and it also reported to serve as a source of glutamate in protein biosynthesis. GluRS is a soluble plastid enzyme which has been isolated from higher plants (barley, wheat) and other organisms. Reported GluRS enzymes are homodimers encoded by a nuclear gene and synthesized in the cytoplasm and have a molecular weight of 54 kD (barley) and 56 kD (wheat).

[0012] GluTR, the first committed enzyme reported in heme and chlorophyll biosynthesis, catalyzes the NADPH dependent reduction of Glu-tRNA to glutamate 1-semialdehyde (“GSA”) with the release of intact tRNA (Porra, Photochemistry and Photobiology 65:492-516 (1997); von Wettstein et al., Plant Cell 7:1039-1057 (1995)). GluTR is reported as the rate limiting step in ALA formation and is present only at low levels in all organisms examined (Masuda et al., Plant Physiol. Biochem. 34:11-16 (1996); Schroeder et al., Biochem. J. 281:843-50 (1992); Masuda et al., Plant Cell Physiol. 36:1237-43 (1995)). Plant GluTR is a soluble enzyme localized in plastids and encoded in the nucleus. GluTR has been reported to exist as a multimer of a single subunit. The purified barley enzyme has a molecular weight of 270 kD with a monomeric subunit size of 54 kD (Pontoppidan and Kannangara, Eur. J. Biochem. 225:529-37 (1994)). Arabidopsis and cucumber enzymes have similar subunit molecular weights (Tanaka et al., Plant Physiol. 110:1223-30 (1996); Ilag et al., Plant Cell 6:265-75 (1994); Kumar et al., Plant Mol. Biol. 30:419-26 (1996)).

[0013] GluTR genes (also known as HEMA genes) have been cloned and the amino acid sequences determined for a number of sources including three higher plants; Arabidopsis, barley, and cucumber. The deduced amino acid sequence of GluTR from all sources exhibit about 60% overall similarity with stretches of amino acid identity. Barley, Arabidopsis, and cucumber show over 70% identity at the deduced amino acid level (Vothknecht et al., Proc. Natl. Acad. Sci. (U.S.A.) 93:9287-9291 (1996)). Two different GluTR genes have been isolated from three higher plants; Arabidopsis (Ilag et al., Plant Cell 6:265-75 (1994)), barley (Bougri and Grimm, Plant J. 9:867-878 (1996)), and cucumber (Masuda et al., Plant Cell Physiol. 36:1237-43 (1995)). In Arabidopsis and cucumber, one GluTR gene is expressed in all tissues and a second is expressed in a tissue specific manner. These genes are also reported to be differentially regulated by light (Tanaka et al., Plant Physiol. 110:1223-30 (1996); Masuda et al., Plant Physiol. Biochem. 34:11-16 (1996); Ilag et al., Plant Cell 6:265-75 (1994); Masuda et al., Plant Cell Physiol. 36:1237-43 (1995); Kumar et al., Plant Mol. Biol. 30:419-26 (1996); Hori et al., Plant Physiol. Biochem. 34:3-9 (1996)).

[0014] GSA-AT (glutamate-1-semialdehyde aminotransferase (E.C. 5.4.3.8)), catalyzes the conversion of GSA to ALA. GSA-AT is a soluble protein localized in the chloroplast and encoded in the nucleus (Porra, Photochemistry and Photobiology 65:492-516 (1997); von Wettstein et al., Plant Cell 7:1039-1057 (1995)). It has a subunit molecular weight of about 45 kD. The holoenzyme consists of two identical subunits and utilizes pyridoxal phosphate (“PLP”) as a cofactor (Kumar et al., Trends in Plant Science 1:371-376 (1996); Gough et al., Glutamate 1-semialdehyde aminotransferase as a target for herbicides, Boeger, Ed., Lewis, Boca Raton, Fla., (1993)). GSA-AT is reported to be inhibited by gabaculine, which has also been shown to inhibit chlorophyll biosynthesis in barley leaves (Rogers and Smith, BCPC Monogr. 42:183-93 (1989)). GSA-AT has been crystallized from Synechococcus (Hennig et al., J. Mol. Biol. 242:591-594 (1994); Hennig et al., Proc. Natl. Acad. Sci. (U.S.A.) 94:4866-4871 (1997)).

[0015] GSA-AT genes have been cloned from a number of plants including Arabidopsis. The deduced amino acid sequences from plants are highly conserved. As with GluTR, two GSA-AT genes have been found in Arabidopsis and they may be differentially regulated by light. It has been reported that the presence of two genes for both enzymes of the C5 pathway indicate that there are two routes for ALA formation in chloroplasts (Kumar et al., Trends in Plant Science 1:371-376 (1996)). Transgenic tobacco plants that express antisense RNA to GSA-AT have been reported to show varying degrees of chlorophyll deficiency. Antisense plants with chlorophyll contents less than about 25% of that in the wild type plants which were maintained in the greenhouse under high light conditions, did not survive (Hennig et al., Proc. Natl. Acad. Sci. (U.S.A.) 94:4866-4871 (1997); Hoefgen, et al., Proc. Natl. Acad. Sci. (U.S.A.) 91:1726-1730 (1994)).

[0016] The second phase of the biosynthesis of tetrapyrroles involves the formation of the porphyrin ring. The intermediates involved in this portion of the chlorophyll/heme biosynthetic pathway, from ALA to protoporphyrin IX, appear to be essentially the same in all organisms including plants and mammals.

[0017] Porphobilinogen synthase (E.C. 4.2.1.24), also known as ALA dehydratase, catalyzes the asymmetric condensation of two molecules of ALA to yield porphobilinogen (Porra, Photochemistry and Photobiology 65:492-516 (1997); von Wettstein et al., Plant Cell 7:1039-1057 (1995)). Porphobilinogen synthase is a metalloenzyme and there are different types of the enzyme categorized according to metal ion usage. Porphobilinogen synthase has been identified in several plants including spinach, pea, tomato, radish, and soybean. In higher plants the enzyme is located in the plastid, is a hexamer (40-50 kD subunits) and binds Mg⁺². The mammalian enzyme is an octamer and binds Zn²⁺ (Cheung et al., Biochemistry 36:1148-1156 (1997); Senior et al., Biochem. J. 320:401-412 (1996)). Several studies have shown that porphobilinogen synthase is both developmentally and light regulated in plants (Kyriacou et al., J. Am. Soc. Hortic. Sci. 121:91-95 (1996)).

[0018] Hydroxymethylbilane synthase (E.C. 4.3.1.8), also known as porphobilinogen deaminase, catalyzes the formation of the linear tetrapyrrole hydroxymethylbilane (Porra, Photochemistry and Photobiology 65:492-516 (1997); von Wettstein et al., Plant Cell 7:1039-1057 (1995)). The reaction involves the deamination and polymerization of four molecules of the monopyrrole porphobilinogen. Hydroxymethylbilane synthase is unusual in that it contains a novel dipyrromethane cofactor at the active site, which is self-assembled by the apoenzyme and is covalently attached to an invariant cysteine. The enzyme has been identified in mammals, yeast, bacteria, and plants (e.g., pea, spinach, Arabidopsis). Hydroxymethylbilane synthase exists as a monomer with a molecular weight of 33-44 kD. Hydroxymethylbilane synthase from Arabidopsis has been cloned and found to be localized in the plastid in both roots and leaves (Witty et al., Planta 199:557-564 (1996)). The 3-dimensional structure of porphobilinogen deaminase from E. coli has been determined (Louie et al., Proteins: Struct., Funct., Genet. 25:48-78 (1996)).

[0019] Uroporphyrinogen III (co)synthase (E.C. 4.2.1.75) catalyzes the ring closure of the unstable linear tetrapyrrole hydroxymethylbilane and the simultaneous isomerization of the acetyl and propionyl groups at pyrrole ring D forming uroporphyrinogen III (Porra, Photochemistry and Photobiology 65:492-516 (1997); von Wettstein et al., Plant Cell 7:1039-1057 (1995)). Uroporphyrinogen III (co)synthase has been isolated from a number of sources including mammals, bacteria, and plants (spinach). Uroporphyrinogen III (co)synthase has a molecular weight of about 30 kD and is highly diverse in primary structure depending on the source.

[0020] Uroporphyrinogen III decarboxylase (E.C. 4.1.1.37) catalyzes the stepwise decarboxylation of all four acetate side chains of uroporphyrinogen III starting with ring D followed by rings A, B, and C, respectively, to form coproporphyrinogen III (Porra, Photochemistry and Photobiology 65:492-516 (1997); von Wettstein et al., Plant Cell 7:1039-1057 (1995)). At high substrate concentrations, decarboxylation can occur randomly. Uroporphyrinogen III decarboxylase has been isolated from mammals, yeast, bacteria and plants (e.g., tobacco, barley). It is a monomeric enzyme with a molecular weight of about 40 kD. The barley and tobacco enzymes are reported to be light regulated (Mock et al., Plant Mol. Biol. 28:245-256 (1995)). Antisense tobacco plants have been generated and decreased levels of the enzyme were accompanied by a light-dependent necrotic phenotype and accumulation of uroporphyrinogen. It has been reported that the lesions may be caused by reactive oxygen species generated by photooxidized uroporphyrinogen (Mock et al., Plant Mol. Biol. 28:245-256 (1995)).

[0021] In aerobic organisms including plants, coproporphyrinogen III oxidase (E.C. 1.3.3.3), catalyzes the oxygen dependent sequential oxidative decarboxylation of the A and B propionyl side chains of coproporphyrinogen III to yield two vinyl groups and protoporphyrinogen IX (Porra, Photochemistry and Photobiology 65:492-516 (1997); von Wettstein et al., Plant Cell 7:1039-1057 (1995)). A separate enzyme is reported to catalyze the anaerobic reaction.

[0022] Coproporphyrinogen III oxidase has been studied in a number of organisms including plants (tobacco, pea). The enzyme is a homodimer and has a subunit molecular weight of about 35-40 kD and is located in plastids. It has been reported that coproporphyrinogen III oxidase is peripherally associated with the membrane. It has been isolated from soybean, barley and tobacco and these sequences show 70% identity at the amino acid level. Transcript levels are reportedly similar in etiolated and green leaves (barley) but higher in developing cells than in mature cells (Kruse et al., Planta 196:796-803 (1995)). Antisense tobacco plants have been reported with decreased levels of the enzyme. The decreased level was accompanied by accumulation of coproporphyrinogen, slightly reduced chlorophyll content and a necrotic phenotype. The prominent phenotype indicates photodynamic damage (Kruse et al., EMBO J. 14:3712-3720 (1995)).

[0023] Protoporphyrinogen IX oxidase (E.C. 1.3.3.4) catalyzes the formation of the aromatic protoporphyrin IX by the six electron oxidation of protoporphyrinogen IX (Porra, Photochemistry and Photobiology 65:492-516 (1997); von Wettstein et al., Plant Cell 7:1039-1057 (1995)). This is the last reported common step in tetrapyrrole biosynthesis. In aerobic organisms, the reaction is catalyzed by a flavoprotein that utilizes oxygen as an oxidant and, under anaerobic conditions, the oxidation is achieved by passing electrons to the electron transport chain. The enzyme has been purified from a number of sources including mammals and plants (barley) and is an integral membrane protein. The barley enzyme has a molecular weight of 36 kD and activity has been found in both plastidal and mitochondrial extracts.

[0024] The plastidal and mitochondrial forms of protoporphyrinogen IX oxidase have been cloned from tobacco and were found to exhibit low homology. The mitochondrial form is associated with heme biosynthesis. The plastidic enzyme functions primarily in the formation of chlorophyll and to a lesser extent in the formation of heme required for plastid proteins (Lermontova et al., Proc. Natl. Acad. Sci. (U.S.A.) 94:8895-8900 (1997)). Protoporphyrinogen IX oxidase is susceptible to inhibition by a number of herbicides including diphenyl ethers. Phytotoxicity has been explained as due to the accumulation of excess protoporphyrinogen which is rapidly oxidized to protoporphyrin in the cytoplasm. Protoporhyrin has been reported as a potent photosensitizer which generates singlet oxygen and causes rapid lipid peroxidation and cell death.

[0025] In the third and final phase of tetrapyrrole biosynthesis, magnesium or iron is inserted into protoporphyrin IX and subsequent modifications lead to the synthesis of the final tetrapyrrole products, such as chlorophyll and heme.

[0026] Mg-chelatase catalyzes the conversion of protoporphyrin IX to magnesium protoporphyrin IX by the insertion of Mg⁺² (Porra, Photochemistry and Photobiology 65:492-516 (1997); von Wettstein et al., Plant Cell 7:1039-1057 (1995)). Mg-chelatase, which requires ATP, is reportedly a three component enzyme. The three protein components have molecular weights of about 140, 40, and 70 kD. The reaction takes place in two steps, an ATP-dependent activation followed by an ATP-dependent chelation step. Mg-chelatase activity has been demonstrated in peas, cucumber, and barley and reportedly is localized in the chloroplast. Barley, Arabidopsis, and soybean genes encoding the 140 and 40 kD subunits have been cloned. Studies with the two identified plant genes show that Mg-chelatase expression is light regulated (Walker and Willows, Biochem. J. 327:321-333 (1997)).

[0027] Mg-protoporphyrin IX O-methyltransferase (E.C. 2.1.1.11) esterifies the propionic side chain of ring III of Mg-protoporphyrin IX to form Mg-protoporphyrin IX monomethylester (Porra, Photochemistry and Photobiology 65:492-516 (1997); von Wettstein et al., Plant Cell 7:1039-1057 (1995)). The methyl group is donated by the cofactor S-adenosyl-L-methionine. The enzyme has been isolated from bacteria and plants (wheat). A gene for Mg-protoporphyrin IX O-methyltransferase has been cloned from bacteria including Synechocystis (Smith et al., Plant Mol. Biol. 30:1307-1314 (1996)).

[0028] Mg-protoporphyrin IX monomethyl ester cyclase catalyzes the cyclization of Mg-protoporphyrin IX monomethylester to form the isocyclic ring E of divinyl protochlorophyllide (Porra, Photochemistry and Photobiology 65:492-516 (1997)). In aerobic organisms the enzymatic reaction is dependent on O₂ and NADPH. Evidence suggests that Mg-protoporphyrin IX monomethyl ester cyclase is a membrane-bound monooxygenase of the iron-sulfur protein or copper protein type. Mg-protoporphyrin IX monomethyl ester cyclase has been extracted from chloroplasts of higher plants including cucumber and wheat. A cucumber enzyme has been shown to consist of two components, a soluble and a membrane-bound component. The soluble component has a molecular weight of 30 kD (Bollivar and Beale, Plant Physiol. 112:105-114 (1996)).

[0029] The reduction of divinyl protochlorophyllide to monovinyl protochlorophyllide has been reported based on product characterization, this reaction is catalyzed by 8-vinyl reductase (Porra, Photochemistry and Photobiology 65:492-516 (1997)). It has been reported that Mg-protoporphyrin IX monomethylester may also act as a substrate. NADPH is the most likely reductant. 8-vinyl reductase has been detected in higher plants including wheat and cucumber.

[0030] Protochlorophyllide reductase (“POR”) (E.C. 1.3.1.33) catalyzes the reduction of the double bond between carbons 7 and 8 of the D ring of protochlorophyllide producing chlorophyllide (Porra, Photochemistry and Photobiology 65:492-516 (1997); von Wettstein et al., Plant Cell 7:1039-1057 (1995)). In angiosperms this is a light-dependent reaction. Non-flowering land plants, algae, and cyanobacteria contain both a light-dependent and a light-independent enzyme. Some other organisms contain only the light-independent enzyme. Three chloroplast genes have been identified that are essential for the light-independent enzyme (chlL, chlN and chlB).

[0031] The light-dependent POR (“L-POR”) has been purified from barley, oat, and Arabidopsis. L-POR has a molecular weight of 35-38 kD and forms different multimers and aggregates with other proteins. L-POR is localized in the plastid and encoded in the nucleus. Genes encoding L-POR have been cloned from, for example, barley, Arabidopsis, pea, and oat. Two distinct and differentially light-regulated L-POR genes, POR A and POR B, have been identified in Arabidopsis and barley. POR A and POR B have biochemically equivalent light-dependent activities, with different expression patterns. POR B is reported to be present throughout the plant life cycle, while POR A is reported to function only in the very early stages of greening of etiolated tissue (Runge et al., Plant J. 9:513-523 (1996); Holtorf and Apel, Plant Mol. Biol. 31:387-392 (1996); Martin et al., Biochem. J. 325:139-145 (1997)).

[0032] Chlorophyll synthetase catalyzes the last reported step in chlorophyll a biosynthesis (Porra, Photochemistry and Photobiology 65:492-516 (1997); von Wettstein et al., Plant Cell 7:1039-1057 (1995)). Chlorophyll synthetase esterifies the propionic acid side chain of ring D of chlorophyllide with either phytyl pyrophosphate in green plants or geranylgeranyl pyrophosphate in greening etiolated seedlings. The enzyme is located in the plastid. A gene that encodes the enzyme in Synechocystis (chlG) and a gene that encodes the enzyme in Arabidopsis (G4) have been cloned and expressed in E. coli. The Synechocystis enzyme has the preferred substrate specificity reported for green plants. The cloned and expressed enzyme from Arabidopsis has the preferred substrate specificity reported for etiolated plants (Oster et al., J. Biol. Chem. 272:9671-9676 (1997); Oster and Rudiger, Bot. Acta 110:420-423 (1997).

[0033] Ferrochelatase (E.C. 4.99.1.1) catalyzes the conversion of protoporphyrin IX to heme. In plants the enzyme is located in both mitochondria and plastids. Ferrochelatase is reported to be a single soluble protein. Two ferrochelatase genes have been identified in Arabidopsis. Ferrochelatase-II encodes a protein targeted to the chloroplast and ferrochelatase-I encodes a protein targeted to both chloroplasts and mitochondria (Roper and Smith, Eur. J. Biochem. 246:32-37 (1997); Chow et al., J. Biol. Chem. 272:27565-27571 (1997)).

[0034] 2. Phytochrome Protein

[0035] Light is essential for normal plant growth and development not only as a source of energy but also as an environmental signal regulating various developmental, physiological and metabolic processes. Light-regulated responses occur throughout the entire life cycle of a plant, including seed germination, seedling de-etiolation, leaf development, chloroplast biogenesis and development, flowering, senescence, effective utilization of carbon between vegetative and reproductive tissues, and responses to environmental factors (Kendrick and Kronenberg, In: Photomorphogenesis in Plants. Martinus Nijhoff, Dordrecht eds. (1994)). Perception and transduction of the light signals have been reported to be governed by at least three families of receptors, including the phytochromes (red and far-red) receptors, blue-light receptors, and UV receptors (Deng, Cell 76:423-426 (1994); Quail et al., Science 268:675-680 (1995)). In addition to light-regulated development and gene expression, it has been reported that some light-inducible genes are also regulated by circadian rhythm (Piechulla, Plant Mol. Biol. 22:533-542 (1993); Taylor, Plant Cell 1:259-264 (1989); Guiliano et al., EMBO Journal 7:3635-3642 (1988)).

[0036] Phytochrome is a light-sensing protein-chromophore complex present in higher plants. At least five species of phytochrome, designated phyA to phyE, have been reported in Arabidopsis thaliana (Sharrock and Quail, Genes Dev. 3:1745-1757 (1989); Clack et al., Plant Mol. Biol. 25:413-427 (1994)) and it has been reported that some of these photosensory phytochromes have both overlapping and unique functions in plants (Reed et al., Plant Physiol. 104:1139-1149 (1994); Smith, Annu. Rev. Plant Physiol. Plant Mol. Biol. 46:289-315 (1995)). Phytochromes have been reported to be associated with the establishment of a plant's circadian clock and its floral initiation rate (Anderson and Kay, Trends in Plant Sciences 1:51-57 (1996); Weller et al., Plant Physiol. 114:1225-1236 (1997); Weller et al., Trends in Plant Sciences 2:412-418 (1997)). Several physiological modes of light regulations associated with phytochromes, including very low fluence response, low fluence response, high radiance response, end-of-day far-red response and the shade avoidance to red:far-red ratio, have been reported (McCormac et al., Plant Journal 4:19-27 (1993); Smith and Whitelam, Plant Cell Environ. 13:695-707 (1990)).

[0037] Reported phytochrome apoproteins are between 120 and 130 kilodaltons in size, and are found in the cytoplasm as dimers. Each monomer has been reported to fold into two major structural domains separated by a protease-sensitive hinge region. Reported phytochrome molecules also have two functional domains. An approximately 70 kilodalton amino terminal domain has been reported to be associated with photosensory specificity of phytochrome. The portion of the molecule necessary for dimerization and signal transduction has been reported to be associated with an approximately 55 kilodalton carboxy terminal end. In several members of the phytochrome family, it has been reported that the initial response to light occurs through a chromophore covalently bound to the polypeptide chain. For all five reported members of the Arabidopsis phytochrome family, the chromophore has been reported to be a linear tetrapyrrole, responsible for the absorption of visible light. Phytochromes have been reported to undergo a light-induced reversible interconversion between two molecular isoforms, known as the Pᵣ and the P_{fr} forms. The Pᵣ form absorbs red photons (λₘₐₓ, 665 nm) to assume the conformation known as the P_{fr} form. It is this “activation” which has been reported as a signal for the cell to respond. Upon exposure to far-red photons (λₘₐₓ, 730 nm), this particular molecule has been reported to respond in one of two ways. The P_{fr} form may return to the conformation of the Pᵣ form or the protein may be rapidly degraded. It is the interconversion of the Pᵣ and P_{fr} forms which has been reported to operate as a trigger for growth and developmental responses by altering gene expression in the cell.

[0038] It has been reported in a number of eukaryotic and prokaryotic organisms that phytochromes may be protein kinases. Autophosphorylation of purified phytochrome proteins and sequence homology between the photoreceptors and eukaryotic protein kinases have been reported (Wong et al., Plant Physiol. 91:709-718 (1989); Thummler et al., FEBS Lett. 357:149-155 (1995); Quail, BioEssays 19:571-579 (1997); Elich and Choury, Cell 91:713-716 (1997)). Phytochromes have been reported to lack the consensus sequences that define protein kinases in eukaryotes. The C-terminal 250 amino acid sequence of phytochrome C has been reported to have similarity to a transmitter histidine protein kinases of the two component systems of prokaryotes (Schneider-Poetsch, Photochem. and Photobiol. 56:839-846 (1992)). Two reported gene sensory proteins of blue-green algae are related to higher plant phytochromes by amino acid homologies in the N-terminal regions. Both have also been reported to have homology to histidine kinases (Quail, Plant, Cell and Environment 20:657-665 (1997); Kehoe et al., Science 273:1409-1412 (1996)). The C-terminus of phytochrome protein has been reported to contain a domain adjacent to a hinge region with reported homology energy-sensing proteins, including histidine kinases (Yeh et al., Science 277:1505-1508 (1997); Zhulin et al., Trends Biochem. Sci. 22:331-333 (1997)). Phytochromes have been reported to function in transduction of light signals through kinase activity that activates one or more G proteins to induce or to shut off transcription of nuclear genes in the specific cells in which the phytochromes are expressed. Some of the genes whose light-regulated expression has been reported to be mediated by phytochromes include regulatory proteins such as nitrate reductase, chlorophyll a/b binding protein, catalase, RUBISCO small subunit protein, and photosystem II proteins (Chandok and Sopory, Mol. Gen. Genet. 251:599-608 (1996); Anderson and Kay, Adv. in Genetics, Vol. 34 Academic Press (1994)).

[0039] Protein sequences similar to plant phytochromes have been reported from Synechocystis strain PCC6803, and Fremyella diplosiphon, two prokaryotic algae (Quail, Plant, Cell and Environment 20:657-665 (1997); Kehoe et al., Science 273:1409-1412 (1996)). In the case of Fremyella diplosiphon, the protein is reported to be a chromatic adaptation sensor.

[0040] The number of phytochrome genes is not reported to be uniform among all plants. Five members of the phytochrome family in Arabidopsis, named A, B, C, D, and E, which are similar in nucleic acid and protein sequences, functions and wavelength to which they respond, have been reported (Sharrock and Quail, Genes Dev. 3:1745-1757 (1989); Clack et al., Plant Mol. Biol. 25:413-427 (1994); Pratt, Photochem. Photobiol. 61:10-21 (1995)). Amino acid homologies between these five Arabidopsis proteins have been reported to be between 46 and 80% with the greatest dissimilarities being at the amino and carboxy-termini. Functional analysis of phytochromes has been reported using photomorphogenic mutants lacking a particular phytochrome. Such mutations are reported to have pleotropic effects on plant development. Constitutive expression of phytochromes have been reported, including constitutive expression of phytochrome A (phyA).

[0041] Phytochrome A has also been reported to be associated with early seedling establishment and survival. In a number of plants, phytochromes, such as phy A, have been reported to mediate far-red high irradiance responses such as response of seeds to light environmental cues. Phytochrome A has been reported to accumulate to high levels in etiolated seedlings, in which it mediates the inhibition of stem growth. In response to far-red and red light, it has been reported that phy A promotes seed germination and seedling de-etiolation (increases chlorophyll biosynthesis to result in green color and stem growth) and plays a crucial role in flowering. Phy A has been reported to control flowering in pea by reducing the level of an inhibitor to flower formation (Weller et al., Trends in Plant Sciences 2:412-418 (1997); Botto et al., Plant Physiol. 110:439-444 (1996)). Phy A has been reported to be the only member of the Arabidopsis gene family that predominates in etiolated plant tissues. Activation to the P_{fr} conformer results in a rapid turnover.

[0042] Phytochrome B is a subfamily, which contains two reported members in Arabidopsis, B1 and B2. These members of the phytochrome B subfamily have been reported to be associated with the red/far-red reversible response. Phy B mutants (phyB-) have been reported to exhibit an early-flowering phenotype (Weller et al., Planta 189:15-23 (1993); Coupland, Trends Genet. 11:393-397 (1995)). Phytochromes A and B have been reported to have reciprocal sensitivities. Phytochrome B has been reported to be associated with a shade avoidance role later in development. Overexpression of an oat phy A gene in tobacco and Arabidopsis has been reported to disable shade avoidance responses to red:far-red ratio (Robson et al., Nature Biotechnology 14:995-998 (1996)). Shade avoidance has been reported to play a role for the light-stable phytochrome pool, including phy B. Reported mutants lacking a B type phytochrome include the long hypocotyl mutant (1 h) of cucumber, the elongated internode mutant (ein) in Brassica napus, the tomato tri mutant and at least one of the maturity mutants (ma₃^{R}) of Sorghum bicolor (Lopez-Juez et al., Plant Cell 4:241-51 (1992); Devlin et al., Plant Physiol. 100: 1442-47 (1992); Reed et al., Plant Cell 5:137-147 (1993); Foster et al., Plant Physiol. 105:941-48 (1994); Childs et al., Plant Physiol. 113:611-619 (1997)). Phy B and the photoreceptors of Arabidopsis have been reported to predominate in extracts of green plants. The P_{fr} form has been not reported to be degraded but is slowly reconformed to the Pᵣ structure.

[0043] Phytochrome C protein of Arabidopsis has been reported to have a photosensory specificity similar to phy B and have a role in primary leaf expansion (Qin et al., Plant J. 12:1163-1172 (1997). It has been reported that the expression of heterologous phytochromes A, B or C in transgenic tobacco plants altered vegetative development and flowering time (Halliday et al., Plant J. 12:1079-1090 (1997)).

[0044] Phy D has been reported to be related to phy B by nucleic acid homology. A reported deletion mutant of the phy D gene in Arabidopsis has been reported to resemble the mutants which lacked phy B (Aukerman et al., Plant Cell 9:1317-1326 (1997).

[0045] Several dicots have been reported to have additional phytochrome or phytochrome-like genes. Expression of phytochrome A genes has been evaluated in Fabaceace, Solanaceae, and Caryophyllaceae (Adam et al., Plant Physiol. 101:1407-1408 (1993); Matthews et al., Ann. Missouri Bot. Gard. 82:296-321 (1995)). Plants which contain additional phytochrome or phytochrome-like genes have been reported to belong to at least three plant families, the Cruciferae, Solanaceae and Umbelliferae. In tomato, with 7 reported genes, two phytochrome-like proteins are reported to mediate a phy B-type response (Pratt et al., Planta 197:203-206 (1995).

[0046] 3. Carbon Assimilation Pathway

[0047] The primary sites of photosynthetic activity, generally referred to as “source organs”, are mature leaves and to a lesser extent, other green tissues (e.g., stems). Photosynthesis may be broadly divided into two phases: a light phase, in which the electromagnetic energy of sunlight is trapped and converted into ATP and NADPH, and a dark or synthetic phase, in which the ATP and NADPH generated by the light phase are used, in part, for biosynthetic carbon reduction. In most plants, the major products of photosynthesis are starch (transitory storage form of carbohydrate formed in chloroplasts), and sucrose (formed in the cytosol). Sucrose represents the predominant form of carbon transport in higher plants. Processes that play a role in plant growth and development, crop yield potential and stability, and crop quality and composition include: enhanced carbon assimilation, efficient carbon storage, and increased carbon export and partitioning.

[0048] Oxygen-evolving organisms are reported to have a common pathway for the reduction of CO₂ to sugar phosphates. This pathway is known as the reductive pentose phosphate (RPP), Calvin-Benson or C3 cycle (Calvin and Bassham, The Photosynthesis of Carbon Compounds, Benjamin, N.Y. (1962); Bassham and Buchanan, In: Photosynthesis, Govindjee, ed., Academic Press, New York, 141-189 (1982). A number of plants exhibit adaptations in which CO₂ is first fixed by a supplementary pathway and then released in cells in which the RPP cycle operates. From the point of view of the metabolic pathway operating for photosynthetic carbon assimilation, higher plants can be classified by the existence of supplemental pathway such as C3, C4, and crassulacean acid metabolism species (Edwards and Walker, C3-C4: Mechanism and cellular and environmental regulation of photosynthesis, Blackwell Scientific Publications, Oxford, (1983)).

[0049] The RPP pathway is reported to be the main route by which CO₂ is ultimately incorporated into organic compounds in all species of higher plants (Edwards and Walker, C3-C4: Mechanism and cellular and environmental regulation of photosynthesis, Blackwell Scientific Publications, Oxford, (1983); Macdonald and Buchanan, In: Plant Physiology, Biochemistry and Molecular Biology, Dennis and Turpin (eds.), J. Wiley & Sons, Inc., New York, p. 239 (1990); Robinson and Walker, In: The Biochemistry of Plants, Vol. 8, Hatch and Boardman (eds.), Academic Press, New York, p. 193 (1981)). In C3 plants, the RPP pathway is the sole route for photosynthetic carbon assimilation, whereas in C4 and CAM plants an additional (not alternative) method of carbon fixation, is present separated in space (C4 plants) or in time (CAM plants) from the RPP cycle (Edwards and Walker, C3-C4: Mechanism and cellular and environmental regulation of photosynthesis, Blackwell Scientific Publications, Oxford, (1983)). Carbon skeletons are required to incorporate other functional groups, the operation of the RPP cycle for photosynthetic CO₂ fixation is a requisite for the biochemical synthesis of carbohydrates, lipids, proteins, and nucleic acids.

[0050] i. The Reductive Pentose Phosphate Cycle

[0051] The RPP cycle is reported to be the primary carboxylating mechanism in plants. Enzymes which catalyze steps in the RPP cycle are water soluble and are located in the soluble portion of the chloroplast (stroma). Reviews on the mechanism and enzymes involved in the RPP cycle include: Bhagwat, In: Handbook of Photosynthesis, Pessaraki, ed., Marcel Dekker Inc, New York, 461-480 (1997); Iglesias et al., In: Handbook of Photosynthesis, Pessaraki, ed., Marcel Dekker Inc, New York, 481-503 (1997); Robinson and Walker, In: The Biochemistry of Plants, Vol. 8, Hatch and Boardman, eds., Academic Press, New York, 193-236 (1981); Macdonald and Buchanan, In: Plant Metabolism, Dennis et al., eds., Longman, Essex, England, 299-313 (1997).

[0052] The RPP pathway is an autocatalytic pathway for the de novo synthesis of carbohydrates from inorganic CO₂. The RPP cycle is reported to comprise three phases. The first phase of the cycle is the carboxylation phase, during which ribulose-1,5-biphosphate (Rbu-1,5-P₂) is carboxylated to produce two molecules of 3-phosphoglycerate (3-PGA). The next phase is the reductive phase during which ATP and NADPH produced by the light reaction of photosynthesis are consumed in the reduction of 3-PGA to glyceraldehyde-3-phosphate (GA-3-P). The RPP cycle is completed by the regeneration phase where intermediates formed from GA-3-P are utilized via a series of isomerizations, condensations and rearrangements, resulting in the conversion of five molecules of triose phosphate to three molecules of pentose phosphate, and eventually ribulose 5-phosphate (Rbu-5-P). Phosphorylation of Rbu-5-P by ATP regenerates the original carbon acceptor Rbu-1,5-P₂, thus completing the cycle.

[0053] The RPP cycle is a metabolic pathway common to all photosynthetic organisms. Many of the enzymes of the metabolic route, as well as proteins involved in metabolite transport and regulation, have been purified.

[0054] Ribulose biphosphate carboxylase (RUBISCO, also referred to as ribulose-1,5-biphosphate carboxylase/oxygenase (EC 4.1.1.39)) constitutes about 50% of the total soluble protein in green leaves. Ribulose biphosphate carboxylase is reported to provide a quantitative link between the pools of inorganic and organic carbon in the biosphere. Ribulose biphosphate carboxylase catalyses the conversion of atmospheric carbon dioxide into three carbon compounds. Subsequent reactions result in both regeneration of the acceptor molecule and translocation of three molecules of triose-phosphate to the cytosol for synthesis of sucrose and starch. Reviews of the ribulose biphosphate carboxylase enzyme are provided by Ellis, Trends Biochem. Sci. 4:241-244 (1979); Hartman and Harpel, Annu. Rev. Biochem. 63:197-234 (1994); Miziorko and Lorimer, Annu. Rev. Biochem. 52:507-535 (1983); Andrews and Lorimer, In: The Biochemistry of Plants, Vol. 10, Hatch and Boardman, eds., Academic Press, San Diego, p. 131 (1987); Jensen, In: Plant Physiology, Biochemistry, and Molecular Biology, Dennis and Turpin, eds., J. Wiley & Sons, Inc., New York, p. 224 (1990).

[0055] Plants are reported to have two phosphoglycerate kinase isoenzymes (EC 2.7.2.3), one in the chloroplast and the other in the cytosol. The two isoenzymes are antigenically related, but can be distinguished on the basis of their isoelectric point (p1) values and on the basis of their affinity for magnesium and other substrates (Anderson and Advani, Plant Physiol. 45:583-585 (1970); Kopke-Secundo et al., Plant Physiol. 93:40-47 (1990)).

[0056] Three different glyceraldehyde 3-phosphate dehydrogenase (GAPDH (EC 1.2.1.13)) enzymes are found in eukaryotic cells (Pupillo and Faggiani, Arch. Biochem. Biophys. 194:581-592 (1979); Iglesias, Biochem. Educ. 18:2-5 (1990)). In higher plants there are two chloroplast GAPDH subunits: GapA (36 kDa) and GapB (42 kDa). The functional enzyme is reported to be a tetramer with either an A₄ or an A₂B₂ subunit structure (Cerff, In: Methods in Chloroplast Molecular Biology, Edelman, ed., Elsevier Press, Amsterdam: 683 (1982)). Sequence analysis of tobacco cDNA clones encoding the GapA and GapB subunits has revealed that they share homologues (Shih et al., Cell 47:73-83 (1986)). The three-dimensional structure of GADPH from both eukaryotes and prokaryotes has been studied, and it has been reported that the initial binding of the NAD coenzyme triggers a number of structural changes (Skarzynski and Wonacott, J. Mol. Biol. 203:1097-1118 (1988)).

[0057] Chloroplastic triose phosphate isomerase (TPI (EC 5.3.1.1)) is a homodimer with a subunit molecular weight of about 27 kDa (Pichersky and Gottlieb, Plant Physiol. 74:340-347 (1984)). The chloroplastic enzyme is reported to be distinguishable from the cytosolic enzyme by isoelectric focusing and peptide digestion mapping (Pichersky and Gottlieb, Plant Physiol. 74:340-347 (1984); Kurzok and Feierabend, Biochim. Biophys. Acta 788:222-233 (1984)). TPI, like several other RPP cycle enzymes, binds the substrate in a pocket, which is reported to be closed by a flexible loop which acts to shield the substrate from attack by water. Even though the active site is formed by residues from one subunit, the second subunit helps to exclude water from the active site domain.

[0058] Two reactions of the RPP cycle involve aldolase (EC 4.1.2.13), and both are catalyzed by the same enzyme, which is a tetramer of the 38 kDa subunit. It has been reported that each subunit of aldolase has a beta/alpha barrel structure (Sygusch et al., Proc. Natl. Acad. Sci. (U.S.A.) 84:7846-7850 (1987)) and that the C-terminal region covers the active site pocket, which is in the barrel and regulates access to the active site pocket.

[0059] Fructose-1,6-bisphosphatase (FBPase) (EC 3.1.3.11) is a homotetramer with a molecular weight of about 160 kDa. The amino acid sequence is reported to be highly conserved (Raines et al., Nucleic Acid Res. 16:7931-7942 (1988)). In both wheat and spinach, 12 extra amino acid residues have been identified that have been reported to be involved in the regulation by light via the ferredoxin/thioredoxin system (Raines et al., Nucleic Acid Res. 16:7931-7942 (1988); Marcus et al., Proc. Natl. Acad. Sci. (U.S.A.) 85:5379-5383 (1988)).

[0060] Transketolase (EC 2.2.1.1) (152 kDa tetramer) is found in cytosolic and chloroplastic forms. These forms are reported to have similar properties except for their response to Mg²⁺ (Feierbend and Gringel, Zeitschrift fur Pflanzenphysiol. 110:247-258 (1983); Murphy and Walker, Planta 155:316-320 (1982)).

[0061] Sedoheptulose-1,7-bisphosphate phosphatase (SBPase (EC 3.1.3.37)) is not reported to have a cytosolic counterpart and is reported to be found only in the chloroplast. The enzyme is reported to be a homodimer with a subunit molecular weight of 35-38 kDa (Nishizawa and Buchanan, J. Biol. Chem. 256:6119-6126 (1981); Cadet and Meunier, Biochem. J. 253:243-248 (1988)).

[0062] D-ribulose-5-phosphate-3-epimerase (EC 5.1.3.1) has been reported in animals as a homodimer with a subunit molecular weight of 23 kDa (Karmali et al., Biochem. J. 211:617-623 (1983)).

[0063] Ribose-5-phosphate isomerase (EC 5.3.1.6) has been purified from tobacco and spinach and is reported to be a homodimer with a subunit molecular weight of 26 kDa (Rutner, Biochemistry 9:178-184 (1970); Babadzhanova and Bakaeva, Biokhimiya 53:134-140 (1987)).

[0064] ii. Regulation of C3 Photosynthesis

[0065] The regulatory properties of the RPP cycle have been reported by Edwards and Walker, C3-C4: Mechanism and Cellular and Environmental Regulation of Photosynthesis, Blackwell Scientific Publications, Oxford, (1983); Leegood, Photosynthesis Res. 6:247-259 (1985); Woodrow, Biochim. Biophys. Acta 851:181-192 (1986). The conservation of phosphate is reported to play a role in the regulation of C3 photosynthesis, as a change in the level of any phosphorylated intermediate is balanced by an equal and opposite change in terms of phosphate elsewhere in the cycle (Woodrow, Biochim. Biophys. Acta. 851:181-192 (1986); Fell and Sauro, Eur. J. Biochem. 148:555-561 (1985)). Therefore, changes in the activity of any of the RPP cycle enzymes can affect both the substrate concentration and activities of other enzymes in the chloroplast.

[0066] iii. The C4 Pathway of Carbon Assimilation

[0067] In the C4 pathway, CO₂ is concentrated in bundle sheath cells at the site of the RPP cycle initiated by ribulose biphosphate carboxylase. C3 photosynthesis is documented to be the only mode of carbon assimilation in algae, bryophytes, pteridophytes, gymnosperms, and the majority of angiosperm families. Only about 10 families of known monocots and dicots have been reported to possess the C4 pathway of photosynthesis, these include, for example, maize, sorghum, sugar cane, etc. The C4 pathway has been reviewed by, for example, Edwards et al., In: CO₂ Metabolism and Productivity of Plants, Burris and Black, eds., University Park Press, Baltimore, Md., p. 83 (1976); Hatch, Biochim. Biophys. Acta 895:81-106 (1987); Ashton et al., In: Methods In Plant Biochemistry, Vol. 3, Academic Press Limited, New York, p. 39 (1990). A feature reported to be common to the enzymes in the C4 pathway is that their activities are 15-100 times higher compared to those reported in C3 plants. For example, adenylate kinase and pyrophosphatase activities are reported to be 20-50 times higher in C4 plants than in C-3 plants. Adenylate kinase and pyrophosphatase are largely located in the mesophyll chloroplast together with pyruvate Pi dikinase (Slack et al., Biochem. J. 114:489-498 (1969)).

[0068] In certain plant types (e.g., maize, sorghum and sugar cane), CO₂ is initially assimilated in mesophyll cells (with phosphoenolpyruvate (“PEP”) acting as a primary acceptor of CO₂) as oxaloacetate, which is reduced to malate by NADP-malate dehydrogenase. It has been reported that malate is moved to bundle sheath cells. In the chloroplast of bundle sheath cells, malate is decarboxylated by NADP-malic enzyme (malate formers) giving rise to pyruvate, and releasing CO₂ and NADPH. NADPH can be cycled back to NADP by coupling to PGA reduction in the RPP cycle. The carbon formed moves back to the mesophyll cells where it is converted to PEP by pyruvate Pi dikinase.

[0069] Plants of the PEP carboxykinase type are reported to have higher activities of aspartate and alanine aminotransferases than the malate formers. Such plants are reported to be aspartate formers rather than malate formers. In aspartate formers, the activity of PEP carboxykinase is reported to be higher and the activity of NADP-malic enzyme is reported to be lower (Edwards and Black, In: Photosynthesis and Photorespiration, Hatch et al., eds., Wiley Interscience, New York, p. 153 (1971)). It has been reported that the PEP carboxykinase is located in the cytosol of bundle sheath cells.

[0070] This group of C4 plants is not reported to contain either high levels of NAD-malic enzyme activity or high levels of PEP carboxykinase. It has been reported by Hatch and Kagawa (Aust. J. Plant Physiol. 1:357-369 (1974)) that these plants contain high NAD-malic enzyme activity in mitochondria and that the number of mitochondria in these plants may be increased by a factor of 34.

[0071] iv. Enzymes Involved in the C4 Pathway

[0072] Phosphoenolpyruvate carboxylase (PEP carboxykinase (EC 4.1.1.31)) is reported to initiate the carboxylative phase of the C4 metabolic route by catalyzing the irreversible beta-carboxylation of PEP. The reaction utilizes a divalent metal ion (e.g., Mg²⁺) as a cofactor. In C4 plants, PEP carboxykinase is reported to play a role in catalyzing the initial fixation of atmospheric CO₂ in the cytoplasm of mesophyll cells (O'Leary, Annu. Rev. Plant Physiol. 33:297-315 (1982); Andreo et al., FEBS Lett. 213:1-8 (1987)). PEP carboxykinase from C4 plants is reported to be a homotetramer with molecular weight of 400 kDa (O'Leary, Annu. Rev. Plant Physiol. 33:297-315 (1982); Andreo et al., FEBS Len. 213:1-8 (1987)). Each subunit is reported to contain at least one substrate-binding site. The monomeric form is reported to be inactive (Wagner et al., Eur. J. Biochem. 173:561-568 (1988); Walker et al., Plant Physiol. 80:848-855 (1986); Wagner et al., Eur. J. Biochem. 164:661-666 (1987).

[0073] In C4 plants, PEP carboxykinase is reported to be allosterically regulated. Glucose-6-phosphate, triose-phosphate and Pi are reported to be activators, and malate is reported to be an inhibitor of enzyme activity. C4 PEP carboxykinase is also reported to be subject to light regulation. Responses to light/dark involve a post-translational modification of the enzyme (Jiao and Chollet, Plant Physiol. 95:981 (1991)). The PEP carboxykinase is phosphorylated, during the light phase, at a serine residue close to the N-terminal region of the enzyme (Ser-15 in maize) (Jiao and Chollet, Plant Physiol. 95:981 (1991)). The phosphorylation is reported to be catalyzed by a soluble protein-serine kinase. The phosphorylated form of PEP carboxykinase is reported to be less sensitive to malate inhibition.

[0074] NADP-dependent malate dehydrogenase (NADP-MDHase (EC 1.1.1.82)) is reported to be located in the chloroplast of mesophyll cells and is reported to reduce oxaloacetate (OAA) by using photosynthetically generated NADPH. The native enzyme is reported to be a dimer composed of a nuclear-encoded subunit of molecular mass 42 kDa (Jenkins et al., Plant Sci. 45:1-7 (1986); Kagawa and Bruno, Arch. Biochem. Biophys. 260:674-695 (1988)). In C4 plants, NADP-MDHase is reported to have an alkaline pH optimum and the reduction of OAA is reported to be inhibited by NADP+. NADP-MDHase is reported to be light regulated with the enzyme active during the light phase and inactive during the dark phase. The activation mechanism involves reversible thiol/disulfide interchanges mediated by ferredoxin and thioredoxin m. The reaction is promoted under conditions of high NADPH:NADP+ ratio in the chloroplast stroma.

[0075] Aspartate aminotransferase (EC 2.6.1.1) is a cytoplasmic enzyme that converts OAA and glutamate into aspartate and alpha-ketoglutarate (alpha-KG) in mesophyll cells (Taniguchi et al., Arch. Biochem. Biophys. 282:427-432 (1990); Rastogi et al., J. Bacteriol. 173:2879-2887 (1991); Reynolds et al., Plant Mol. Biol. 19:465-472 (1992); Kirk et al., Plant Physiol. 105:763-764 (1994); Schultz et al., Plant J. 7:61-75 (1995)). Aspartate is exported into bundle sheath cells where decarboxylation takes place. Aspartate aminotransferase is reported to be present in aspartate forming C4 plants.

[0076] Alanine aminotransferase (EC 2.6.1.2) is reported to be present in C4 plants of the NAD-dependent malic acid enzyme (NAD-ME) type and interconverts in a reversible reaction the metabolites pyruvate and alanine in the cytoplasm of both mesophyll and bundle sheath cells (Son et al., Plant Mol. Biol. 20:705-713 (1992); Umemura et al., Biosci. Biotechnol. Biochem. 58:283-287 (1994)). The amino acid alanine is a metabolite transported in this C4 subtype.

[0077] NADP-dependent malic enzyme (NADP-ME (EC 1.1.1.40)) is reported to be present in NADP-ME type C4 plants and is located in the chloroplasts of bundle sheath cells. NADP-ME catalyses the conversion of malate into pyruvate and CO₂ in the presence of NADP+. This reaction is reported to require a metal ion (Ashton et al., In: Methods in Plant Biochemistry, Lea, ed., Academic Press, New York, p. 39 (1990); Leegood and Osmond, In: Plant Physiology, Biochemistry and Molecular Biology, Dennis and Turpin, eds., Wiley & Sons, Inc., New York, p. 274 (1990)). The NADP-ME enzyme in C4 plants is reported to comprise a single subunit with molecular weight of 62 kDa. At least two plastidic isoforms of NADP-ME, “dark” form and “light” form (the light form is also know as the “green” form), have been reported in maize leaves (Andreo et al., In: Proceedings of the International Congress on Photosynthesis, Montepelier, France, Mathis (ed.), Kluwer Academic Publishers, Amsterdam, (1995)). The dark form of the NADP-ME, which is present mainly in etiolated maize leaves, has a molecular weight of 72 kDa and a lower specific activity compared to the “green” form of NADP-ME (62 kDa) found in green leaves (Andreo et al., In: Proceedings of the International Congress on Photosynthesis, Montepelier, France, Mathis, ed., Kluwer Academic Publishers, Amsterdam, (1995)). The “green” form of NADP-ME appears to be enhanced by light. The dark form of the enzyme resembles the NADP-MEs found in C-3 plants in both photosynthetic and nonphotosynthetic tissues.

[0078] NAD-dependent malic enzyme (NAD-ME (EC 1.1.1.39)) is reported to be located in the mitochondria where it catalyzes the NAD-dependent decarboxylation of malate in the presence of a divalent cation (e.g., Mg²⁺). NAD-ME is reported to be ineffective in the decarboxylation of OAA (Artus and Edwards, FEBS Lett. 182:225-233 (1985). NAD-ME is reported to comprise two subunits (alpha and beta) which differ in molecular weights (58 and 62 kDa, respectively).

[0079] In C4 plants of the PEP carboxykinase (EC 4.1.1.49) type, aspartate is converted into OAA in bundle sheath cells and ketoacid is decarboxylated by cytoplasmic PEP carboxykinase. PEP carboxykinase is reported to have a requirement for Mn²⁺ and a preference for ATP (Ashton et al., In: Methods in Plant Biochemistry, Lea (ed.), Academic Press, New York, p. 39 (1990)). The native enzyme is reported to be a homohexamer with a molecular weight of 380 kDa (subunit molecular weight of 64 kDa). PEP carboxykinase enzyme is reported to be inhibited by the metabolites 3PGA, fructose-6-phosphate, fructose 1,6 bisphosphate and DHAP.

[0080] In all three subtypes of C4 plants, regeneration of PEP from pyruvate takes place in mesophyll chloroplasts by the reaction catalyzed by pyruvate Pi dikinase (PPDKase (EC 2.7.9.1)). This is a regulatory step in the C4 pathway (Hatch, Biochim. Biophys. Acta 895:81-106 (1987); Ashton et al., In: Methods in Plant Biochemistry, Lea (ed.), Academic Press, New York, p. 39 (1990)). PPDKase is a homotetrameric protein with a molecular weight of about 390 kDa (Ashton et al., In: Methods in Plant Biochemistry, Lea (ed.), Academic Press, New York, p. 39 (1990)). PPDKase is reported to be inactivated by cold temperatures and the absence of Mg²⁺ and is activated in the light period and inactivated in the dark period ((Ashton et al., In: Methods in Plant Biochemistry, Lea (ed.), Academic Press, New York, p. 39 (1990)). Activation by light of PPDKase is a result of dephosphorylation and the switch to inactive dark form involves phosphorylation.

[0081] Pyrophosphatase (inorganic pyrophosphatase (EC 3.6.1.1)) promotes the reaction catalyzed by the enzyme pyruvate Pi dikinase in the direction of PEP synthesis through hydrolysis of PPi (Jiang et al., Arch. Biochem. Biophys. 346:105-112 (1997); Mitchell et al., Can. J. Microbiol. 43:734-743 (1997)). Pyrophosphatase has been isolated from potato (du Jardin et al., Plant Physiol. 109:853-860 (1995)) and Arabidopsis (Kieber and Signer, Plant Mol. Biol. 16:345-348 (1991)).

[0082] Ribose-5-phosphate kinase (EC 2.7.1.19) is reported to be found in photosynthetic organisms possessing the C-4 pathway. This homodimeric enzyme has a subunit molecular weight of 39.2 kDa (Roeslier and Ogren, Nucleic Acid Res. 16:7192 (1988); Milanez and Mural, Gene 66:55-63 (1988)). The N-terminal region seems to be involved in the regulation of catalytic activity. Cys¹⁶ may form a part of the ATP-binding region. Lys⁶⁸ has also been implicated in ATP binding (Miziorko et al., J. Biol. Chem. 265:3642-3647 (1990)).

[0083] B. Carbohydrate Metabolism

[0084] 1. Glycolysis and Gluconeogenesis Pathways

[0085] i. The Glycolysis Pathway

[0086] Glycolysis plays a role in supplying energy to most organisms. Glycolysis, although it is per se anaerobic, is reported to be the primary source of carbon for respiration in plants via the citric acid cycle (Plaxton, Annu. Rev. Plant Physiol. Plant Mol. Biol. 47:185-214 (1996)). Under conditions of low oxygen, pyruvate generated from glycolysis can be converted into ethanol or lactate via fermentation. In addition to the production of energy, glycolysis can produce intermediates for formation of essential molecules such as amino acids (Plaxton, Annu. Rev. Plant Physiol. Plant Mol. Biol. 47:185-214 (1996); Salisbury and Ross, Plant Physiol. Wadsworth Pub. Co., Belmont, Calif. (1978)). In plants, glycolysis has been reported to take place in both the cytosol and plastids, using isozymes encoded by separate nuclear genes (Plaxton, Annu. Rev. Plant Physiol. Plant Mol. Biol. 47:185-214 (1996); Dennis and Miernyk, Annu. Rev. Plant Physiol. 33:27-50 (1982); Stitt and apRees, Phytochem. 18:1905-1911 (1979)). It has been reported that metabolites can be passed between the glycolysis and gluconeogenesis pathways via transporters (Plaxton, Annu. Rev. Plant Physiol. Plant Mol. Biol. 47:185-214 (1996)). It has also been reported that the maize phosphate translocator in C4 plants readily transports 2-phosphoglycerate and phosphoenolpyruvate, whereas the translocator in spinach, a C3 plant, transports these molecules very poorly (Gross et al., Planta 180:262-271 (1990)). Genes representing many of the enzymes of glycolysis have been reported.

[0087] Glycolysis may begin with glucose, fructose, or a glucose phosphate, all of which are eventually converted to fructose-6-phosphate. If glycolysis is begun with glucose or glucose-1-phosphate, glucose-6-phosphate is produced as an intermediate. Glucose may be phosphorylated to glucose-6-phosphate by hexokinase (EC 2.7.1.1) in an irreversible reaction requiring ATP and Mg²⁺ (Brownleader et al., In: Plant Biochemistry, Academic Press, New York pp. 111-141 (1997)). A hexokinase cDNA isolated from Arabidopsis thaliana has been reported (Dai et al., Plant Physiol. 108:879-880 (1995)).

[0088] Phosphoglucomutase (EC 5.4.2.2) catalyzes the conversion of glucose-1-phosphate to glucose-6-phosphate (Tetlow et al., Biochem. Soc. Trans. 25:468S (1997)). A plastidic phosphoglucomutase cDNA sequence has been reported from Spinacia oleracea (L.) (Penger et al., Plant Physiol. 105:1439-1440 (1994)). Phosphoglucomutase isozyme variants have been studied in maize. (Stuber and Goodman, Biochem. Genet. 21:667-689 (1983)).

[0089] Hexose phosphate isomerase (EC 5.3.1.9) catalyzes the conversion of glucose-6-phosphate to fructose-6-phosphate. cDNAs, isolated from several species including maize, have been reported (Lal and Sachs, Plant Physiol 108:1295-1296 (1995)). Fructose-6-phosphate can also be produced by the phosphorylation of fructose via fructokinase (EC 2.7.1.4). A fructokinase cDNA clone, isolated from potato, has been reported (Smith et al., Plant Physiol. 102:1043 (1993)).

[0090] Phosphofructokinase catalyzes the first reported step in glycolysis by converting fructose-6-phosphate to fructose-1,6-bisphosphate (Turner and Turner, In: Biochemistry of Plants—A Comprehensive Treatise, Vol. 2, pp. 279-316 (1980)). Two types of phosphofructokinases can catalyze this reaction: an ATP-dependent phosphofructokinase, known as ATP-dependent fructose-6-phosphate 1-phosphotransferase (EC 2.7.1.11), also known as PFK, which catalyzes an irreversible and regulated reaction and a pyrophosphate-dependent form, known as fructose-6-phosphate:pyrophosphate phosphotransferase (EC 2.7.1.90), also known as PFP, which catalyzes a freely reversible reaction stimulated by fructose-2,6-bisphosphate (apRees, In: Encyclopedia of Plant Physiology Vol. 18 pp. 391-417, (1985); Stitt, Annu. Rev. Plant Physiol. Plant Mol. Biol. 41:153-185, (1990)). Phosphofructokinase (PFK) has been reported to be the primary enzyme catalyzing the conversion of fructose-6-phosphate to fructose-1,6-bisphosphate in glycolysis (Brownleader et al., In: Plant Biochemistry Academic Press, New York pp. 111-141(1997)). Reports on transgenic potato tubers indicate that phosphofructokinase (PFP) can catalyze a net glycolytic flux (Kruger and Scott, Biochem. Soc. Trans. 22:904-909, (1994); Hajirezaei et al., Planta 192:16-30 (1994)). Reports have indicated that transgenic potato plants with approximately 1% of normal activity of phosphofructokinase (PFP) in tubers had no detectable changes in phenotype other than a small increase in sucrose and a decrease in starch in the tubers. The results of the report indicate that the phosphofructokinase (PFK) is normally present is sufficient to maintain flux through the glycolytic pathway and that phosphofructokinase (PFP) is present in excess (Hajirezaei et al., Planta 192:16-30 (1994)). Phosphofructokinase (PFK) is inhibited by phosphoenolpyruvate; this inhibition of phosphofructokinase can be relieved by Pᵢ (orthophosphate ion) (Plaxton, Ann. Rev. Plant Physiol. Plant Mol. Biol. 47:185-214 (1996)). Phosphofructokinase (PFK) catalyzes a non-equilibrium reaction and has been reported to be the first of two regulatory points in glycolysis (apRees, In: The Biochemistry of Plants, Vol. 3 pp. 1-42 (1980)). Fructose-6-phosphate:pyrophosphate phosphotransferase (PFP) has been cloned from potato (Carlisle et al., J. Biol. Chem. 265:18366-18371 (1990)) and castor bean (Todd et al., Gene 152:181-186 (1995)).

[0091] Fructose-1,6-bisphosphate aldolase (EC 4.1.2.13) catalyzes the breakdown of fructose-1,6-bisphosphate. The breakdown of fructose-1,6-bisphosphate by fructose-1,6-bisphosphate aldolase yields two three-carbon molecules, dihydroxyacetone phosphate and glyceraldehyde-3-phosphate. Aldolase clones, isolated from maize (Kelley and Tolan, Plant Physiol. 82:1076-1080 (1986)) and rice (Hidaka et al., Nucl. Acids Res. 18:3991 (1990)), have been reported.

[0092] Triose phosphate isomerase (EC 5.3.1.1) converts dihydroxyacetone phosphate to glyceraldehyde-3-phosphate. Because the conversion of dihydroxyacetone phosphate results in a six-carbon molecule becoming two molecules with three carbons each, the following reactions produce two molecules per initial hexose molecule. Sequences of triose phosphate isomerase have been reported from maize (Marchionni and Gilbert, Cell 46:133-141 (1986)) and rice (Xu and Hall, Plant Physiol. 101:683-687 (1993)).

[0093] Glyceraldehyde-3-phosphate dehydrogenase (EC 1.2.1.12) catalyzes the conversion of glyceraldehyde-3-phosphate into glycerate-1,3-bisphosphate. It has been reported that maize has cytosolic and plastid forms of this enzyme (Russell and Sachs, Mol. Gen. Genet. 229:219-228 (1991)) as does Arabidopsis thaliana (Shih et al., Gene 104:133-138 (1991)).

[0094] Glycerate-3-phosphate kinase (EC 2.7.2.3), also known as phosphoglycerate kinase, converts glyceraldehyde-1,3, bisphosphate to glycerate-3-phosphate. The conversion of glyceraldehyde-1,3, bisphosphate to glycerate-3-phosphate produces one molecule of ATP and requires Mg²⁺. Longstaff et al. have reported both cytosolic and plastidic forms of this enzyme from wheat (Longstaff et al., Nucleic Acids Res. 17:6569-6580 (1989)).

[0095] Glycerate-P-mutase (EC 5.4.2.1), also known as phosphoglycerate mutase, converts glycerate-3-phosphate to glycerate-2-phosphate. In plants, glycerate-P-mutase is cofactor independent. Glycerate-P-mutase has been reported from maize (Grana et al., J. Biol. Chem. 267:12797-12803 (1992)), tobacco, and castor bean (Huang et al., Plant Mol. Biol. 23:1039-1053 (1993)).

[0096] Enolase (EC 4.2.1.11), also known as phosphopyruvate hydratase, catalyzes the conversion of glycerate-2-phosphate to phosphoenolpyruvate and H₂O. Enolase is reported to require Mg²⁺ for its catalytic activity. Enolase has been reported from maize (Lal et al., Plant Mol. Biol. 16:787-795 (1991)), castor bean (Blakeley et al., Plant Physiol. 105:455-465 (1994)), tomato and Arabidopsis thaliana (van der Straeten et al., Plant Cell 3:719-735 (1991)).

[0097] Pyruvate kinase (EC 2.7.1.40) catalyzes conversion of phosphophenolpyruvate to pyruvate yielding a molecule of ATP. Pyruvate kinase has been reported to be encoded by multiple genes in certain plants. Certain isozymes have been reported to be targeted to specific plastid types. The conversion of phosphophenolpyruvate to pyruvate can also be catalyzed by phosphoenolpyruvate phosphatase (EC 3.1.3.2), also known as PEPase. It has been reported that in transgenic tobacco plants lacking cytosolic pyruvate kinase in their leaves, no change in aboveground phenotype or metabolism was observed. This report indicates that other pathways, such as that using PEPase, are capable of bypassing the need for pyruvate kinase (Gottlob-McHugh et al., Plant Physiol. 100:820-825 (1992)). The pyruvate kinase reaction is a non-equilibrium reaction and has been reported to be a second of two regulatory points in glycolysis (apRees, In: The Biochemistry of Plants, Vol. 3 pp. 142, 1980). Pyruvate kinase has been reported from a number of plants including tobacco, castor bean (Blakeley et al., Plant Mol. Biol. 27.79-89 (1995)) and potato (Cole et al., Gene 122:255-261 (1992)).

[0098] In the presence of oxygen, pyruvate from glycolysis can enter the citric acid cycle. Pyruvate is first converted to acetyl-coA by a pyruvate dehydrogenase enzyme complex, consisting of pyruvate dehydrogenase (EC 1.2.4.1), dihydrolipoamide-s-acetyltransferase (EC 2.3.1.12), and dihydrolipoamide dehydrogenase (EC 1.8.1.4). Pyruvate dehydrogenase and dihydrolipoamide-s-acetyltransferase subunit genes have been reported from Arabidopsis thaliana (Luethy et al., Biochem. Biophys. Acta. 1187:95-98, (1994), Guan et al., J. Biol. Chem. 270:5412-5417 (1995)). A dihydrolipoamide dehydrogenase gene has been isolated from pea (Turner et al., J. Biol. Chem. 267:7745-7750 (1992)).

[0099] In the absence of oxygen, pyruvate from glycolysis can undergo fermentation by using one of two pathways. In one pathway, lactate dehydrogenase (EC 1.1.1.27) catalyzes the conversion of pyruvate to lactate. In the other pathway, a two step process is involved. First, pyruvate is converted to acetaldehyde by pyruvate decarboxylase (EC 4.1.1.1). Next, acetaldehyde is converted to ethanol by alcohol dehydrogenase (EC 1.1.1.1). It has been reported that pyruvate decarboxylase activity is favored at low pH, so that as lactate is produced, lactate dehydrogenase activity decreases while pyruvate decarboxylase activity increases (Davies et al., Planta 118:297-310 (1974)). Gene sequences representing alcohol dehydrogenase, lactate dehydrogenase, and pyruvate decarboxylase have been cloned from maize (Dennis et al., Nucl. Acid Res. 12:3983-4000 (1984); Good and Paetkau, Plant Mol. Biol. 19:693-697 (1992); Kelley et al., Plant Mol. Biol. 17:1259-1261 (1991)).

[0100] ii. The Gluconeogenesis Pathway

[0101] Gluconeogenesis takes place primarily in germinating oil seeds and has been reported to be the predominant metabolic activity during germination of oil seeds (apRees, In: Encyclopedia of Plant Physiology, Vol. 18 pp. 391-417 (1985); apRees, In: The Biochemistry of Plants, Vol. 3 pp. 1-42 (1980)). Gluconeogenesis provides a mechanism for the breakdown of stored lipids into sugars. Developing seedlings may utilize sugars which result from this breakdown of stored lipids.

[0102] Gluconeogenesis has been reported to begin with oxaloacetate. Oxaloacetate has been reported to be produced from succinate with no net loss of carbon. apRees has reported that the conversion from fatty acids to succinate can occur in glyoxysomes and that the conversion of succinate to oxaloacetate occurs in the mitochondria. Reports also indicate that the remaining reactions of gluconeogenesis may occur in the cytosol (apRees, In: The Biochemistry of Plants, Vol. 3 pp. 142 (1980)).

[0103] Gluconeogenesis reactions are not the exact reverse of glycolysis. Glycolysis and gluconeogenesis differ in two ways. There are two reported irreversible reactions in glycolysis which are catalyzed by pyruvate kinase and phosphofructokinase. These enzymes are not utilized in gluconeogenesis. Gluconeogenesis begins with oxaloacetate that is not a substrate reported to be associated with glycolysis.

[0104] PEP carboxykinase (EC 4.1.1.49) catalyzes the conversion of oxaloacetate to phosphoenolpyruvate and CO₂ in the first reported reaction of gluconeogenesis. PEP carboxykinase has been reported from the Urochloa panicoides (Finnegan and Burnell, Plant Mol. Biol. 27:365-376 (1995)) and from cucumber (Kim and Smith, Plant Mol. Biol. 26:423-434 (1994)). Phosphoenolpyruvate is converted to fructose-1,6-bisphosphate in six steps utilizing enolase, phosphoglycerate mutase, phosphoglycerate kinase, glyceraldehyde-3-phosphate dehydrogenase, triose phosphate isomerase, and aldolase in the reverse order as in glycolysis.

[0105] The fructose-1,6-bisphosphate to fructose-6-phosphate reaction is catalyzed by fructose-1,6-bisphosphatase (EC 3.1.3.11). Fructose-1,6-bisphosphatase cDNA has been isolated from spinach (Martin et al., Plant Mol. Biol. 32:485-491 (1996); Hur et al., Plant Mol. Biol. 18:799-802 (1992)), oilseed rape (Laroche et al., Plant Physiol. 108:1335-1336 (1995); Rodriguez-Suarez and Wolosiuk, Plant Physiol. 103:1453-1454 (1993)), pea (Jacquot et al., Eur. J. Biochem. 229:675-681 (1995); Dong et al., Plant Physiol. 107:313-314 (1995); Carrasco et al., Planta 193:494-501 (1994)), and Arabidopsis thaliana (Horsnell and Raines, Plant Mol. Biol. 17:185-186 (1991)).

[0106] Gluconeogenesis has been reported to be capable of converting about 70% of the carbon from fat to sucrose. The majority of the loss of carbon in the conversion of fat to sucrose has been reported to be due to the CO₂ released in the PEP carboxykinase reaction. The efficiency of gluconeogenesis may indicate that little carbon is lost to respiration. Some carbon, however, may be respired for use in biosynthetic reactions in the seedling (apRees, In: The Biochemistry of Plants, Vol. 3 pp. 142 (1980)).

[0107] 2. Sucrose Metabolism

[0108] Carbon fixed during photosynthesis is either retained in the chloroplast and converted to a storage carbohydrate, for example, starch, or it is transferred to the cytosol in the form of triose phosphates and converted to sucrose. The newly synthesized sucrose in source tissues is a major transported form of reduced carbon in higher plants and can be either metabolized into other carbohydrates, stored in the vacuole or exported to other plant tissues. Plant tissues where sucrose is synthesized, such as leaves, are often referred to as ‘source’ tissues. Translocated sucrose is retained in ‘sink’ tissues (such as expanding leaves, growing seeds, flowers, roots or tubers, and fruit) and may be assimilated, or further metabolized to sustain cell maintenance or fuel growth, or be converted to alternative storage compounds (e.g., starch, fats). The relative type and size of these carbohydrate pools vary during tissue development, between different plant species, and within the same species subject to different environmental conditions. Such differences are reported to affect the yield and quality of agricultural produce.

[0109] Sucrose synthesis and catabolism are reported to be highly coordinated and regulated processes that may also be coordinately regulated with other dedicated metabolic pathways in a particular plant, plant organ or cell type. Sucrose synthesis is reported to be coordinately regulated with starch metabolism and photosynthesis in green ‘source’ plant tissues. Sucrose supply by transport mechanisms to actively growing ‘sink’ tissues is reported to be coordinated with plant development. In growing sink tissues, the supply of carbohydrate is reported to be important to other metabolic pathways and physiological processes including respiration, starch biosynthesis, cell wall biogenesis, lipid and protein biosynthesis. Sucrose synthesis and/or transport is also reported to play a role in the carbohydrate capacity that is available to growing fruits and seeds. Sucrose resynthesis during seed germination is reported to play a role in seedling vigor and agronomic stand establishment in many plant species during early plant development.

[0110] In many plant species, enzymes of pathways involved in sucrose metabolism can play a role in plant physiology and plant growth and development. Compartmentation and temporal regulation of genes and enzymes of sucrose metabolic pathways can allow multiple pathways to utilize sucrose as a common metabolite. Flux through a particular sucrose metabolic pathway can define the utilization of sucrose in any tissue or developmental stage. Sucrose and its metabolite products have been reported to play a role in gene regulation and expression of the sucrose pathway and other metabolic pathways in plants.

[0111] Reviews on sucrose metabolism in plants include Avigad, In: Encyclopedia of Plant Physiology, Vol. 13A, Loewus and Tanner (eds.), Springer Verlag, Heidelberg, pp. 217-347 (1982); Hawker, In: Biochemistry of Storage Carbohydrates in Green Plants, Dey and Dixon (eds.), Academic Press, London, 1-51 (1985); Huber et al., In: Carbon Partitioning Within and Between Organisms, Pollock et al. (eds.), Bios Scientific, Oxford, 1-26 (1992); Stitt et al., In: Biochemistry of Plants, Vol. 10, Hatch and Boardman (eds.), Academic Press, New York, 327-407 (1987); Quick and Schaffer, In: Photoassimilate Distribution In: Plants And Crops, Zamski and Schaffer (eds.), Marcel Dekker Inc., New York, 115-156 (1996).

[0112] The synthesis of sucrose precursors (triose and hexose phosphates) is derived from either photosynthetic CO₂ fixation or degradation of previously deposited storage reserves. One substrate for sucrose synthesis in photosynthetic tissues is three carbon sugar phosphates. These are exported from the chloroplast during photosynthesis, predominantly in the form of triose phosphates. The pool of triose phosphates, dihydroxyacetone phosphate (“DHAP”), and glyceraldehyde-3-phosphate (“GAP”), is maintained at equilibrium within the cytoplasm by triose phosphate isomerase (EC 5.3.1.1). A subsequent reaction involves an aldol condensation of DHAP and GAP, catalyzed by the enzyme fructose 1,6-bisphosphate aldolase (often called aldolase) (EC 4.1.2.13) to form fructose 1,6-bisphosphate (“F1,6BP”). Fructose-1,6-bisphosphatase (“FBPase”) (EC 3.1.3.11) catalyzes the cleavage of phosphate from the C1 carbon of fructose-1,6-bisphosphate to form fructose-6-phosphate (“F6P”). This reaction is essentially irreversible and has been reported to represent the first committed step within the pathway of sucrose synthesis. The cytosolic FBPase has been reported to be subject to allosteric regulation and may serve to coordinate the rate of sucrose synthesis with that of photosynthesis. Fructose 2,6-bisphosphate (“F2,6BP”) is reported to be a regulator of FBPase (Black et al., In: Regulation of Carbohydrate Partitioning In Photosynthetic Tissue, Heath and Preiss (eds.), Waverly, Baltimore, 109-126 (1985); Stitt et al., In: Biochemistry Of Plants, Vol. 10, Hatch and Boardman (eds.), Academic Press, New York, 327-407 (1987)). The concentration of F2,6BP is reported to be controlled in plants by two enzymes, fructose-2,6-bisphosphatase (F2,6Bpase) (EC 3.1.3.46) and fructose-6-phosphate,2-kinase (F6P,2K) (EC 2.7.1.105) (Stitt, Annu. Rev. Plant Physiol. Plant Mol. Biol. 41:153-181 (1990)).

[0113] Glucose-6-phosphate (“G6P”) and glucose-1-phosphate (“G1P”) are reported to be maintained in equilibrium with the F6P pool by the action of phosphoglucoisomerase (“PGI”) (EC 5.3.1.9) and phosphoglucomutase (“PGM”) (EC 5.4.2.2), respectively. Uridine diphosphate glucose (“UDPG”) and pyrophosphate (“PPi”) are formed from uridine triphosphate (“UTP”) and G1P catalyzed by the enzyme UDPG-pyrophosphorylase (“UDPGase”) (EC 2.7.7.9). This reaction is reversible and net flux in the direction of sucrose synthesis is reported to require removal of its products, particularly PPi. A pyrophosphate-dependent proton pump, vacuolar H⁺-translocating-pyrophosphatase (EC 3.6.1.1), has been identified within the vacuolar membrane and has been reported to utilize pyrophosphate to sustain a proton gradient formed between these two compartments (Rea et al., Trends in Biol. Sci. 17:348-353 (1992)).

[0114] A pyrophosphate-dependent fructose-6-phosphate phosphotransferase (“PFP”) (EC 2.7.1.90) is also present in the cytoplasm and catalyzes the reversible production of F1,6BP and Pi from F6P and PPi. One reported function of PFP is to operate in a futile cycle with the cytosolic FBPase, and function as a “pseudopyrophosphatase” recycling PPi. Uridine diphosphate glucose is then combined with F6P to form sucrose-6-phosphate (“S6P”). This reaction is catalyzed by sucrose phosphate synthase (“SPS”) (EC 2.4.1.14). Attachment of UDP to the glucose moiety activates the C1 carbon atom of UDPG, which is necessary for the subsequent formation of a glycosidic bond in sucrose. In certain organisms, SPS is capable of using adenine diphosphate glucose (“ADPG”), instead of UDPG, as a substrate. The use of nucleotide biphosphate sugars is a feature of metabolic pathways leading to the production of disaccharides and polysaccharides. SPS is reported to be subject to allosteric and covalent regulation and, in conjunction with the cytosolic FBPase, reportedly serves to coordinate the rate of sucrose synthesis with the rate of photosynthesis. The reported final reaction in the pathway is catalyzed by sucrose-6-phosphate phosphatase (“SPPase” or “SPP”) (EC 3.1.3.24), which catalyzes the hydrolysis of S6P to sucrose. It has been reported that SPS and SPPase may associate to form a multienzyme complex, that the rate of sucrose-6-phosphate synthesis by SPS is enhanced in the presence of SPP, and that the rate of sucrose-6-phosphate hydrolysis by SPP is increased in the presence of SPS (Echeverria et al., Plant Physiol. 115:223-227 (1997)).

[0115] i. Sucrose Synthesis

[0116] Reviews describing fructose-1,6-bisphosphatase (“FBPase”, EC 3.1.3.11) include those by Hers and Van Shaftingen, Biochem J. 206:1-12 (1982), and Stitt, Annu. Rev. Plant Physiol. Plant Mol. Biol. 41:153-181 (1990). Two isoforms of FBPase are reported to exist in plants. The first isoform is associated with the plastid and occurs largely in photosynthetic plastids. The second isoform, located in the cytoplasm, is reported to be involved in both gluconeogenesis and sucrose synthesis (Zimmerman et al., J. Biol. Chem. 253:5952-5956 (1978); Stitt and Heldt, Planta 164:179-188 (1985). FBPase catalyzes an irreversible reaction in the direction of F6P synthesis in vivo and has been reported to represent the first committed step in the pathway of sucrose synthesis. The properties of the enzyme are reported to involve the action of several regulatory metabolites (Stitt et al., In: Biochemistry Of Plants, Vol. 10, Hatch and Boardman, eds., Academic Press, New York, 327-407 (1987)). The enzyme reportedly has a high affinity for its substrate F1,6BP, a requirement for Mg²⁺, a requirement for a neutral pH, is weakly inhibited (Km 2-4 μm) by adenosine monophosphate (AMP), and is strongly inhibited by the regulatory metabolite F2,6BP (Hers and Van Shaftingen, Biochem J. 206:1-12 (1982); Black et al., In: Regulation of Carbohydrate Partitioning In Photosynthetic Tissue, Heath and Preiss (eds.), Waverly, Baltimore, 109-126 (1985); Huber, Annu. Rev. Plant Physiol. 37:233-246 (1986); Stitt et al., In: Biochemistry Of Plants, Vol. 10, Hatch and Boardman (eds.), Academic Press, New York, 327-407 (1987)). F2,6BP is also an activator of PFP and reportedly plays a role in the regulation of gluconeogenetic and respiratory metabolism.

[0117] The concentration of F2,6BP is reportedly determined in plants by two enzymes, fructose-2,6-bisphosphatase (“F2,6BPase”) (EC 3.1.3.46) and fructose-6-phosphate,2-kinase (“F6P,2K”) (EC 2.7.1.105). A review of these enzymes is provided by Stitt, Annu. Rev. Plant Physiol. Plant Mol. Biol. 41:153-181 (1990). Regulation of the activity of the F1,6FBPase and the rate of sucrose synthesis is reported to be, at least in part, brought about by changes in the concentration of F2,6BP.

[0118] Sucrose phosphate synthase (SPS (EC 2.4.1.14)) catalyzes a reaction that is displaced from equilibrium in vivo in the direction of S6P synthesis and is reported as an essentially irreversible reaction in vivo (Stitt et al., In: Biochemistry Of Plants, Vol. 10, Hatch and Boardman (eds.), Academic Press, New York, 327-407 (1987); Lunn and Rees, Biochem. J. 267:739-743 (1990); U.S. Pat. No. 5,665,892). SPS has been purified from spinach and maize, and the amino acid and cDNA sequences have been published (Worrel et al., Plant Cell 3:1121-1130 (1991); Klein et al., Planta 190:498-510 (1993); Sonnewald et al., Planta 189:174-181 (1993)). The enzyme has a subunit molecular weight of 117 kDa from spinach (Klein et al., Planta 190:498-510 (1993); Sonnewald et al., Planta 189:174-181 (1993)) and pea (Lunn and Rees, Phytochem. 29:1057-1063 (1990)) and 135 kDa from maize (Worrel et al., Plant Cell 3:1121-1130 (1991)). The native enzyme reportedly exists as a tetramer (Walker and Huber, Plant Physiol. 89:518-524 (1988); Lunn and Rees, Phytochem. 29:1057-1063 (1990); Worrel et al., Plant Cell 3:1121-1130 (1991), although dimeric molecular weights have been reported (Klein et al., Planta 190:498-510 (1993)). Activity has been observed for SPS at both dimeric and tetrameric molecular weights (Sonnewald et al., Planta 189:174-181 (1993)).

[0119] SPS is located in the cytosol, has a neutral pH optimum, and has been detected in all plant tissues which undertake active sucrose synthesis. SPS is also reported to undertake active sucrose synthesis. An increase in abundance of the enzyme is has been reported during the development of leaves, germination of seeds and ripening of fruit. SPS has been reported to be subject to regulation by metabolites and is activated by G6P and is inhibited by Pi. Pi and GP6 are reported to act competitively at an allosteric site of the enzyme. In the presence of high Pi concentrations, the enzyme is phosphorylated which reduces activity of the enzyme. It has also been reported that light-induced photosynthesis increases the activity of SPS in crude extracts (Sicher and Kremer, Plant Physiol. 79:910-912 (1984), Sicher and Kremer, Plant Physiol. 79:695-698 (1985); Pollock and Housley, Ann. Bot. 55:593-596 (1985)). In addition, it has been reported that compounds altering the phosphate status of the leaf can simulate the effects of light. Feeding leaves mannose, which sequesters phosphate by its conversion to the non-metabolized mannose-6-P, has been reported to cause activation of SPS (Stitt et al., Planta 174:217-230 (1988)).

[0120] The phosphorylation and dephosphorylation of SPS is catalyzed by SPS-phosphatase and SPS-kinase, respectively (Huber et al., Plant Physiol. 99:1275-1278 (1992). Hydrolysis of sucrose-6-P to sucrose is catalyzed by sucrose-6-phosphatase (SPPase or SPP) (EC 3.1.3.24). The activity of both SPS and SPP is reported to be affected by a multienzyme complex between SPS and SPP (Echeverria et al., Plant Physiol. 115:223-227 (1997)).

[0121] Regulatory properties of SPS and FBPase are reported to coordinate the rate of sucrose synthesis with that of photosynthesis (Stitt, In: Plant Physiology, Biochemistry and Molecular Biology, Dennis and Turpin, eds., Singapore, London, 319-340 (1990)). When photosynthesis produces triose phosphate in excess of the rate of sucrose synthesis, a feed-forward activation of sucrose synthesis occurs. Triose phosphate crosses the chloroplast membrane in exchange for cytosolic Pi. Under these conditions, F6P,2-kinase activity is reduced and the inhibition of F2,6Bpase is decreased.

[0122] As cytosolic F2,6BP falls, F2,6BPase activity increases, and F6P levels increase. Hexose phosphate levels are reported to increase due to PGM and PGI, and with low Pi, activate SPS and F1,6BPase. Reduction in rate of photosynthesis must result in a deactivation of sucrose synthesis, which occurs through decreased cytosolic triose-P, increased Pi and ultimately increased F2,6BP concentration and reduced SPS activity (Stitt, Phil. Trans. R. Soc. Lond. B 342:225-233 (1993); Huber et al., Plant Physiol. 99:1275-1278 (1992); Neuhaus et al., Planta 181:583-592 (1990).

[0123] ii. Metabolic Pathways of Sucrose Catabolism

[0124] Sucrose can initially be cleaved by invertases (EC 3.2.1.26) or by sucrose synthases (EC 2.4.1.13). Invertases, which are classified as acid or alkaline in pH preference (Karuppiah et al., Plant Physiol. 91:993-998 (1989); Fahrendorf and Beck, Planta 180:237-244 (1990); Iwatsubo et al., Biosci. Biotech. Biochem. 56:1959-1962 (1992); Unger et al., Plant Physiol. 104:1351-1357 (1994); Avigad, In: Encyclopedia of Plant Physiology, Vol. 13A, Loewus and Tanner (eds.), Springer Verlag, Heidelberg, 217-347 (1982)), irreversibly cleave sucrose into glucose and fructose, both of which is usually phosphorylated for further metabolism. The invertase pathway usually is associated with rapidly growing sink tissues such as expanding leaves, expanding internodes, flower petals, and early fruit development (Avigad, In: Encyclopedia of Plant Physiology, Vol. 13A, Loewus and Tanner (eds.), Springer Verlag, Heidelberg, 217-347 (1982); Huber, Plant Physiol. 91:656-662 (1989); Morris and Arthur, Phytochem. 23:2163-2167 (1984); Hawker et al., Phytochem. 15:1441-1443 (1976); Schaffer et al., Plant Physiol. 69:151-155 (1987)).

[0125] Sucrose synthase carries out the kinetically reversible transglycosylation of sucrose and UDP into fructose and UDPG, requiring only the phosphorylation of fructose for additional metabolism. Polysaccharide biosynthesis in sink tissues may utilize a sucrose synthase mediated sucrose catabolism (Avigad, In: Encyclopedia of Plant Physiology, Vol. 13A, Loewus and Tanner, eds., Springer Verlag, Heidelberg, 217-347 (1982); Doehlert et al., Plant Physiol. 86:1013-1019 (1988); Dale and Housley Plant Physiol. 82:7-10 (1986)). Respiring tissues reportedly utilize either sucrose synthase or invertase metabolic pathways (Echeverria and Humphreys, Phytochem. 23:2173-2178 (1984); Uritani and Asahi, In: The Biochemistry of Plants Vol. 2, Davies (ed.), Academic Press, New York, 463-487 (1980)). Tissues that are undergoing respiration, starch biosynthesis, amino acid and fatty acid synthesis, rapid expansion or growth, and other cellular metabolism, can utilize several sucrose metabolic pathways which may be temporally or compartmentally regulated (Doehlert et al., Plant Physiol. 86:1013-1019 (1988); Doehlert, Plant Physiol. 78:560-567 (1990); Doehlert and Choury, In: Recent Advances in Phloem Transport and Assimilate Compartmentation, Bonnemain et al. (eds)., Ouest editions, Nantes, France, 187-195 (1991); Delmer and Stone, In: The Biochemistry of Plants, Vol. 14, Preiss (ed.), Academic Press, San Diego, 373-420 (1988); Maas et al., EMBO J. 9:3447-3452 (1990)).

[0126] Hexose kinases are a class of enzymes responsible for the phosphorylation of hexoses, and are classified into two groups. Hexokinase (EC 2.7.1.1) can phosphorylate either glucose or fructose, with different isoforms often unique to different tissues or plant species. Different isoforms can have affinities for different hexoses (Turner and Copeland, Plant Physiol. 68:1123-1127 (1981); Copeland and Turner, In: The Biochemistry of Plants, Vol. 11, Stumpf and Conn (eds.), Academic Press, New York, pp. 107-128 (1987)). Hexokinases include fructokinases (EC 2.7.1.11), which typically have specific affinities for fructose (Doehlert, Plant Physiol. 89:1042-1048 (1989); Renz and Stitt, Planta 190:166-175 (1993). Fructokinases can also be specific in their affinity for nucleotides. The extent to which a fructokinase utilizes UTP may play a physiological role in how efficiently UDP can be recycled for sucrose synthase activity in a particular tissue (Huber and Akazawa, Plant Physiol. 81:1008-1013 (1986); Xu et al., Plant Physiol. 90:635-642 (1989). UDP levels for the sucrose synthase reaction may be maintained, even in the case of an ATP-specific fructokinase, by the enzyme NDP-kinase (EC 2.7.4.6).

[0127] NDP-kinase has been reported in several plant tissues (Kirkland and Turner, J. Biochem. 72:716-720 (1959); Bryce and Nelson, Plant Physiol. 63:312-317 (1979); Dancer et al., Plant Physiol. 92:637-641 (1990); Yano et al., Plant Molec. Biol. 23:1087-1090 (1993)). Fructokinase can be substrate inhibited by fructose. In addition, sucrose synthase can be inhibited by fructose (Doehlert, Plant Sci. 52:153-157 (1987); Morell and Copeland, Plant Physiol. 78:140-154 (1985), Ross and Davies, Plant Physiol. 100: 1008-1013 (1992)). Whereas plant tissues where sucrose is catabolized by sucrose synthase predominantly contain fructokinases (Xu et al., Plant Physiol. 90:635-642 (1989); Kursanov et al., Soviet Plant Physiol. 37:507-515 (1990); Ross et al., Plant Physiol. 90:748-756 (1994)), plant tissues where sucrose is catabolized by invertase often contain hexokinases (Nakamura et al., Plant Physiol. 81:215-220 (1991)). Tissues which have both invertase and sucrose synthase activity may contain both hexose kinases (Nakamura et al., Plant Physiol. 81:215-220 (1991)). F6P resulting from hexose kinase activity can be further metabolized in glycolysis or used in resynthesis of sucrose by SPS. G6P resulting from hexose kinase activity can enter the pentose phosphate pathway, via G6P dehydrogenase (EC 1.1.1.49), or be converted to F6P by phosphoglucoisomerase (“PGI”) (EC 5.3.1.9) or G1P by phosphoglucomutase (“PGM”) (EC 5.4.2.2) (Rees, In: Encyclopedia of Plant Physiology Vol. 18, Douce and Day (eds.), Springer Verlag, Berlin, 391-417 (1985); Copeland and Turner, In: The Biochemistry of Plants Vol. 11, Stumpf and Conn (eds.), Academic Press, New York, pp. 107-128 (1987); Foster and Smith, Planta 180:237-244 (1993)).

[0128] PGI and PGM are reported to be ubiquitous and reversible with commitments of G6P to either F6P or G1P resulting from fluxes in metabolites further along each pathway, i.e., depending on the cell needs for glycolysis (F6P) or starch biosynthesis (G1P) (Edwards and Rees, Phytochem. 25:2033-2039 (1986); Kursanov et al., Soviet Plant Physiol. 37:507-515 (1990); Tobias et al., Plant Physiol. 99:140-145 (1992)). UDPG formed by sucrose synthase may be utilized directly for cellulose or callose biosynthesis via UDP-glucose dehydrogenase (EC 1.1.1.2) (Robertson et al., Phytochem. 39:21-28 (1995)), can be used for sucrose synthesis by SPS or sucrose synthase, or for glycolysis or starch metabolism dependent on further metabolism by UDP-glucose pyrophosphorylase (EC 2.7.7.9). UDP-glucose phosphorylase has been reported to be a largely reversible enzyme (Kleczkowski, Phytochem. 37:1507-1515 (1994)). Flux through UDP-glucose pyrophosphorylase is reported to be influenced by metabolite levels and utilization of reaction products further along in the pathways (Doehlert et al., Plant Physiol. 86:1013-1019 (1988); Huber and Akazawa, Plant Physiol. 81:1008-1013 (1986); Zrenner et al., Planta 190:247-252 (1993)). The reversibility of PGI, PGM and UDPGPPase has been reported to provide for metabolic variability and networking in metabolism, independent of which initial enzyme cleaved sucrose.

[0129] The fate of F6P reportedly plays a role in carbohydrate metabolism. NTP-phosphofructokinase (PFK) (EC 2.7.1.11) (Copeland and Turner, In: The Biochemistry of Plants Vol. 11, Stumpf and Conn (eds.), Academic Press, New York, pp. 107-128 (1987); Dennis and Greyson, Plant Physiol. 69:395-404 (1987); Rees, In: The Biochemistry of Plants Vol. 14, Preiss (ed.), Academic Press, San Diego, pp. 1-33 (1988)) is reported to irreversibly convert F6P to F16BP and is associated with glycolysis. The reverse reaction of F16BP to F6P, associated with gluconeogenesis, is essentially irreversible, and is catalyzed by FBPase (EC 3.1.3.11) (Black et al., Plant Physiol. 69:387-394 (1987). Both reactions may be carried out in a reversible manner by a PPi-dependent fructose-6-phosphate phosphotransferase or PPi-phosphofructokinase (PFP; EC 2.7.1.90) (Black et al., Plant Physiol. 69:387-394 (1987).

[0130] PPi-dependent fructose-6-phosphate phosphotransferase or PPi-phosphofructokinase is reported to play a role in the generation of biosynthetic intermediates (Dennis and Greyson, Plant Physiol. 69:395-404 (1987); Tobias et al., Plant Physiol. 99:146-152 (1992)) in addition to the cycling of PPi for UDPGPPase and ultimately UDP for sucrose synthase (Huber and Akazawa, Plant Physiol. 81:1008-1013 (1986); Black et al., Plant Physiol. 69:387-394 (1987); Rees, In: The Biochemistry of Plants Vol. 14, Preiss (ed.), Academic Press, San Diego, pp. 1-33 (1988)).

[0131] 3. Starch Pathway

[0132] Starch is the principal storage carbohydrate of plants. Starch is found in both source tissues, such as leaves, and in sink tissues such as expanding leaves, growing seeds, flowers, roots or tubers, and fruit. Starch is synthesized in leaves during the day from photosynthetically fixed carbon and is mobilized at night. The carbon is transported in the form of sucrose to sink tissues where it may be photoassimilated, further metabolized to fuel cell growth and maintenance, or converted to storage compounds such as, proteins, lipids or starch. Starch anabolism and starch catabolism are central to the balance of carbon distribution and, as a consequence, may occur simultaneously in different tissues of the same plant.

[0133] Starch is a polysaccharide composed of glucose units connected by α-(1,4) and α-(1,6) linkages. Starch may be found in plant cells as water insoluble grains or granules. During photosynthesis starch is synthesized and stored in chloroplasts. Starch is also synthesized in roots and storage organs such as tubers, fruits and seeds. In these non-photosynthetic tissues, starch granules are stored in a form of plastids called amyloplasts. The size of the granules varies depending upon the plant species. Starch is composed of amylose and amylopectin, two distinct types of glucose polymers. Amylose is primarily linear chains of α-(1,4)-linked glucose molecules with an average chain length of 1000 glucose molecules. Amylopectin is a highly branched glucan chain consisting of approximately twenty α-(1,4)-linked glucose molecules joined by α-(1,6) linkages to other branches.

[0134] Starch can comprise up to 65-75% of the dry weight of cereal grains and up to 80% of mature potato tubers. In these crops starch is the primary energy reserve required for germination. Starch forms a major part of animal diets, particularly of their carbohydrate intake. Starch may also be used in many industrial processes such as paper production, textiles, plastics and adhesives. Starch production in a plant directly correlates with yield. Worldwide, starch producing crops, include but are not limited to wheat, rice, maize and potatoes.

[0135] Reviews of starch metabolism include Kruger, In: Plant Metabolism, 2^{nd} edition, Dennis et al. (eds.), Addison Wesley Longman, London, pp. 83-104 (1997); Martin and Smith, Plant Cell 7:971-985 (1995); Preiss, In: Biochemistry of Plants, Vol. 14, Preiss (ed.), Academic Press, San Diego, pp. 181-254 (1988); Preiss, Oxf Surv. Plant Mol. Cell. Biol. 7:59-114 (1991); Smith et al., Plant Physiol. 107:673-677 (1995); Steup, In: Biochemistry of Plants, Vol. 14, Preiss (ed.), Academic Press, San Diego, pp. 255-296 (1988).

[0136] The last three reported committed steps of the starch biosynthesis pathway are catalyzed by three enzymes, adenosine 5′-diphosphoglucose pyrophosphorylase (ADP-Glc PPase), starch synthase, and starch branching enzymes. ADP-Glc PPase converts α-glucose-1-phosphate and ATP into ADP-glucose and pyrophosphate. Starch synthase adds the ADP-glucose molecule to the unbranched chain of α-1,4-glucose molecules and releases ADP. Starch branching enzymes take a short chain of α-1,4-glucose molecules and links that chain via an α-1,6-glucose bond.

[0137] ADP-Glc PPase (EC 2.7.7.27) is an extensively characterized enzyme of the starch biosynthetic pathway. ADP-Glc PPase catalyzes the conversion of glucose-1-phosphate into ADP-glucose in the presence of ATP. ADP-Glc PPase is a tetramer composed of two large and two small subunits. Maize ADP-Glc PPase has been reported to possess molecular masses of 55 and 60 kDa (Preiss et al., Plant Physiol. 92:881-885 (1990). ADP-Glc PPase has also been reported to be subject to allosteric regulation by the activator 3-phosphoglycerate and by the inhibitor inorganic phosphate (Preiss, Oxf. Surv. Plant Mol. Cell. Biol. 7:59-114 (1991)). The large and small subunits have been reported from a diverse range of plants. ADP-Glc PPase clones, both cDNA and genomic, have been isolated and sequenced (Wasserman et al., Cereal Food World 40:810-817 (1995)). Studies have shown genetic modulation of ADP-Glc PPase levels can impact starch yield. For example, transgenic potato plants transformed with ADP-Glc PPase cDNA in the reverse orientation, have been reported to express low levels of ADP-Glc PPase, resulting in the reduction in starch level in the tuber by 70-75% (Muller-Rober et al., EMBO J. 11:1229-1238 (1992)). Conversely, elevated levels of ADP-Glc PPase have been reported to increase starch yield in transgenic plants (Stark et al., Science 258:287-291 (1992)).

[0138] UDP-glucose pyrophosphorylase (EC 2.7.7.9) (UDP-Glc PPase) differs from ADP-Glc PPase, in that UDP-Glc PPase utilizes UTP to convert glucose-1-phosphate to UDP-glucose. UDP-glucose is utilized in plants as the glucosyl donor for the synthesis of various carbohydrates including sucrose, cellulose or α-(1,3) glucans. In bacteria, UDP-glucose is reported to be the primary glucosyl donor for the synthesis of glycogen. Plant starch synthase (EC 2.4.1.21) has been reported to have some affinity for UDP-glucose, and therefore, UDP-glucose may be a substrate for the synthesis of starch. UDP-Glc PPase activity has been isolated from plants (Hondo et al., Plant Cell Physiol. 24:61-69 (1983)). An isolated cDNA clone encoding UDP-Glc PPase has been reported from S. tuberosum (Katsube, J. Biochem. 108:321-326 (1990)). A nucleic acid sequence of a S. tuberosum UDP-Glc PPase has been reported to be more homologous to the nucleic acid sequence of UDP-Glc PPase from Dictyostelium discoideum than to ADP-Glc PPase of Oryza sativa or Escherichia coli. Unlike plant ADP-Glc PPase, S. tuberosum UDP-Glu PPase cDNA does not have a chloroplast-specific transit peptide.

[0139] Starch synthase (EC 2.4.1.21) is a glucosyl transferase that transfers glucose from ADP-Glc and catalyzes chain elongation via the formation of α-(1,4)-glucosidic linkages (Preiss, Oxf. Surv. Plant Mol. Cell. Biol. 7:59-114 (1991). Starch synthase activity has been reported to be associated with the starch grain (granule bound starch synthase) as well as with the stroma of the plastid (soluble starch synthase) (MacDonald and Preiss, Plant Physiol. 78:849-852 (1985)). Multiple forms of soluble and granule-bound starch synthase have been identified and characterized in the seeds and leaves of higher plant species.

[0140] A 60 kDa granule bound starch synthase I (the waxy protein) is reported to be responsible for the amylose formation (Klosgen et al., Mol. Gen. Genet. 203:237-244 (1986), Shure et al., Cell 35:225-233 (1983)). A waxy mutation yields a phenotype with 100% amylopectin in contrast to wild type maize, which contains about 70% amylopectin and 25-30% amylose. Analysis of proteins associated with the starch granule in waxy maize showed the absence of a major protein of 60 kDa. Furthermore, the starch synthase activity of isolated granules was diminished (Echt and Schwartz, Genetics 99:275-284 (1981)). Additional evidence that granule bound starch synthase I is the waxy gene product which is responsible for amylose biosynthesis was obtained when the expression of the antisense waxy RNA chimeric gene was shown to inhibit granule bound starch synthase synthesis (Visser et al., Mol. Gen. Genet. 225:289-296 (1991)).

[0141] Soluble starch synthase is functionally defined as the enzyme recovered in 16,000×g supernatants, or which is released into this supernatant from the granule by gentle or mild agitation. Efforts to purify soluble starch synthases have been complicated by low recoveries of starch synthase polypeptides in soluble extracts and by stability problems. Recently, however, it has been possible to correlate specific polypeptides with activity found in partially purified fractions. The sizes of starch synthase polypeptides recovered from soluble extracts have varied from 77 kDa in pea (Denyer and Smith, Planta 186:609 (1992)), 76 kDa in maize (Mu et al., Plant J. 6:151-159 (1994)), to 55 and 57 kDa in rice (Baba et al., Plant Physiol. 103:565-573 (1993)). Reported studies have demonstrated that soluble starch synthases and starch branching enzymes become entrapped within the starch granule matrix during granule enlargement (Martin and Smith, Plant Cell 7:971-985 (1995); Mu-Forster et al., Plant Physiol. 111:821-829 (1996)). It has been reported that soluble and granule bound forms of these enzymes may not be distinct polypeptides.

[0142] The biosynthesis of amylopectin is catalyzed by the combined action of both starch synthases and starch branching enzymes (EC 2.4.1.18). α-(1,6) linkages are introduced into α-(1,4) glucan by transfer of a part of the growing α-(1,4)-polyglucose chain to the hydroxyl group of the number 6 carbon of a glucosyl unit of another chain. This reaction has been reported to be catalyzed by a starch branching enzyme. Similar to starch synthase, multiple isoforms of starch branching enzyme have been identified. Maize has been reported to contain three starch branching enzyme isoforms SBEI, SBEIIa and SBEIIb, which have been cloned (Wasserman et al., Cereal Food World 40:810-817 (1995)). Recent evidence indicates that SBE isoforms IIa and IIb are under separate genetic control (Fisher et al., Plant Physiol. 110:611-619 (1996)). Expression of maize SBEI and II cDNAs in Escherichia coli followed by structural analysis of the resultant α-glucan reveals that SBEII transfers oligosaccharide fragments of shorter chain length than SBEI (Guan et al., Proc. Natl. Acad. Sci. USA 92:964-967 (1995)). SBEI has a reported preference for amylose while SBEII has a reported preference for amylopectin (Guan and Preiss, Plant Physiol. 102:1269-1273 (1993)).

[0143] A number of enzymes have been reported to be associated with mobilization of starch from leaves to storage organs or the germination of seeds in which starch is a primary energy source. The actions of these enzymes include two categories. Endoamylases split linkages in random fashion in the interior of the starch molecule. Exoamylases hydrolyze from the nonreducing end of the starch molecule, successively resulting in shortened end-products. Another division can be made according to which linkages the enzymes are capable of hydrolyzing.

[0144] α-(1,4) linkages of starch are initially hydrolyzed at random by α-amylase (also referred to as 1,4-α-D-glucan glucanohydrorolase (EC 3.2.1.1.)) to produce mixture of shorter straight-chained and branched oligosaccharides called α-limit dextrans, in addition to maltotriose, maltose and, ultimately, glucose. During cereal seedling development, α-amylase and other enzymes secreted from the aleurone and scutellum hydrolyze starch and other materials stored in the endosperm. α-amylase is an endoamylase which liberates poly- and oligosaccharide chains of varying lengths. Dextrinization of the substrate is accompanied by rapid loss of viscosity of the substrate solution. Commercial applications of α-amylase include the thinning of starch in the liquefaction process of the sugar, alcohol, and brewing industries. α-amylases are also used in desizing of fabrics, in the baking industry, in production of adhesives, pharmaceuticals, and detergents, in sewage treatment, and in animal feed.

[0145] α-amylase genes have been reported and characterized in rice (Goldman et al., Plant Sci. 99:75-88 (1994)), barley (Rogers et al., Plant Physiol. 105:151-158 (1994)), maize (Young et al., Plant Physiol. 105:759-760 (1994)) and wheat (Lenton et al., Plant Physiol. 15:261-270 (1994)). The phytohormone, GA3, stimulates expression of certain α-amylase genes and many other genes encoding hydrolytic enzymes. The GA3 signal has the reported function of stimulating source metabolism by increasing the mobilization of the nutrients stored in the endosperm (Thomas and Rodriguez, Plant Physiol. 106:1235-1239 (1994)). Expression of α-amylase gene has been reported to be repressed by sucrose, glucose or fructose. Equimolar concentrations of mannitol do not repress α-amylase gene expression, indicating that the sugar repression of gene expression is not a general osmotic response (Yu et al., J. Biol. Chem. 266:21131-21137 (1991)).

[0146] β-Amylase (EC 3.2.1.2) (also known as 1,4-α-D-glucan maltohydrolase) occurs commonly in plants and is an exohydrolase that removes maltose residue from the non-reducing end of α-(1,4) amylose chain. This hydrolysis has not been reported to be able to bypass α-1,6-glucosidic bounds of branched substrate (Marshall, FEBS Lett. 46:14 (1974)). The undegraded part of the substrate is β-limit dextrin. Preferred substrates for this enzyme include long malto-oligosaccharide chains in amylose that are produced first by the partial α-amylolysis of starch. Food and beverage industries employ β-amylase to convert starch into maltose solutions.

[0147] Starch phosphorylase (EC 2.4.1.1) (also known as amylophosphorylase, polyphosphorylase or α-(1,4) glucan phosphorylase) catalyzes the degradation of α-(1,4) glucans by removal of a single glucosyl moiety. The reaction catalyzed by starch phosphorylase is reversible and kinetic values favor glucan synthesis. A primary in vivo function has been reported to be α-(1,4) glucan degradation (Steup, In: Biochemistry of Plants, Vol. 14, Preiss (ed.), Academic Press, San Diego, pp. 255-296 (1988)). Phosphorylases are found in all starch containing tissues, including leaves and storage organs. Starch phosphorylases have been classified as type I and type II based upon monomer molecular weight, intracellular location, and glucan specificity. The type II (also known as L) enzyme is the predominant reported form in chloroplasts and has a high specificity for maltodextrins, relative to the type I (also known as H) enzyme which is cytoplasm-specific and has a greater affinity for highly branched α-(1,4) glucans like starch or glycogen (Steup, In: Biochemistry of Plants, Vol. 14, Preiss (ed.), Academic Press, San Diego, 255-296 (1988)). Type I or II two enzymes are immunologically distinct. Genes encoding both type I and type II have been reported and described from a number of plant species including S. tuberosum (Brisson et al., Plant Cell 1:559-566 (1989); Sonnewald et al., Plant Mol. Biol. 27:567-576 (1995)), I. batatas (Lin et al., Plant Physiol. 107:277-278 (1995)) and V. faba (Buchner et al., Planta 199:64-73 (1996)).

[0148] The α-(1,6) branches of starch, or other long chain glucans containing α-(1,6) linkages such as pullulan, in addition to α-limit dextrans, can be hydrolyzed by α-dextrin endo-1,6-α-glucosidase (EC 3.2.1.41) (also known as pullulanase, pullulan-6-glucanohydrolase, limit dextrinase, debranching enzyme, amylopectin-6-glucanohydrolase or R-enzyme). The α-(1,6) bonds of the smaller multimeric glucans may also be hydrolyzed by oligo-1,6-glucosidase (EC 3.2.1.10) (also known as sucrose-isomaltase, isomaltase or limit dextrinase).

[0149] Enzymes preparations of “limit dextrinase” have been reported and described from Pisum sativum L. (Yellowees, Carbohydrate Res. 83:109-118 (1980)), Sorghum vulgare (Hardie et al., Carbohydrate Res. 50:75-85 (1976)), and Hordeum vulgare (Manners and Rowe, Biochem. J. 110:35P (1968)). In addition a full length cDNA clone of “limit dextrinase” has been cloned from Hordeum vulgare (Genbank accession number AF022725). Oligo-1,6-glucosidase is not reported to be capable of hydrolyzing large chain glucans. α-dextrin endo-1,6-α-glucosidase is reported to be capable of hydrolyzing long-chain glucans and short-chain glucans. Manners and Rowe (Biochem J. 110:35P (1968) report two α-1,6-glucosidase activities, one a hydrolysis of small glycans (dextrins or smaller) and the other a hydrolysis of the outermost α-1,6-glucosidic linkages of large-chain glucans (R-enzyme). Bewley and Black report two α-1,6-glucosidase activities (Bewley and Black, In: Seeds: Physiology and Development and Germination, Plenum Press, New York, N.Y. (1994))

[0150] Isoamylase which is also known as glycogen 6-glucanohydrolase, (EC 3.2.1.68) has been reported to hydrolyze α-1,6-glucosidic linkages of amylopectin, glycogen, and various branched dextrins and oligosaccharides. Isoamylase has not been reported to be capable of hydrolyzing all α-1,6-linkages of α-limit dextrins, probably because of a reported low affinity towards the shortened side chains. Pseudomonas amyloderamosa isoamylase has been reported to require a substrate with at least three glucose residues in branched chained (Kainuna et al., Carbohydrate Res. 61:345-357 (1978)). Isoamylases are used to debranch starch in production of glucose and maltose. Genes encoding isoamylase have been reported from P. amyloderamosa SB-15 (Amemura et al., J. Biol. Chem. 263:9271-9275 (1988)). P. amyloderamosa SB-15 isoamylase has a signal peptide of 26 amino acid residues. The P. amyloderamosa SB-15 isoamylase sequence is homologous to α-amylases and CGTases in three reported regions and has significant homology with carboxyl terminus of pullulanase (Amemura et al., J. Biol. Chem. 263:9271-9275 (1988)). It is reported that the carboxy terminal similarities are involved in cleavage of the 1,6-linkages.

[0151] Modified isoamylase expression of Flavobacterium sp. isoamylase in the tubers of S. tuberosum was reported by Krohn et al., Mol. Gen. Genet. 254:469-478 (1997). A double gene vector was utilized in which the expression of both a Flavobacterium sp. isoamylase gene, Iam, and an Escherichia coli ADP-Glc PPase mutant isoform, glgC16 (Stark et al., Science 258:287-291 (1992)), was under the control of a tuber tissue-specific promoter and targeted to amyloplasts via a chloroplast transit peptide fusion. Starches of the transgenic potatoes showed a significantly higher percentage of branch chains having a degree of polymerization of 30 and higher, in comparison to wild type control starch.

[0152] Glucose-1,6-bisphosphate synthase (EC 2.7.1.106) catalyzes the conversion of 3-phospho-glyceroyl phosphate and glucose-1-phosphate to 3-phospho-glycerate and glucose-1,6-bisphosphate. Glucose-1,6-bisphosphate synthase has been reported to utilize glucose-6-phosphate to form glucose-1,6-bisphosphate. Glucose-1,6-bisphosphate has been implicated in the control of several important carbohydrate metabolic enzymes (Beitner, In: Regulation of Carbohydrate Metabolism (Beitner, R. ed.) Vol. 1, pp. 1-27, CRC Press, Boca Raton, Fla. (1985)) including hexokinase, phosphofructokinase, pyruvate kinase, phosphogluconate dehydrogenase and fructose-1,6-bisphosphatase (Piatti et al., Arch. Biochem. and Biophys. 293:117-121 (1992)). The product of this reaction, glucose-1,6-bisphosphate, rather than the enzyme, has been well characterized in higher animals.

[0153] 4. Phosphogluconate Pathway

[0154] The phosphogluconate pathway (OPPP) (also known as the oxidative pentose phosphate pathway, pentose phosphate shunt, or Warburg-Dickens pathway) is one of the two major pathways in plants by which carbohydrates may be ultimately degraded into CO₂, the other being glycolysis followed by the TCA cycle (Brownleader et al., In: Plant Biochemistry Academic Press, New York, pp. 111-141 (1997)). It has been reported that the OPPP generally accounts for 10-15% of the carbohydrate oxidation in cells (apRees In: The Biochemistry of Plants Vol. 3:1-42 (1980)). It has been reported that the primary purposes of the OPPP is production of NADPH for use in biosynthetic reactions and the production of a ribose-5-phosphate for use in nucleic acid biosynthesis (Turner and Turner, In: Biochemistry of Plants—A Comprehensive Treatise, Vol. 2, pp 279-316, (1980)). The subcellular localization of this pathway has been reported to differ between species, cell type, and plastid type being investigated. For example, reported cellular fractionation experiments in spinach leaf cells showed all enzymes of the phosphogluconate pathway were found in chloroplasts, but that only the first two enzymes of that pathway are present in the cytosol (Schnarrenberger et al., Plant Physiol. 108:609-614 (1995)).

[0155] In general, OPPP can be divided into two parts, oxidative (the reactions leading up to ribulose-5-phosphate), and non-oxidative (e.g. Williams, Trends Biochem. Sci. 5:315-320 (1980); apRees, In: Encyclopedia of Plant Physiology, Vol. 18, pp. 391-417, (1985)).

[0156] The first reported reaction of OPPP is the conversion of glucose-6-phosphate by glucose-6-phosphate dehydrogenase (G6PDH; EC 1.1.1.49) to 6-phosphogluconolactone. The hydrolysis of 6-phosphogluconolactone to 6-phosphogluconate can occur in a nonenzymatically manner or be catalyzed by a lactonase. This reaction is not at equilibrium and is irreversible (Ashihara and Komamine, Plant Sci. Lett. 2:331-337 (1974); Turner and Turner, In: Biochemistry of Plants—A Comprehensive Treatise, Vol. 2, pp. 279-316 (1980)). The hydrolysis of 6-phosphogluconolactone to 6-phosphogluconate is reported to be a critical regulatory step in the phosphogluconate pathway. The hydrolysis of 6-phosphogluconolactone to 6-phosphogluconate has been reported to respond to the concentration of glucose-6-phosphate as well as the NADPH/NADP+ ratio. Inhibition of the hydrolysis of 6-phosphogluconolactone to 6-phosphogluconate by NADPH is consistent with the function of OPPP to provide NADPH (apRees, In: The Biochemistry of Plants, Vol. 3, pp. 1-42 (1980)). cDNA clones for G6PDH have been isolated from several plants including alfalfa (Fahrendorf et al., Plant Mol. Biol. 28:885-900 (1995)) and potato (Graeve et al., Plant J. 5:353-361 (1994)).

[0157] 6-phosphogluconate is dehydrogenated to ribulose-5-phosphate, NADPH, and CO₂ in an irreversible reaction catalyzed by 6-phosphogluconate dehydrogenase (6PGDH; EC 1.1.1.44). A cDNA clone for 6PGDH has been isolated from alfalfa (Fahrendorf et al., Plant Mol. Biol. 28:885-900 (1995)). The first two steps of the OPPP are the only reported oxidation reactions in that pathway. Other reactions within OPPP serve to regenerate glucose-6-phosphate, as well as producing intermediates such as ribose-5-phosphate that are utilized in nucleic acid biosynthesis.

[0158] Ribulose-5-phosphate may be metabolized in one of two pathways. Ribose-5-phosphate isomerase (EC 5.3.1.6) catalyzes the conversion of ribulose-5-phosphate to ribose-5-phosphate, while ribulose-5-phosphate-3-epimerase (also known as pentose-5-phosphate-3-epimerase; EC 5.1.3.1) catalyzes the conversion of ribulose-5-phosphate to xylulose-5-phosphate. Transketolase (EC 2.2.1.1) catalyzes the conversion of ribulose-5-phosphate and xylulose-5-phosphate into sedheptulose-7-phosphate and 3-phosphoglyceraldehyde. Transaldolase (EC 2.2.1.2) catalyzes the conversion of sedheptulose-7-phosphate and 3-phosphoglyceraldehyde into erythrose-4-phosphate and fructose-6-phosphate.

[0159] Erythrose-4-phosphate is a substrate associated with the biosynthesis of lignin (Salisbury and Ross, Plant Physiology, Wadsworth Publishing Company, Belmont, Calif., (1978)), or the production of aromatic amino acids via the shikimate pathway (Schnarrenberger et al., Plant Physiol. 108:609-614 (1995)). Clones for potato transaldolase (Moehs et al., Plant Mol. Biol. 32:447-452 (1996)); spinach transketolase (Flechner et al., Plant Mol. Biol. 32:475-484 (1996)); potato ribulose-5-phosphate-3-epimerase (Teige et al., FEBS Lett. 377:349-352 (1995)); and spinach ribulose-5-phosphate-3-epimerase (Nowitzki et al., Plant Mol. Biol. 29:1279-1291 (1995)) have been reported.

[0160] Fructose-6-phosphate may enter glycolysis (apRees, In: The Biochemistry of Plants, Vol. 3, pp. 142 (1980)). Fructose-6-phosphate can also be converted to glucose-6-phosphate via phosphohexose isomerase (EC5.3.1.9). Glucose-6-phosphate can be recycled in the OPPP pathway or be utilized during the synthesis of polysaccharides.

[0161] Transketolase (EC2.2.1.1) can catalyze the conversion of erythrose-4-phosphate and xylulose-5-phosphate to fructose 6-phosphate and 3-phosphoglyceraledehyde. Likewise, fructose 6-phosphate and 3-phosphoglyceraledehyde may be used in reactions as described above.

[0162] 5. Galactomannan Pathway

[0163] Galactomannan enzymes are involved in carbohydrate modifications. Galactomannans are reserve polysaccharides composed of (1→4) linked β-D-mannopyranosyl residues having side stubs linked to α-D-galactopyranosyl joined by (1→6) linkages. Galactomannans are widely used in food industry, pharmaceuticals, cosmetics, paper and paint industries. Galactomannans are mainly found in members of the Leguminosae, Anonaceae, Convolvulaceae, Ebenaceae and Palmae and are usually located in the endosperm.

[0164] α-mannosidase (EC 3.2.1.24) catalyzes the hydrolysis of terminal, non-reducing α-D-mannose residues in α-D-mannosides. α-mannosidase also hydrolyzes heptopyranosides with the same configuration at C-2, C-3 and C-4 as mannose. α-mannosidase enzyme has been detected in several plant species, including Avena sativa, fenugreek, Hevea latex and soybean (Greve and Orden, Plant. Physiol. 60:478-481 (1977); Beaugiraud et al., Bull. Soc. Chem. Biol. 50:621-631 (1968)). α-mannosidase isoforms have be reported in almond, lupin, Phaseolus vulgaris and soybean (Schwartz et al., Arch. Biochem. Biophys. 137:122-127 (1970); Paus and Christensen, Eur. J. Biochem. 25:308-314 (1972)). It has been reported that α-mannosidase levels increase during seed germination (Meyer and Bourrillon, Biochimie 55:5-10 (1973); Agarwal et al., J. Biol. Chem. 243:103-111 (1968); Neely and Beevers, J. Exp. Bot. 31:299-312 (1980)). It has also been reported that α-mannosidase levels increase during the ripening of some fruits (Ahmed and Labavitch, Plant Physiol. 65:1014-1016 (1980)).

[0165] α-mannosidase II (EC 3.2.1.14) is a type II membrane protein, predominantly found in medial Golgi cisternae. α-mannosidase II catalyzes the final hydrolysis step in the asparagine-linked oligosaccharide (N-glycan) maturation pathway. It has been reported that α-mannosidase II is involved in both the biosynthesis and breakdown of N-linked glycans (Daniel et al., Glycobiology 4:551-566 (1994); Moremen et al., Glycobiology 4:113-125 (1994)). It has been reported that lysosomal α-mannosidases are soluble and are involved in N-glycan degradation. Golgi and endoplasmic reticulum α-manosidases have been reported to be involved with the biosynthesis of N-glycans (Misago et al., Proc. Natl. Acad. Sci. (USA) 92:11766-11770 (1995)). It has been reported that human genetic defect in α-mannosidase II causes a congenital dyserythropoietic anemia resulting in clustering membrane proteins and formation of unstable erythrocytes (Chui et al., Cell 90:157-167 (1997)).

[0166] Mannan-endo-1,4-β-mannosidase (EC 3.2.1.78) catalyzes the hydrolysis of β-D (1→4) mannopyranosyl linkages of mannans, galactomannans, glucomannans and galacto-glucomannans (Dekker and Richards, Adv. Carbohydr. Chem. Biochem. 32:277-352 (1976)). It has been reported that mannan-endo-1,4-β-mannosidase has been isolated and characterised from bacterial, plants and animal sources including fenugreek, guar-seeds, clover and Konjac (Drekker and Richards, Adv. Carbohydr. Chem. Biochem. 32:277-352 (1976); Ahlgren et al., Acta. Chem. Scand. 21:937-944 (1967); Eriksson and Rzedowski, Arch. Biochem. Biophys. 129:683-688 (1969); Emi et al., Agric. Biol. Chem. 36:991-1001 (1972); McCleary and Matheson, Phytochemistry 14:1187-11949 (1975); Villarroya and Petek, Biochim. Biophys. Acta 438:200-211 (1976); Halmer et al., Planta 130:189-196 (1976); Clermont-Beaugiraud and Percheron, Bull. Soc. Chem. Biol. 50:633-639 (1968); Williams et al., Biochem. J. 161:509-515 (1977); Shimihara et al., Agric. Biol. Chem. 39:301-312 (1975)). A crystallized mannan-endo-1,4-β-mannosidase, isolated from Bacillus subtilis, has been reported (Emi et al., Agric. Biol. Chem. 36:991-1001(1972)). It has also been reported that, in seeds, β-D-mannase activity increases upon germination with a simultaneous decrease of D-mannan (Reid and Meier, Verh. Scweiz. Naturforsch. Ges. 151:68-70 (1971); McCleary and Matheson, Phytochemistry, 14:1187-1194 (1975); Clermont-Beaugiraud and Percheron, Bull Soc. Chem. Biol. 50:633-639 (1968)).

[0167] G1 1,4-alpha-D-glucan glucohydrolase (also know as glucoamylase (EC 3.2.1.3)) catalyzes the hydrolysis of terminal 1,4 and 1,6 linked α-D-glucose residues successively from non-reducing ends releasing β-D-glucose. Glucoamylase has industrial applications such as the degradation of starch for the production of glucose and fructose. Glucoamylase is produced by many fungi but only by a few bacteria, like Flavobacterium sp and Halobacterium sodomese have been reported to produce glucoamylase (Taniguchi et al., Agric. Biol. Chem. 50:2423 (1986); Ohba and Ueda, Agric. Biol. Chem. 46:2425 (1982)). Nearly all the fungal glucoamylases are glycoproteins which vary in the number of carbohydrate groups present. It has been reported that glucoamylase exists as three isozymes in Aspergillus awamori var kawachi (Pazur and Kleppe, J. Biol. Chem. 237:1002-1007 (1962)). A cloned glucoamylase from A. awamori glucoamylase has been reported (Erratt and Nasim, J. Bacteriol. 166:484-490 (1986); Yamashita et al., J. Bacteriol. 161:567-573 (1985)). It has been reported that cloned glucosamylase from Saccharomyces diastaticus exists as three unlinked genes, STA1, STA2, and STA3 (Erratt and Nasim, J. Bacteriol. 166:484-490 (1986); Yamashita et al., J. Bacteriol. 161:567-573 (1985); Meaden et al., Gene 34:325-334 (1985); Pretorius et al., Mol. Gen. Genet. 203:36-41 (1986); Pardo et al., Nucleic Acid Res. 14:4701-4718 (1983)). Cloned glucoamylase from Rhizopus oryzae has been reported (Tamaki, Mol. Gen. Genet. 164:205 (1978)). Reports of sequence comparison of the known glucoamylases reveal five homologous segments, one of which does not seem to be essential for the amylolytic activity (Polaina and Wiggs, Curr. Genet. 7:109 (1983). Carbohydrate presence has been reported to be important for the maintenance of the three-dimensional structure of glucoamylase. Glucoamylase has also been reported to be 0-glycosidically linked to serine or threonine residues (Tucker et al., BiotenoL Bioeng. Symp. 14:279 (1984)). Molecular weights of glucoamylase varies from 20,000 to 306,000 (Abe et al., J. Appl. Biochem. 7:235 (1985); Bartoszewicz, Acta Biochem. Pol. 33:17-29 (1986); Erratt and Nasim, J. Bacteriol. 166:484-490 (1986)). It has been reported that heavy metals inhibit glucoamylase (Oten-Gyang et al., Eur. J. Appl. Microbiol. Biotechnol 9:129 (1980)). Reports of chemical modification of Aspergillus niger glucoamylase indicate that tryptophane residues are essential for enzymatic activity (Lineback and Baumann, Carbohydr. Res. 14:341 (1970)).

[0168] Glucosamine-fructose-6-P aminotransferase (EC 2.6.1.16) catalyzes the formation of glucosamine-6-phosphate. This reaction is the reported rate limiting step of the hexosamine pathway. Glucosamine-fructose-6-P aminotransferase is also reported to be associated with the regulation of the availability of the precursors for N or O glycosylation of the proteins (Marshall et al., J. Biol. Chem. 266:4706-4712 (1991); Traxinger et al, J. Biol. Chem. 266:10148-10154 (1991)). It has been reported that glucosamine-fructose-6-P aminotransferase is insulin-regulated and may play an important role in insulin resistance in cultured cells (McKnight et al., J. Biol. Chem. 267:25208-25212 (1992)). A cloned human glucosamine-fructose-6-P aminotransferase has been reported. This cloned glucosamine-fructose-6-P aminotransferase has been expressed in Escherichia coli. Expression of a 3.1 KB glucosamine-fructose-6-P aminotransferase cDNA, encoding 681 amino acids, in Escherichia coli resulting in a 77 KD protein has been reported (McKnight et al., J. Biol. Chem. 267:25208-25212 (1992)).

[0169] Mannosyl-oligosaccharide alpha-1,2-mannosidase (EC 3.2.1.113) catalyzes the hydrolysis of the terminal 1,2-linked alpha-D-mannose residues in the oligo-mannose oligosaccharide MAN₍₉₎(GlcNAc₍₂₎) (Kornfeld et al., Ann. Rev. Biochem. 54:631-664 (1985)).

[0170] 6. Raffinose Pathway

[0171] The biosynthesis of raffinose saccharides has been studied (Dey, Biochemistry of Storage Carbohydrates in Green Plants, Academic Press, London, pp. 53-129 (1985)). Galactinol synthase initiates the first reported committed step in this pathway. Subsequently, specific galactosyl transferases catalyze the formation of raffinose and its higher homologues (most commonly stachyose) from galactinol and sucrose.

[0172] The enzymes directly involved in the synthesis of raffinose oligosaccharides include: galactinol synthase (EC 2.4.1.123), raffinose synthase (EC 2.4.1.82), and stachyose synthase (EC 2.4.1.67).

[0173] Galactinol synthase (also referred to as UDP-D-galactose:myo-inositol D-galactosyltransferase) catalyzes the reported initial reaction of synthesizing galactinol from UDP-D-galactose and myo-inositol in the presence of Mn²⁺. This reaction has been reported in a variety of plants (Tanner et al., Plant Physiol. 41:1540-42 (1966); Tanner et al., Eur. J. Biochem. 4:233-239 (1968); Webb, Plant Physiol. 51: suppl. 12 (1973); Pharr et al., Plant Sci. Lett. 23:25-33 (1981)). It has been reported that galactinol synthase controls the flux of reduced carbon into the biosynthesis of the raffinose saccharides (Handley et al., J. Amer. Soc. Hort. Sci. 108:600-605 (1983); Saravitz et al., Plant Physiol. 83:185-189 (1987)). Galactinol synthase has been purified from zucchini and nucleotide sequences have been reported from zucchini and soybean (Kerr et al., U.S. Pat. No. 5,648,210).

[0174] Raffinose synthase (Galactinol:sucrose galactosyltransferase) catalyses the second reported step by transferring a D-galactosyl group from galactinol to sucrose in the following reaction: sucrose plus galactinol yields raffinose plus myo-inositol. Lehle et al., (Eur. J. Biochem. 38:103-110 (1973)) report purifying raffinose synthase from V. faba seeds. Raffinose is widely distributed in higher plants (French, Adv. Carbohydrate Chem. 9:149-184 (1954); Kuo et al., J. Agric. Food Chem. 36:32-36 (1988)). It has been reported that the primary role of raffinose is to store and/or transport carbohydrates. Other reported roles include frost hardiness (Kandler et al., The Biochemistry of Plants, Academic Press, New York, Vol. 3, pp. 221-270 (1980)), and seed viability (Ovcharov et al., Fiziol. Rast. 21:969-974 (1974)).

[0175] Stachyose synthase (Galactinol:raffinose galactosyltransferase) transfers a D-galactosyl group from galactinol to sucrose yielding stachyose and myo-inositol. Stachyose synthase has been reported from seeds of P. vulgaris (Tanner et al., Plant Physiol. 41:1540-1542 (1966); Tanner et al., Eur. J. Biochem. 4:233-239 (1968)) and V. faba (Tanner et al., Biochem. Biophys. Res. Commun. 29:166-171 (1967)) as well as leaves of C. pepo (Gaudreault et al., Phytochemistry 20:2629-2633 (1981)). Stachyose is one of the major oligosaccharides in plants and is reported to be an important transport carbohydrate.

[0176] Plants have the capability of degrading raffinose oligosaccharides through the following enzymes: β-fructofuranosidase (EC 3.2.1.26) and α-galactosidase (EC 3.2.1.22).

[0177] α-galactosidase catalyzes the hydrolysis of the 1-6 linkage in the raffinose oligosaccharides. This enzyme has been reported from almost 60 different eukaryotic and prokaryotic sources (Pridham et al., Plant Carbohydrate Biochemistry, Academic Press, London, pp. 83-96 (1974); Itoh et al., J. Biochem. 99:243-250 (1986); Pederson et al., Can. J. Microbiol. 26:978-984 (1980); Duffaud et al., Appl. Environ. Microbiol. 63:169-177 (1997); Davis et al., Biochem. and Mol. Biol. Int. 39:471-485 (1996)). A number of nucleotide sequences have also been published (Davis et al., Biochem. and Mol. Biol. Int. 39:471-485 (1996); Zhu et al., Gene 140:227-231 (1994); den Herder et al., Mol. Gen. Genet. 233:404-410 (1992)).

[0178] β-fructofuranosidase (fungal invertase) has been reported to liberate fructose from both sucrose and galactooligosaccharides (Cruz et al., J. Food Sci 46:1196-1200 (1981)). A fungal invertase produces melibiose and manninotriose from raffinose and stachyose, respectively. It has been reported that a combination of fungal invertase and alpha-galactosidase is more efficient in the hydrolysis of galactooligosaccharides in soya meal and canola meal (Slominski, J. Sci. Food Agric. 65:323-330 (1994)).

[0179] 7. Complex Carbohydrate Synthesis/Degradation Pathways

[0180] The term “complex carbohydrate” has been used to distinguish simple carbohydrates from polysaccharides. Simple carbohydrates include the mono, di, tri, and tetra-saccharides and sugar alcohols present in food. Other oligosaccharides containing up to 19 residues can also be considered non-complex. Complex carbohydrates such as starch and cell wall polysaccharides can display a wide range of chemical and physical properties.

[0181] The cell wall is the principal structural element of plant form. A plant's cell wall contains a network of cellulose and cross-linking glycans embedded in a gel matrix of pectic substances and is reinforced with structural proteins and aromatic substances (McCann and Roberts, In: Architecture of the Primary Cell Wall, Lloyd (ed.), Academic Press, London, pp. 109-129 (1991); Carpita and Gibeaut, Plant J. 3:1-30 (1993)). Cellulose (β-1,4-glucan) and callose (β-1,3-glucan) have been reported to be synthesized at the plasma membrane of plant cells. Non-cellulosic polysaccharides, the matrix polysaccharides, have been reported to be synthesized in the golgi apparatus, packaged in secretory vesicles, and exported to the surface, where they are integrated with cellulose microfibrils.

[0182] Glycosyl transferases located on the plasma membrane of higher plants play a role in the biosynthesis of various cell wall biopolymers. Polysaccharides that have been studied include β-linked glucans cellulose and callose. Cellulose is comprised of β-(1,4) linkages of glucose. Delmer and Amor, (Plant Cell 7:987-1000 (1995)) review the synthesis of this long chain glucan. Cellulase (EC 3.2.1.4), also referred to as endoglucanase and endo-1,4-β-glucanase, catalyzes the endohydrolysis of the β-(1,4) linkages of cellulose and can also hydrolyze the β-(1,4) linkages of more complex glucans containing 1,3-linkages. Among plants, a cDNA encoding cellulase has been reported from Arabidopsis thaliana (Accession number U37702), Glycine max (Accession number U34755), Poplus alba (Accession number D32166), Phaseolus vulgaris (Accession number U34754) and Persea americana (Tucker et al, Eur. J. Biochem. 112:119-124 (1987)). Cellulase has been reported to be active during germination and to degrade cell wall structural carbohydrates to better enable radical emergence. Cellulase may also play a role in protection against pathogen invasion.

[0183] Callose has been reported to be synthesized at the plasma membrane when cells are damaged (Delmer, Annu. Rev. Plant Physiol. 38:259-290 (1987)) and at specific stages of development such as pollen tube growth or phragmoplasts of dividing cells. The β-(1,3) linkages of the callose glucan have been reported to be formed by β-(1,3) glucan synthase (EC 2.4.1.34). β-(1,3) glucan synthase is also known as 1,3-β-D-glucan-uridine diphosphate glucosyltransferase (1,3-β-D-glucan-UDP glucosyltransferase), UDP-glucose-1,3-β-D-glucan glucosyltransferase and callose synthetase. β-(1,3) Glucan synthase has been reported to be located in the plasma membrane. Like cellulase, the substrate of β-(1,3) glucan synthase has been reported to be UDP-glucose (Delmer, Annu. Rev. Plant Physiol. 38:259-290 (1987). Hayashi et al., Plant Physiol. 83:1054-1062 (1987)) have reported that micromolar amounts of Ca²⁺ are required for enzyme activity and that such levels may act to endogenously signal cell or membrane damage. Ca²⁺ has been reported to increase the rate of callose formation (Fredrickson and Larson, Biochem. Soc. Trans. 20:210-713 (1992)). The addition of Mg²⁺ has been reported to result in the production of greater amounts of insoluble polymer.

[0184] β-1,4-glucosidase (EC 3.2.1.21) has been reported to be found in both prokaryotes and eukaryotes, performing multiple functions in both (Esen, β-glucosidases: Biochemistry and Molecular Biology, ACS Symposium Series, 533, ACS, Washington, D.C. (1993)). In plants, β-glucosidases are involved in the hydrolysis of β-1,4-glucans, such as cellulose and other cell wall polysaccharides, which results in the release of β-D-glucose. The hydrolysis of β-1,4-glucans becomes more pronounced during seed germination. β-(1,3) glucan synthase linkage of callose has been reported to be hydrolyzed by the activity of glucan endo-1,3-β-D-glucosidase (EC 3.2.1.39). Glucan endo-1,3-β-D-glucosidase is also referred to as endo-1,3-β-glucanase, (1,3)-β-D-glucan endohydrolase or laminarinase. Akiyama et al., Carbohydrate Research 297:365-374 (1997)), have reported the activity of a glucan endo-1,3-β-D-glucosidase. Both β-1,4-glucosidase and β-1,3-glucosidase have also been reported to participate in chemical defense against pathogens and the regulation of plant phytohormones such as cytokinin, gibberellin and auxin. Genes encoding β-glucosidase have been reported from a number of plant species including, but not limited to, Hordeum vulgare L. (Accession number L41869, Leah et al., J. Biol. Chem. 270:15789-15797 (1995)), Nicotiana tabacum (Accession number M60403), maize (Accession number U25157) and Avena sativa (Accession number X78433).

[0185] Pectin is a major component of the primary cell wall of dicots and has been reported to play a role in cell growth. Pectin is composed of several polymers. The neutral pectins are arabinans, galactans and arabinogalactans. The acidic pectins include rhamnogalacturonan (Darvill et al., In: The Biochemistry of Plants, Stupf and Conn (eds.), Academic Press, New York, Vol. 1, pp. 91-62 (1980)). Rhamnogalacturonic acid consists of chains of α-(1,4) linked galacturonic acid residues interspersed with rhamnose. The carboxyl function of the galacturonosyl residues can be present as a methyl ester, acid or salt.

[0186] Pectin methylesterase (EC 3.1.1.11) is also referred to as pectase, pectin demethoxylase, pectin methoxylase and pectinesterase. Pectin methylesterase has been reported to be a ubiquitous enzyme in plants. Pectin methylesterase catalyzes the de-esterification of methoxylated pectins in the cell wall and has been reported to be responsible for chemical modifications of pectin embedded in the plant's primary cell wall matrix. Pectin methylesterase has also been reported to be involved in cell wall growth regeneration the separation of root border cells from the root cap and in the formation of abscission zones and textural changes in ripening fruit (Sexton and Robert, Annu. Rev. Plant Physiol. 33:133-162 (1982); Lamport, In: The Primary Cell Wall: A New Model, Young and Rowell (eds.), John Wiley and Sons, New York, pp. 77-90 (1986); Shea et al., Planta 179:293-308 (1989); Nari et al., Biochem. J. 26:343-350 (1991); Stephenson and Hawes, Plant Physiol. 106:739-745 (1994); Tieman and Handa, Plant Physiol. 106:429-436 (1994)). Multiple isozymes of pectin methylesterase have been reported to be present in different tissues of plants, including tomato (Gaffe et al., Plant Physiol. 105:199-203 (1994)). The clones encoding these isoenzymes of pectin have been isolated (Gaffe et al., Plant Physiol. 105:199-203 (1996)).

[0187] Pectinase (EC 3.2.1.15), an endo-acting polygalacturonase, has been isolated from fruits and its expression has been reported to be correlated with the rate of tissue softening. Pectinase catalyzes the digestion of pectin, which results in the release of two rhamnogalacturonan fragments. In tomato (Tucker et al, Eur. J. Biochem. 112:119-124 (1980), pear (Ahmed and Labavitch, Plant Physiol. 65:1014-1016 (1980)) and avocado (Awad and Young, Plant Physiol. 64:306-308 (1979)), pectinase activity in unripe tissue has been reported to be low or absent and increases during ripening. Further correlation has been made between the fruit softening rate and pectinase activity in tomato ripening mutants. Pectinase activity in the never ripe mutant has been reported to be reduced to 10% of its normal level. In the never ripe mutant, it has been reported that the reduced pectinase activity corresponds to a slower rate of softening. The ripening inhibitor mutant (rin) has been reported to have no detectable pectinase activity and does not soften (Tigchelaar et al., Hort. Science, 13:508-513 (1978)). Active pectinase during tomato fruit ripening has a catalytic domain that is necessary for pectin degradation. A second polypeptide in the pectinase complex, a 38-kD “β-subunit”, modifies pH, thermal stability and increases the binding of pectinase to cell walls (Watson et al., Plant Cell 6:1623-1634 (1994)). Plants with antisense of the β-subunit have been reported to show a 60% increase in polyuronide solubilization during ripening. Subsequently, fruit ripening has been reported to result from the degradation of pectin by pectinase. Transgenic plants expressing genetically altered pectinase could have an altered rate of fruit ripening.

[0188] α-arabinofuranosidase (EC 3.2.1.55), also known as arabinosidase, hydrolyzes α-L-arabinofuranosidic linkages. α-L-arabinofuranosidase has been reported in lupin seeds at the resting stage and at increased levels during germination. A fraction of α-L-arabinofuranosidase activity was reported to be cell-bound and the rest was reported to be soluble. α-arabinofuranosidase activity has been reported to increase with fruit ripening. After the fruit enlargement stage, cell wall-bound α-L-arabinofuranosidase activity was reported to increase 15-fold with fruit ripening (Tateishi et al., Phytochemistry 42:295-299 (1996)).

[0189] It has been reported that in lupin seeds germination causes modification of the chemical structure of the primary cell-wall polysaccharides. α-L-arabinofuranosidase and β-galactosidase have been reported to aid this modification in chemical structure, which occurs in fruit softening, especially in instances where pectin-degrading enzymes have not been detected. α-L-arabinofuranosidase has also been reported to have a role in cancer chemotherapy with antineoplastic compounds (Butschak et al., Arch. Geschwulstforsch. 46:365-375 (1976)). α-L-arabinofuranosidase enzymes with an optimum pH of 6 were reported to be suitable for selective activation of antitumor compounds. β-peltatin α-α-L-arabinofuranoside, for example, was used in combination with α-L-arabinofuranosidase, which caused slow release of the active component.

[0190] Chitin has also been referred to as a homopolymer of N-acetylglucosamine. N-acetylglucosamine is also known as (1,4)-2 acetamido-2-deoxy-β-D-glucan. N-acetylglucosamine is a main cell wall component in fungi and yeast. Chitinase (EC 3.2.1.14), an enzyme which degrades chitin, has been reported to exist in microorganisms, plants and in the digestive tracts of animals which feed on chitin-containing organisms. Insects shed their old cuticles, which are made primarily of chitin, during molting for growing and during transformation to more mature stages. Chitin in the old cuticle is degraded to chitooligosaccharides by chitinase. Plant chitinases are induced in response to infection by exogenous plant pathogens or are accumulated in seeds or tubers. Plant chitinases have been reported to play a role in self-defense reactions against fungi and insects that contain chitin in their cell walls and exoskeleton (Koga, Kichin. Kotosan Kenkyu 2:88-89 (1996)).

[0191] Chitinase is also known as β-1,4-poly-N-acetyl glucosamidinase, chitodextrinase and poly-β-glucosaminidase. Chitinase hydrolyzes the polymers of N-acetyl-D-glucosamine (Zhnioglu, J. Fac. Sci. 19:63-73 (1996)). Chitinase precursors contain a N-terminal signal peptide and a main catalytic domain. Some chitinase precursors have a chitin-binding domain or C-terminal signal vacuole-directing peptide. Most chitinases have been reported to be inducible by biotic factors such as pathogens and oligosaccharides, or abiotic factors such as ethylene, salicylic acid, salt solutions, ozone and UV light (Punja and Zhang, Can. J. Nematol. 25:526-540 (1993)). The inducibility of chitinase has been reported to be tissue-specific and development-regulated. Chitinase precursors become matured proteins by removal of N-terminal signal peptide, hydroxylation of a proline and removal of C-terminal signal peptide.

[0192] Genes encoding chitinase have been reported from various sources of microorganisms and plants (Sueda et al., Kichin Kitosan Kenkyu 1:128 (1995); Nishizawa, Nogyo Seibutsu Shigen Kenkyusho Kenkyu Hokoku 10:73-104 (1995); de A. Gerhardt et al., FEBS Lett. 419:69-75 (1997); Wu et al., Plant Mol. Biol. 33:979-987 (1997); Hudspeth et al., Plant. Mol. Biol. 31:911-916 (1996)). It has been reported that a gene (chiSH1) encoding chitinase was isolated from a bacterium capable of efficiently digesting chitin K. zopfii K12-119. Ikeda et al., (Nippon Shokubutsu Byori Gakkaiho 62:11-16 (1996)), applied viable cells of Escherichia coli transformed with chiSH1 to barley leaves inoculated with the powdery mildew pathogen. Growth of the pathogen was reported to be effectively suppressed by the treatment, indicating the effectiveness of chitinolytic microbes as biocontrol agents.

[0193] Some microorganisms have been reported to contain a homopolymer of glucosamine. Glucosamine is also known as (1,4)-2-amino-2-deoxy-β-D-glucan). Unlike the acetylated glycan, chitin, chitosan can be extracted from the cell wall with diluted acid. It has been reported that the crystalline conformation of chitosan is only detectable after it is extracted from the wall with dilute acid. Coating postharvest produce with chitosan has been reported to delay the ripening process and maintain quality attributes of fruit (Arul and Ghaouth, Can. Adv. Chitin Sci. 1:372-380 (1996)). Chitosan coating has been reported to be effective as a fungicide in controlling the decay of strawberry fruit. Chitosan has also been reported to effectively inhibit the decay caused by Botrytis cinerea in tomato and bell pepper. Additionally, chitosan treatment has been reported to stimulate the activities of chitinase, chitosanase and β-1,3-glucanase, which contribute to a plant fungal defense.

[0194] Chitosanase (EC 3.2.1.132) hydrolyzes chitosan from its polymerized structure to its oligomer. Chitosanases occur in soil microorganisms and in plants. It has been reported that chitosanase may play a defensive role in plants. It has also been reported that the pharmaceutical industrial may utilize chitosanase for the generation of size-specific chitosan oligomers (Somashekar and Joseph, India Bioresour. Technol. 58:197-237 (1996)).

[0195] Trehalose, also know as α-D-glucopyranosyl-α-D-glucopyranoside, is a carbohydrate synthesized by cultured Bradyrhizobium japonicum. Rhizobium have also been reported to accumulate trehalose (Streeter, J. Bacteriol. 164:78-84 (1985)). Trehalose has also been reported in yeast, fungi, bacteria and Actinomycetes. In soybean, trehalose has been reported to be restricted to nodule tissue.

[0196] The biosynthesis of trehalose in microorganisms involves, but is not limited to the following enzymes: phosphoglucomutase, UDP-glucose pyrophosphorylase (EC 2.7.7.9), α,αtrehalose-6-phosphate synthase (EC 2.4.1.15), and trehalose phosphatase. In the cytosolic phase of the cell, α-D-glucose-6-phosphate is converted into α-D-glucose-1-phosphate through the action of phosphoglucomutase (EC 5.4.2.2). α-D-glucose-1-phosphate is then utilized by UDP-glucose pyrophosphorylase (EC 2.7.7.9) to produce UDP-glucose. UDP-glucose is then converted into α,α-trehalose-6-phosphate in the presence of α-D-glucose-6-phosphate by α,α-trehalose-6-phosphate synthase (EC 2.4.1.15). Trehalose phosphatase (EC 3.1.3.12) then incorporates α,α-trehalose-6-phosphate into α,α-trehalose, with the generation of free orthophosphate (Salminen and Streeter, Plant Physiol. 81:538-541 (1986)). Enzyme activity of phosphoglucomutase, α,α-trehalose-6-phosphate synthase and trehalose is dependent on the presence of Mg²⁺.

[0197] Trehalose hydrolysis is catalyzed by α,α-trehalase (EC 3.2.1.28) in the cytosolic phase of the cell to generate two molecules of D-glucose. α,α-trehalase has been reported to be present in microorganisms as well as in some higher plants (Salminen and Streeter, Plant Physiol. 81:538-541 (1986)). In Saccharomyces cerevisias, three trehalases have been reported. The first reported trehalase is the cytosolic neutral trehalase, which is encoded by the NTH1 gene and is regulated by the cAMP-dependent phosphorylation process, available nutrients and temperature. The second trehalase is the vacuolar acid trehalase, which is encoded by the ATH1 gene and is regulated by the availability of nutrients. The third trehalase is a putative trehalase, Nth1p, which is encoded by the NTH2 gene, a homologue of the NTH1 gene, and is regulated by the availability of nutrients and temperature. Neutral trehalase has been reported to be responsible for the intracellular hydrolysis of trehalose. Acid trehalase has been reported to be responsible for utilization of extracellular trehalose. The NTH1 and NTH2 gene are reported to be required for the recovery of cells after heat shock at 50° C. Other stressors, such as toxic chemicals, have also been reported to induce the expression of the NTH1 and NTH2 genes (Solomon and Helmut, Prog. Nucleic Acid Res. Mol. Biol. 58:197-237 (1998)).

[0198] Extracellular α,α-trehalose can be transferred into the cytosolic phase of the cell by the plasma membrane by phosphoenolpyruvate (PEP)-dependent phosphorylation. Extracellular α,α-trehalose can then be converted into α,α-trehalose-6-phosphate. α,α-trehalose-6-phosphate can be further hydrolyzed into D-glucose-6-phosphate through the action of α,α-phosphotrehalase (EC 3.2.1.93). In Bacillus popilliae, phosphotrehalase the range of pH 6.5 to pH 7.0 was reported to be optimum. The optimum Kₘ for trehalose-6-phosphate was reported to be 1.8 mM. It has been reported that a mutant missing phosphotrehalase failed to grow on trehalose and grew normally on other sugars. The mutant lacking phosphotrehalase has been reported to accumulate trehalose-14C as trehalose-14C-6-phosphate. Phosphorylation of trehalose was reported to be at least two times faster with PEP than with ATP, and the phosphorylation activity was associated primarily with the particulate fraction. Subsequently, it has been reported that trehalose is transported into the cell as trehalose-6-phosphate by a PEP:sugar phosphotransferase system (Bhumiratana et al., J. Bacteriol. 119:484-493 (1974)).

[0199] The trehalose biosynthetic pathway is associated with the paramylon degradation pathway. Paramylon is composed of 1,3-β-D-glucosyl linkage. Paramylon can be degraded into 3-β-D-glucosylglucose, also known as laminaribiose, by α,α-trehalose-phosphorylase (EC 2.4.1.64). α,α-trehalose-phosphorylase has also been reported to generate α-D-glucose-1-phosphase that can contribute to trehalose biosynthesis. α,α-trehalose-phosphorylase then further converts laminaribiose into D-glucose. D-glucose is then incorporated into β-D-glucose-6-phosphate by β-phosphoglucomutase (EC 5.4.2.6).

[0200] Aldose reductase (EC 1.1.1.21) is a member of the NADPH-dependent aldoketoreductase superfamily. Aldose reductase catalyzes the NADPH-dependent reduction of dome aldehydes to their corresponding sugar alcohols. Aldose reductase has been reported to exist in mammals, birds, plants, fungi and bacteria (Markus et al., Biochem. Med. 29:31-45 (1983); Wirth and Wermuth, Prog. Clin. Biol. Res. 174:231-239 (1985); Davidson et al., Comp. Biochem. Physiol. 60:309-315 (1978); Carper et al., FEBS Lett. 220:209-213 (1987); Bohren et al., J. Biol. Chem. 264:9547-9551 (1989); Schade et al., J. Biol. Chem. 265:3628-3635 (1990); Bartels et al., EMBO. J. 10: 1037-1043 (1991)). Aldose reductase activity has been reported to result in an increase in sorbitol and galactitol in the cells of some tissues (Kador and Kinoshita, Am. J. Med. 79:8-12 (1985)). Accumulation of sugar alcohols has been reported to cause osmotic cataracts in eye lens.

[0201] D-xylulose reductase (EC 1.1.1.9) catalyzes the reversible conversion of D-xylose to D-xylitol. D-xylulose reductase has been reported to participate in the synthesis of xylitol which is an acarcinogenic, non-caloric sweetener (Kulbe et al., Prog. Biotechnol. 7:565-572 (1992)). D-xylulose reductase has been purified from yeast (Ditzelmuller, Appl. Microbiol. Biotechnol. 22:297-299 (1985); Verduyn et al., Biochem. J. 226:297-299 (1985)). Studies on xylulose reductase from Pichia stipitis have reported histidine and cysteine residues that are associated with the binding of cofactors.

[0202] Glycosyltransferase catalyzes the synthesis of carbohydrate moities of glycoproteins, glycolipids and proteoglycans. Glycosyltransferases have been reported to exist on the membranes of the endoplasmic reticulum and golgi apparatus. Glycosyltransferases transfer sugar groups from an activated donor, usually a nucleotide sugar, to a growing carbohydrate group. The structure of the sugar chains produced by a cell depends on the specificity of the glycosyltranserases for their acceptors and donors. It has been reported that more than 100 glycosyltransferases are required for the synthesis of known carbohydrate structures on glycolipids or glycoproteins. (Sadler, In: Biology of Carbohydrates, Ginsburg, and Robbins (eds), John Wiley and Sons, New York, Vol. 2, pp 87-131 (1984); Beyer et al., Adv. Enzymol. Relat. Areas Mol. Biol. 52:23-175 (1981)). Glycosyltransferases are grouped according to the type of sugar they transfer. Galactosyltransferases and sialyltransferases are examples of this type of grouping. Glycosyltransferases have been isolated and purified to homogeneity from mammalian sources (Sadler, Biology of Carbohydrates, Ginsburg, and Robbins (eds), John Wiley and Sons, New York, Vol. 2, pp 87-131 (1984); Beyer et al., Adv. Enzymol. Relat. Areas Mol. Biol. 52:23-175 (1981); Blanken et al., J. Biol. Chem. 260:12927-12934 (1985); Elices et al., J. Biol. Chem. 261:6064-6072 (1986); Prieels et al., J. Biol. Chem. 256:10456-10463 (1981)). Isolated glycosyltransferases include galactosyltransferase (Shaper et al, J. Biol. Chem. 263:10420-10428 (1988); Masri et al., Biochem. Biophys. Res. Commun. 157:657-663 (1988); Joziasse et al., J. Biol. Chem. 264:14290-14297 (1989)), sialyltransferase, fucosyltransferase (Kornfeld and Kornfeld, Annu. Rev. Biochem. 54:631-664 (1985)) and N-acetylgalactosaminyltransferase (Sadler, Biology of Carbohydrates 2:87-131 (1984)). Sequence comparison studies have revealed little sequence homology between these proteins (Kornfeld and Kornfeld, Annu. Rev. Biochem. 54:631-664 (1985); Sadler, Biology of Carbohydrates 2:87-131 (1984)). All the glycosyltransferases, however, have been reported to have a similar short NH₂-terminal cytoplasmic tail, a 16-20 anchor domain and a stem region which attaches a large COOH terminal catalytic domain to the anchor domain (Paulson et al., Biochem. Soc. Trans. 15:618-620 (1987)). It has been reported that glycosyltransferases are present in the golgi apparatus (Roth, Biochem. Biophys. Acta 906:405-436 (1987)).

[0203] Subcompartmentalization of glycosyltransferases within the golgi has been reported. N-acetylglucosamyltransferase I has been reported to be localized in the medial cisternae and GlcNAc β 1,4-galactosyltrasnerase, Gal α-2,6-sialytransferase has been reported to be present in the trans citernae (Berger and Hesford, Proc. Natl. Acad. Sci. (U.S.A.) 82:4736-4739 (1985); Bergeron et al., Biochem. Biophys. Acta 821:393-403 (1985); Duncan and Kornfeld, J. Cell. Biol. 106:617-628 (1988)).

[0204] Glycosyltransferases have been reported to be differentially expressed during differentiation and oncognic transformation (Rademacher et al., Glycobiology Annu. Rev. Biochem. 57:785-838 (1988)). Glycosyltransferase expression has been reported to be regulated at the transcription level. Paulson has reported that the level of Gal α-2,6-ST increases 4-5 fold in the liver after inflammation (Paulson et al., J. Biol. Chem. 264:10931-10934 (1989)). Wang et al., (J. Biol. Chem. 264:1854-1859 (1989)), have reported an increase in sialyltransferase levels during liver inflammation. It has been reported that changes in glycosyltransferase expression also produce changes in glycolipid or glycoprotein glycosylation (Coleman et al., J. Biol. Chem. 250:55-60 (1975); Nakaishi et al., Biochem. Biophys. Res. Commun. 150:760-765 (1988); Matsuura et al., J. Biol. Chem. 264:10472-10476 (1989)).

[0205] L-arabinose-isomerase (EC 5.3.1.4) catalyzes isomerization or intramolecular oxidoreduction. L-arabinose-isomerase catalyzes the isomerization of L-arabinose to L-ribulose. L-arabinose-isomerase has been purified from various sources including Salmonella typhimurium, Lactobacillus gayonii, L. plantarum, Escherechia coli and Streptomyces sp. (Lin et al., Gene 34:123-128 (1985)). A gene encoding L-arabinose-isomerase has been reported (Lin et al., Gene 34:123-128 (1985); Wilcox et al., J. Biol. Chem. 248:2946-2952 (1974)).

[0206] Pullulanase hydrolyzes 1,6-linkages of pullulan and other branched oligosaccharides. Pullulanase has been reported to have been found in microbes, including Klebsiella pneumoniae. A Klebsiella pneumoniae ATCC 15050 pullulanase gene has been reported to have been isolated from Escherichia coli (Michaelis et al., J. Bacteriology 164:633-638 (1985)). It has been reported that genes for two additional pullulanase genes have also been isolated. One pullulanase gene from Thermoanaerobacterium brockii has been cloned into E. coli and B. subtilis (Coleman et al., J. Bacteriol. 169:4302-4307 (1987)) and another pullulanase gene from Thermus sp. AMD-33 has been cloned into E. coli (Sashibara et al., Microbiol. Lett. 49:385-390 (1988)). Pullulanase is a cell-bound enzyme intracellular and extracellular enzyme. It has been reported that the intracellular and the extracellular forms have similar properties (Walenfels et al., Biochem. Biophys. Res. Commun. 22:254-261 (1960)). Clostridium thermohydrosulfuricum, T. brockii and Thermus sp. AMD-33 have been reported to produce thermostable pullulanase (Hyun and Zeikus, Appl. Environ. Microbiol. 49:1168-1173 (1985); Coleman et al., J. Bacteriol. 169:4302-4307 (1987); Sashibara, FEMS Microbiol. Lett. 49:385-390 (1988)). The molecular weight of pullulanase has been reported to vary from 80,000-kDa to 145,000-kDa. It has been reported that pullulanase exists as a monomer (Katsuragi et al., J. Bacteriol. 169:2301-2306 (1987)). Heavy metal ions and cyclodextrins have been reported to inhibit pullulanases. Pullulanase purified from Bacillus sp. No. 202-1 was not reported to be inhibited by either PCMB or EDTA (Nakamura et al., Biochem. Biophys. Acta 397:188-193 (1975)). α-galactosidase (EC 3.2.1.22) catalyzes the hydrolysis of terminal non-reducing α-D-galactose residues in α-D-galactosides, including galactose oligosaccharides, galactomannans and galactolipids. Under certain conditions, α-galactosidase has been reported to catalyze de novo synthesis of oligosaccharides (Dey et al., Advan. Enzymol. Relat. Areas. Mol. Biol. 36:91-130 (1972); Pridham and Dey, In: Plant Carbohydrate Biochemistry, Pridham (ed.), Academic Press, London, p 83 (1974)). α-galactosidases have been reported from plants (Dea and Morrison, Adv. Carbohydra. Chem. Biochem. 31:241-312 (1975); Bailey, In: Chemotaxonomy of the Leguminoseae, Harborne et al., Academic Press, London, p. 503 (1971); Courtois, An. Real. Acad. Farm 34:3-32 (1968); McCleary and Matheson, Phytochemistry 13:1747-1757 (1974); Courtois and Percheron, In: Mem. Soc. Bot. Fr., pp 29-39 (1965)), animals and microbes (Dey et al., Advan. Enzymol. Relat. Areas. Mol. Biol. 36:91-130 (1972)). It has been reported that in plants one of the functions of α-galactosidases is to cleave α-D-galactosyl groups from α-D-galactose-containing oligo- and polysaccharides. The degradation product in this reaction serves as an energy source. It has further been reported that α-galactosidase is involved in galactolipid metabolism and chloroplast-membrane function (Bamberger and Park, Plant Physiol. 41:1591-1600 (1970)). α-galactosidase specificities are reported to vary widely. α-galactosidase from Vicia sativa and Mortierella vinacea are reported to hydrolyze small molecular weight substrates but is not reported to act on larger substrates (Petek et al., Eur. J. Bioche., 8:395-402 (1969)). α-galactosidase from coffee bean and Phaseolus vulgaris, however, is reported to hydrolyze both types of substrates (Courtois and Petek, Methods. Enzymol. 28:565-571 (1966); Agarwal and Bahl, J. Biol. Chem. 243:103-111 (1968)). α-galactosidase activity has been reported to increase during the germination of seeds in certain species, including fenugreek (Sioufi et al., Phytochemistry 9:991-999 (1970)), guar, soybean (McCleary and Matheson, Phytochemistry 13:1747-1757 (1974), cotton, and coffee. In many of these plants, it has been reported that there is a concomitant depletion of α-galactosidic reserve carbohydrate. The presence of α-galactosidase isozymes has been reported in the germinated seeds of carob, guar, lucerne and soybean (McCleary and Matheson, Phytochemistry 13:1747-1757 (1974). The presence of two α-galactosidases has been reported in Vicia faba (Dey and Pridham, Advan. Enzymol. Relat. Areas. Mol. Biol. 36:91-130 (1972)).

[0207] β-D-galactosidase (EC 3.2.1.23) catalyzes the hydrolysis of β-D-galactoside. β-galactosidase has been reported in many plant species including barley, maize and wheat (Dey, Phytochemistry 16:323-325 (1977); Lee and Ronalds, J. Sci. Food Agric. 23:199-202 (1972)). Isozymes of β-D-galactosidase have been reported to have been found in several plant species (Schwartz et al., Arch. Biochem. Biophys. 137: 122-127 (1970)). β-galactosidase activity has been reported to increase in germinating seeds. Levels of β-D-galactosidase have been reported to increase with the ripening of fruit (Kupferman and Loeschen, J. Am. Chem. Hortic. Sci. 105:452-454 (1980)).

[0208] The α(1,4) glucose disaccharide, maltose, can be degraded by maltose phosphorylase (EC 2.4.1.8). The degradation of maltose phosphorylase releases D-glucose and β-D-glucose-1-phosphate. Maltose can be synthesized by the reversal of the maltose degradation reaction. Maltose phosphorylase has been characterized from several bacterial species. Huwel et al., (Enzyme and Microbial Technology 21:413-420 (1997)), have reported a maltose phosphorylase from Lactobacillus brevis. Sucrose α-glucosidase (EC 3.2.1.48), also known as sucrase-isomaltase, sucrose α-glucohydrolase and sucrase, catalyzes the degradation of sucrose to glucose and fructose. Sucrose α-glucosidase is also able to utilize maltose as a substrate, resulting in the release of two molecules of α-D-glucose. The gene encoding sucrose α-glucosidase has been reported to have been isolated from human (Green et al, Gene 57: 101-110 (1987)) and rat (Broyart et al., Biochim. Biophys. Acta, 1087:61-67 (1990)) intestines. Sucrose α-glucosidase has been reported to exhibit a similar enzyme activity in germinating seedlings.

[0209] The 3,6-dideoxyhexoses are involved in the serological specificity of several immunologically active polysaccharides. The 3,6-dideoxyhexoses are present primarily as a lipopolysaccharide component of the cell wall of the gram-negative bacteria in which they constitute the nonreducing terminal groups of the O-antigen repeating units. Biosynthesis of 3,6-dideoxyhexoses starts with an internal oxidation-reduction step mediated by an NAD⁺-dependent oxidoreductase. NAD⁺-dependent oxidoreductase catalyzes the transformation of a nucleotidyl diphosphohexose to the corresponding 4-keto-6-deoxyhexose derivative. The 4-keto-6-deoxyhexose derivative can be further catalyzed by a dehydrate and a reductase resulting in 3,6-dideoxyhexose as the final product (Glaser and Zarkowsky, Enzymes, 3^{rd} Vol. 5, pp. 465-480 (1971)).

[0210] One of the major reported oxidoreductases in this category is cytidine diphosphate-glucose oxidoreductase (CDP-glucose oxidoreductase). CDP-glucose oxidoreductase (EC 4.2.1.45), also known as CDP-glucose 4,6-dehydratase, has been reported from Yersinia pseudotuberculosis (He et al., Biochem. 35:4721-4731 (1996); Thorson et al., J. Bacteriol. 176:5483-5493 (1994)). CDP-glucose 4,6-dehydratase from Yersinia pseudotuberculosis is an NAD⁺-dependent enzyme which catalyzes the conversion of CDP-glucose to CDP4-keto-6-deoxy-D-glucose. Although CDP-glucose 4,6-dehydratase (EC 4.2.1.45) is a member of the class of enzymes which utilizes tightly bound NAD⁺ as a catalytic prosthetic group, CDP-glucose 4,6-dehydratase (EC 4.2.1.45) is unique in that it requires NAD⁺ for its activity. A gene coding for this enzyme has been reported to have been isolated, sequenced and expressed in Escherichia coli at a level of 5% of the total soluble protein. Comparison of the NAD⁺-binding characteristics of recombinant CDP-glucose, in the absence and presence of substrate, and dehydroquinate synthase, another member of the class, reveals a 2700-fold lower NAD⁺ affinity for the CDP-glucose 4,6-dehydratase. Primary structure correlation of these enzymes indicates differences in the ADP-binding bab fold between CDP-glucose 4,6-dehydratase (EC 4.2.1.45) and dehydroquinate synthase. From this comparison, a potentially new NAD⁺-binding motif has been reported. The reported NAD⁺-binding motif intimates that the weaker binding displayed by a Yersina pseudotuberculosis enzyme which has been reported may be the result of a decrease in the α-helix dipole, an important cofactor for binding, or an increase in protein-cofactor steric interaction.

[0211] Malto-oligosaccharides, also known as linear (1,4)-linked α-D-glucopyranosyl-oligosaccharides, can be used as food additives such as sweeteners, gelling agents, viscosity modifiers, fermentation feedstocks, synthons for pharmaceuticals, and experimental substrates for amylases. Malto-oligosaccharides have been produced from the enzymatic digestion of starch by malto-oligosaccharide-forming amylase. In addition, malto-oligosaccharides can also be produced from cyclomaltoheptose (β-cyclodextrin) and cyclomaltooctaose (r-cyclodextrin) using cyclomaltodextrinase (EC 3.2.1.54) (Uchida et al., Carbo. Res. 287:271-274 (1996)).

[0212] Cyclomaltodextrinase (EC 3.2.1.54) is also known as cyclodextriase, and cyclodextrin-hydrolyase. Cyclomaltodextrinase has cyclodextrin-hydrolyzing activity and coupling activity. The cyclodextrin-hydrolyzing activity involves the decycling of cyclodextrins. Cyclomaltodextrinase coupling activity involves the transfer of D-glucose to cyclodextrins with a decycling reaction. Optimal substrates of cyclomaltodextrinase include α-, β—, and gamma-cyclodextrins and linear maltooligosaccharides, with maltose as a final product. Cyclomaltodextrinase converts pullulan to panose. Cyclomaltodextrinase can also hydrolyze soluble starch, amylose, and amylopectin, although it cannot hydrolyze glycogen. Cyclomaltodextrinase has been reported from microorganisms, in the bacillus family (Galvin et al., Appl. Microbiol. Biotechnol. 42:46-50 (1994); Bender, Appl. Microbiol. Biotechnol. 43:838-843 (1995); Yang et al., Ann. N.Y. Acad. Sci. 799:425-428 (1996)); Zhong et al., Appl. Biochem. Biotechnol. 59:63-75 (1996)). In Bacillus stearothermophilus, the Kₘ and Vₘₐₓ for α-, β-, and gamma-cyclodextrins were reported to be 1.79 mg/mL and 2.50 mg/mL and 336 mmol/mg/min, 185 mmol/mg/min and 208 mmol/mg/min, respectively. It has been reported that due to the effect of some protein modification reagents on the activity of cyclomaltodextrinase tryptophan, histidine residues may be located at the active site (Zhong et al., Appl. Biochem. Biotechnol. 59:63-75 (1996)).

[0213] Cyclomaltodextrinase is involved in the production of maltodextrins and maltooligosaccharides. Genes encoding cyclomaltodextrinase have reported from Bacillus sphaericus (Oguma et al., Appl. Microbiol. Biotechnol. 39:197-203 (1993)), Clostridium thermohydrosulfuricum (Podkovyrov and Zeikus, J. Bacteriol. 174:5400-5405 (1992)), and Bacillus subtilis (Krohn and Lindsay, Curr. Microbiol. 26:217-222 (1993)). A cyclodextrinase gene of Bacillus sphaericus has been cloned and expressed in Escherichia coli and has been manufactured for use in the preparation of maltooligosaccharides and other oligosaccharides (Oguma et al., Ger. Offen. p. 10 (1993)).

[0214] Glycogen is produced for use as a deposit of reserve carbohydrate by many organisms. Glycogen is a counterpart of starch in mammalian and bacterial system. The carbohydrate polymer is highly branched with about 90% of its units existing as (1,4)-α-glucosidic linkages and the remainder as (1,6)-α-linkages.

[0215] Glycogen synthase (EC 2.4.1.21), also known as glycogen glucosyltransferase, catalyzes the linear elongation of glycogen. In bacterial systems, glycogen synthase uses ADP-glucose as its substrate and it is known as ADP-glucose glycogen glucosyltransferase. In mammalian systems, glycogen synthase uses UDP-glucose as its substrate. In mammalian systems, glycogen synthase is known as UDP-glucose glycogen glucosyltransferase. Glycogen synthase is thought to serve the same function in bacterial and mammalian systems as does starch synthase in higher plants. Glycogen synthase and each of its forms were purified from various sources, such as Escherichia coli (Fox et al., Biochem. 15:849-856 (1976)), Saccharomyces cerevisiae (Huang and Cabib, J. Biol. Chem. 249:3851-3857 (1974); Huang et al., J. Biol. Chem. 249:3858-3861 (1974)) and rabbit muscle (Soderling et al., J. Biol. Chem. 58:197-237 (1970); Brown and Larner, Biochim. Biophys. Acta, 242:69-80 (1971)). Yeast and mammalian glycogen synthase exists in D and I forms. The D form is essentially inactive without glucose-6-phosphate, while the I form reaches nearly full activity without it. The I & D forms of glycogen synthase are interconvertible by phosphorylation and dephosphorylation when catalyzed by a synthase kinase and a synthase phosphatase (Lamer and Villar-Palasi, Curr. Top. Cell Regul. 3:196-236 (1971)). A structural gene for glycogen synthase, glgA, has been isolated from both bacterial and mammalian systems (Okita et al., J. Biol. Chem., 256:5961-5964 (1981); Browner et al., Proc. Natl. Acad. Sci. U.S.A. 86:1443-1447 (1989); Bai et al, J. Biol. Chem. 265:7843-7848 (1990)). Due to the differences in substrate, as well as in regulatory mechanisms, bacterial and mammalian glycogen synthase are not homologous and have been reported to be different molecular entities all together.

[0216] In addition to glycogen synthase, the synthesis of bacterial glycogen also requires ADP-D-glucose pyrophosphorylase and glycogen branching enzyme, which are encoded by glgC and glgB, respectively. It has been reported that the major form of ADP-D-glucose pyrophosphorylase in maize endosperm is extra-plastidial (Denyer et al., Plant Physiol. 112:779-785 (1996)). glgC and glgB genes are found as a cluster on the Escherichia coli genome. The order of the genes is reported to be asd-glgB-glgC-glgA, in which asd codes for aspartate semialdehyde dehydrogenase (Okita et al., J. Biol. Chem., 256:5961-5964 (1981)). It has been reported, through the use of photoaffinity labeling using substrate analogues, that the active binding site of glycogen synthase exhibited a conserved region Lys-X-Gly-Gly (Tagaya et al., J. Biol. Chem. 260:6670-6676 (1985)).

[0217] Glucose-1-phosphate cytidylyltransferase (EC 2.7.7.33), also known as CDP-glucose pyrophosphorylase, catalyzes the formation of cytidine 5′-diphosphate-glucose from cytosine triphosphate and glucose-1-phosphate. Glucose-1-phosphate cytidylyltransferase is in the α-D-glucose-1-phosphate nucleotidyltransferase class, which includes ADP-D-glucose pyrophosphorylase (EC 2.7.7.27) and UDP-D-glucose pyrophosphorylase (EC 2.7.7.9). Cytidine 5′-diphosphate-glucose is a precursor for some 3,6-dideoxyhexoses found in lipopolysaccharides of gram-negative bacteria (Thorson et al., J. Bacteriol. 176:5483-5493 (1994)). These 3,6-dideoxyhexoses have been reported to be involved in the organisms immunological determination. Cytidine 5′-diphosphate-glucose was also reported to inhibit the self-glycosylating protein, glycogenin, which is reported to be responsible for early steps of glycogen biosynthesis in higher animals (Manzella et al., Arch. Biochem. Biophys. 320:361-368 (1995)). Glucose-1-phosphate cytidylyltransferase has been reported from Salmonella partyphi type A and Azptobacter vinelandii. A gene encoding glucose-1-phosphate cytidylyltransferase has been reported from Yersinia pseudotuberculosis (Thorson et al., J. Bacteriol. 176:5483-5493 (1994)) and from Salmonella enterica (Lindqvist et al., J. Biol. Chem. 269:122-126 (1994)).

[0218] CDP-4-dehydro-6-deoxyglucose reductase (EC 1.17.1.1), also known as CDP-4-keto-6-deoxyglucose reductase, participates in the reversible reaction involving the interconversion of nucleotidyl-hexose CDP-4-dehydro-3,6-dideoxy-D-glucose and CDP4-dehydro-3,6-deoxy-D-glucose. CDP4-dehydro-6-deoxyglucose reductase has been reported to be involved in the formation of several antigenic polysaccharide chains of the lipopolysaccharides of the cell envelope of some gram-negative bacteria such as Salmonella enterica (Lindqvist et al., J. Biol. Chem. 269:122-126 (1994)). Polysaccharides containing hexoses such as abequose, ascarylose, paratose and tyvelose are derived from cytidine 5′-diphosphate-glucose (Thorson et al., J. Bacteriol. 176:5483-5493 (1994)).

[0219] Glucose-1,6-bisphosphate synthase (EC 2.7.1.106) catalyzes the conversion of 3-phospho-D-glyceroyl phosphate and D-glucose-1-phosphate to 3-phospho-D-glycerate and D-glucose-1,6-bisphosphate. Glucose-1,6-bisphosphate synthase can also use D-glucose-6-phosphate to form D-glucose-1,6-bisphosphate. D-glucose-1,6-bisphosphate has been reported to be associated with the control of several carbohydrate metabolic enzymes including hexokinase, phosphofructokinase, pyruvate kinase, phosphogluconate dehydrogenase and fructose-1,6-bisphosphatase (Beitner, Regul. Carbohydr. Metabol. 1:1-27 (1985)). D-glucose-1,6-bisphosphate has been characterized in higher animals. The metabolism of plant starch and bacterial glycogen has been reported to be similar in the regulation mechanism of (1,4)-α-glucan synthesis.

[0220] α-Mannosidase (EC 3.2.1.24), is a carbohydrate-digesting enzyme. α-Mannosidase is associated with early N-linked oligosaccharide processing which removes α-1,2-linked mannose residues from glycoprotein and oligosaccharide substrates. α-1,2-mannosidase activity has been reported in the endoplasmic reticulum and golgi complex of mammalian cells. α-Mannosidase from the endoplasmic reticulum and golgi complex of mammalian cells have been purified and are reported to share biochemical characteristics (Moremen and Herscovics, Guideb. Secretory Pathway, Rothblatt et al. (eds.), Oxford University Press, Oxford, UK, pp. 103-104, (1994)). α-1,2-mannosidases have been reported to be inhibited by 1-deoxymannojirimycin (dMNJ). Distinctions among α-1,2-mannosidase have been made by differences in their specificities to oligosaccharide substrates, their intracellular location and their cation requirements. Two endoplasmic reticulum α-mannosidases have been reported to have catabolic activity. It has been reported that an endoplasmic reticulum/cytosolic mannosidase is involved in the degradation of dolichol intermediates that are not needed for protein glycosylation. It has also been reported that the soluble form of Man9-mannosidase is responsible for the degradation of glycans on defective or malfolded proteins that are specifically retained and broken down in the endoplasmic reticulum. It has further been reported that, based on inhibitor studies with pyranose and furanose analogs, α-mannosidases may be divided into 2 groups. α-Mannosidases in Class 1 are (1,2)-linkage specific enzymes like golgi mannosidase I, whereas α-mannosidases in Class 2, like lysosomal α-mannosidase I, can hydrolyze (1,2), (1,3) and (1,6) linkages (Daniel et al., Glycobiol. 4:551-566 (1994)).

[0221] In higher plants, the level of α-mannosidase has been reported to increase during seed germination. The α-mannosidase levels have also been reported to increase during ripening of some fruit and to be involved in the processing of oligosaccharide derivatives that participate in the synthesis of some glycoproteins.

[0222] β-mannosidase (EC 2.3.1.25) liberates D-mannose from synthetic substrates and some natural substrates, such as, D-manno-oligosaccharides and D-mannose-containing glycopeptides. β-mannosidase has been reported as an exohydrolase which cleaves β-D-(1,4)-linked mannosyl groups from the non-reducing end of their substrates. β-mannosidase presence has been reported in mammalian systems and higher plants (Percheron, Bull. Acad. Natl. Med. 179:881-892 (1995)).

[0223] Xylose reductase catalyzes the conversion of xylose to ethanol. Xylose reductase has been isolated from yeast (Amore et al., Gene 109:89-97 (1991)). Xylose reductase belongs to the aldo-keto reductase superfamily (Bohren et al., J. Biol. Chem. 264:9547-9551 (1989)). The aldo-keto reductases are usually monomeric proteins. Aldo-keto reductases metabolize various substrates ranging from aliphatic and aromatic aldehydes to polycyclic aromatic hydrocarbons. Members of the aldo-keto reductase superfamily have been reported to exhibit amino acid sequence identity. It has been reported that sequence alignment studies have revealed a strict conservation of amino acid sequence at 11 positions in the primary structure of all of the reported proteins. Aldo-keto reductases have been reported to maintain a barrel scaffold structure when modulating substrate specificity through loop modifications. Xylose reductase has been reported from Neurospora crassa (Rawat and Rao, Biochem. Biophys. Acta 1293:222-230 (1996)). A tryptophan residue has also been reported to be involved in the NADPH binding. The presence of a lysine residue, essential for the xylose reductase activity and conformation, has also been reported (Rawat and Rao, Biochim. Biophys. Acta 246:344-349 (1997)). The presence of a cysteine residue that plays a role in the enzyme catalysis has been reported in flouresence studies (Rawat and Rao, Biochim. Biophys. Acta 246:344-349 (1997)).

[0224] Glucose dehydrogenase (EC 1.1.1.47) catalyzes an NADP dependent oxidation of glucose to gluconic acid. Glucose dehydrogenase is a quinoprotein as it has pyrrolo-quinoline quinone as its prosthetic group. Aerobic bacteria which do not have a glycolytic pathway or a phosphotransferase system, oxidize glucose by using glucose-dehydrogenase. Glucose-dehydrogenase is a membrane bound enzyme which catalyzes periplasmic oxidation of glucose to gluconic acid (Anthony, Quinoproteins and Energy Transduction, Anthony (ed.), Academic Press, London, pp 293-316, (1988)). Gluconic acid is then further oxidized or released into the growth medium. Some strains of Acinetobacter calcoaceticus are unable to oxidise gluconic acid, although they have an active glucose dehydrogenase. Some enteric bacteria, such as Escherechia coli, are only able to oxidise glucose if provided with pyrrolo-quinoline quinone in the growth medium (Hommes et al., FEMS Microbiol. Lett. 24:329-333 (1984); Neijssel et al., FEMS Microbiol. Lett. 20:35-39 (1983)).

[0225] Glucose dehydrogenase has been reported to be reconstituted by the addition of pyrrolo-quinoline quinone to the apo-enzyme (Duine et al., Eur. J. Biochem. 108:187-192 (1980)). In certain bacteria, where glucose dehydrogenase occurs, the products of the catalytic reaction are not further metabolized. Glucose dehydrogenase has been reported to provide energy from glucose (Neijssel et al., In: PQQ and Quinoproteins, Jongejan and Duine (eds.), pp. 57-68 (1989)). Glucose dehydrogenase was first isolated and purified from Acinetobacter calcoaceticus (Hauge, J. Biol. Chem. 239:3630-3639 (1964)).

[0226] Ubiquinone has been reported to be an electron acceptor for glucose dehydrogenase in Pseudomonas and Acinetobacter (Matsushita et al., Agric. Biol. Chem. 46: 1007-1011 (1982); Matsushita et al., J. Bact. 169:205-209 (1987); Matsushita et al., J. Biochem. 105:633-637 (1989)). It has been reported that glucose dehydrogenase from Acinetobacter calcoaceticus and E. coli is a monomer of 87 kDa in size (Cleton-Jansen et al., Nucleic Acids Res. 16:6228 (1988); Cleton-Jansen et al., J. Bact. 172:6308-6315 (1990)). The involvement of Mg²⁺ and Ca²⁺ in the binding of pyrrolo-quinoline quinone to the apoenzyme has also been reported (Imanaga, In: PQQ and Quinoproteins, Jongejan et al. (eds.), pp 87-96 (1989)). A periplasmic form and another soluble form of glucose dehydrogenase has also been reported (Cleton-Jansen et al., Mol. Gen. Genet. 217:430-436 (1989); Dokter et al., Biochem. J. 239:163-167 (1986)).

[0227] 8. Phytic Acid Pathway

[0228] myo-Inositol-1-phosphate (mIP6) is synthesized from glucose-6-phosphate with the addition of five phosphates using ATP as a donor yielding mIP6 (Bewley and Black, Seeds: Physiology of Development and Germination, 2^{nd} Ed. Plenum Press, NY (1994); Sasakawa et al., Biochem. Pharmacol. 50:137-146 (1995)). Characterized systems for phytic acid synthesis include the cellular slime mold, Dictyostelium, (Stephens and Irvine, Nature 346:500-583 (1990); Stephens et al., J. Biol. Chem. 268:4009-4015 (1993); van Haastert and van Dijken, FEBS Lett. 410:39-43 (1997)) and the duckweed, Spirodela polyrhiza (Brearley and Hanke, Biochem. J. 314:215-227 (1996)). In both systems, the biosynthetic pathway has been inferred by identification of metabolic intermediates in cell-free extracts. Enzymes reported to be involved in the synthesis of phytic acid are myo-Inositol-1-phosphate synthase (EC 5.5.1.4) and a series of ATP-dependent kinases.

[0229] myo-Inositol-1-phosphate synthase catalyzes the conversion of glucose-6-phosphate to 1L-myo-Inositol-1-phosphate in the presence of NAD⁺. myo-Inositol-1-phosphate synthase has been reported from a number of species including Sacharomyces cerevisiae (Dean-Johnson and Henry, J. Biol. Chem. 264:1274-1283 (1989); Katsoulou et al., Yeast 12:789-797 (1996)), Candida albicans (Klig et al., Yeast 10:789-800 (1994)), Arabidopsis thialana (Johnson, Plant Physiol. 105:1023-1024 (1994)), grapefruit (Abu-Abied and Holland, Plant Physiol. 106:1689-1689 (1994)) and Spirodela polyrhiza (Smart and Fleming, Plant J. 4:279-293 (1993)). ATP-dependent kinases have been reported from the identification of metabolic intermediates in Dictostelium and Spirodela polyrhiza.

[0230] Phytase (EC 3.1.3.8), also known as myo-inositol hexakisphosphate hydrolase, is found widely in nature and catalyzes the conversion of phytic acid to inositol and orthophosphate, via penta-, quatra-, tri-, di- and monophosphates (Reddy et al., Advances in Food Research 28:1-92 (1982)). Phytases have been isolated and characterized from bacteria, (Patwardhan, Biochem. J. 31:695 (1937)) fungi, (Patwardhan, Biochem. J. 31:695 (1937); Piddington et al., Gene 133:55-62 (1993); van Hartingsveldt et al., Gene 127:97-94 (1993); Ullah, Prep. Biochem. 18:459-471 (1988)), cereals (Singh and Sedeh, Cereal Chem. 56:267 (1979); Nagai and Funahashi, Agric. Biol. Chem. 26:794 (1962); Lim and Tate, Biochim. Biophys. Acta 302:316-315 (1973); Suzuki et al., Bull. Coll. Agric. Tokyo Imp. Univ. 7:495-512 (1907); Yoshida et al., Agric. Biol. Chem. 39:289 (1975)), beans (Lolas and Markakis, J. Food Sci. 42:1094-1098 (1977); Mandal and Biswas, Plant Physiol. 45:4-9 (1970); Mandal et al., Phytochemistry 11:495 (1972); Maiti et al., Phytochem. 13:1047 (1974); Maiti and Biswas, Phytochem. 18:316 (1979); Gibbins and Norris, Biochem. J. 86:67 (1963); Chang, Ph.D. dissertation, Univ. of California, Berkley (1975)); animal (Bitar and Reinhold, Biochim. Biophys. Acta 268:442 (1972)) and human (Bitar, Biochim. Biophys. Acta 268:442-452 (1972)). A plant phytase from corn has also been isolated (Maugenest et al., Biochem. J. 322:511-517 (1997)).

[0231] Isolation and expression of fungal phytase, production of enzymes in seeds and expression of fungal phytase in plants have been reported in U.S. Pat. Nos. 5,436,156; 5,543,576, and 5,593,963. Low phytic acid mutants of corn have been reported in U.S. Pat. No. 5,689,054.

[0232] C. Amino Acid Pathways

[0233] Living organisms differ considerably with respect to their ability to synthesize different amino acids. For example, human being can only synthesize 10 of the 200 amino acids required as building blocks for protein biosynthesis. In contrast, higher plants can make all the amino acids required for protein biosynthesis. Microorganisms differ widely in their capacity to synthesize amino acids.

[0234] 1. Methoinine Biosynthesis Pathway

[0235] The amino acid, L-methionine, is synthesized in higher plants via a pathway that starts with L-aspartate. This pathway has been studied (Azevedo et al., Phytochemistry 46:395-419 (1997)). L-methionine is one of four so-called aspartate-derived amino acids (along with L-lysine, L-threonine, and L-isoleucine) (Miflin et al., IN: Nitrogen Assimilation in Plants, Hewitt et al., (eds.), Academic Press, New York, p. 335 (1997); Bryan, In: The Biochemistry of Plants, Miflin (ed.), Academic Press, New York, p. 403 (1980); Lea et al., In: The Chemistry and Biochemistry of Amino Acids, Barrett et al. (eds.), London, 5:197 (1985); Bryan, In: The Biochemistry of Plants, Miflin et al., (eds.), Academic Press, San Diego, 16:161 (1990)).

[0236] In plants, the pathway leading to methionine biosynthesis typically includes the following enzymes: aspartate kinase (EC 2.7.2.4), aspartate-semialdehyde dehydrogenase (EC 1.2.1.11), homoserine dehydrogenase (EC 1.1.1.3), homoserine kinase (EC 2.7.1.39), cystathionine gamma-synthase (EC 4.2.99.9), cystathionine beta-lyase (EC 4.4.1.8), and methionine synthase (EC 2.1.1.14). Some higher plants and microbes utilize alternative enzymatic reactions for one or more steps of the pathway, as noted below.

[0237] Aspartate kinase catalyzes the first reaction of the pathway in which aspartate is converted to β-aspartyl phosphate. This enzyme has been isolated and characterized from plant sources including maize, barley, carrot, pea, and soybean. These studies have revealed that there are multiple isoenzymes of aspartate kinase, and the isoenzymes differ with respect to both feedback inhibition sensitivity and expression profile (tissue and developmental stage). Feedback inhibition is mediated by lysine and threonine. Transgenic plants which express an unregulated aspartate kinase have demonstrated increased flux through the aspartate pathway. Pathway regulation is reported to be exerted, at least in part, via control of this enzyme's activity.

[0238] Aspartate semialdehyde dehydrogenase catalyses the second pathway reaction and converts β-aspartyl phosphate to aspartate semialdehyde via an NADPH-dependent reaction. Gengenbach et al., Crop Science 18:472-476 (1978) report the isolation of aspartate semialdehyde dehydrogenase from maize suspension culture cells. These suspension cultures did not exhibit feedback inhibition of the enzyme in the presence of aspartate-derived amino acids, with the exception of methionine, for which some feedback sensitivity was observed. Aspartate semialdehyde dehydrogenase enzyme activity has been detected in maize shoot, maize root, and maize kernel (Gengenbach et al., Crop Science 18:472-476 (1978)).

[0239] Homoserine dehydrogenase catalyzes the next step of the pathway in which homoserine is generated from aspartate semialdehyde in a reaction requiring NADH or NADPH. Homoserine dehydrogenase enzyme has been studied in higher plants and multiple isoenzyme forms have been reported (Bryan et al., Biochemistry and Biophysics Research Communications 41:1211-1217 (1970); Gengenbach et al., Crop Science 18:472-476 (1978); Dotson et al., Plant Physiology 91:1602-1608 (1989); Dotson et al., Plant Physiology 93:98-104 (1989); Azevedo et al., Phytochemistry 31:3725-3730 (1992); Azevedo et al., Phytochemistry 31:3731-3734 (1992); Brennecke et al., Phytochemistry 41:707 (1996); Aarnes, Plant Science Letters 9:137-145 (1977); Bright et al., Biochemical Genetics 200:229-243 (1982); Aruda et al., Plant Physiology 76:442-446 (1984); Lea et al., In: Barley: Genetics, Molecular Biology and Biotechnology, Shewrey (ed.), CAB International, Oxford, p. 181 (1992); Davies et al., Plant Science Letters 9:323-332 (1977); Davies et al., Plant Physiology 62:536-541 (1978); Matthews et al., Zeitschrift für Naturforschung, Section Bioscience 34:1177-1185 (1979); Relton et al., Biochimica et Biophysica Acta 953:48-60 (1988); Aarnes et al., Phytochemistry 13:2717-2724 (1974); Lea et al., FEBS Letters 98:165-168 (1979); Matthews et al., Canadian Journal of Botany 57:299-304 (1979)). The isoenzymes have been found to differ with respect to sensitivity to threonine-mediated feedback inhibition, with both sensitive and insensitive forms being isolated from maize suspension cultures and seedlings (Miflin et al., In: Nitrogen Assimilation of Plants 335 (1979); Bryan, In: The Biochemistry of Plants, Miflin (ed.), Academic Press, New York, 5:403 (1980)).

[0240] There is evidence that plants also possess a bifunctional enzyme with both aspartate kinase and homoserine dehydrogenase activities (Lea et al., The Chemistry and Biochemistry of Amino Acids 197 (1985); Bryan, In: The Biochemistry of Plants, Miflin (ed.), Academic Press, New York, 5:161 (1990)). Clones of these bifunctional enzymes have been isolated from Arabidopsis thaliana (Giovanelli et al., In: The Biochemistry of Plants, Miflin (ed.), Academic Press, New York, p. 453 (1990)) carrot (Giovanelli et al., Plant Physiology 90:1584-1599 (1989)), maize (Singh et al., Amino Acids 7:165-168 (1994)) and soybean (Matthews et al., In: Biosynthesis and Molecular Regulation of Amino Acids in Plants, Singh et al. (eds.), American Society of Plant Physiologists, Rockville, Md., p 294 (1992)).

[0241] The next enzymatic step leading to methionine biosynthesis in higher plants is the final common reaction shared by other amino acid end products (threonine and isoleucine). The reaction is catalyzed by homoserine kinase resulting in the generation of O-phosphohomoserine from homoserine, with ATP serving as the phosphate donor. Homoserine kinase has been purified to varying degrees from multiple higher plant sources (Galili, The Plant Cell 7:899-906 (1995); Rees et al., Biochemical Journal 309:999-1107 (1995); Bryan et al., Biochemistry and Biophysics Research Communications 41:1211-1217 (1970); Gengenbach et al., Crop Science 18:472-476 (1978); Dotson et al., Plant Physiology 91:1602-1608 (1989); Dotson et al., Plant Physiology 93:98-104 (1989)). Homoserine kinase isolated from barley and wheat did not exhibit feedback inhibition by aspartate-derived amino acids (Gengenbach et al., Crop Science 18:472-476 (1978); Dotson et al., Plant Physiology 93:98-104 (1989)). There is some evidence for feedback regulation of this enzyme in the dicots, pea (Rees et al., Biochemical Journal 309:999-1007 (1995)) and radish (Bryan et al., Biochemistry and Biophysics Research Communications 41:1211-1217 (1970)). Bacterial and yeast homologues have been reported (Azevedo et al., Phytochemistry 31:3725-3730 (1992); Azevedo et al., Phytochemistry 31:3731-3734 (1992); Brennecke et al., Phytochemistry 41:707 (1996); Aarnes, Plant Science Letters 9:137-145 (1977)).

[0242] O-acetylhomoserine and O-oxalylhomoserine are generated as alternatives to O-phosphohomoserine in Pisum sativum and Lathyrus sitivus, respectively (Thomas and Surdin-Kerjan, Microbiol. Mol. Biol. Rev. 61:503-532 (1997)). Enteric bacteria use O-succinylhomoserine instead of O-phosphohomoserine, while several gram-positive bacteria, yeasts and fungi use O-acetylhomoserine (formed using homoserine O-acetyltransferase, EC 2.3.1.31, (Thomas and Surdin-Kerjan, Microbiol. Mol. Biol. Rev. 61:503-532 (1997)).

[0243] In yeast, sulfur is incorporated into carbon chains by the O-acetylhomoserine sulfhydrylase (EC 4.2.99.10) reaction, which generates homocysteine from O-acetylhomoserine. O-acetylhomoserine sulfhydrylase has been purified to homogeneity and shown to be a homotetramer with a molecular weight of 200,000 and to bind four molecules of pyridoxal phosphate (Thomas and Surdin-Kerjan, Microbiol. Mol. Biol. Rev. 61:503-532 (1997)).

[0244] In yeast, cysteine is synthesized from homocysteine via two successive enzymatic steps, beta addition and gamma elimination. Cystathionine beta-synthase (EC 4.2.1.22) catalyzes the first reaction in which cystathionine is generated from homocysteine and serine. In S. cervisiae, cystathionine beta-synthase is encoded by the STR4 gene. (Thomas and Surdin-Kerjan, Microbiol. Mol. Biol. Rev. 61:503-532(1997)). Cystathionine gamma-lyase (EC 4.4.1.1) catalyzes the gamma cleavage of cystationine, which is the second reaction leading to cysteine biosynthesis from homocysteine. This enzyme, encoded by STR1, has been purified to homogeneity and has a molecular weight of about 194,000 (Thomas and Surdin-Kerjan, Microbiol. Mol. Biol. Rev. 61:503-532 (1997)).

[0245] Cystathionine γ-synthase catalyzes the first reaction which is unique to methionine biosynthesis, thereby committing aspartate pathway flux toward this amino acid. In this reaction, O-phosphohomoserine and cysteine serve as common substrates in higher plants for the production of cystathionine. No isoenzymes of cystathionine γ-synthase from plants sources have been characterized. No feedback inhibition of this enzyme by aspartate-derived amino acids has been reported (Bright et al., Biochemical Genetics 20:229-243 (1982); Arruda et al., Plant Physiology 76:442-446 (1984)). The enzyme has been reported to be sensitive to product inhibition by orthophosphate (Lea et al., Barley: Genetics, Molecular Biology and Biotechnology, Shewrey (ed.), CAB International, Oxford, 181 (1992); Davies et al., Plant Science Letters 9:323-332 (1977)). The gene for cystathionine γ-synthase has been cloned from Arabidopsis thaliana (Davies et al., Plant Physiology 62:536-541 (1978). There is evidence suggesting that flux to methionine is modulated via regulation of cystathionine-synthase (Matthews et al., Zeitschrift für Naturforschung, Section Bioscience 34:1177-1185 (1979-2724 (1974); Lea et al., FEBS Letters 98:165 (1979)).

[0246] Cystathionine beta-lyase catalyzes the next reaction in the biosynthesis of methionine. This reaction generates homocysteine, pyruvate, and ammonia from the enzymatic decomposition of cystathionine. Evidence for isoenzymes which differ with respect to cellular localization have been reported for barley (Matthews et al., Canadian Journal of Botany 57:299-304 (1979)), and spinach (Rognes et al., Nature 287:357-359 (1980)).

[0247] Methionine synthase generates methionine from homocysteine by a methylation reaction and thus represents the final step of the methionine biosynthetic pathway. Methionine synthase is also sometimes referred to as 5-methyltetrahydropteroyltriglutamate-homocysteine-S-methyltransferase. N-methyltetrahydrofolate serves as the methyl donor in this reaction, which occurs in the absence of cobalamin (Giovanelli et al., Plant Physiology 90:1577-1583 (1989); Green et al., Crop Science 14:827-830 (1974)).

[0248] 2. Methionine Degradation Pathway

[0249] Plants contain a pathway for the degradation of L-methionine. This degradation pathway includes the following enzymes: methionine adenosyltransferase (EC 2.5.1.6), methionine S-methyltransferase (EC 2.1.1.12), adenosylmethionine hydrolase (EC 3.3.1.2), homocysteine S-methyltransferase (EC 2.1.1.10) and S-adenosyl-methionine decarboxylase (EC 4.1.1.50).

[0250] The reported first step in the catabolism of methionine is the ATP-dependent conversion to S-adenosylmethionine (AdoMet), which is catalyzed by the enzyme methionine adenosyltransferase, also known as S-adenosylmethionine synthetase. Methionine adenosyltransferase enzyme has been characterized from several plant sources (Aarnes, Plant Science Letters 10:381 (1977); Mathur et al., Biochimia and Biophysica Acta 1078:161-170 (1991); Kim et al., Journal of Biochemical and Molecular Biology 28:100 (1995)) and nucleic acid molecules (genomic and cDNA) have also been obtained from a variety of sources (Izhaki et al., Plant Physiology 108:841-842 (1995); Espartero et al., Molecular Biology Plant 25:217-237 (1994)). Regulation of methionine adenosyltransferase activity has been observed for the enzyme from Glycine max (soybean). In Glycine max, methionine adenosyltransferase was reportedly inhibited by S-adenosylmethionine (Kim et al., Journal of Biochemical and Molecular Biology 28:100 (1995). Studies have also reported that the levels of methionine adenosyltransferase appear to fluctuate in response to hormonal or environmental conditions such as gibberellic acid (Mathur et al., Biochimica and Biophysica Acta 1162:289-290 (1993); Mathur et al., Biochimica and Biophysica Acta 1137:338-348 (1992)), salt stress (Espartero et al., Molecular Biology Plant 25:217-227 (1994)), and wounding (Kim et al., Plant Cell Reports 13:340 (1994)). It has also been reported that methionine adenosyltransferase may play a role in the lignification process (Peleman et al., Plant Cell 1:81 (1989)).

[0251] AdoMet is further catabolized by several enzymes and has been reported to serve a variety of metabolic functions including that of a methyl donor (Cossins, In: The Biochemistry of Plants 11:317, Devis (ed.), Academic Press, San Diego (1987)) that of a precursor for polyamine biosynthesis (Tiburico et al., The Biochemistry of Plants 16:283 (1990)) and that of a precursor for ethylene biosynthesis (Kende, Plant Physiology 91:1-4 (1989); Flurh et al., Critical Review of Plant Science 15:479 (1996)). In each case, enzymes are present to regenerate methionine from the sulfur-containing backbone resulting in no net loss of methionine.

[0252] An enzyme involved in AdoMet catabolism is adenosylmethionine hydrolase which converts AdoMet to methylthioadenosine and L-homoserine. L-homoserine is further metabolized during the biosynthesis of polyamines and ethylene and methylthioadenosine is recycled to methionine.

[0253] Another enzyme for which AdoMet is a substrate for is homocysteine S-methyltransferase. Homocysteine S-methyltransferase catalyzes the combination of AdoMet, with L-homocysteine to produce both S-adenosyl-L-homocysteine and L-methionine. Another enzyme has been described which generates S-adenosyl-L-homocysteine from AdoMet. This enzyme is called methionine S-methyltransferase, and it catalyzes the reaction in which S-adenosyl-L-homocysteine reacts with L-methionine to generate S-adenosyl-L-homocysteine and S-methyl-L-methionine. AdoMet can also be decarboxylated by adenosyl methionine decarboxylase, which generates (5-deoxy-5-adenosyl)(3-aminopropyl) methylsulfonium salt.

[0254] S-adenosyl-L-homocysteine is removed by S-adenosyl-L-homocysteine hydrolase (EC 3.3.1.1) to yield homocysteine and adenosine. This enzyme has been characterized in tobacco and parsley and its gene is cloned. The predicted amino acid sequence is highly homologous to that of S-adenosyl-L-homocysteine from various organisms (Ravanel et al., Proc. Natl. Acad. Sci. (U.S.A.) 93:7805-7812 (1998)).

[0255] Another enzyme has been described which generates S-adenosyl-L-homocysteine from AdoMet. This enzyme is called methionine S-methyltransferase, and it catalyzes the reaction in which S-adenosyl-L-homocysteine reacts with L-methionine to generate S-adenosyl-L-homocysteine and S-methyl-L-methionine. AdoMet can also be decarboxylated by adenosyl methionine decarboxylase, which generates (5-deoxy-5-adenosyl) (3-aminopropyl) methylsulfonium salt.

[0256] 3. Lysine Pathway

[0257] L-lysine is synthesized in higher plants via a pathway that starts with L-aspartate. (Azevedo et al., Phytochemistry 46:395-419 (1997)). It is one of the four so-called aspartate-derived amino acids (along with L-methionine, L-threonine, and L-isoleucine) (Miflin et al., Nitrogen Assimilation in Plants, Hewitt et al. (eds.), Academic Press, New York, p. 335 (1997); Bryan, The Biochemistry of Plants, Miflin (ed.), Academic Press, New York, 403 (1980); Lea et al., The Chemistry and Biochemistry of Amino Acids, Barrett et al. (eds.), London, 5:197 (1985); Bryan, The Biochemistry of Plants, Miflin et al. (eds.), Academic Press, San Diego, 16:161 (1990)).

[0258] Aspartate kinase (EC 2.7.2.4) and aspartate-semialdehyde dehydrogenase (EC 1.2.1.11) have been reported to catalyze the formation of aspartate semialdehyde. Aspartate semialdehyde has been reported to be the common precursor for the synthesis of L-lysine, L-methionine, L-threonine, and L-isoleucine. Enzymes that are reported to be specific for the synthesis of lysine include dihydrodipicolinate synthase (EC 4.2.1.52), dihydrodipicolinate reductase (EC 1.3.1.26), piperidine dicarboxylate acylase (EC 2.3.1.117) acyldiaminopimelate aminotransferase (EC 2.6.1.17), acyldiaminopimelate deacylase (EC 3.5.1.18), diaminopimelate epimerase (EC 5.1.1.7), and diaminopimelate decarboxylase (EC 4.1.1.20).

[0259] Aspartate kinase catalyzes the first reported reaction of the pathway in which aspartate is converted to β-aspartyl phosphate. Aspartate kinase has been reported from several plant sources including maize, barley, carrot, pea, and soybean (Azevedo et al., Phytochemistry 46:395-419 (1997)). It has been reported that there are multiple isoenzymes of aspartate kinase, and that the isoenzymes differ with respect to both feedback inhibition sensitivity and expression profile (tissue and developmental stage). Feedback inhibition has been reported to be mediated by lysine and threonine. Transgenic plants which express an unregulated aspartate kinase enzyme have been reported to have increased flux through the aspartate pathway. Pathway regulation has been reported to be exerted, at least in part, via control of this enzyme's activity.

[0260] Aspartate-semialdehyde dehydrogenase catalyses the second reported reaction of the lysine biosynthesis pathway and converts β-aspartyl phosphate to aspartate semialdehyde via an NADPH-dependent reaction. Gengenbach et al. (Crop Science 18:472-476 (1978)), reported the isolation of aspartate-semialdehyde dehydrogenase from maize suspension culture cells. These suspension cultures have reported to not exhibit feedback inhibition of the enzyme in the presence of aspartate-derived amino acids, with the exception of methionine, for which some feedback sensitivity is observed. Aspartate-semialdehyde dehydrogenase enzyme activity has been reported in maize shoot, root, and kernel tissues (Gengenbach et al., Crop Science 18:472-476 (1978)).

[0261] Homoserine dehydrogenase (EC 1.1.1.3) catalyzes the conversion of aspartate semialdehyde into homoserine in a reaction requiring NADH or NADPH. Multiple isozyme forms of homoserine dehydrogenase enzyme have been reported (Bryan et al., Biochemistry and Biophysics Research Communications 41:1211-1217 (1970); Gengenbach et al., Crop Science 18:472-476 (1978); Dotson et al., Plant Physiology 91:1602-1608 (1989); Dotson et al., Plant Physiology 93:98-104 (1989); Azevedo et al., Phytochemistry 31:3725-3730 (1992); Azevedo et al., Phytochemistry 31:3731-3734 (1992); Brennecke et al., Phytochemistry 41:707 (1996); Aarnes, Plant Science Letters, 9:137-145 (1977); Bright et al., Biochemical Genetics 20:229-243 (1982); Arruda et al., Plant Physiology 76:442-446 (1984); Lea et al., Barley: Genetics, Molecular Biology and Biotechnology, Shewrey (ed.), CAB International, Oxford, p. 181 (1992); Davies et al., Plant Science Letters 9:323-332 (1977); Davies et al., Plant Physiology 62:536-541 (1978); Matthews et al., Zeitschrift für Naturforschung, Section Bioscience 34:1177-1185 (1979); Relton et al., Biochimica et Biophysica Acta 953:48-60 (1988); Aarnes et al., Phytochemistry 13:2717-2724 (1974); Lea et al., FEBS Letters 98:165-168 (1979); Matthews et al., Canadian Journal of Botany 57:299-304 (1979)). Homoserine dehydrogenase isoenzymes have been reported to differ with respect to sensitivity to threonine-mediated feedback inhibition. Both sensitive and insensitive forms have been reported from maize suspension cultures and seedlings (Miflin et al., Nitrogen Assimilation of Plants 335 (1979); Bryan, The Biochemistry of Plants, Miflin (ed.), Academic Press, New York, 5:403 (1980)).

[0262] Dihydrodipicolinate synthase catalyses the first reported reaction committed to lysine biosynthesis. Dihydrodipicolinate synthase has been reported to be associated with the regulation of lysine biosynthesis. Dihydrodipicolinate synthase has also been reported to catalyze the condensation of pyruvate and aspartate semialdehyde into dihydrodipicolinate (Frish et al., Molecular and General Genetics 288:287-291 (1991); Wallsgrove et al., Phytochemistry 20:2651-2655 (1981); Dereppe et al., Plant Physiology 98:813-821 (1992); Ghislain et al., Planta 180:480-486 (1990)). Dihydrodipicolinate synthase clones have been reported from poplar, wheat, Arabidopsis and soybean. Clones from maize and wheat have been reported to exhibit homology (Azevedo et al., Phytochemistry 46:395-419 (1997)).

[0263] Lysine is reported to be a competitive inhibitor with respect to aspartate semialdehyde but not with respect to pyruvate (Kumpaisal et al., Plant Physiology 85:145-151 (1987)). Three amino acid residues within one region of dihydrodipicolinate synthase have been reported to be involved in the regulation of the feedback inhibition property of the maize dihydrodipicolinate synthase enzyme (Shaver et al., Proc. Natl. Acad. Sci. (U.S.A.) 93:1962-1966 (1996)).

[0264] Dihydrodipicolinate reductase and diaminopimelate decarboxylase, have also been reported to be involved in lysine biosynthesis.

[0265] Dihydrodipicolinate reductase catalyses the reduction of dihydrodipicolinic acid to tetrahydrodipicolinic acid. A partially purified dihydrodipicolinate reductase from maize kernel has been reported to be inhibited by compounds similar to dihydrodipicolinic acid (Tyagi et al., Plant Physiol. 73:687-691 (1983)).

[0266] Acyldiaminopimelate deacylase (also known as succinyl-diaminopimelate desuccinylase) converts tetrahydrodipicolinic acid to diaminopimelic acid (Lalonde, Mol. Microbiol. 11:273-280 (1994); Edwards, Mol. Gen. Genet. 247:189-198 (1995); Berges et al., J. Med. Chem. 29:89-95 (1986)).

[0267] An E. coli diaminopimelate epimerase has a reported molecular weight of 34 kD (Wiseman and Nichols, J. Biol. Chem. 259:8907-8914 (1984); Higgins et al., Eur. J. Biochem. 186:137-143 (1989); Richaud et al., J. Bacteriol. 169:1454-1459 (1987)). Diaminopimelate epimerase has been reported to exchange the alpha protons of the substrates DL- and LL-diaminopimelic acid in a two base reaction (Wiseman and Nichols, J. Biol. Chem. 259:8907-8914 (1984)).

[0268] Diaminopimelate decarboxylase (EC 4.1.1.20) catalyzes the last reported step in the lysine biosynthesis pathway and converts meso-diaminopimelic acid to lysine by a decarboxylation reaction. Diaminopimelate decarboxylase has been reported to be a chloroplast-localized enzyme (Mazelis et al., FEBS Letters 84:236-240 (1977)). Diaminopimelate decarboxylase has been reported in Lemna perpusilla, Vicia faba, and maize (Shimura et al., Biochem. Biophys. Acta 118:396-401 (1996); Mazelis et al., FEBS Letters 84:236-240 (1976); White et al., Biochem. J. 96:75-80 (1965)).

[0269] It has been reported, that in radiolabelled lysine fed plants, lysine is catabolized via saccharopine (Brandt, FEBS Letters 52:288-291 (1975); Arruda et al., Plant Physiol. 69:988-999 (1982)). The first two reported steps in lysine catabolism are catalyzed by the bifunctional enzyme, lysine-ketoglutarate reductase/saccharopine dehydrogenase (EC 1.5.1.8). Lysine-ketoglutarate reductase/saccharopine dehydrogenase has been reported to be a homodimer of 260 kD (Goncalves-Butruille et al., Plant Physiol. 110:765-771 (1996)). Lysine-ketoglutarate reductase and saccharopine dehydrogenase activities are reported to reside in adjacent domains and catalyze the sequential steps of the enzyme reaction. It has been reported that lysine-ketoglutarate reductase activity, in developing tobacco seeds, can be induced by treatment with exogenous lysine (Karchi et al., Proc. Natl. Acad. Sci. (U.S.A.) 91:2577-2581 (1994)).

[0270] 4. Arginine Pathway

[0271] Arginine serves multiple physiological functions during the growth and development of higher plants. One of the physiological functions of arginine is the maintenance of nitrogen metabolism. In addition to its role as an amino acid constituent of proteins, arginine also appears to play a role as a plant storage molecule for nitrogen (Thompson, The Biochem. of Plants, Vol. 5 Miflin (ed.), Academic Press, New York. (1980)). For example, in the protein-rich soybean cotyledon, arginine was found to contribute 18% of total protein nitrogen throughout development (Micallef et al., Plant Physiol. 90:624-630 (1989)), and levels as high as 40% of seed protein nitrogen have been reported (Vaneteen et al., Agric. Food Chem. 5:399-410 (1963)). Moreover, arginine comprises from 50% to 90% of the free amino acid pool found in developing soybean cotyledons (Micallef, et al., Plant Physiol. 90:624-630 (1989)), developing pea cotyledons (Deruiter et al., Plant Physiol. 73:525-528 (1983)), cotton seeds (Capdevila et al., Plant Physiol. 59:268-273 (1977)), fruit trees (Oland, Plant Physiol. 12:594-646 (1959)), grape vines (Kliewer et al., Am. J. Enol. Vitic. 25:111-118 (1974)), and flower bulbs (Boutin, Eur. J. Biochem. 127:237-243 (1982)). The role of arginine as a nitrogen transport molecule in plants has also been reported (Oland, Physiol. Plant 12:594-646 (1959).

[0272] In addition to maintaining nitrogen levels, arginine metabolism is also associated with the synthesis of secondary metabolites in plants (Beevers, Nitrogen Metabol. in Plants, Edward Arnold, London. p. 62 (1976)). For example, the diamine, putrescine, and the polyamines, spermidine and spermine, are generated from the catabolism of arginine or ornithine, which itself is an intermediate of arginine biosynthesis (Goodwin et al., Intro. to Plant Biochem. 2^{nd} edition. Pergamon Press, Oxford (1983)). A role for polyamines in such processes as stress tolerance, cell division, and organogenesis has been reported based on correlations between polyamine levels and the plant's physiological state (Walden et al., Plant Physiol. 113:1009-1013 (1997)). Ornithine is also involved in the synthesis of alkaloids (Goodwin et al., Introduction to Plant Biochem. 2^{nd} ed., Pergamon Press, Oxford (1983). In addition, another intermediate, carbamoyl phosphate, contributes to the de novo synthesis of pyrimidine nucleotides, which are required for DNA synthesis (Jones, Annu. Rev. Biochem. 49:253-279 (1980); Ross, The Biochem. of Plants, Vol. 6, Protein and Nucleic Acids, Marcus (ed.), Academic Press, New York, p. 169-205. (1981)).

[0273] Arginine is derived from glutamate via a series of reactions that are common to the non-enteric bacteria, fungi, yeast, green algae, and higher plants reported to date (Thompson, The Biochem. of Plants, Vol. 5, Miflin (ed.) Academic Press, New York, p. 375 (1980); McKay et al., Plant Sci. Letters 9:189-193 (1977)). In plants, ¹⁴C-labeling studies have provided evidence for a role for glutamate as the precursor for arginine biosynthesis (McConnell, Can. J. Biochem. Physiol. 37:933-936 (1959)); Morris et al., Plant Physiol. 59:684-687 (1977)). The arginine biosynthetic pathway can be divided into two main sets of enzymatic reactions: (1) those reactions which convert glutamate to ornithine and (2) those reactions which convert ornithine to arginine.

[0274] Glutamate is converted to ornithine via a series of reactions involving acetylated intermediates. The sequence of intermediates is as follows (in order): glutamate, N-acetylglutamate, N-acetylglutamate 5-phosphate, N-acetylglutamate 5-semialdehyde, N-acetylornithine, and ornithine (Bryan, The Biochem. of Plants, Vol. 16, Miflin and Lea (eds.) Academic Press, New York. p. 186-187 (1990)). Enzymes which catalyze these conversions are as follows (respectively): acetyl-CoA:glutamate N-acetyltransferase (EC 2.3.1.1), N-acetylglutamate kinase (EC 2.7.2.8), N-acetylglutamate semialdehyde oxidoreductase (EC 1.2.1.38), N-acetylornithine aminotransferase (EC 2.6.1.11), and acetylornithine deacetylase (EC 3.5.1.16) (Gamble et al., J. Biol. Chem. 248:610-618 (1973); Weiss et al., J. Biol. Chem. 248:5403-5408 (1973); O'Neal et al., Biochem. Biophys. Res. Commun. 31:322-327 (1968); Gamborg et al., Exp. Cell Res. 50:151-158 (1968); Gamborg., Plant Physiol. 45:72-375 (1970); Lowry et al., J. Biol. Chem. 193:265-275 (1951)). In addition, the enzyme acetylornithine: glutamate N-acetyltransferase (EC 2.3.1.35) is also involved in the generation of both N-acetylglutamate and ornithine via transfer of the acetyl group from N-acetylornithine to glutamate (Bryan, The Biochem. of Plants, Vol. 16, Miflin and Lea (ed.) Academic Press, New York, p. 186-187 (1990)).

[0275] Ornithine is converted to arginine via three enzymatic reactions (Bryan, The Biochem. of Plants, Vol. 16, Miflin and Lea (ed.) Academic Press, New York, p. 186-187 (1990)). The first reported reaction is catalyzed by ornithine carbamoyltransferase (EC 2.1.3.3), and it generates citrulline from the substrates, ornithine and carbamoyl phosphate. Carbamoyl phosphate for this reaction can be generated by the enzyme, carbamoyl phosphate synthetase (EC 6.3.5.5), which uses glutamine, carbon dioxide, and ATP as a substrate (Kolloffel et al., Plant Physiol. 69:143-145 (1982)).

[0276] The second reported reaction generates argininosuccinate from citrulline and aspartate (with ATP as an energy donor) and is catalyzed by argininosuccinate synthetase (EC 6.3.4.5). Argininosuccinate is then catabolized to arginine and fumarate by the enzyme, argininosuccinate lyase (EC 4.3.2.1) (Davis, Advances in Enzymol., Vol. 16, Meister (ed.), John Wiley & Sons, New York, p. 247-312; Micallef et al., Plant Physiol. 90:631-634 (1989); Thompson, The Biochem. of Plants, Vol. 5 Miflin (ed) Academic Press, London, p. 375-402 (1980)).

[0277] Catabolic enzymes catalyze reactions leading to the recycling of the nitrogen bound by arginine. It has been reported that the levels of arginine catabolic enzymes are significantly elevated during seed germination, and that arginine serves as an important nitrogen source for this process (DeRuiter, Ph.D. Thesis. University of Utrecht (1984); DeRuiter et al., Plant Physiol. 70:313 (1982); DeRuiter et al., Plant Physiol. 73:523 (1983).

[0278] Enzymes which catalyze the degradation of arginine in plants include arginase (EC 3.5.3.1), arginine decarboxylase (EC 4.1.1.19), and arginine deiminase (EC 3.5.3.6). Arginase converts arginine to ornithine and urea. Ornithine and urea catabolites can be further metabolized to yield polyamines, alkaloids and ammonia (Kang et al., Plant Physiol. 93:1230-1234 (1990)). Arginine decarboxylase, converts arginine to agmatine, which can then be further processed to form putrescine and polyamines (Borrell et al., Plant Physiol. 109:771-776 (1995); Tabor et al., Microbiol. Rev. 49:81-99 (1985); Pegg, Biochem. J. 234:249-262 (1986)).

[0279] Arginine deiminase converts arginine to citrulline and generates ammonia. It has been reported that this activity enables plant cells to utilize arginine as an endogenous nitrogen source (Ludwig, Plant Physiol. 101:429-434 (1993)).

[0280] In plants, arginine synthesis is primarily localized to the plastids and the cytosol. Arginine catabolism is primarily located in the mitochondria (Shargool et al., Phytochem. 27:1571-1574 (1988)). It has been reported that such compartmentalization of enzymes enables a cell to sustain ornithine levels destined for arginine biosynthesis physically separated from the catabolically derived ornithine which is earmarked for glutamate and arginine generation (Thompson, The Biochem. of Plants, Vol. 5, Miflin (ed.), Academic Press, London, p. 375-402 (1980). An enzyme that further metabolizes ornithine into glutamate, ornithine aminotransferase, is a mitochondrial enzyme whose levels increase during seed germination (Taylor et al., Biochem. Biophys. Res. Commun. 101:1281-1289 (1981); McKay, Ph.D. Thesis, University of Saskatchewan (1980)).

[0281] Localization studies have been reported for arginine biosynthetic pathway enzymes using both soybean cells (protoplasts) and pea leaf tissue cells (Jain et al., Plant Sci. 51:17-20 (1987); Taylor et al., Biochem. Biophys. Res. Commun. 101:1281 (1981); Shargool et al., Can. J. Biochem. 56:273 (1978)). Based on these studies, the following enzymes were localized in the plastids: acetylornithine:glutamate N-acetyltransferase, N-acetylornithine aminotransferase, ornithine carbamoyltransferase, and carbamoyl phosphate synthetase. Cytosolic locations have been reported for acetyl-CoA:glutamate N-acetyltransferase, N-acetylglutamate kinase, argininosuccinate synthetase, and argininosuccinate lyase (Jain et al., Plant Sci. 51:17-20 (1987); Taylor et al., Biochem. Biophys. Res. Commun. 101:1281 (1981); Shargool et al., Can. J. Biochem. 56:273 (1978); DeRuiter, Ph.D. Thesis, University of Utrecht (1984)). Arginase has been reported to exist in the mitochondria of several plants, including broad bean, pea, jackbean, and soybean (Kolloffel et al., Plant Physiol. 55:507 (1975); Taylor et al., Biochem. Biophys. Res. Commun. 101:1281 (1981); Downum et al., Plant Physiol. 73:963 (1983)). Studies using oat leaves have reported that arginine decarboxylase is localized in the plastids (chloroplasts) (Borrell et al., Plant Physiol. 109:771-776 (1995)). It has also been reported that arginine catabolism via arginine iminohydrolase occurs in the chloroplasts of Arabidopsis leaves (Ludwig, Plant Physiol. 101:429-434 (1993)).

[0282] The first reported step in the synthesis of arginine is an acetylation of glutamate. This reaction can be catalyzed by either of two enzymes, acetyl-CoA:glutamate N-acetyltransferase (EC 2.3.1.1) or acetylornithine:glutamate N-acetyltransferase (EC 2.3.1.35) (McKay et al., Plant Sci. Letters 9:189-193 (1977); Morris et al., Plant Physiol. 55:960-967 (1975); Morris et al., Plant Physiol. 59:684-687 (1977)). In soybean cell cultures acetylornithine:glutamate N-acetyltransferase is a reported rate-limiting enzyme of ornithine biosynthesis and simultaneously generates ornithine and acetylglutamate from acetylornithine and glutamate. Acetylornithine:glutamate N-acetyltransferase has been reported to be associated with the recycling of acetyl groups in the arginine pathway (Shargool et al., Plant Physiol. 78:796-798 (1985); Shargool et al., Plant Physiol. 78:796-798 (1985); Shargool et al., Phytochem. 27:1571-1574 (1988)). Acetylornithine:glutamate N-acetyltransferase activity has been reported to be common to organisms, with the exception of the Enterobacteriaceae and the archeon Sulfolobus solfataricus, which utilize acetyl ornithase (EC 3.5.1.16) (Shargool et al., Phytochem. 27:1571-1574 (1988); Cunin et al., Microbiol. Rev. 50:314-352 (1986); Van de Casteele et al., J. General Microbiol. 136:1177-1183 (1990)). Acetylglutamate synthesis acetyl-CoA:glutamate N-acetyltransferase has been reported to serve an anapleurotic function in plants by supplementing the activity of the acetylornithine-utilizing acetyltransferase.

[0283] Biochemical studies of acetyl-CoA:glutamate N-acetyltransferase (EC 2.3.1.1) and acetylornithine:glutamate N-acetyltransferase (2.3.1.35) from extracts of plant sources and the green alga, Chlorella vulgaris, have reported that the anapleurotic enzyme is inhibited by arginine and that acetylornithine:glutamate N-acetyltransferase is insensitive to the pathway end-product (McKay, Ph.D. Thesis, University of Saskatchewan (1980); Clayton et al., Plant Physiol. 59:684-687 (1977); Clayton et al., Plant Physiol. 55:960-967 (1975)). Kinetic studies of acetyl-CoA:glutamate N-acetyltransferase and acetylornithine:glutamate N-acetyltransferase activities in extracts of sugar beet leaves reported Kₘ values of 2.5 and 0.025 mM for acetyl-CoA and acetylornithine, respectively (Clayton et al., Plant Physiol. 59:684-687 (1977)). Corresponding Kₘ values from Chlorella extracts were found to be 3.2 and 0.2 mM, respectively (Clayton et al., Plant Physiol. 55:960-967 (1975)). In sugar beet extracts, the pH optimum for the acetyl-CoA:glutamate N-acetyltransferase activity was reported to be pH 7.2, while that of the acetylornithine-dependent acetyltransferase was reported to be pH 8.3 (Clayton et al., Plant Physiol. 59:684-687 (1977)). The nucleotide sequences of several microbial genes for these two acetyltransferases have been reported (GenBank database, File Release No. 104, National Center for Biotechnology Information, National Library of Medicine, 38A, 8N805, 8600 Rockville Pike, Bethesda, Md.).

[0284] The next reported step of the arginine biosynthetic pathway is the phosphorylation of N-acetylglutamate to form N-acetylglutamate 5-phosphate. ATP serves as the phosphoyl donor in this reaction, which is catalyzed by N-acetylglutamate kinase (EC 2.7.2.8). N-Acetylglutamate kinase has been purified to homogeneity from pea cotyledon (McKay et al., Biochem. J. 195:71-81 (1981)). N-Acetylglutamate kinase has been reported to be oligomeric in nature and composed of two different subunits, with molecular weights of 43 and 53 kDa. N-Acetylglutamate kinase can exist as a dimer or a tetramer, each made up of equal numbers of the two subunits. N-Acetylglutamate kinase exhibits a reported negative cooperativity with respect to acetylornithine and two Kₘ values of 1.9 and 6.2 mM. The reported Kₘ value for ATP was 1.7 mM. It was also reported that this enzyme is inhibited by arginine. In addition, it was reported that this inhibition is relieved by N-acetylglutamate, which can function as a activator (McKay et al., Biochem. J. 195:71-81 (1981); McKay, Ph.D. Thesis, University of Saskatchewan (1980)). Inhibition of N-acetylglutamate kinase activity by arginine was also reported from studies of extracts of the green alga, Chlorella vulgaris (Clayton et al., Plant Physiol. 55:960-967 (1975)). It has also been reported that the N-acetylglutamate kinase reaction represents a key regulatory point in the pathway of arginine biosynthesis in plants (McKay et al., Biochem. J. 195:71-81 (1981); Shargool et al., Phytochem. 27:1571-1574 (1988)). The nucleotide sequences for microbial N-acetylglutamate kinase genes have been reported (GenBank database, File Release No. 104, National Center for Biotechnology Information, National Library of Medicine, 38A, 8N805, 8600 Rockville Pike, Bethesda, Md.).

[0285] In the next reported step of arginine biosynthesis, N-acetylglutamate 5-phosphate is converted to N-acetylglutamate 5-semialdehyde via a reaction catalyzed by N-acetylglutamate 5-semialdehyde oxidoreductase (EC 1.2.1.38). NADPH serves as the reducing agent for this reaction. The semialdehyde product of this reaction is then converted to N-acetylornithine by the action of N-acetylornithine aminotransferase (EC 2.6.1.11). In this reaction, glutamate serves as the amino donor and is converted to α-ketoglutarate. A 341-bp sequence representing the 5′ partial sequence of a putative cDNA clone (EST) of the N-acetylornithine aminotransferase gene in Arabidopsis thaliana has been reported (GenBank Accession No. Z97344, Desprez et al.).

[0286] The next reported intermediate generated in the arginine biosynthetic pathway is ornithine, and it can be generated via two different reactions. One reaction involves acetyltransferase (EC 2.3.1.35). In the acetyltransferase reaction, an acetyl group of N-acetylornithine is transferred to glutamate, resulting in ornithine. The second reaction which generates ornithine is catalyzed by acetylornithine deacetylase (EC 3.5.1.16). In addition to generating ornithine, this reaction also releases acetate. Acetylornithine deacetylase is reported to be required as a means to complement the initial anapleurotic reaction catalyzed by acetyl-CoA:glutamate acetyltransferase (i.e., when acetyl groups are not recycled in the pathway). A subset of nucleotide sequence from genomic DNA of Arabidopsis thaliana has been reported as the gene for acetylornithine deacetylase (GenBank Accession No. Z34670, Bevan et al.).

[0287] Ornithine can be converted to other metabolites besides arginine (e.g., putrescine). A conversion of ornithine to the next pathway intermediate, citrulline, represents the first reported commitment of flux to the arginine end-product. This reaction is catalyzed by ornithine carbamoyltransferase (EC 2.1.3.3) and, in addition to ornithine, involves a second substrate, carbamoyl phosphate. Ornithine carbamoyltransferase has been isolated from plant sources, including maize, wheat, barley, wild oat, oat, sugar beet, soybean, and sicklepod (Acaster et al., J. Experimental Bot. 40:1121-1125 (1989)).

[0288] Acaster et al. have reported that the Kₘ values for ornithine ranged from 0.3 mM to 3.0 mM, and that the Kₘ values for carbamoyl phosphate ranged from 0.11 mM to 0.55 mM (Acaster et al., J. Experimental Bot. 40:1121-1125 (1989)). Reported molecular weights for ornithine carbamoyltransferase ranged from 148 to 167 kDa, and the subunit molecular weight for the enzyme from wild oat was reported as 38 kDa (Acaster et al., J. Experimental Bot. 40:1121-1125 (1989)). Ornithine carbamoyltransferase has also been isolated and characterized from the chloroplasts of leaf cells from Pisum sativum and compared with the enzyme partially purified from seedling shoots from this same plant species (DeRuiter et al., Plant Physiol. 77:695-699 (1985)). It was reported on the basis of this biochemical comparison that these tissues share a common form of ornithine carbamoyltransferase, with an approximate molecular weight of 77.6 kDa, a pH optimum of pH 8.3, and the following Kₘ values for substrates: ornithine, 1.2 mM; and carbamoyl phosphate, 0.2 mM.

[0289] Two isoenzymes of ornithine carbamoyltransferase with distinct biochemical and kinetic properties have been reported in sugarcane, pea seedlings, black alder root nodules, and apple leaves (Glenn et al., Plant Physiol. 60:122-126 (1977); Eid et al., Phytochem. 13:99-102 (1974); Martin et al., Acad. Sci. Paris Ser. 3:557-559 (1982); Spencer et al., Plant Physiol. 54:382-385 (1974)). Isolation and characterization of a cDNA encoding pea ornithine carbamoyltransferase has been reported (Williamson et al., Plant Mol. Biol. 31:1087-1092 (1996)). Southern blot analysis was utilized to detect the presence of multiple ornithine carbamoyltransferase genes in Pisum sativum. It has also been reported that the multiple isoenzymes of ornithine carbamoyltransferase in plants may serve different metabolic functions (Glenn et al., Plant Physiol. 60:122-126 (1977); Eid et al., Phytochem. 13:99-102 (1974)). The catabolic role of this enzyme in chloroplasts of Arabidopsis thaliana has been reviewed in Ludwig (Plant Physiol. 101:429-434 (1993)).

[0290] In addition to a reported gene sequence from pea, a cDNA sequence of ornithine carbamoyltransferase from Arabidopsis thaliana (GenBank Accession No. AJ002524, Quesada et al.), Medicago truncatula (GenBank Accession No. AA660661, Covitz et al.) and castor bean (van de Loo et al. Plant Physiol. 108:1141-1150 (1995)) have been reported.

[0291] Carbamoyl phosphate used in the ornithine carbamoyltransferase reaction is predominantly generated from glutamine, carbon dioxide, and ATP by the enzyme carbamoyl phosphate synthetase (EC 6.3.5.5). Carbamoyl phosphate synthetase also serves as a substrate in the pathway leading to de novo synthesis of pyrimidines (Jones, Annual Rev. Biochem. 49:253-279 (1980); Ross, The Biochem. of Plants, Vol. 6, Protein and Nucleic Acids, Marcus (ed.) Academic Press, New York, p. 169-205 (1981); Lovatt et al., Plant Physiol. 64:562-579 (1979); Mazus et al., Phytochem. 11:77-82 (1972)). The first step is catalyzed by aspartate carbamoyltransferase (EC 2.1.3.2), which has been reported to be localized to the chloroplasts in four plant species (Shibata et al., Plant Physiol. 80:126-129 (1986)). It has been reported that carbamoyl phosphate synthetase activity is feed back inhibited by pyrimidine nucleosides (e.g., UMP) and that this inhibition is relieved by ornithine (O'Neal et al., Biochem. Biophys. Res. Commun. 31:322-327 (1968)).

[0292] In contrast to most animal and fungi, which possess separate carbamoyl phosphate synthetase enzymes devoted to arginine and pyrimidine biosynthetic pathways, higher plants have one reported enzyme that is shared by both pathways (Makoff et al., Microbiol. Rev. (1978) 42:307-328; Rainer, Adv. Enzymol. Relat. Areas Mol. Biol. (1973) 39:1-90; O'Neal et al., Plant Physiol. 57:23-28 (1976); Ong et al., Biochem. J. 129:583-593 (1972)). It has been reported that in plants, carbamoyl phosphate synthetase is a regulatory enzyme that has a role in the metabolism of glutamine during seed development (O'Neal et al., Plant Physiol. 57:23-28 (1976); Ong et al., Biochem. J. 129:583-593 (1972); Kolloffel et al., Plant Physiol. 69:143-145 (1982)). Of note are the following findings: (1) arginine accumulates to a large degree in developing cotyledons; (2) nutrients supplied to the cotyledons are rich in glutamine; and (3) carbamoyl phosphate synthetase levels are 10-fold higher during early seed development than during germination (Flinn et al., Ann. Bot. 32:479-495 (1968); Lea et al., J. Exp. Bot. 30:529-537 (1979); Lewis et al., J. Exp. Bot 24:596-606 (1973); Millerd et al., Aust. J. Plant Physiol. 2:51-59 (1975); Pate et al., The Physiol. of the Garden Pea, Sutcliffe and Pate (eds.), Academic Press, London, p. 431-468 (1977); Kolloffel et al., Plant Physiol. 69:143-145 (1982)). Metabolic flux to arginine is also affected by the activity of ornithine carbamoyltransferase, since it is a determinant of the amount of carbamoyl phosphate that is committed to arginine biosynthesis as opposed to pyrimidine biosynthesis (Legrain et al., Eur. J. Biochem. 247:1046-1055 (1997)).

[0293] The reported penultimate reaction in the arginine biosynthetic pathway is catalyzed by argininosuccinate synthetase (EC 6.3.4.5). Argininosuccinate synthetase catalyzes the combination of citrulline and aspartate to form argininosuccinate using energy supplied by the conversion of ATP to AMP and PPi. Characterization of argininosuccinate synthetase from yeast and mammals reveals homotetramers with a subunit size of around 46 kDa (Van Vilet et al., Gene 95:99-104 (1990)). Pea cotyledons have been reported to possess high levels of argininosuccinate synthetase (Shargool et al., Canadian J. of Biochem. 47:467-475 (1969)). A regulatory role of argininosuccinate synthetase has been reported in that it is regulated by energy charge with arginine serving as a modifier of this regulation (Shargool, FEBS Letters 33:348 (1973)).

[0294] Argininosuccinate lyase (EC 4.3.2.1) catalyzes the final reported step in the biosynthetic pathway. Argininosuccinate lyase catalyzes the generation of arginine and fumarate from the catabolism of argininosuccinate (Davidson et al., Nature 169:313 (1952); Walker et al., J. Biol. Chem. 203:143 (1953); Buraczewski et al., Bull. Acad. Polon. Sci. Ser. Sci. Biol. 8:93 (1960); Rosenthal et al., Plant Physiol. (suppl.):xi (1966)). Argininosuccinate lyase was partially purified and characterized from cotyledons of germinating pea seeds (Shargool et al., Canadian J. Biochem. 46:393-399 (1968)). The pH optimum of argininosuccinate lyase was reported to be pH 7.9 and the Kₘ value for argininosuccinate was 0.2 mM. Studies of soybean cell cultures reported that argininosuccinate lyase activity declines after about 24 hours of growth (Shargool, Plant Physiol. 52:68-71 (1973)). The presence of a specific metal-dependent protease was reported to be responsible for the loss of argininosuccinate lyase activity in soybean cell cultures (Shargool, Plant Physiol. 55:632-635 (1975)). Argininosuccinate lyase has been reported as a regulatory step in the arginine pathway. An Arabidopsis thaliana cDNA encoding for argininosuccinate lyase has been reported (GenBank Accession No. Z97558, Hansen et al.).

[0295] Enzymes which catabolize arginine have been reported to be associated with nitrogen storage function in plants. Arginase (EC 3.5.3.1) catalyzes the breakdown of arginine into urea and ornithine. Levels of arginase activity increase in soybean axes during germination (Kang et al., Plant Physiol. 93:1230-1234 (1990)). It has been reported that arginase activities increase 10-fold in the seedlings of Arabidopsis thaliana during the first 6 days after germination (Zonia et al., Plant Physiol. 107:1097-1103 (1995)). The reported mole percentage of arginine is high in Arabidopsis thaliana storage protein relative to an “average” protein (Krumpelman et al., Plant Physiol. 107:1479-1480 (1995); VanEtten et al., J. Agric. Food Chem. 11:399-410 (1963); VanEtten et al., J. Agric. Food Chem. 11:399-410 (1963)).

[0296] Arginase has been purified to homogeneity from soybean axes and this enzyme was reported to be a 240 kDa multimeric protein with a subunit size of 60 kDa (Kang et al., Plant Physiol. 93:1230-1234 (1990)). Arginase has a reported optimum pH of 9.5, and a Kₘ value for arginine of 83 mM. A cDNA clone of the arginase gene from Arabidopsis thaliana has been reported (Krumpelman et al., Plant Physiol. 107:1479-1480 (1995)).

[0297] Another enzyme of arginine catabolism is arginine decarboxylase (EC 4.1.1.19), which catalyzes the conversion of arginine to agmatine. This reaction is the first reported step leading to the synthesis of polyamines from arginine (Tabor et al., Annu. Rev. Biochem. 53:749-790 (1984)). Plants can also utilize ornithine as a precursor to polyamine synthesis via the activity of ornithine decarboxylase. It has been reported that the arginine decarboxylase pathway is the predominant route for polyamine synthesis in non-dividing tissues, while the ornithine decarboxylase pathway is used predominantly in reproductive and dividing cells (Slocum et al., Arch. Biochem. Biophys. 235:283-303 (1984); Tabor et al., Annu. Rev. Biochem. 53:749-790 (1984); Evans et al., Annu. Rev. Plant Physiol. Plant Mol. Biol. 40:235-269 (1989); Pegg, Biochem. J. 234:249-262 (1986)). In addition, activity of arginine decarboxylase has been reported to increase during conditions of environmental stress, including salt stress and low oxygen levels (Flores et al., Cell. Mol. Biol. Plant Stress. eds. Key and Kosuge. A.R. Liss, Inc., New York. p. 93-114 (1985); Reggiani et al., Plant Cell Physiol. 31:489-494 (1990); Reggiani, Plant Cell Physiol. 35:1245-1249 (1994)). The existence of translational or post-transcriptional regulation of arginine decarboxylase activity in tomato plants and in osmotically stressed oat leaves spermine has been reported to inhibit processing of arginine decarboxylase to its mature form (Walden et al., Plant Physiol. 113:1009-1013 (1997); Borrell et al., Plant Physiol. 98:105-110 (1996); Rastogi et al., Plant Physiol. 103:829-834 (1993)).

[0298] Arginine decarboxylase has been isolated from numerous plant species, including oat seedlings, rice embryos, cucumber seedlings, and leaves of Vicia (Smith, Phytochem. 18:1447-1452 (1979); Vicente et al., Plant Cell Physiol. 22:1119-1123 (1981); Choudhuri et al., Agric. Biol. Chem. 46:739-743 (1982); Matsuda, Plant Cell Physiol. 25:523-530 (1984); Prasad et al., J. Biosci. 7:331-343 (1985)). Arginine decarboxylase purified from rice coleoptiles has been reported to have a molecular mass of 176 kDa and a subunit size of 63 kDa (Reggiani, Plant Cell Physiol. 35:1245-1249 (1994)). cDNA clones of arginine decarboxylase have also been reported for plant species, including oat, tomato, pea, and Arabidopsis thaliana (Bell et al., Mol. Gen. Genet. 224:431-436 (1990); Rastogi et al., J. Biol. Chem. 103:829-834 (1993); Perez-Amador et al., Plant Molecul. Biol. 28:997-1009 (1995); Malmberg et al., Plant Physiol. 111:S-21 (1996)).

[0299] Another enzyme which catalyzes the catabolism of arginine is arginine iminohydrolase (EC 3.5.3.6) which converts arginine to citrulline with the concomitant liberation of ammonia. It has been reported from studies on Arabidopsis thaliana that this chloroplastic enzyme represents the first reported step of a pathway (along with ornithine carbamoyltransferase and carbamate kinase) in which arginine is eventually broken down into ornithine, ammonium, bicarbonate, and ATP (Ludwig, Plant Physiol. 101:429-434 (1993)).

[0300] 5. Proline Pathway

[0301] The proline pathway was first characterized in microorganisms using a combination of techniques including isotope competition, auxotrophic mutants, accumulation of intermediates in mutants and absence of enzymes in mutants (Vogel, In: Amino Acid Metabolism, McElroy and Glass eds., John Hopkins Press, Baltimore, Md., pp. 335-336 (1955)). The proline biosynthesis pathway in plants is reported to be homologous to the proline biosynthesis pathway in bacteria (Bryan, In: The Biochemistry of Plants; A Comprehensive Treatise, Miflin and Lea, eds., Academic Press, San Diego, Vol. 16, pp. 161-165, (1990); Leisinger, In: Escherichia coli and Salmonella typhimurium: Cellular and Molecular Biology, Neidhardt, Ingraham, Low, Magasanik, Schaechter, and Umbarger, American Society of Microbiology, Washington, pp. 345-351 (1987)). Unlike the bacterial proline pathway, the plant proline pathway can synthesize proline from glutamate and ornithine.

[0302] Stress-induced proline accumulation in plants and the status of the characterized genes and proteins associated with the proline pathway of plants has been reviewed by Hare and Cress, Plant Growth Regul. 21:79-102 (1997). Free proline accumulates in plants in response to biotic and abiotic stresses. Free proline has been reported to play a role in osmotic adjustment, subcellular structure stabilization, and free radical scavenging. Free proline is also associated with multiple cellular functions including but not limited to: reducing cellular acidification, priming oxidative respiration, maintaining NAD(P)⁺/NAD(P)H ratios, maintaining redox potential, enhancing the oxidative pentose phosphate pathway, providing precursors for nucleotide biosynthesis and secondary metabolites, enhancing nitrogen fixation, and providing an energy source for ADP phosphorylation.

[0303] It has been reported from radioisotope labeling studies that glutamate is the primary precursor for proline biosynthesis in stressed plant cells (Hu et al., Proc. Natl. Acad. Sci. 89:9354-9358 (1992)), whereas ornithine is reported to be utilized as a proline precursor in other metabolic processes. It has also been reported that the utilization of glutamate or ornithine for proline biosynthesis in plants may be dependent on the nitrogen status, developmental stage, and cell type (Hare and Cress, Plant Growth Regul. 21:79-102 (1997)).

[0304] The rate of proline accumulation in plant tissues is reported to be regulated by the rate of biosynthesis and degradation of proline (Kiyosue et al., Plant Cell 8:1323-1335 (1996)). Proline degradation has been reported to contribute carbon to the tricarboxylic acid cycle in energy intensive processes of thermogenic plants, nitrogen fixation, and in plants recovering from stress. In addition, proline degradation has been reported to contribute to the regulation of intracellular redox potential (Hare and Cress, Plant Growth Regul 21:79-102 (1997)).

[0305] Osmolytes (such as alcohols, sugars, proline, and glycine betaine) have been reported to accumulate in plants subjected to environmental stress, such as water deprivation and salinization. Free proline has also been reported to accumulate in plants subjected to environmental stress, such as water deprivation and salinization (Deluaney and Verma, Plant J. 4:215-223 (1993); Heuer, In: Handbook of Plant and Crop Stress, Pessarakli ed., Marcel Dekker, New York, pp. 363-381 (1994)), high temperature (Kuo and Chen, J. Am. Soc. Hort. Sci. 111:746-750 (1986)), low temperature (Naidu et al., Phytochem 30:407-409 (1991)), heavy metal toxicity (Alia et al., J. Plant Physiol. 138:554-558 (1991); Bassi and Sharma, Ann. Bot. 72:151-154 (1993)), pathogen infection (Seitz and Hoechester, Life Sci. 3:1033-1037 (1964); Labanauskas et al., J. Am. Soc. Hort. Sci. 99:497-500 (1974); Meon et al., Physiol. Plant Pathol. 12:251-256 (1978)), anaerobiosis (Aloni and Rosenshtein, Physiol. Plant 56:513-517 (1982)), nutrient deficiency (Goring and Thein, Biochem. Physiol. Pflanzen. 174:9-16 (1979); Vaucheret et al., Plant J. 2:559-569 (1992)), atmospheric pollution (Anbazhagan et al., J. Plant Physiol. 133:122-123 (1988)), and UV-irradiation (Pardha Saradhi et al., Biophys. Res. Commun. 209:1-5 (1995)).

[0306] i. Proline Biosynthesis Pathway

[0307] The bacterial proline biosynthesis pathway is reported to initiate with the phosphorylation of glutamate by γ-glutamyl kinase (proB gene) to form γ-glutamyl phosphate. Glutamic-γ-semialdehyde dehydrogenase (proA gene) converts γ-glutamyl phosphate to glutamic-γ-semialdehyde. Glutamic-γ-semialdehyde spontaneously cyclizes to Δ¹-pyrroline-5-carboxylate which is reduced to proline via Δ¹-pyrroline-5-carboxylate reductase (proC gene) (Leisinger, In: Escherichia coli and Salmonella typhimurium: Cellular and Molecular Biology, Neidhardt, Ingraham, Low, Magasanik, Schaechter, and Umbarger eds., American Society of Microbiology, Washington, pp. 345-351 (1987)). A similar pathway for proline synthesis has been reported for plants.

[0308] The first reported committed reaction of the plant proline biosynthesis pathway is catalyzed by the bifunctional enzyme Δ¹-pyrroline-5-carboxylate synthase (also referred to as delta-1-pyrroline-5-carboxylate synthase (EC 2.7.2.11 and EC 1.2.1.41)). Δ¹-Pyrroline-5-carboxylate synthase has been characterized in Vigna (Hu et al., Proc. Natl. Acad. Sci. (U.S.A.) 89:9345-9358 (1992)), and Arabidopsis (Savoure et al., FEBS Lett 372:13-19 (1995); Yoshiba et al., Plant J 7:751-760 (1995)). The reported plant enzymes are bifunctional and have two domains, a proB-like domain which exhibits γ-glutamyl kinase (proB) activity and a proA-like domain which exhibits glutamic-γ-semialdehyde dehydrogenase (proA) activity. Thus, in the first catalytic step, glutamate is converted into γ-glutamyl phosphate in an ATP dependent reaction. In the second catalytic step, γ-glutamyl phosphate is converted into glutamic-γ-semialdehyde in a NADPH dependent reaction. These two catalytic steps are performed by two enzymes (proA and proB) in the bacterial proline biosynthesis pathway. The plant Δ¹-pyrroline-5-carboxylate synthase activity is reported to have glutamic-γ-semialdehyde dehydrogenase-dependent γ-glutamyl kinase activity and to be feedback inhibited by proline. Glutamic-γ-semialdehyde spontaneously cyclizes to yield Δ¹-pyrroline-5-carboxylate.

[0309] Δ¹-Pyrroline-5-carboxylate reductase (also referred to as delta-1-pyrroline-5-carboxylate reductase (EC 1.5.1.2)) catalyses the conversion of Δ¹-pyrroline-5-carboxylate to proline in a NADPH dependent reaction. cDNA clones encoding Δ¹-pyrroline-5-carboxylate reductase activity have been isolated and characterized from pea (Williamson and Slocum, Plant Physiol 100:1464-1470 (1992)), soybean (Delauney and Verma, Mol. Gen. Genet. 22:299-305 (1990)), and Arabidopsis (Verbuggen et al., Plant Physiol 103:771-781 (1993)). In Arabidopsis, Δ¹-pyrroline-5-carboxylate reductase is reported to be cytosolic and the mRNA level is reported to be higher in roots and ripening seeds than in green tissues. Salt treatment of Arabidopsis plants is reported to increase the Δ¹-pyrroline-5-carboxylate reductase mRNA level five-fold. Thus, it has been suggested that the Δ¹-pyrroline-5-carboxylate reductase gene promoter region is subject to osmoregulation (Verbuggen et al., Plant Physiol 103:771-781 (1993)).

[0310] Plants also synthesize proline from ornithine via the transamination of ornithine to glutamic-γ-semialdehyde by ornithine δ-aminotransferase (also referred to as delta-aminotransferase (EC 2.6.1.13)). The enzyme ornithine δ-aminotransferase spontaneously cyclizes ornithine in the presence of 2-oxoglutarate through the intermediate glutamic-γ-semialdehyde to yield Δ¹-pyrroline-5-carboxylate. Δ¹-Pyrroline-5-carboxylate is then converted to proline by Δ¹-pyrroline-5-carboxylate reductase. The cDNA encoding ornithine 8-aminotransferase has been isolated from Vigna (Delauney and Verma, J. Biol. Chem. 268:18673-18678 (1993)). Enzymatic studies have been performed on ornithine 8-aminotransferase (Taylor and Stewart, Biochem. Biophys. Res. Commun. 101:1281-1289 (1981)). The ornithine δ-aminotransferase cDNA is reported to contain a mitochondrial targeting sequence. It has also been reported that transamination of ornithine occurs primarily in the mitochondria.

[0311] ii. Proline Degradation Pathway

[0312] Proline levels in plants is regulated, in part, by the rate of proline degradation. Proline is oxidized to Δ¹-pyrroline-5-carboxylate in plant mitochondria via proline dehydrogenase (oxidase) and Δ¹-pyrroline-5-carboxylate is converted to glutamate by Δ¹-pyrroline-5-carboxylate dehydrogenase (Elthon and Stewart, Plant Physiol 67:780-784 (1981)). In plants, both proline dehydrogenase and Δ¹-pyrroline-5-carboxylate dehydrogenase are reported to be bound to the matrix side of the inner mitochondrial membrane. Proline oxidation is reported to be involved in the transfer of electrons into the initial portion of the electron transport chain (Hare and Cress, Plant Growth Regul. 21:79-102 (1997)).

[0313] Plant proline dehydrogenase (oxygenase) (EC 1.4.3) is reported to be an oxygen-dependent flavoprotein localized in mitochondria (Elthon and Stewart, Plant Physiol. 67:780-784 (1981)). Proline dehydrogenase (oxygenase) converts proline to Δ¹-pyrroline-5-carboxylate in the presence of oxygen and FAD. A cDNA encoding a proline dehydrogenase (oxidase) has been isolated and characterized from Arabidopsis (Kiysue et al., Plant Cell 8:1323-1335 (1996)). It has been reported that proline dehydrogenase mRNA and protein accumulate in plant tissues in response to rehydration after dehydration and when plant tissue is incubated in the presence of high levels of proline (Yoshiba et al., Plant J 7:751-760 (1995)). It has also been reported that proline induction of proline dehydrogenase (oxidase) is inhibited by salt stress (Peng et al., Mol. Gen. Genet. 253:334-341(1996)).

[0314] Plant mitochondria are reported to contain two isoenzymes of Δ¹-pyrroline-5-carboxylate dehydrogenase (EC 1.5.1.12) (Forlani et al., Planta 202:242-248 (1997)). One isoform is reported to oxidize Δ¹-pyrroline-5-carboxylate from proline and the other isoform is reported to oxidize Δ¹-pyrroline-5-carboxylate from ornithine. The later isoenzyme is reported to form a complex with the mitochondrial ornithine δ-aminotransferase, thus channeling the substrates to degradation (Elthon and Stewart, Plant Physiol. 70:567-572 (1982)). Both isozymes convert Δ¹-pyrroline-5-carboxylate into glutamate in the presence of NADP+. A cDNA for the Δ¹-pyrroline-5-carboxylate dehydrogenase gene from the basidiomycete Agaricus has been reported (Schaap et al., Appl. Environ. Microbiol. 63:57-62 (1997)).

[0315] 6. Glutamate/Glutamine and Aspartate/Asparagine Pathway

[0316] Primary nitrogen assimilation has been reviewed by Lam et al., Plant Cell 7:887-898 (1995); Brears and Coruzzi, Transgenic plants exhibiting enhanced nitrogen assimilation PCT WO 9509911. Nitrogen is often the rate-limiting element in plant growth and development. Agricultural crops often require supplementation with inorganic nitrogenous fertilizer to attain optimized crop yields. Since fertilizer is rapidly depleted from most soil types, it often has to be applied two or three times during the growing season. Nitrogenous fertilizers often account for 40% of the costs associated with crops such as corn and wheat.

[0317] Plants harvest nitrogen from their environment as inorganic compounds, namely nitrates and ammonia taken up from roots, and atmospheric nitrogen reduced to ammonia in nitrogen-fixing root nodules. Although small levels of ammonia and nitrate can be detected in vascular tissues (xylem and phloem), glutamine, glutamate and asparagine serve as predominant nitrogen-transport compounds and nitrogen donors in the biosynthesis of many plant compounds, including essentially all amino acids, nucleic acids, and other nitrogen-containing compounds, such as hormones and chlorophyll. Nitrogen may subsequently be channeled from glutamine and glutamate to aspartate or asparagine. The four nitrogen-transport amino acids generated by this pathway (glutamine, glutamate, aspartate, and asparagine) are the predominant amino acids found in most higher plants. In Arabidopsis thaliana, these amino acids represent 64% of the total amino acids found in a leaf extract. The amide amino acids glutamine and asparagine each carry an extra nitrogen atom in the amide group of their side chains and have been reported to play a role as nitrogen carriers in cellular metabolism.

[0318] It has been reported that asparagine is the predominant amino acid exported in phloem from leaves of dark-grown or dark-adapted plants. Glutamine is reported to be used primarily to transport assimilated nitrogen from roots to shoots. Glutamine and asparagine have other reported roles in plant metabolism besides being a nitrogen carrier. Glutamine is metabolically active in reactions that use an amide nitrogen atom. Asparagine is used for transport. Asparagine has not been reported to directly participate in nitrogen metabolism and is hydrolyzed to aspartate and ammonia by asparaginase (EC 3.5.1.1). Aspartate is a substrate utilized in the synthesis of proteins and amino acids.

[0319] Studies have reported that increased expression of the glutamate synthesizing enzymes correlates with increased storage protein metabolism (Osuji and Madu, Phytochemistry 39:495-503 (1995)). Illinois high protein maize lines (25% protein) show higher leaf glutamate dehydrogenase levels than those reported in Illinois low protein (5%) maize lines. Glutamine synthetase activity shows an inverse relationship between these two lines (Dembinski et al., Acta Physilogiae Plantarum 17:361-365 (1995)).

[0320] Inorganic nitrogen, in the form of nitrate, is taken up by plants and reduced to ammonia via the concerted actions of nitrate reductase (NR, EC 1.6.6.1) and nitrite reductase (NiR, EC 1.6.6.4). Atmospheric nitrogen can be reduced by the microbial enzyme nitrogenase (N₂ase, EC 1.18.6.1). Ammonia is then assimilated into glutamine and glutamate through the combined actions of glutamine synthetase (GS, EC 6.3.1.2) and ferredoxin-dependent glutamate synthase (Fd-GOGAT, EC 1.4.7.1) or NADH-dependent glutamate synthase (NADH-GOGAT, EC 1.4.1.14). Glutamate dehydrogenases (GDH; EC 1.4.1.2, EC 1.4.1.3, and EC 1.4.1.4) are reported to be the primary route of nitrogen assimilation in microorganisms under certain in vitro conditions. GDH in higher plants is reported to function largely in glutamate catabolism. Nitrogen may subsequently be channeled from glutamine and glutamate to aspartate by aspartate aminotransferase (AsAT; EC 2.6.1.1) or to asparagine by asparagine synthetase (AS; also referred to as asparagine synthase EC 6.3.5.4).

[0321] Primary nitrogen assimilation has been reviewed by Lam et al., Plant Cell 7:887-898 (1995) and Oaks, Can. J. Bot. 72:739-750 (1995). Light and metabolic status are two signals that govern the regulation of amide amino acid metabolism. Regulation by light of asparagine synthetase, glutamine synthetase and ferredoxin-glutamate synthase is an example of reciprocal gene regulation. Light up-regulates glutamine synthetase and ferredoxin dependent glutamate synthase expression and down-regulates asparagine synthetase expression.

[0322] Physiological changes in expression of these genes are reflected in corresponding changes in the amino acid profiles of Arabidopsis thaliana leaf extracts. For example, asparagine levels are high in the dark and glutamine levels are high in the light. During the light period, when photosynthesis occurs and carbon skeletons are abundant, nitrogen is assimilated and transported as glutamine. Levels of mRNA for genes associated with glutamate and glutamine synthesis are induced by both light and sucrose. Light represses the synthesis of asparagine, which accumulates in tissues of dark adapted plants. Levels of asparagine synthetase mRNA are induced in dark adapted plants. Induction of asparagine synthetase mRNA is repressed by light or high sucrose.

[0323] Under conditions of carbon limitation or nitrogen excess, plants activate genes associated with asparagine biosynthesis. Certain nitrogen assimilation gene promoters, including those of pea GS2 and AS, are reported to contain light responsive elements.

[0324] Nitrate and ammonia have been reported to regulate genes involved in the primary assimilation of nitrogen. In maize leaves GOGAT, nitrate reductase and nitrite reductase levels have been reported to respond to nitrate levels. In roots, there is up regulation of nitrate reductase, nitrite reductase, glutamine synthetase (both cytosolic and plastidic GS's), ferredoxin- and NADH-glutamate synthase in response to nitrate. Glutamine synthetase, ferredoxin-glutamate synthase, NADH glutamate synthase, glutamate dehydrogenase, and PEP carboxylase levels are up regulated in response to ammonia. Gowri et al., Plant Mol. Biol. 18:55-64 (1992), have reported that the production of nitrate reductase mRNA is not affected by cyclohexamide treatment and that the gene is turned on in response to nitrate levels.

[0325] Nitrogen metabolism enzymes play a role in nitrogen assimilation. Nitrogen assimilation takes place primarily in the chloroplast where most of the nitrate is converted to ammonia. Ammonia is in turn converted to glutamine and glutamate by the action of GS and GOGAT. Ammonia generated during the photorespiratory process or during the deamination of amino acids is reassimilated.

[0326] NADPH dependent glutamate synthase (EC 1.4.1.13) catalyzes the conversion of glutamine and 2-oxoglutarate to yield two molecules of glutamate. NADPH dependent glutamate synthase can use either NADH or NADPH as a coenzyme (Lea et al., In: Ammonia assimilation in higher plants: Nitrogen Metabolism of plants, Mengel and Pilbeam, eds., 153-186 (1992)). It has also been reported that the NADH-dependent form dominates in higher plant tissue. The NADPH-dependent form is found primarily in microbes and lower plants.

[0327] Properties and a general description of NADH dependent glutamate synthase have been reviewed by Lea, In: U.K. Plant Biochem, 273-306 (1997). NADH dependent glutamate synthase (EC 1.4.1.14) catalyzes conversion of glutamine and 2-oxoglutarate to two molecules of glutamate. In green leaves the activity of this NADH dependent glutamate synthase enzyme is lower than the ferredoxin-dependent glutamate synthase enzyme activity. NADH dependent glutamate synthase activity has also been reported in a variety of non-green tissues such as roots, cotyledons, and tissue cultured cells and this enzyme has been reported to play a role in the ammonia assimilation in nitrogen fixing nodules. This enzyme is a monomer and has a reported molecular weight in the region of 200-225 kDa.

[0328] Properties and a general description of ferredoxin dependent glutamate synthase (EC 1.4.7.1) have been reviewed by Lea, In: U.K Plant Biochem 273-306 (1997). This enzyme catalyzes the conversion of glutamine and 2-oxoglutarate to yield two molecules of glutamate. Ferredoxin dependent glutamate synthase was first reported in pea leaves, is an iron-sulfur flavoprotein and can represent up to 1% of the protein content of leaves. Ferredoxin dependent glutamate synthase is a monomeric protein with a molecular weight of 140-160 kDa. Tissue fractionation studies have shown that ferredoxin dependent glutamate synthase is localized in the chloroplast of the leaf. Activity of ferredoxin dependent glutamate synthase increases during leaf development in the light. In maize, the transcription level of ferredoxin dependent glutamate synthase has been reported to increase after illumination of etiolated leaves. Similar results were obtained in tobacco. In tomato, it has been reported that a similar response was mediated by phytochrome.

[0329] Aspartate aminotransferase has been reviewed by Lea, In: U.K. Plant Biochem. 273-306 (1997). Aspartate aminotransferase catalyzes the transfer of an amino group from the 2 position of glutamate, which generates aspartate and alpha-ketoglutarate. Glutamate is an amino donor for the reaction (Glutamate+Oxaloacetate←→2-Oxoglutarate+Asparate). Aspartate aminotransferase plays a role in the formation of aspartate required for the synthesis of the proteins and the aspartate family of amino acids. Additionally, aspartate aminotransferase has three other reported roles. The first role of aspartate aminotransferase is in the transfer of amino groups from glutamate via aspartate to asparagine in nitrogen fixing root nodules. 2-Oxoglutarate molecules are reported to cycle in a manner that collects additional amino groups in the glutamate synthase reaction. In addition, oxaloacetate is synthesized in a manner that is catalyzed by the action of PEP carboxylase. The second reported role of aspartate aminotransferase is in the malate-oxaloacetate shuttle, which transfers reducing power from mitochondria and chloroplasts to the cytoplasm via the enzyme malate dehydrogenase. Due to the inherent instablility of oxaloacetate, it is also transaminated to asparate to facilitate transport. The third role of aspartate aminotransferase is in the formation of oxaloacetate. In conjunction with the PEP carboxylase reaction in C4 plants, aspartate is transported from mesophyll cells to bundle sheath cells in NAD-ME type plants. Distinct isoenzymes of aspartate aminotransferase have been reported in the mitochondria, chloroplast, peroxisomes, and cytoplasm of higher plants and reports based on molecular analysis of this gene in plants have illustrated that this gene can be present as a multigene family.

[0330] Alanine aminotransferase (EC 2.6.1.2) has been reviewed by Lea, In: U.K. Plant Biochem., 273-306 (1997). Alanine aminotransferase catalyzes the transfer of the amino group from the 2 position of the amino acid to yield an oxo acid and amino acid. Glutamate is an amino donor for alanine aminotransferase reaction (Glutamate+Pyruvate←→2-Oxoglutarate+Alanine). Alanine aminotransferase liberates 2-oxoglutarate, which returns to the glutamate synthase cycle. Alanine aminotransferases have been detected in plants that can synthesize all amino acids found in plant proteins, excluding proline, when the corresponding 2-oxo acid precursor is present. Nitrogen can be distributed from glutamate, via asparate and alanine to all such amino acids. Reversibility of the reaction has been reported to allow for sudden changes in demand for key amino acids.

[0331] Glutamine synthetase (GS, EC 6.3.1.2) has been reviewed by Lea, In: U.K. Plant Biochem. 273-306 (1997). It has been reported that in higher plants that glutamine synthetase (GS) is a port of entry into amino acids. GS catalyzes an ATP-dependent conversion of glutamate into glutamine (Glutamate+Ammonia+ATP→Glutamine+AMP+Pi). GS is an octameric protein with a native molecular weight of 350-400 kDa and has an affinity for ammonia. GS isozymes have been reported in Phaseolus vulgaris, and Pisum sativum. Five genes coding for GS have been reported in Phaseolus vulgaris. Gln-alpha, gln-beta, and gln-gamma genes encode cytosolic alpha, beta, and gamma polypeptides, which are located in the cytoplasm. A gln-delta gene that encodes a chloroplastic form and a gln-epsilon gene have also been reported. Chloroplastic polypeptides assemble into octamers of identical subunits. Cytosolic polypeptides assemble into a range of isoenzymes containing various proportions of alpha, beta, and gamma polypeptides. It has been reported that Pisum Sativum has three cytosolic genes and one chloroplastic GS gene.

[0332] Properties of glutamate dehydrogenase (GDH; EC 1.4.1.2, EC 1.4.1.3, and EC 1.4.1.4) has been reviewed by Lam et al., Plant Cell 7:887-898 (1995). In vitro studies have reported that a plant GDH can catalyze two distinct biochemical reactions: the amination of alpha-ketoglutarate and the deamination of glutamate. The majority of higher plant GDH enzymes characterized to date have a high Kₘ for ammonia and have been reported to play a catabolic role. In some cases, an ammonia assimilation role for GDH has been reported. Another reported role for GDH is in the ammonia detoxification process. It has also been reported that GDH assimilates a portion of the photorespiratory ammonia necessary to generate catalytic amounts of glutamate for the GS/GOGAT cycle.

[0333] Gamma glutamylcyclotransferase (E.C. 2.3.2.4) catalyzes the conversion of epsilon-(L-gamma-glutamyl)-L-lysine to lysine and 5-oxo-L-proline (Fink and Folk, Mol. Cell. Biochem. 38:59-67 (1981); Steinkamp et al., Fed. Rep. Ger. Physiol. Plant. 69:499-503 (1987)).

[0334] 5-Oxoprolinase catalyzes the ATP-dependent decyclization of 5-oxo-L-proline to L-glutamate (Li et al., J. Biol. Chem. 264:3096-3101 (1989)). 5-Oxoproloinase in tobacco grown with glutathione as the sole sulfur source catalyzes the conversion of 5-oxoproline to glutarnic acid (Rennenberg et al., Z. Naturforsch 35:708-711 (1980)).

[0335] Asparagine synthetase (AS, EC 6.3.5.4) has been reviewed by Lea, In: U.K. Plant Biochem, 273-306 (1997). Asparagine synthetase catalyzes the transfer of an amide group of glutamine to aspartate (Glutamine+Aspartate+ATP→Asparagine+Glutamate+ADP+Ppi). It has been reported that the cotyledons of germinating seeds are a source of asparagine synthetase activity. Asparagine synthetase has been studied in, for example, lupins and soybeans. Asparagine synthetase is also able to use ammonia as a substrate in maize roots. Asparagine synthetase also plays a physiological role in root nodules. Two classes of asparagine synthetase cDNAs, AS1 and AS2, have been reported from pea. These classes encode homologues that are distinct polypeptides. AS1 and AS2 have molecular weights of 66.3 kDa and 65.6 kDa respectively. Additionally, glutamine binding sites were detected at the amino acid terminus of both AS1 and AS2. It has been reported that the level of the AS1 mRNA is increased in leaves of both etiolated seedlings and mature pea plants in the dark. Light repression of AS1 mRNA synthesis was reported to be phytochrome mediated. It has also been reported that both AS1 and AS2 mRNA accumulate in germinating cotyledons and nitrogen fixing nodules.

[0336] Glutaminase (EC 3.5.1.2) hydrolyzes glutamine to form glutamate (Voet and Voet, In: Biochemistry, John Wiley & Sons, New York, 690-691 (1990); Duran et al., Microbiol. 141:2883-2889 (1995)). It has been reported that glutaminase participates in a glutamine cycle in which it degrades glutamine that can be resynthesized by glutamine synthetase. Glutaminase activity has been further reported by Bigot and Boucaud, Phytochemistry 31:4071-4074 (1992).

[0337] 1-Pyrroline-5-carboxylate dehydrogenase (EC 1.5.1.12) catalyzes the first two reported steps in the biosynthesis of proline in plants (Zhang et al., J. Biol. Chem. 270:20491-20496 (1995). 1-Pyrroline-5-carboxlyate dehydrogenase catalyzes the conversion of proline to glutamic acid (Yoshiba et al., Plant Cell Physiol. 38:1095-1102 (1997)). Yoshiba et al., Plant Cell Physiol. 38:1095-1102, have also reported that such metabolism of proline is inhibited when proline accumulates during dehydration and is activated when rehydration occurs.

[0338] NADP⁺ dependent isocitrate dehydrogenase (ICDH, EC 1.1.1.42) has been reviewed by Fieuw et al., Plant Physiol. 107:905-913 (1995). NADP⁺ dependent isocitrate dehydrogenase catalyzes the reversible conversion of isocitrate to 2-oxoglutarate. Under in vitro conditions, the equilibrium of this reaction is dependent on the pH of the assay solution. For etiolated pea seedlings the optimal pH of the forward and reverse reactions were reported to be pH 8.4 and pH 6.0, respectively. NADP⁺ dependent isocitrate dehydrogenase is stable between pH 7.0 and pH 8.0. It has been reported that NADP⁺ dependent isocitrate dehydrogenase has been found in prokaryotes and located in different compartments of eukaryotes such as the cytosol, mitochondria, and peroxisomes. About 90% of NADP⁺ dependent isocitrate dehydrogenase activity is located in the cytosol, 10% is located in chloroplasts, less than 1% is present in the peroxisomes, and less than 1% is found in mitochondria NADP⁺ dependent isocitrate dehydrogenase exhibits a requirement for divalent metal ions such as Mn²⁺ or Mg²⁺.

[0339] In Escherichia coli, isocitrate dehydrogenase is reported to be a Krebs cycle enzyme, regulated via reversible phosphorylation, depending upon growth conditions. For Salmonella typhimurium and the protozoan Crithidia fasciculata, a regulation of isocitrate dehydrogenase by cellular ATP and 2-oxoglutatrate has been reported. In higher plants, NADP⁺ dependent isocitrate dehydrogenase is inhibited by glyoxylate and oxaloacetate and NADPH and 2-oxoglutarate. Citrate is a competitive inhibitor of NADP⁺ dependent isocitrate dehydrogenase activity. Additionally, it has been reported that the activity of NADP⁺ dependent NADP⁺ dependent isocitrate dehydrogenase may also be controlled by the intracellular NADPH/NADP⁺ ratio.

[0340] Glutamine has been reported to be a positive effector of isocitrate dehydrogenase. Similar to the protozoan and animal system NADP⁺ dependent isocitrate dehydrogenase of higher plants has also been reported to play a role in replenishing the cytosol with reducing power (i.e., NADPH), particularly during metabolic limitation of the pentose phosphate pathway. NADP⁺ dependent isocitrate dehydrogenase has also been reported to play a role in supplying carbon skeletons for NH₃ assimilation. 2-Oxoglutarate has been reported to function as a metabolite, linking nitrogen and carbon metabolism.

[0341] Glutamate decarboxylase (GAD, EC 4.1.1.15) has been reported by Baum et al., EMBO 15:2988-2996 (1996). Glutamate decarboxylase (GAD) catalyzes the decarboxylation of glutamate, yielding CO₂ and gamma-aminobutyrate (GABA) (Baum et al., EMBO 15:2988-2996 (1996)). GABA is a ubiquitous non-protein amino acid and neurotransmitter inhibitor in certain organisms. It has been reported that plants possess a form of GAD that binds calmodulin (CaM) (Arazi et al., Plant Physiol. 108:551-561 (1995)). Reported regulation of GAD by Ca²⁺/CaM in plants has been reported to reflect the requirement for rapid GAD modulation in response to external signals. GAD activity is reported to be stimulated by stresses such as hypoxia, temperature shock, water stress and mechanical manipulation. It has been further reported that GAD plays a role in plant development as GAD's expression in leaves, flowers, and germinating seeds is developmentally regulated by transcriptional and/or post-transcriptional processes.

[0342] Succinate-semialdehyde dehydrogenase (EC 1.2.1.24) catalyzes the irreversible reaction in which succinate-semialdehyde is oxidized to succinate. This process reduces one molecule of NAD. Most studies have concerned animal and microbial systems. Succinate-semialdehyde dehydrogenase activity in potato tuber has been reported by Narayan et al., Indian Arch. Biochem. Biophys. 275:469-477 (1989). Succinate-semialdehyde dehydrogenase has also been reported to have a native molecular weight of 145,000 kDa and under denaturing conditions has a polypeptide band of 35,000 kDa (SDS-Page). It has also been reported that succinate-semialdehyde dehydrogenase exhibits a specificity for succinate-semialdehyde and NAD and requires a thiol compound for maximal activity.

[0343] 4-Aminobutyrate (GABA) aminotransferase (EC 2.6.1.19) has been described by Givan, In: Aminotransferases in Higher Plants, eds. Stumpf and Conn, 329-355 (1980) and Brown et al., Plant Physiol. 115:1-5 (1997). 4-Aminobutyrate (GABA) aminotransferase catalyzes the reversible reaction of GABA and pyruvate to succinate-semialdehyde and alanine. It has been reported that peanut mitochondria 4-aminobutyrate (GABA) aminotransferase has a substrate preference for pyruvate which is about five times greater than that of oxoglutarate. A substrate preference of pyruvate over oxoglutarate was also reported in radish leaf extracts. Evidence for GABA-pyruvate and GABA-oxoglutarate has been reported. An oxoglutarate-dependent enzyme with an affinity for GABA has been reported. In root nodule tissue, GABA transamination has been reported to take place using 2-oxoglutarate as the amino acceptor. Use of 2-oxoglutarate has been reported to be associated with rhizobial bacteriod symbionts. A GABA transaminase isolated from mushroom was reported to be highly specific for 2-oxoglutarate. Delta-aminovalerate was an alternative donor substrate for mushroom for 2-oxoglutarate.

[0344] N-Acetylglucosamine kinase (EC 2.7.1.59) catalyzes the phosphorylation of N-acetylglucosamine (Allen and Walker, Biochem. J. 185:565-575 (1980)). It has been reported that N-acetylglucosamine kinase is a symmetrical dimer of mol. wt. 80,000. Allen and Walker, Biochem. J. 185:577-582 (1980), have reported that N-acetyl-D-glucosamine inhibits the phosphorylation of D-glucose.

[0345] D. Plant Hormones Pathways and Other Regulatory Molecules

[0346] 1. Cytokinin Pathway

[0347] Plant hormones, produced in response to genetic, environmental or chemical stimuli (Goldberg, Science 240:1460-1467 (1988); Letham, In: Phytohormones and Related Compounds—A Comprehensive Treatise, eds. Letham et al., Amsterdam, Elsevier North Holland. 1:205-263 (1978); von Sachs, Arb. Bot. Inst. Wurzburg 2:452-488 (1880)), play a role in controlling the growth, development and environmental responses of plants.

[0348] Cytokinins are a class of plant hormones with a structure resembling adenine. Cytokinins, in combination with auxin, promote cell division. Cytokinins are associated with many aspects of plant growth and development (Horgan, Advanced Plant Physiology, ed. Wilkins, Pitman, London:90-116 (1984); Skoog et al., Biochemical Actions of Hormones, ed. Litwack, Academic Press, London, Vol. VI:335-413 (1979)). Cytokinins have been reported in almost all higher plants as well as mosses, fungi, and bacteria. In addition to occurring in higher plants as free compounds, cytokinins may also occur as component nucleosides in tRNA of plants, animals, and microorganisms.

[0349] Kinetin, the first cytokinin to be discovered, was so named because of its ability to promote cytokinesis (cell division). Although kinetin is a natural compound, it is not made in plants, and is therefore usually considered a “synthetic” cytokinin. Two common forms of cytokinin in plants are zeatin and zeatin riboside (maize) (Letham, Life Sci. 2:569-573 (1963)). More than 200 known natural and synthetic cytokinins have been reported.

[0350] Several cytokinin related mutations have also been reported. For example, the ckr1 mutant of Arabidopsis is resistant to the cytokinin bezyladenine (Su and Howell, Plant Physiol. 99:1569-1574 (1992)). The Arabidopsis mutant amp1 has been reported to be a negative regulator of cytokinin biosynthesis (Chadbury et al., Plant J. 4:907-916 (1993)).

[0351] Cytokinin concentrations are highest in meristematic regions and areas of continuous growth potential such as roots, young leaves, developing fruits, and seeds (Arteca, Plant Growth Substances: Principles and Applications, eds. Chapman & Hall, New York (1996); Mauseth, Botany: An Introduction to Plant Biology, ed. Saunders, Philadelphia: 348-415 (1991); Raven et al., Biology of Plants, ed. Worth, New York: 545-572 (1992); Salisbury and Ross, Plant Physiology, ed. Wadsworth, Belmont, Calif.: 357-407, 531-548 (1992)).

[0352] It has been reported that the induced cytokinin response varies depending on the type of cytokinin and plant species (Davies, Plant Hormones: Physiology, Biochemistry and Molecular Biology, Kluwer, Dordrecht (1995); Mauseth, Botany: An Introduction to Plant Biology, Saunders, Philadelphia: 348-415 (1991); Raven et al., Biology of Plants, ed. Worth, New York: 545-572 (1992); Salisbury and Ross, Plant Physiology, ed. Wadsworth, Belmont, Calif.: 357-407, 531-548 (1992)). Elevated cytokinin levels are associated with the development of seeds in higher plants, and have been demonstrated to coincide with maximal mitotic activity in the endosperm of developing maize kernels, cereal grains, and fruits. Exogenous cytokinin application (via stem injection) has been shown to directly correlate with increased kernel yield in maize. In addition, plant cells transformed with the ipt gene from Agrobacterium tumefaciens showed increased growth corresponding to an increase in endogenous cytokinin levels upon induction of the enzyme. Cytokinins have been reported to confer thermotolerance in certain physiological processes such as plastid biogenesis and endosperm cell division (Cheikh and Jones, Plant Physiol. 106:45-51 (1994); Parthier, Biochem. Physiol Pflanz 174:173-214 (1979); Jones et al., Crop Science 25:830-834 (1985)).

[0353] Reviews of cytokinin metabolism, compartmentalization, conjugation and cytokinin metabolic enzymes have been presented by Jameson, Cytokinins, eds. Mok and Mok, Boca Raton, Fla., 113-128 (1994); Letham and Palni, Ann. Rev. Plant Physiol. 34:163-197 (1983); McGaw et al., In: Biosynthesis and metabolism of plant hormones, Soc. Exp. Biol. Seminar Series, eds. Crozier and Hillman, Cambridge University Press, Cambridge, Vol. 23, Chapter 5 (1984); McGaw and Horgan, Biol. Plant 27:180 (1985); McGaw et al., In: Plant Hormones: Physiology, Biochemistry and Molecular Biology, ed. Davies, Kluwer, Dordrecht, 98-117 (1995); Mok and Martin, Cytokinins, eds. Mok and Mok, Boca Raton, Fla., 129-137 (1994); Salisbury and Ross, Plant Physiology, Belmont, Calif.: ed. Wadsworth, 357-407, 531-548 (1992).

[0354] i. Biosynthesis of Cytokinins

[0355] Cytokinins are generally found in higher concentrations in meristematic regions and growing tissues. It has been reported that cytokinins are synthesized in the roots and translocated via the xylem to the meristematic regions and growing shoots of the plant. Although cytokinin biosynthesis in developed plants takes place mainly in roots (Engelbrecht, Biochem. Physiol. Pflanzen 163:335-343 (1972); Henson et al., J. Exp. Bot 27:1268-1278 (1976); Sossountzov et al., Planta 175:291-304 (1988); Van Staden et al., Ann. Bot. 42:751-753 (1978)), smaller amounts can be synthesized by the shoot apex and some other plant tissues.

[0356] The level of active cytokinin at a particular site of action has been reported to be influenced by a large number of factors: de novo synthesis; oxidative degradation; reduction; formation and hydrolysis of inactive conjugates; transport into and out of particular cells; subcellular compartmentalization to or away from sites of action. It has also been reported that physiological responses may be modulated by variations in the ability of cells to respond to a particular concentration of free cytokinin.

[0357] Cytokinin biosynthesis occurs through the biochemical modification of adenine (McGaw et al., In: Plant Hormones: Physiology, Biochemistry and Molecular Biology, ed. Davies, Kluwer, Dordrecht: 98-117 (1995); Salisbury and Ross, Plant Physiology, Belmont, Calif.: ed. Wadsworth, 357-407, 531-548 (1992)). Plants appear to synthesize cytokinins either directly by addition of isopentenylpyrophosphate to AMP by an adenylate:isopentenyltransferase (cytokinin synthase) producing isopentenyladenosine 5′ phosphate (“[9R-5′P]iP”), which in turn serves as an intermediate for further modifications, or indirectly via isopentenylation of adenosine residues of tRNA by tRNA:isopentenyltransferase (McGaw et al., In: Plant Hormones: Physiology, Biochemistry and Molecular Biology, ed. Davies, Kluwer, Dordrecht: 98-117 (1995)). [9R-5′P]iP may be modified by dephosphorylation, deribosylation, hydroxylation and reduction to produce a variety of derivatives with potential activity (Binns, Annu. Rev. Plant Physiol. Plant Mol. Biol. 45:173-196 (1994)). Further, conjugation may modulate levels of active cytokinins (Letham and Palni, Ann. Rev. Plant Physiol. 34:163-197 (1983)).

[0358] In the biosynthesis of tRNA cytokinins, mevalonic acid pyrophosphate undergoes decarboxylation, dehydration and isomerization to yield 2-isopentyl pyrophosphate (“iPP”). iPP then condenses with the relevant adenosine residue in the tRNA to give the N⁶(Δ²-isopentenyl)adenosine (“[9R]iP”) moiety. With the exception of [9R]iP and to a lessor extent cis- and trans-[9R]Z, the free and tRNA cytokinins are structurally distinct (e.g., free Zeatin (“Z”) is mainly the trans isomer (trans-Zeatin while Z present in tRNA is mainly the cis isomer (McGaw et al., In: Plant Hormones: Physiology, Biochemistry and Molecular Biology, ed. Davies, Kluwer, Dordrecht, 98-117 (1995).

[0359] The de novo biosynthesis pathway of cytokinins in plants includes the following enzymes: isopentyltransferase, 5′-nucleosidase, adenine nucleotidase, adenine phosphorylase, adenine kinase, adenine phosphoribosyl transferase, microsomal mixed function oxidases, Zeatin reductase, O-glucosyltransferase, O-xylosyltransferase, β-(9-cytokinin-alamino)synthase, cytokinin oxidase, β-glucosidase, and Zeatin cis-trans isomerase.

[0360] Isopentyltransferase catalyzes the first reaction of the pathway in which N⁶(Δ²-isopentenyl)adenosine-5′-monophosphate (“[9R-5′P]iP”) is generated from iPP and AMP.

[0361] 5′-nucleotidase catalyzes the conversion of [9R-5′P]iP to [9R]iP. The reaction catalyzed by the enzyme 5′-nucleotidase has been reported in wheat germ extract (Chen et al., Plant Physiol. 67:494-498 (1981); Chen et al., Plant Physiol. 68:1020-1023 (1981)) and in tomato leaf and root extracts (Burch and Stuchbury, Phytochemistry 25:2445-2449 (1986); Burch and Stuchbury, J. Plant Physiol. 125:267-273 (1986)). Adenine kinase catalyzes the reversion of [9R]iP to [9R-5′P]iP. Alternatively, [9R-5′P]iP can be converted to t-Zeatin riboside-5′-monophosphate (“[9R-5′P]Z”) by a microsomal mixed function oxidase.

[0362] Adenosine nucleotidase catalyzes the conversion of [9R]iP to iP. This reaction can be reversed by the enzyme adenine phosphorylase. Alternatively, [9R]iP can be converted to t-Zeatin riboside (“[9R]Z”) by a microsomal mixed function oxidase. Under another reaction mechanism, adenosine can be cleaved from [9R]iP by cytokinin oxidase. The enzyme adenine phosphoribosyl transferase can catalyze the conversion of iP to [9R-5′P]iP. Adenine phosphoribosyl transferase which is one of the salvage routes in plants for converting adenosine to AMP has also been shown to catalyze the phosphoribolyzation of cytokinin bases from a number of plant sources, including wheat germ (Chen et al., Arch. Biochem. Biophys. 214:634-641 (1982)), tomato (Burch et al., Physiol. Plant 69:283-288 (1987)), A. thaliana (Moffatt et al., Plant Physiol. 95:900-908 (1991)) and Acer psuedoplatanus (Doree and Guern, Biochem. Biophys. Acta 304:611-622 (1973); Sadorge et al., Physiol. Veg. 8:499-514 (1970)).

[0363] The cytokinins N⁶(Δ²-isopentenyl)adenosine-7-glucoside (“[7G]iP”) and N⁶(Δ²-isopentenyl)adenosine-9-glucoside (“[9G]iP”) are generated from iP from the enzymes Zeatin reductase and O-glucosyltransferase (such as cytokinin-9-glucosyl transferase), respectively. Under another reaction mechanism, adenine can be cleaved from iP by cytokinin oxidase.

[0364] In addition to converting [9R-5′P]iP to [9R]iP, 5′-nucleotidase can also catalyze the conversion of [9R-5′P]Z to [9R]Z. Adenine kinase can catalyze the conversion of [9R]Z to [9R-5′P]Z.

[0365] O-glucosyltransferase catalyzes the conversion of [9R]Z to t-Zeatin riboside-O-glucoside (“(OG)[9R]Z”). O-glucosyltransferase can also remove the glucoside group from (OG)[9R]Z to regenerate [9R]Z. Adenosine can be cleaved from [9R]Z by cytokinin oxidase. Alternatively, adenine nucleotidase can convert [9R]Z to Z. Adenine phosphorylase can catalyze the conversion of Z back into [9R]Z.

[0366] The cytokinins dihidroZeatin (“(diH)Z”), Zeatin-7-glucoside ([7G]Z), Zeatin-9-glucoside (“[9G]Z”), and lupinic acid (“[9Ala]Z”) are generated from Z by the enzymes Zeatin reductase, O-glucosyltransferase, Zeatin reductase and β-(9-cytokinin alamino) synthase, respectively. Zeatin cis-trans isomerase catalyzes the isomerization of Zeatin between its cis and trans isomers. O-glucosyltransferase catalyzes the addition of a glucoside residue to Z to form t-Zeatin-O-glucoside (“(OG)Z”) or removal of a glucoside residue from (OG)Z to form Z.

[0367] The cytokinins dihydroZeatin-9-glucoside (“(diH)[9G]Z”), dihydroZeatin-7-glucoside (“(diH)[7G]Z”), and dihydrolupinic acid (“(diH)[9Ala]Z”) are generated from (diH)Z by the enzymes β-(9-cytokinin alamino)synthase, Zeatin reductase, and O-glucosyltransferase, respectively. O-glucosyltransferase catalyzes the addition of a glucoside residue to (diH)Z to form t-Zeatin-O-glucoside (“(diHOG)Z”) or removal of a glucoside residue from (diHOG)Z to form (diH)Z. Alternatively, (diH)Z can be converted into dihydrozeatin riboside ((diH)[9R]Z) by adenine phosphorylase. The enzyme adenine nucleotidase can catalyze the conversion of (diH)[9R]Z to (diH)Z.

[0368] O-glucosyltransferase catalyzes the addition of a glucoside residue to (diH)[9R]Z to form t-dihydroZeatin riboside-O-glucoside (“(diHOG)[9R]Z”) or the removal of a glucoside residue from (diHOG)[9R]Z to form (diH)[9R]Z. The cytokinin dihydroZeatin riboside-5′-monophosphate (“(diH)[9R-5′P]Z”) is generated from (diH)[9R]Z by the enzyme adenine kinase. This reaction can be reversed by the enzyme 5′-nucleotidase.

[0369] It is understood that the above description of the de novo biosynthesis of cytokinins only describes the core of the biosynthesis pathway. Other enzymes have been reported to be involved in this pathway.

[0370] Active cytokinins can be inactivated by degradation or conjugation to different low-molecular-weight metabolites, such as sugars and amino acids. The enzyme cytokinin oxidase plays a role in the degradation of cytokinins. This enzyme removes the side chain and releases adenine, the backbone of all cytokinins. Cytokinin oxidases are reported to remove cytokinins from plant cells after cell division. Cytokinin derivatives are also made.

[0371] β-glucosidase (EC 3.2.1.21) has been reported to cleave the biologically inactive hormone conjugates of cytokinin-O-glucoside to release the active cytokinin (Brzobohaty et al., Science 262:1051-1054 (1993); Campos et al., Plant J. 2:675-684 (1992)). β-glucosidase catalyzes the hydrolysis of aryl and alkyl β-D-glucosides and/or cellobiose with the release of β-D-glucose (Reese, Recent Adv. Phytochem. 11:311 (1977)). The enzyme has been purified from maize and has a molecular weight of 60 kD (Esen, Plant Physiol. 98:174-182 (1992); Esen et al., Biochem. Genet. 28:319-336 (1990)). Esen et al. have identified the rolC gene of Agrobacterium rhizogenes which encodes for a cytokinin β-glucosidase and which effects the growth and development of transgenic plants (Esen et al., EMBO J. 10:2889-2895 (1991)).

[0372] Conjugation is often reported as a way of removing free and active hormones from a tissue. The conjugation process is often reversible, and, as conjugates can frequently accumulate in excess of free forms of phytohormone. The conjugate pools are also considered as sources of free hormone and may represent storage or inactive transportable forms of the hormone.

[0373] 2. Gibberellin Metabolism

[0374] Gibberellins (“GAs”) are tetracyclic diterpenoid compounds found in fungi and higher plants. GAs are reported to regulate plant growth and development (Crozier, ed. Biochemistry and Physiology of Gibberellins, Vol. 2, Praeger, N.Y. (1983)). More than eighty different forms of naturally occurring, biologically active or inactive gibberellins have been identified (Sponsel, Plant Hormones, Physiology, Biochemistry and Molecular Biology ed. Davies, Kluwer Academic Publishers, Dordrecht, (1995)). These can be broadly categorized into C₂₀-GAs and C₁₉-GAs. A subset of active and inactive GAs may be found in any given plant species.

[0375] The GA biosynthetic pathway includes the following enzymes: copalyl diphosphate synthase, ent-kaurene synthase, ent-kaurene oxidase, cytochrome P450 monooxygenase, 7-oxidase, gibberellin 20-oxidase, 2β-hydroxylase, 3β-hydroxylase, gibberellin 2β, 3β-hydroxylase and GA enzymes capable of inactivation, 2β-hydroxylase, 3β-hydroxylase, gibberellin 2β, 3β-hydroxylase.

[0376] The first reported committed step in diterpenoid biosynthesis leading to gibberellins occurs when geranylgeranyl diphosphate is cyclized by copalyl diphosphate synthase (“CPS”, also referred to as ent-kaurene synthetase A) to copalyl diphosphate. GA biosynthesis is not eliminated in two reported mutants of the a encoding CPS, a gal mutant (Arabidopsis) and a an1 mutant (maize).

[0377] The second reported committed step in diterpenoid biosynthesis leading to gibberellins is a cyclization catalyzed by ent-kaurene synthase (“KS”, also referred to as ent-kaurene synthetase B), which converts copalyl diphosphate to ent-kaurene. KS exhibits amino acid homology to CPS and other terpene cyclases. Both CPS and KS are reported to be localized in developing plastids, which are generally found in vegetative tissues and seeds (Aach et al., Planta 197:333-342 (1995)).

[0378] Cytochrome P450 monooxegenases catalyze the oxidation of ent-kaurene. The products of this reaction are ent-kaurenol, ent-kaurenal, and/or ent-kaurenoic acid (Hedden and Kamiya, Ann. Rev. Plant Physiol. Plant Mol. Biol. 48:431-460 (1997)). An isolated maize cytochrome P-450 monooxegenase gene has been reported (Winkler and Helentjaris, Plant Cell 7:1307-1317 (1995)). Hydroxylation of ent-kaurenoic acid at position seven generates ent-7α-hydroxy-kaurenoic acid. From this intermediate, a contraction of the B ring generates GA₁₂-aldehyde.

[0379] An oxidation by 7-oxidase at C-7 of GA₁₂-aldehyde converts GA₁₂-aldehyde to GA₁₂-carboxylic acid. Beyond the formation of GA₁₂, the GA biosynthetic pathway is reported to vary in a species dependent manner. This oxidation is common to all GAs and is associated with biological activity. Both monooxygenases and 2-oxoglutarate dependent dioxygenases have been reported that can catalyze oxidation (Lange and Graebe, Methods in Plant Biochemistry, ed. Lea, Academic Press, London 9:403-430 (1993)).

[0380] One of the subsequent modifications is hydroxylation of the C-13 position resulting, for example, in the formation of GA₁. 13-hydroxylation may occur early in the gibberellin pathway (acting on the C-20 GA, GA₁₂ substrate) or late in the pathway during the interconversion of bioactive, non-13-hydroxylated, C-19 GAs to their 13-hydroxylated derivatives (e.g., GA₄ to GA₁). Generally, the formation of bioactive GAs includes successive oxidation of C-20 by Gibberellin 20-oxidase and the eventual loss of this carbon to create the C₁₉-GAs. Bioactive GAs undergo this oxidation and elimination step. This step in GA biosynthesis is a reported regulatory point that is responsive to environmental and feedback regulation (Xu et al., Proc. Natl. Acad. Sci. (U.S.A.) 92:6640-6644 (1995)). Enzyme substrate specificity can vary depending upon the species of origin. For example, rice GA 20-oxidase exhibits a reported substrate preference for 13-hydroxylated GAs, for example GA₅₃, and not for its non-13-hydroxylated precursor, GA₁₂ (Toyomasu et al., Plant Physiol. 99:111-118 (1997)).

[0381] GA 20-oxidase is a 2-oxoglutarate dependent dioxygenase that catalyzes the oxidation of C-20 GA₁₂ at position C-20. Genes encoding GA 20-oxidase have been isolated from several species including pumpkin, Arabidopsis and rice. Different members of GA 20-oxidase multigene family have been reported to be developmentally and spatially regulated (Phillips et al., Plant Physiol. 108:1049-1059 (1995)).

[0382] The final reported conversion necessary for the formation of bioactive GAs is the 30-hydroxylation catalyzed by 2-oxoglutarate dependent dioxygenase. Certain 3β-hydroxylases can hydroxylate more than one GA species. 3β-hydroxylase enzymes can also exhibit multifunctional capabilities and catalyze additional reactions such as a 2,3-desaturation and a 2β-hydroxylation (Smith et al., Plant Physiol. 94:1390-1401(1990), Lange et al., Plant Cell 9:1459-1467 (1997)).

[0383] Gibberellins can be rendered biologically inactive by several mechanisms. 2β-hydroxylation has been reported to eliminate GA activity. 2β-hydroxylation has also been reported as a GA inactivation mechanism in plants. Multiple enzymes with this activity may be present in a species (Smith and MacMillan, Journal of Plant Growth Regulators 2:251-264 (1984)). Bifunctional 2β, 3β-hydroxylase gene has been isolated from pumpkin endosperm (Lange et al., Plant Cell 9:1459-1467 (1997).

[0384] Further catabolism of 2β-hydroxylated GAs occurs by additional oxidation steps that can be catalyzed by 2-oxoglutarate dependent dioxygenases. GAs may also be inactivated or sequestered, in planta, by conjugation to sugars to form gibberellin glucosides and glucosyl ethers (Schneider and Schmidt, Plant Growth Substances, ed. Pharis, et al., Springer-Verlag, Heidelberg, 300 (1988)).

[0385] 3. Ethylene Pathway

[0386] Ethylene is a plant hormone involved in the regulation of physiological responses (Abeles et al., Ethylene in Plant Biology, Second Edition New York: Academic Press, Inc. (1992); Mattoo et al., The Plant Hormone Ethylene, CRC Press, Inc. (1991)). In addition to its recognition as a “ripening hormone”, ethylene is reported to be involved in other developmental processes from germination of seeds to senescence of various organs (Davies, Plant Hormones: Physiology, Biochemistry and Molecular Biology, Dordrecht, Kluwer (1995)). Depending upon the type of plant, type of tissue, and/or developmental timing, ethylene regulates a variety of processes including fruit ripening, cell elongation, flower senescence, leaf abscission, and sex determination. Ethylene has also been implicated in the modulation of responses of plants to a wide range of biotic and abiotic stresses (Abeles et al., Ethylene in Plant Biology, Second Edition, New York: Academic Press, Inc. (1992); Yang and Hoffmann, Annu. Rev. Plant Physiol. 35:155-189 (1984)).

[0387] Ethylene is biosynthesized by some bacteria and fungi, but the biosynthetic pathway in microorganisms is different from the biosynthetic pathway in higher plants (Mattoo and Suttle, The Plant Hormone Ethylene, CRC Press, Inc (1991)). Ethylene is produced in most higher plants and is synthesized from methionine in tissues undergoing senescence or ripening.

[0388] As a gas, ethylene moves by diffusion from its site of synthesis. One intermediate in ethylene production, 1-aminocyclopropane-1-carboxylic acid (“ACC”) can be transported and may account for ethylene effects at a distance from the causal stimulus (Davies, Plant Hormones: Physiology, Biochemistry and Molecular Biology, Dordrecht: Kluwer (1995)).

[0389] Ethylene production is reported to be influenced by ethylene and other plant hormones. Auxin, cytokinins, abscisic acid and ethylene can regulate ethylene production at the level of ACC synthesis, although they may exert their effects by different biochemical mechanisms (Davies, Plant Hormones: Physiology, Biochemistry and Molecular Biology, Dordrecht: Kluwer (1995)).

[0390] The effects of ethylene on plant growth and development include the following: release from dormancy; shoot and root growth and differentiation (triple response); adventitious root formation; leaf, flower and fruit abscission; flower induction; induction of femaleness in dioecious flowers; flower opening; flower and leaf senescence; and fruit ripening (Davies, Plant Hormones: Physiology, Biochemistry and Molecular Biology, Dordrecht: Kluwer (1995)).

[0391] Several reviews have been published on the ethylene biosynthetic pathway that include: Abeles et al., Ethylene in Plant Biology, Second Edition, New York: Academic Press, Inc. (1992); Mattoo and Suttle, The Plant Hormone Ethylene, CRC Press, Inc (1991); Zarembinski and Theologis, Plant Mol. Biol. 26:1579-1597 (1994); and Kende, Annu. Rev. Plant Physiol. Plant Mol. Biol. 44:283-307 (1993), Fluhr and Mattoo, Crit. Rev. Plant Sci. 15:479-523 (1996).

[0392] Methionine is a biological precursor of ethylene. The ethylene pathway starts with the diversion of methionine into the SAM cycle which is also known as the methionine cycle. The SAM cycle generates S-adenosylmethionine (“AdoMet” or “SAM”) and other intermediates.

[0393] The enzyme S-adenosylmethionine synthetase (“SAM synthetase”) catalyzes the conversion of methionine and ATP into S-adenosylmethionine (AdoMet or SAM). This is the first reported step in the ethylene pathway.

[0394] In addition to its role in ethylene production, the precursor, S-adenosylmethionine (AdoMet or SAM) is involved in the biosynthesis of polyamines and in methylation reactions (Tabor and Tabor, Adv. Enzymology 56:251-282 (1984)).

[0395] SAM can be converted to decarboxylated S-adenosylmethionine (“dSAM”) by the enzyme S-adenosylmethionine decarboxylase (“SAM decarboxylase”) for polyamine biosynthesis. The enzyme S-adenosylmethionine hydrolase (“SAMase”) catalyzes the conversion of SAM to 5′-methylthioadenosine (MTA) and homoserine. SAM is the metabolic precursor of 1-aminocyclopropane-1-carboxylic acid (ACC), which itself is reported to be the immediate precursor of ethylene (Yang and Hoffmann, Annu. Rev. Plant Physiol. 35:155-189 (1984)).

[0396] The pathway from SAM to ethylene is catalyzed in higher plants by the enzymes ACC synthase (1-aminocyclopropane-1-carboxylic acid synthase) and ACC oxidase (1-aminocyclopropane-1-carboxylic acid oxidase) (also known as the ethylene-forming enzyme or EFE). The reported rate-limiting step in ethylene biosynthesis is the conversion of S-adenosylmethionine to ACC and 5′-methylthioadenosine (“MTA”) which is catalyzed by the enzyme ACC synthase.

[0397] The operation of a methionine cycle in plants results in recycling of MTA. MTA is produced as a product of ACC synthase and SAM decarboxylase, to regenerate methionine, and thereby SAM, providing a pathway to maximize the availability of SAM. The recycling of the methylthio group from SAM is important to the maintenance of ethylene production in plants.

[0398] ACC is then converted to either ethylene, CO₂, and HCN by the enzyme ACC oxidase or ACC is conjugated. Conjugation of the substrate ACC with malonate forms 1-(malonylamino)cyclopropane-1-carboxylic acid (M-ACC) by the enzyme ACC N-malonyltransferase (1-aminocyclopropane-1-carboxylate N-malonyltransferase). Another conjugate of ACC is 1-(L-glutamylamino) cyclopropane-1-carboxylic acid (G-ACC). Conjugation of ACC may be one way of sequestering the precursor to prevent its accumulation and conversion to ethylene.

[0399] The enzyme S-adenosylmethionine synthetase (SAM synthetase (EC 2.5.1.6)) catalyzes the conversion of methionine and ATP into S-adenosylmethionine (AdoMet or SAM). The genes for SAM synthetase, which catalyzes the conversion of methionine to SAM, have been cloned from Arabidopsis thaliana (Peleman et al., Plant Cell 1:81-93 (1989), Peleman et al., Gene 84:359-369 (1989)), from carnation (Woodson and Larsen, Plant Physiol. 96:997-999 (1991)), and poplar (Van Doorsselaere et al., Plant Physiol. 102:1365-1366 (1993)).

[0400] SAM synthetase gene is reported to be differentially expressed. The highest reported levels of expression for this gene is in vascular tissues, which requires AdoMet for lignification. It has been reported that levels of AdoMet synthase activity are adequate to allow for the autocatalytic production of ethylene that occurs during flower senescence (Woodson et al., Plant Physiol. 95:251-257 (1992)).

[0401] SAM can also be converted to S-decarboxylated S-adenosylmethionine (“dSAM”) by the enzyme S-adenosylmethionine decarboxylase (SAM decarboxylase). The propylamino group from SAM is added to putrescine to form polyamine spermine in the polyamine biosynthesis pathway (Abeles et al., Ethylene in Plant Biology, Second Edition, New York: Academic Press, Inc. (1992)).

[0402] The gene encoding the enzyme S-adenosylmethionine hydrolase (SAMase (EC 3.3.1.2)) has been isolated from the bacteriophage T3. SAMase catalyzes the conversion of SAM to 5′-methylthioadenosine (MTA) and homoserine. Expression of SAMase in transgenic plants has been reported to delay ripening of tomato fruit in a stage- and tissue-specific manner (Good et al., Plant Mol. Biol. 26:781-790 (1994)).

[0403] 1-Aminocyclopropane-1-carboxylate synthase (ACC synthase (EC 4.4.1.14)), catalyzes the conversion of S-adenosylmethionine (AdoMet or SAM) to 1-aminocyclopropane-1-carboxylic acid (ACC) and 5′-methylthioadenosine (MTA), is reported to play a role in the regulation of ethylene production. The rate-limiting step in the synthesis of ethylene is reported to be the formation of ACC. ACC synthase exists in several isoforms which are derived from a divergent multigene family where each gene can be differentially regulated in response to developmental, environmental, and hormonal factors (Kende, Annu. Rev. Plant Physiol. Plant Mol. Biol. 44:283-307 (1993); Yang and Hoffmann, Annu. Rev. Plant Physiol. 35:155-189 (1984)). ACC synthase is a pyridoxal-5′-phosphate requiring enzyme and is reported to be sensitive to pyridoxal inhibitors, especially aminoethoxyvinylglycine (“AVG”) and aminooxyacetic acid (“AOA”) (Davies, Plant Hormones: Physiology, Biochemistry and Molecular Biology, Dordrecht: Kluwer (1995)).

[0404] An ACC synthase clone has been reported from zucchini (Sato and Theologis, Proc. Natl. Acad. Sci. (U.S.A.) 86:6621-6625 (1989)). Two ACC synthase clones have been reported from ripe tomato fruit (Van Der Straeten et al., Proc. Natl. Acad. Sci. (U.S.A.) 87:4859-4863 (1990)). ACC synthase clones have also been reported from different plant species, such as apple, tomato, Arabidopsis, winter squash, rice, orchid, carnation, mungbean hypocotyls, soybean, and tobacco (Zarembinski and Theologis, Plant Mol. Biol. 26:1579-1597 (1994); Fluhr and Mattoo, Crit. Rev. Plant Sci. 15:479-523 (1996)).

[0405] ACC synthase is reported to play a role in regulating ethylene biosynthesis. Increased ethylene production is reported to be involved in developmental processes including germination, ripening, and senescence, and in stress responses to wounding, drought, water logging, chilling, toxic agents, infection or insect infestation (Yang and Hoffmann, Annu. Rev. Plant Physiol. 35:155-189 (1984); Lieberman, Annu. Rev. Plant Physiol. 30:533-591 (1979)). It has been reported that the higher levels of ethylene are accompanied by increased ACC production, due to induction, based on increased transcription of ACC synthase gene(s) (Lincoln et al., J. Biol. Chem. 268:19422-19430 (1993); Dong et al., Planta 185:3845 (1991); Olson et al., Proc. Natl. Acad. Sci. (U.S.A.) 88:5340-5344 (1991); Olson et al., J. Biol. Chem. 270:14056-14061 (1995); Rottmann et al., J. Mol. Biol. 222:937-961 (1991); Clark et al., Plant Mol. Biol. 34:855-865 (1997); Huang et al., Proc. Natl. Acad. Sci. (U.S.A.) 88:7021-7025 (1991)). It has also been reported that the ACC synthase gene can be used to manipulate ethylene synthesis in plants, both positively (Lanahan et al., Plant Cell 6:521-530 (1994)) and negatively (Oeller et al., Science 254:437-439 (1991)).

[0406] Conjugation of 1-aminocyclopropane-1-carboxylic acid (ACC) to form 1-(malonylamino)cyclopropane-1-carboxylic acid (M-ACC) is catalyzed by the enzyme ACC N-malonyltransferase (1-aminocyclopropane-1-carboxylate N-malonyltransferase). This reaction constitutes a reported regulatory step by inactivating ACC. A rapid decline in the rate of ethylene production can result from decreased ACC synthesis, or from the conjugation of ACC to MACC. Ethylene production can be promoted by blocking malonylation (Yang and Hoffmann, Annu. Rev. Plant Physiol. 35:155-189 (1984); Su et al., Phytochemistry 24:1141-1145 (1985)). ACC N-malonyltransferase has been isolated and partially purified from mungbean hypocotyls (Guo et al., Plant Physiol. 100:2041-2045 (1992)) and from tomato fruit (Martin and Saftner, Plant Physiol. 108:1241-1249 (1995)).

[0407] An enzyme that synthesizes a conjugate of ACC, 1-(?-L-glutamylamino) cyclopropane-1-carboxylic acid (G-ACC), has been reported in tomato fruit (Martin et al., Plant Physiol. 109:917-926 (1995)). The enzyme is reported to use reduced glutathione as a substrate for this reaction. MACC is reported to be the major conjugate of ACC in plant tissues, whereas GACC is a minor conjugate (Peiser and Yang, Plant Physiol. 116:1527-1532 (1998)).

[0408] The enzyme 1-aminocyclopropane-1-carboxylate deaminase (ACC deaminase (EC 4.1.99.4)) degrades 1-aminocyclopropane-1-carboxylic acid (ACC) to alpha-ketobutyric acid and ammonia, thus effectively preventing its conversion to ethylene (Honma and Shimomura, Agric. Biol. Chem. 42:1825-1831 (1978)). The gene encoding ACC deaminase has been cloned from Pseudomonas sp. (Klee et al., Plant Cell 3:1187-1193 (1991); Sheehy et al., J. Bacteriol. 173:5260-5265 (1991)). Expression of this gene in plants is reported to reduce ethylene synthesis in all tissues where the gene is expressed.

[0409] The conversion of ACC to ethylene is reported to be carried out by an oxidative enzyme that is known as 1-aminocyclopropane-1-carboxylate oxidase (ACC oxidase) (formerly known as ethylene-forming enzyme or EFE) (Yang and Hoffmann, Annu. Rev. Plant Physiol. 35:155-189 (1984)). The conversion of ACC to ethylene is the reported final step in ethylene biosynthesis. ACC oxidase was identified by expressing the tomato cDNA pTOM13 in an antisense orientation, which reduced ethylene production in tomato fruit (Hamilton et al., Nature 346:284-287 (1990)). Ethylene is reported to be synthesized by an iron-dependent oxidation mechanism (Ververidis and John, Phytochemistry 30:725-727 (1991)). ACC oxidase activity was reported to be conferred when expressed in yeast (Hamilton et al., Proc. Natl. Acad. Sci. (U.S.A.) 88:7434-7437 (1991)) or Xenopus oocytes (Spanu et al., EMBO J. 10:2007-2013 (1991)).

[0410] ACC oxidase is encoded by multigene family. ACC oxidase has been purified from apple (Dong et al., Proc. Natl. Acad. Sci. (U.S.A.) 89:9789-9793 (1992); Dupille et al., Planta 190:65-70 (1993)). cDNAs for ACC oxidase have been isolated from different species, such as carnation, peach, melon, orchid, mungbean, broccoli, petunia, and tomato (Barry et al., Plant J. 9:525-535 (1996)). ACC oxidase has also been cloned from banana, melon and kiwi fruit (Huang et al., Biochem. Mol. Biol. Int. 41:941-950 (1997); Lasserre et al., Mol. Gen. Genet. 24:81-90 (1996); Lay et al., Eur. J. Biochem. 242:228-234 (1996)). ACC oxidase, as measured by ethylene production in the presence of a saturating concentration of ACC, is reported to be present in most tissues of higher plants. However, under some stress conditions, in response to ethylene, or during certain developmental stages (such as fruit ripening), the level of ACC oxidase increases and is reported to effectively regulate ethylene production (Yang and Hoffmann, Annu. Rev. Plant Physiol. 35:155-189 (1984)). Antisense gene expression of ACC oxidase has been reported to reduce ethylene synthesis in ripening fruit by 97% relative to the controls (Hamilton et al., Nature 346:284-287 (1990)). ACC oxidase antisense gene has also been reported to delay leaf senescence (Picton et al., Plant Journal 3:469-481 (1993)).

[0411] Ethylene synthesis is reported to be controlled at the level of ACC synthase. It has also been reported that ACC oxidase also plays a role in regulating ethylene biosynthesis (Kende and Zeevaart, Plant Cell 9:1197-1210 (1997)).

[0412] Ethylene is reported to activate transcription of a set of genes in ripening tomato fruit, including E4 and E8 (Lincoln et al., Proc. Natl. Acad. Sci. (U.S.A.) 84:22793-2797 (1987)). Regulation of the E4 and E8 genes by ethylene is reviewed by Deikman, Physiol. Planta. 100:561-566 (1997). The E8 gene has been reported to be transcriptionally activated at the onset of ripening (Lincoln et al., Proc. Natl. Acad. Sci. (U.S.A.) 84:22793-2797 (1987)), and the E8 protein has been reported, by sequence homology, to be a member of the dioxygenase family of enzymes which includes the ACC oxidase family identified by Hamilton et al., Nature 346:284-287 (1990); Hamilton et al., Proc. Natl. Acad. Sci. (U.S.A.) 88:7434-7437 (1991); Deikman et al., EMBO J. 7:3315-3320 (1988). E8 gene expression leads to the inhibition of ethylene production in tomato (Lincoln and Fischer, Plant Physiol. 88:370-374 (1988)). Transgenic tomato fruit expressing antisense E8 mRNA have shown that this gene negatively regulates ethylene biosynthesis in fruit. (Penarrubia et al., Plant Cell 4:681-687 (1992)). It has been reported that the E8 protein may constitute a part of the proposed metalloprotein ethylene receptor. A cDNA clone 2A6, from Arabidopsis shows high homology to the tomato E8 cDNA. The 2A6 protein shows three domains that are highly conserved among E8, ACC oxidases, and 2-oxoglutarate-dependent dioxygenases (2-ODD) (Trentmann et al., Plant Mol. Biol. 29:161-166 (1995).

[0413] Ethylene synthesis has been reduced using antisense gene constructs of ACC oxidase (Hamilton et al., Nature 346:284-287 (1990)) or ACC synthase (Oeller et al., Science 254:437-439 (1991)) and by expressing ACC deaminase (Klee et al., Plant Cell 3:1187-1193 (1991)).

[0414] The ethylene transduction pathway has been studied by screening for ethylene response mutants in Arabidopsis (Ecker, Science 268:667-675 (1995)). Mechanisms responsible for the perception of the ethylene stimulus or how signals are transduced following perception in order to bring about specific alterations to gene expression are reviewed by Bleecker and Schaller, Plant Physiol. 111:653-660 (1996); Chang, Trends Biochem. Sci. 21:129-133 (1996); Theologis, Curr. Biol. 6:144-145 (1996); Theologis, Science 270:1774 (1995); Ecker, Science 268:667-675 (1995); Kieber and Ecker, Trends Genet. 9:356-362 (1993); Bleecker, Symp. Soc. Exp. Biol. 45:149-158 (1991).

[0415] A seedling triple response phenotype in Arabidopsis has been used to dissect the components of the ethylene response pathway genetically, and several classes of ethylene-related mutants have been identified (Ecker, Science 268:667-675 (1995)). In the presence of ethylene, dark-grown seedlings of such mutants either do not exhibit the “triple response” or show the triple response phenotype even in the absence of ethylene. Chemical inhibitors of ethylene biosynthesis or binding, or mutations that block the perception of ethylene are reported to prevent this morphological transformation (Guzman and Ecker, Plant Cell 2:513-523 (1990)).

[0416] One group of mutants includes those that display ethylene responses in the absence of exogenous ethylene. Plants that display a constitutive triple response phenotype (Ctr) may result either from ethylene overproduction, as is the case for eto1, eto2, and eto3 mutants (Guzman and Ecker, Plant Cell 2:513-523 (1990); Kieber et al., Cell 72:427-441 (1993)), or as a consequence of constitutive activation of the ethylene signaling pathway, as is the case for the ctr1 (CONSTITUTIVE TRIPLE RESPONSE1) mutant (Kieber et al., Cell 72:427-441 (1993)).

[0417] A second class of mutants includes those that show a reduction or absence of responsiveness to treatment with exogenous ethylene. Insensitive or resistant mutants are reported to be altered in their ability to perceive or respond to ethylene, and include etr1 (Bleecker et al., Science 241:1086-1089 (1988)); ein2 (Guzman and Ecker, Plant Cell 2, 513-523 (1990)); ein3 (Rothenberg and Ecker, Sem. Dev. Biol. Plant Dev. Genet. 4:3-13 (1993); Kieber and Ecker, Trends Genet. 9:356-362 (1993)); ain1 (Van Der Straeten et al., Plant Physiol. 102:401-408 (1993)); eti mutants (Harpham et al., Ann. Bot. 68:55-62 (1991)); and ein4, ein5, ein6, and ein7 (Roman et al., Genetics 139:1393-1409 (1995)).

[0418] The mutation ethylene-resistant1 (etr1) is dominant, and the mutant lacks a number of responses to ethylene (Bleecker et al., Science 241:1086-1089 (1988)). The capacity of etr1 to bind ethylene in vivo was reported to be one-fifth that of the wild-type, indicating that the mutant is impaired in receptor function. An ETR1 gene has been cloned and found to encode a protein with sequence similarity to bacterial two-component regulators (Chang et al., Science 262:539-544 (1993); Chang and Meyerowitz Proc. Natl. Acad. Sci. (U.S.A.) 92:4129-4133 (1995); Chang et al., Biochem. Soc. Trans. 20:73-75 (1992)). ETR1 is reported to form membrane-associated dimers and, when expressed in yeast binds ethylene (Schaller and Bleecker, Science 270:1809-1811 (1995); Schaller et al., J. Biol. Chem. 270:12526-12530 (1995)).

[0419] The ETR2 and ETHYLENE-INSENSITIVE4 (EIN4) genes encode homologues of ETR1, and mutations in these genes confer dominant ethylene insensitivity onto Arabidopsis seedlings (Roman et al., Genetics 139:1393-1409 (1995); Hua et al., Science 269:1712-1714 (1995)). An ETHYLENE RESPONSE SENSOR (ERS) gene of Arabidopsis encodes a second type of putative ethylene receptor which was reported to confer dominant ethylene insensitivity. ERS acts upstream of the CTR1 protein kinase gene in the ethylene response pathway (Hua et al., Science 269:1712-1714 (1995)). Homologues of ETR1 and ERS1 have also been isolated from tomato and include Never ripe (Wilkinson et al., Science 270:1807-1809 (1995)), tETR1 (tomato ETR1) (Payton et al., Plant Mol. Biol. 31:1227-1231 (1996)), eTAE (Zhou et al., Plant Mol. Biol. 30:1331-1338 (1996)) and a third ETR1-related gene, TFE27 (Zhou et al., Plant Physiol. 110:1435-1436 (1996)).

[0420] The tomato Never ripe locus is reported to regulate ethylene-inducible gene expression and has been reported to be linked to a homologue of the Arabidopsis ETR1 gene (Yen et al., Plant Physiol. 107:1343-1353 (1995)). Never ripe mutants are reported to contain reduced amounts of polygalacturonase (Tucker et al., Eur. J. Biochem. 112:119-124 (1980)). It has also been reported that the Never ripe mutation blocks ethylene perception in tomatoes (Lanahan et al., Plant Cell 6:521-530 (1994)).

[0421] It has been reported that tETR mRNA is undetectable in unripe fruit or pre-senescent flowers, and increases in abundance during the early stages of ripening, flower senescence and in abscission zones, and is reduced in fruit of ripening mutants deficient in ethylene synthesis or response (Payton et al., Plant Mol. Biol. 31:1227-1231 (1996)).

[0422] eTAE mRNA has been reported to be constitutively expressed in all tissues, and its accumulation in leaf abscission zones is reported to be unaffected by ethylene, silver ions (an inhibitor of ethylene action) or auxin (Zhou et al., Plant Mol. Biol. 30:1331-1338 (1996)).

[0423] An EIN2 gene has been cloned. A sequence of the E1N2 gene is reported in PCT publication number WO 95/35318.

[0424] EIN3 encodes a novel nuclear-localized protein that shares sequence similarity, structural features, and genetic function with three EIN3-LIKE (EIL) proteins. EIN3 (ETHYLENE-INSENSITVE3) encodes a positive regulator in the ethylene signaling pathway of Arabidopsis. Several related EIN-LIKE (EIL1, EIL2, EIL3) genes have also been cloned, and like EIN3, which was localized to the nucleus, their predicted translation products contain features commonly found in transcriptional regulatory proteins. It has been reported that EIN3 is a downstream regulator in the ethylene signaling pathway and may act along with EIL proteins to mediate a diverse array of plant responses to ethylene gas (Chao et al., Cell 89:1133-1144 (1997)). Mutations in the Arabidopsis ETHYLENE-INSENSITIVE3 (EIN3) gene are reported to limit a plant's response to the gaseous hormone ethylene (Chao et al., Cell 89:1133-1144 (1997)).

[0425] Genes acting downstream of ethylene perception in Arabidopsis include CONSTITUTIVE TRIPLE RESPONSE1 (CTR1). A gene corresponding to the ctr1 mutation has been cloned and reported to encode a peptide that resembles the Raf family of serine/threonine kinases. CTR1 protein is reported to act as a negative regulator in the ethylene signal transduction pathway. Ctrl mutants express the triple response phenotype constitutively, even in the absence of ethylene (Kieber et al., Cell 72:427-441 (1993)). It has been reported that ctr1 mutants affect the production of root hair and hairless cells in the Arabidopsis root (Masucci and Schiefelbein, Plant Cell 8:1505-1517 (1996)).

[0426] A genetic framework has been reported for the action of these genes in the ethylene response pathway (Roman et al., Genetics 139:1393-1409 (1995)). These reports set forth that ETR1 and EIN4 act upstream of the CTR1, whereas the EIN2, EIN3, EIN5, EIN6, and EIN7 act downstream of CTR1.

[0427] The downstream branches identified by the EIR1, AUX1 and HLS1 genes may involve interactions with other hormonal or developmental signals (Roman et al., Genetics 139:1393-1409 (1995)).

[0428] The HOOKLESS1 (HLS1) gene of Arabidopsis has been identified as an ethylene-responsive gene whose expression is required for the formation of the apical hook (Lehman et al., Cell 85:183-194 (1996)). It has been reported that the N-acetyl transferase encoded by HLS1 affects the distribution of auxin in seedlings and constitute a link between ethylene and auxin action in asymmetric growth.

[0429] An ethylene-induced cDNA clone encoding a protein kinase, PK12, has been isolated (Sessa et al., Plant Cell 8:2223-2234 (1996)). The activation characteristics of PK12 kinase, suggests its involvement in the ethylene signal transduction pathway (Fluhr, Trends Plant Sci. 3:141-146 (1998)).

[0430] 4. Jasmonic Acid Synthesis Pathway

[0431] Jasmonic acid is a cyclopentanone containing compound that accumulates in response to wounding or pathogen attack (Mueller, Physiologia Plantarum 100:653-663 (1997)). Jasmonic acid has been reported to modulate responses to environmental stimuli such as wounding or pathogenic attack (Wasternack and Parthier, Trends in Plant Sciences 2:302-307 (1997)), and developmental processes, such as germination, senescence, fruit development, production of viable pollen, and root growth (Creelman and Mullet, Annual Review of Plant Physiology and Plant Molecular Biology 48:335-381 (1997)). Jasmonic acid is derived from α-linolenic acid via four enzymes that are specific to jasmonic acid synthesis. These enzymes are a lipoxygenase (E.C. 1.13.11.12), allene oxide synthase (E.C. 4.2.1.92), allene oxide cyclase (E.C. 5.3.99.6), and 12-oxo-phytodienoic acid reductase. The product of 12-oxo-phytodienoic acid reductase, 10,11 dihydro-12-oxo-phytodienoic acid, is converted to jasmonic acid by three rounds of β-oxidation (Mueller, Physiologia Plantarum 100:653-663 (1997)).

[0432] Lipoxygenase (LOX) is a non-heme iron containing enzyme that catalyzes the formation of hydroperoxylinolenate from linolenic acid. Multiple forms of LOX are found in plants that vary in their organ and tissue distribution. LOX isoforms also differ in their substrate specificity and production of hydroperoxylinolenate isomers. LOX is generally located in multiple subcellular compartments. In plants, LOX produces two linolenic acid derived isomers, 9-hydroperoxylinolenate and 13-hydroperoxylinolenate. 13-hydroperoxylinolenate is reported to be a precursor to jasmonic acid. LOX activity that is associated with the formation of 13-hydroperoxylinolenate during inducible jasmonic acid production has been reported in the plastid (Creelman and Mullet, Annual Review of Plant Physiology and Plant Molecular Biology 48:335-381 (1997)). A rice LOX, containing a plastid transit sequence, is reported to catalyze the production of 13-hydroperoxylinolenate (Peng et al., J. Biol. Chem. 269:3755-3761 (1994)). Transgenic Arabidopsis with a reduced accumulation of plastidic LOX2 failed to generate a jasmonic acid response to wounding (Bell et al., Proc. Natl. Acad. Sci. (U.S.A.) 92:8675-8679 (1995)). Non-plastidic LOX has been reported to be associated with the constitutive production of jasmonic acid.

[0433] Allene oxide synthase (AOS (EC 4.2.1.92)) catalyzes the conversion of 13-hydroperoxylinolenate to 12,13-epoxy-octadecatrienoic acid. Allene oxide synthase has been cloned from flax (Song et al., Proc. Natl. Acad. of Sci. (U.S.A.) 90:8519-8523 (1993)), guayule (Pan et al., J. Biol. Chem. 270:8487-8494 (1995)), and Arabidopsis (Laudert et al., Plant Molecular Biology 31:323-335 (1996)). AOS is a cytochrome P450 enzyme with a heme binding region in the C-terminal portion of the protein. Reported flax and Arabidopsis clones encode proteins with plastid transit sequences (Song et al., Proc. Natl. Acad. Sci. (U.S.A.) 90:8519-8523 (1993); Laudert et al., Plant Molecular Biology 31:323-335 (1996)). A reported flax clone has been expressed in potato and the AOS protein accumulated in plastids. Transgenic potato plants expressing flax AOS are reported to have elevated levels of jasmonic acid. These reported elevated jasmonic acid levels did not result in constitutive expression of wound induced transcripts (Harms et al., Plant Cell 7:1645-1654 (1995)). A cloned Arabidopsis AOS has been expressed in E. coli and is reported to accept either 9-hydroperoxylinolenate or 13-hydroperxoylinolenate as substrates (Laudert et al., Plant Molecular Biology 31:323-335, (1996). A cloned guayule AOS is homologous to clones from Arabidopsis and flax. In guayuale, AOS expression is reported to be associated with rubber particles in the bark parenchyma (Pan et al., J. Biol. Chem. 270:8487-8494 (1995)).

[0434] Allene oxide cyclase (AOC (EC 5.3.99.6)) catalyzes the conversion of 12,13-epoxy-octadecatrienoic acid to 12-oxo-phytodienoic acid. AOC activity has been reported in the seed coat of immature soybean seeds (Simpson and Gardner, Plant Physiology 108:199-202 (1995)) and dry maize seeds (Ziegler et al., Plant Physiology 114:565-573 (1997)). A maize AOC enzyme was reported to be soluble, with an approximately molecular weight of 45-47 kD. The reported substrate specificity of the maize AOC is 12,13-epoxy-octadecatrienoic acid, which is derived from linolenic acid. AOC exhibits only limited activity with the substrate 12,13-epoxy-octadecadienoic acid, which is derived from linoleic acid (Ziegler et al., Plant Physiology 114:565-573 (1997)).

[0435] 12-oxo-phytodienoic acid reductase catalyzes the reduction of the 10,11 double bond of 12-oxo-phytodienoic acid to form 10,11-dihydro-12-oxo-phytodienoic acid. The enzyme has been characterized from maize seedlings and kernels (Vick and Zimmerman, Plant Physiology 80:202-205 (1986)), and suspension cultures of Corydalis sempervirens (Schaller and Weiler, Eur. J. Biochem. 245:294-299 (1997)). A maize 12-oxo-phytodienoic acid reductase enzyme was reported to be soluble. Based on gel filtration measurements, the estimated molecular weight of 12-oxo-phytodienoic acid reductase is 54 kD (Vick and Zimmerman, Plant Physiology 80:202-205 (1986)). A Corydalis 12-oxo-phytodienoic acid reductase enzyme has a reported monomer molecular weight of approximately 41 kD (Schaller and Weiler, Eur. J. Biochem. 245:294-299 (1997)). 12-oxo-phytodienoic acid reductase exhibits a co-factor preference for NADPH over NADH, and the maize enzyme is reported to be active over a broad pH range (Schaller and Weiler, Eur. J. Biochem. 245:294-299 (1997); Vick and Zimmerman, Plant Physiology 80:202-205 (1986)).

[0436] 5. Transcription Factors

[0437] Eukaryotic transcription utilizes three different RNA polymerases. RNA polymerase I is located in the nucleolus and catalyzes the synthesis of ribosomal RNA. RNA polymerase II and III are present in the nucleoplasm. DNA dependent RNA synthesis by RNA polymerase III transcription complexes is responsible for the transcription of the genes that encode small nuclear RNAs and transfer RNA. RNA polymerase II transcribes the majority of the nuclear structural genes which typically encode proteins (type II genes).

[0438] In higher eukaryotes type II gene expression is often regulated, at least in part, at the level of transcription. A typical type II gene has one or more regulatory regions which include a promoter and one or more structural regions which is transcribed into precursor and messenger RNA. Type II genes are characterized by an upstream promoter region. Such regions are typically found between the start of transcription and 2000 bases distal to that transcriptional start site. Different combinations of sequence motifs can be associated with the upstream promoter region. These sequence motifs are recognized by sequence specific DNA binding proteins (transcription factors).

[0439] The polypeptide chains of transcription factors are usually divided into two functionally different regions, one that specifically binds to nucleic acid molecules and another that is associated with the activation of transcription. These functions are often present on different domains.

[0440] Several distinct structural elements or DNA binding domains which allow the transcription factor to bind to DNA in a sequence specific manner have been identified (Branden and Tooze, Introduction to Protein Structure, Garland Publishing, Inc., New York (1990)). These binding domains often range in size from approximately 20 residues to more than 80 residues. Many DNA binding domain exhibit one or another of the following structural motifs: the helix-turn-helix motif, the zinc finger motif, and the leucine zipper motif. Other structural motifs include: the helix-loop-helix motif, the pou motif and the multi-cysteine zinc finger.

[0441] Two sequence motifs or cis elements, the TATA box and the CAAT box are located within the promoter region of most type II genes. An AT-rich sequence called a TATA box is located approximately 30 nucleotides upstream from the start of transcription and is reported to play a role in positioning the start of transcription. A TATA box binding protein or TFIID factor has been identified that binds to this region (Hancock, Nucleic Acid Research 21:2823-2830 (1993); Gasch et al., Nature 346:390-394 (1990))(the TFIID factor is also referred to as the TBP/TAF factors). It has been reported that binding of TFIID to the TATA box plays a role in the assembly of other transcription factors to form a complex capable of initiating transcription (Nakajima et al., Mole. Cell. Biol. 8:4038-4040 (1988); Van Dyke et al., Science 241:1335-1338 (1988); Buratowski et al., Cell 56:549-561 (1989)).

[0442] In addition to the TATA box sequence, a CAAT box sequence is usually located approximately 75 bases upstream of the start of transcription. A CAAT box sequence binds a number of proteins, some of which are expressed in all tissues while others are expressed in a tissue specific manner (Branden and Tooze, Introduction to Protein Structure, Garland Publishing, Inc., New York (1990). One example of a CAAT box binding protein is the protein referred to as the CAAT box binding protein (C/EBP).

[0443] The G-box is a cis-acting element found within the promoters of many plant genes where it mediates expression in response to a variety of different stimuli (Schindler et al., EMBO J. 11:1275-1289 (1992)). The G-box comprises a palindromic DNA motif (CACGTG) which is composed of two identical half sites (Donald et al., EMBO J. 9:1727-1735 (1990); Izawa et al., J. Mol. Biol. 230:1131-1144 (1993) Schindler et al., Plant Cell 4:1309-1319 (1992); Schindler et al., EMBO J. 11:1275-1289 (1992); Odea et al., EMBO J. 10: 1793-1991 (1991) Weisshaar et al., EMBO J. 10: 1777-1786 (1991); and Zhang et al., Plant J. 4:711-716 (1993)). Both half sites are involved in the binding of the bZIP protein, GBF1, a member of the family Arabidopsis thaliana. The bZIP protein has been characterized in at least 19 other plant species (Erlich et al., Gene 117:169-178 (1992); Foley et al., Plant J. 3:669-679 (1993); Guiltinan et al., Science 250:267-271 (1990); Kawata et al., Nucl. Acids Res. 20:1141 (1992); Katagiri et al., Nature 340:727-730 (1989); Odea et al., EMBO J. 10:1793-1991 (1991); Pysh et al., Plant Cell 5:227-236 (1993); Schindler et al., Plant Cell 4:1309-1319 (1992); Schmidt et al., Proc. Natl. Acad. Sci. (USA) 87:46-50 (1990); Singh et al., Plant Cell 2: 891-903 (1990); Tabata et al., EMBO J. 10: 1459-1467 (1991); Tabata et al., Science 245:965-967 (1989); Weisshaar et al., EMBO J. 10:1777-1786 (1991); Zhang et al., Plant J. 4:711-716 (1993)). Each of these proteins recognizes DNA sequences that share the central core sequence ACGT. bZIP transcription factors are characterized by the presence of a basic domain and a leucine zipper.

[0444] Plant bZIP proteins have been shown to bind regulatory elements from a wide variety of inducible plant genes including those regulated by cell cycle, light, UV light, drought and pathogen infections (Ehrlich et al., Gene 117:169-178 (1992), Donald et al., EMBO J. 9:1727-1735 (1990); Guiltinan et al., Science 250:267-271 (1990); Katagiri et al., Nature 340:727-730 (1989); Oeda et al., EMBO J. 10:1793-1991 (1991); Tabata et al., EMBO J. 10:1459-1467 (1991); Weisshaar et al., EMBO J. 10:1777-1786 (1991); Holdworth et al., Plant Molecular Biology 29:711-720 (1995); Mikami et al., Mol. Gen. Genet. 248: 573-582 (1995)).

[0445] Specific transcription factors contribute to the quantitative and qualitative gene expression within a cell. The activity of a given transcription factors can effect cell physiology, metabolism, and/or the cell's ability to differentiate and communicate or associate with other cells within an organism. The regulation of the transcription of a gene may be the result of the activity of one or more transcription factors. Transcription factors are involved in the regulation of constitutive expression, inducible expression (such as expression in response to an environmental stimuli), and developmentally regulated expression.

[0446] Transcription factor gene families have been reported in plants (Martin and Paz-Ares, Trends in Genetics 13:43-84 (1997); Riechmann and Meyerowitz, Bio. Chem. 378:1079-1101 (1997)). The MADS-box transcription factor family is one example of a transcription factor gene family found in plants as well as other organisms (Riechmann and Meyerowitz, Bio. Chem. 378: 1079-1101 (1997); Noda et al., Nature 369:661-664 (1994); Schwarz-Sommer et al., EMBO J. 11:251-263 (1992); Yanofsky et al., Nature 346:35-39 (1990); Drews et al., Cell 65: 991-1002 (1991); Mizukami and Ma, Cell 71:119-131 (1992); Mandal et al., Nature 360:273-277 (1992); Gustafson-Brown et al., Cell 76:131-143 (1994); Jack et al., Cell 68:703-716 (1992); Goto and Meyerowitz, Genes and Development 8:1548-1560 (1994); Kriek and Meyerowitz, Development 122:11-22 (1996); Kempin et al., Science 267:522-525 (1995); Ma et al., Genes and Development 5:484-495 (1991); Flanagan et al., Plant J. 10:343-353 (1996); Flanagan and Ma, Plant Mol. Biol. 26:581-595 (1994); Huang et al., Plant Cell 8:81-94 (1995); Savidge et al., Plant Cell 7.721-733 (1995); Mandal and Yanofsky, Plant Cell 7:1763-1771 (1995); Roundsley et al., Plant Cell 7:1259-1269 (1995); Heck et al., Plant Cell 7:1271-1282 (1995); Perry et al., Plant Cell 8:1977-1989 (1996); Bradley et al., Cell 72:85-95 (1993); Huijser et al., EMBO J. 11:1239-1249 (1992); Sommer et al., EMBO J. 9:605-613 (1990); Trober et al., EMBO J. 11:4693-4704 (1992); Schwarz-Sommer et al., EMBO J. 11:251-263 (1992); Davies et al., EMBO J. 15:4330-4343 (1996); Zachgo et al., Development 121:2861-2875 (1995); Tsuchimoto et al., Plant Cell 5:843-853 (1993); Angenent et al., Plant J. 5:33-44 (1993); Van der Krol et al., Genes and Development 7:1214-1228 (1993); Angenent et al., Plant Cell 7:505-516 (1995); Angenent et al., Plant Cell 4:983-993 (1992); Angenent et al., Plant J. 5:33-44 (1994); Angenent et al., Plant J. 4:101-112 (1993); Angenent et al., Plant Cell 7:1569-1582 (1995); Columbo et al., Plant Cell 7:1859-1868 (1995)).

[0447] MADS-box transcription factors have been shown to bind to DNA and alter transcription by both induction and repression. Examples are known where MADS-box transcription factors exert their transcriptional regulation by binding and interacting individually, as homodimers or heterodimers, or through heterologous associations with non-MADS-box transcription factors. However, MADS transcription factors typically form dimers (Riechmann and Meyerowitz, Bio. Chem. 378:1079-1101 (1997)). MADS box transcription factors are defined by the signature MADS domain which is the most highly conserved portion of the protein among all the family members. In plants, additional domains (the I region, K-domain, and C-terminal region, in linear order) have been reported which are characteristic of the plant specific branch of this family.

[0448] The MADS domain is an approximately 57 amino acid domain located at or near the N-terminal portion of the MADS-box transcription factor (with approximately 260 amino acids in the total protein). This domain is highly conserved and is the most uniquely defining element of the family. For example, two homologues, APETALA1 from Arabidopsis and ZAP1 from Zea mays, show 89% identity over MADS domain. Conservation of this domain may be linked to its function as the portion of the protein that directly interacts with the target DNA binding site. The MADS domain is responsible for specifically binding DNA at A-T rich sequences referred to as CArG-boxes, whose consensus sequence has been reported as CC(A/T)₆GG (Shore and Sharrocks, Eur. J. Biochem. 229:1-13 (1995)).

[0449] The I domain spans approximately 30 amino acid sequence of poor sequence conservation compared to the MADS-domain. The intervening-region links the MADS domain region with the K-domain. Its length and sequence is variable and may be absent from some family members.

[0450] The K domain is an approximately 70 amino acid domain that is unique to the plant family members of the MADS-box gene superfamily. It is found in the majority of plant MADS-box genes. It has weak similarity to portions of animal keratin and is predicted to form amphipathic alpha helices which may facilitate interaction with other proteins. It has been reported that the structural conformation of this domain is a contributing constraint on conservation of this sequence. The K-domain typically exhibits less overall amino acid conservation than the MADS-domain, but between homologue genes such as APETALA1 from Arabidopsis and ZAP1 from maize, this similarity can still be high (approximately 70%).

[0451] The C terminal domain, along with the I-domain, is the least conserved portions of the MADS-box gene family member in plants. Although exact functions for this approximately 90-100 amino acid domain have not been determined, there are known mutations within this region that lead to distinct developmental abnormalities in plants which indicate a role in transcriptional regulation. Conservation of this domain increases with increasing evolutionary closeness of species and homologues under comparison.

[0452] Genetic and molecular analysis have shown that transcription factors belonging to the MADS transcription factor family, at least in part, regulate diverse functions (Riechmann and Meyerowitz, Bio. Chem. 378:1079-1101 (1997)). MADS transcription factors often exert their effect in a homeotic manner (e.g. loss of AG activity (a MADS transcription factor) in Arabidopsis homeotically transforms the third and fourth whorl organs and eliminates floral determinacy) (Mena et al., Science 274:1537-1540 (1996)). MADS transcription factors can regulate different processes. For example, the role of certain MADS transcription factors in floral development is reviewed in Riechmann and Meyerowitz, Bio. Chem. 378:1079-1101 (1997)). MADS transcription factors are also involved in the regulation of other plant processes such as phytochrome regulation (Wang et al., Plant Cell 9:491-507 (1997)) and seed development (Colombo et al., Plant Cell 9:703-715 (1997)).

[0453] Another family of transcription factors found in plants are MYB transcription factors. MYB transcription factors generally contain three repeats (R1, R2 and R3). The MYB DNA binding domain of plant proteins usually consists of two imperfect repeats of about 50 residues (Baranowskij et al., EMBO J. 13:5383-5392 (1994)). MYB transcription factors exhibit a helix-turn-helix motif (Ogata et al., Cell 79:639-648 (1994)). The DNA binding specificity of plant MYB proteins differs. For example, the maize P protein recognizes the motif [C/A]TCC[T/A]ACC similar to that bound by AmMYB305 from Antirhinum, and neither of these proteins appears to bind to the similar vertebrate MYB consensus motif (TAACNG) (Grotewold et al., Cell 76:543-553 (1994); Solano et al., EMBO J. 14:1773-1784 (1995)). Small changes in the amino acid sequence of a MYB transcription factor can alter the DNA binding properties of that transcription factor. For example, PMYB3 from Petunia binds to two sequences, MBSI (TAAC[C/G] GTT) and MBSII (TAACTAAG) (Solano et al., EMBO J. 14:1773-1784 (1995)). In the case of PMYB3, it has been shown that a substitution of a single residue in the R2 recognition helix switches the dual DNA-binding specificity to that of c-MYB, and the reciprocal substitution in c-MYB gives dual DNA-binding specificity similar to PhMYB3.

[0454] Mutations in residues that do not contact bases may also effect sequence-specific binding and have been reported to account for some of the differences in DNA-binding specificity between plant MYB proteins (Suzuki, Proc Jap. Acad. Series B 71:27-31 (1995)). Of the eight putative base-contacting residues in MYB proteins, six are fully conserved in all plant MYB proteins, and the remaining two are conserved in at least 80% of these proteins. Nonetheless MYB transcription factors exhibit different nucleic acid sequence specificities and different strengths of contacts (Solano et al., Plant J. 8:673-682 (1995)). In addition, temporal patterns of accumulation of RNA of different plant MYB genes may be effected by environmental stimuli, such as light, salt stress or the plant hormones, gibberellic acid and abscisic acid (Urao et al., Plant Cell 5:1529-1539 (1993); Jackson et al., Plant Cell 3:115-125 (1991); Cone et al., Plant Cell 5:1795-1805 (1993); Noda et al., Nature 369:661-664 (1994); Larkin et al., Plant Cell 5:1739-1748 (1993); Gubler et al., Plant Cell 7:1879-1891 (1995); Hattari et al., Genes Dev. 6:609-618 (1992)).

[0455] In plants distinct functions for different MYB transcription factors have been reported including controlling secondary metabolism, regulation of cellular morphogenesis and the signal transduction pathways. MYB proteins are reported to play a role in the control of phenylpropanoid metabolism. Phenylpropanoid metabolism is one of the three main types of secondary metabolism in plants involving modification of compounds derived initially from phenylalanine. Through one branch (flavonoid metabolism) it is responsible for the production of a majority group of plant pigments (the anthocyanins) and other minor groups (aurones and phlobaphenes) and it also produces compounds that modify pigmentation through chemical interaction with the anthocyanins (co-pigmentation), such as the flavones and flavonols. Flavones and flavonols also serve to absorb ultraviolet light to protect plants. Several flavanoids act as signalling molecules in legumes inducing gene expression in symbiotic bacteria in a species-specific manner, and others act as factors required for pollen maturation and pollen germination in some plant species. A number of flavanoids and related phenylpropanoids (such as stilbenes) also act as defensive agents (phytoallexins) against biotic and abiotic stresses in particular plant species. Another branch of phenylpropanoid metabolism produces the precursors for production of lignin, the strengthening and waterproofing material of plant vascular tissue and one of the principal components of wood. This branch also produces other soluble phenolics, which can serve as signalling molecules, cell-wall crosslinking agents and antioxidants.

[0456] The C1 transcription factor (a MYB transcription factor) activates transcription of genes encoding enzymes involved in the biosynthesis of the anthocyanin pigments in the outer layer of cells of the maize seed endosperm (the aleurone) (Paz-Ares et al., EMBO J. 5:829-833 (1986) Cone et al., Proc. Natl. Acad. Sci. (U.S.A.) 83:9631-9635 (1986)). Activation has been reported for at least five genes in the pathway to anthocyanin. Activation by C1 involves a partner transcriptional activator found in aleurone, a protein similar to a MYB transcription factor. These proteins also interact with other members of the R-protein family to regulate anthocyanin biosynthetic gene expression (Cone et al., Plant Cell 5:1795-1805 (1993)). For example, in maize, another MYB protein, ZmMYB1, can activate one of the structural genes required for anthocyanin production (Franken et al., Plant J. 6:21-30 (1994)), while yet another, ZmMYB38, inhibits C1-mediated activation of the same promoter.

[0457] Reiteration of MYB-gene function reportedly occurs in the control of a branch of flavonoid metabolism producing the red phlobaphene pigments from intermediates in flavonoid metabolism. This pathway is under control of the P gene in maize, which encodes a MYB-related protein (Grotewold et al., Cell 76:543-553 (1994)). The P gene product activates a subset of the genes involved in anthocyanin biosynthesis. The P-binding site is contained within the promoters of these target genes (Li and Parish, Plant J. 8:963-972 (1995)). In maize, at least two different MYB proteins serve to direct flavonoid metabolism along different routes by selective activation of target genes.

[0458] In other plant species MYB proteins can serve similar roles in the control of phenylpropanoid metabolism as, for example, in Petunia flowers. MYB proteins can also serve to regulate other branches of phenylpropanoid metabolism. In Antirrhinum majus and tobacco AmMYB305 (or its homologue in tobacco) can activate the gene encoding the first enzyme of phenylpropanoid metabolism, phenylalanine ammonia lyase (PAL (Urao et al., Plant Cell 5:1529-1539 (1993)). Some MYB genes have been shown to be highly expressed in tissues such as differentiating xylem and may act to influence the branch of phenylpropanoid metabolism involved in lignin production (Campbell et al., Plant Physiol. 108 (Suppl.), 28 (1995)).

[0459] A second reported role for plant MYB genes is in the control of cell shape. For example, the MIXTA gene of Antirrhinum and the homologue PhMYB1 gene from Petunia have been shown to play a role in the development of the conical form of petal epidermal cells and the GL1 gene of Arabidopsis has been shown to be essential for the differentiation of hair cells (trichomes) in some parts of the leaf and in the stem (Noda et al., Nature 369:661-664 (1994); Oppenheimer et al., Cell 67:483-493 (1991); Mur, Ph.D. Thesis, Vrije Univ. of Amsterdam (1995)). Overexpression of MIXTA in transgenic tobacco results in trichome formation on pedals, suggesting that conical petal cells might be ‘trichoblasts’ arrested at an early stage in trichome formation.

[0460] GLI of Arabidopsis is associated with the expansion in the size of the cell that develops into the trichome, and it acts upstream of a number of other genes (Huilskamp et al., Cell 76:555-566 (1994)). GLI mutants can exhibit cellular outgrowths that do not develop into full branched trichomes. GL2 of Arabidopsis encodes a homeodomain protein that is associated with chome development (Rerie et al., Genes Dev. 8: 1388-1399 (1994)). The GL2 gene promoter contains motifs very similar to the binding sites of P and AmMYB305 transcription factors (Rerie et al., Genes Dev. 8:1388-1399 (1994)).

[0461] The conical cells produced by the action of the MIXTA gene of Antirrhinum resemble the limited outgrowths produced in Arabidopsis g12 mutants where trichome formation is aborted. In its regulation of trichome formation, GLI interacts with the product of the TTG gene, which is required for trichome formation and anthocyanin production (Lloyd et al., Science 258:1773-1775 (1992)). Expression of the maize R gene complements the ttg mutation and it has been reported that the TTG gene product is also a R-related protein that interacts with GL1 in a matter analogous to the interaction of C1 and R in maize (Lloyd et al., Science 258:1773-1775 (1992)).

[0462] A further reported role for plant MYB proteins is in hormonal responses during seed development and germination. A barley MYB protein (GAMY) whose expression is induced by gibberellic acid (GA) has been shown to activate expression of a gene encoding a high pI α-amylase that is synthesized in barley aleurone upon germination for the mobilization of starch in the endosperm (Larkin et al., Plant Cell 5:1739-1748 (1993)). Expression of GAMYB is induced by treatment of aleurone layers with GA and expression of the α-amylase gene is induced subsequently. There is a suggestion that other GA-inducible genes can also respond to activation by MYB proteins during seed germination because MYB-like motifs from other GA-responsive gene promoters have been shown to direct reporter gene expression in response to GA (Larkin et al., Plant Cell 5:1739-1748 (1993)). In addition, some MYB genes are expressed in response to GA treatment of Petunia petals (Mur, Ph.D. Thesis, Vrije Univ. of Amsterdam (1995)).

[0463] Treatment with another plant hormone, abscisic acid (ABA), induces expression of AtMYB2 in Arabidopsis, a MYB gene that is also induced in response to dehydration or salt stress (Shinozaki et al., Plant Mol. 19:439-499 (1992)). In maize, expression of the C1 gene is also ABA-responsive, where it is involved in the formation of anthocyanin in the developing kernels (Larkin et al., Plant Cell 5:1739-1748 (1993)). The rd22 gene promoter contains MYC-recognition sequences suggesting that AtMYB2 can interact with a bHLH protein to induce gene transcription in response to dehydration or salt stress (Iwasaki et al., Mol. Gen. Genet. 247:391-398 (1995)).

[0464] Plant transcription factors that fall within the helix-loop-helix class of transcription factors have been reported. These include the transcription factor encoded by the maize R and B class gene (Radicella et al., Genes and Development 6:2152-2164 (1992)). Alleles that have been identified at the b and r loci show differences in developmental or tissue specific expression.

[0465] Homeodomain transcription factors have been isolated from different plant species (Ma et al., Plant. Molec. Biol. 24:465-473 (1994); Muller et al., Nature 374:727 (1995); Lincoln et al., Plant Cell 6:1859-1876 (1994); Hareven et al., Cell 84:735-744 (1996); Vollbrecht et al., Nature 350:241-243 (1991)).

[0466] The homeodomain contains three α-helices (Quain et al., Cell 59:573-580 (1989)). Residues in helix 3 contact the major groove of a nucleic acid in a sequence specific manner. Although structurally similar, different homeodomains are able to recognize diverse binding sites (Hanes et al., Cell 57:1275-1283 (1989); Treisamn et al., Genes Dev. 5:594-604 (1991); Affolter et al., Proc. Natl. Acad. Sci. (U.S.A.) 87:4093-4097 (1990); Percival-Smith et al., EMBO J. 9:3967-3974 (1990)).

[0467] One class of homeodomain transcription factors are those that share a conserved cysteine-rich motif as illustrated by the Arabidopsis GLABRA2 homeodomain protein and the maize KNOTTED1 (KN1)-like proteins (Vollbrecht et al., Nature 350:241-243 (1991), Ma et al., Plant. Molec. Biol. 24:465-473 (1994)). The morphological mutation Knotted1 in maize alters the developmental fate of cells in leaf blades with wild-type expression of the gene localized in the meristem and ground tissue but absent from leaves or leaf primordia (Hake, Trends in Genetics 8:109-114 (1992); Freeling and Hake, Genetics 111:617-634 (1995)). In addition to having a homeodomain, the kn1 class of genes in maize encode an ELK domain which contains repeating hydrophobic residues (Kerstetter et al., Plant Cell 6:1877-1887 (1994)).

[0468] Kn1-like homeodomain genes have been reported in other plants, such as Arabidopsis (Lincoln et al., Plant Cell 6:1859-1876 (1994)), tomato and soybean (Ma et al., Plant Molecular Biology 24:465-473 (1994)).

[0469] Homeodomain transcription factors have been associated with the regulation of cell to cell communication and development in plants. Presence of the KNOTTED1 homeodomain transcription factor in a plant cell can lead to an increase in plasmodesmal size permitting the transport of larger molecules between cells (Lucas et al., Science 270:1980-1983 (1995)).

[0470] Another class of transcription factors, the polycomb-like transcription factors, have been reported in plants (Goodrich et al., Nature 386:44-51 (1997)). Wild type CLF, a polycomb-like transcription factor, isolated from Arabidopsis, exhibits extensive structural homology with Drosphilia Pc-G genes plants (Goodrich et al., Nature 386:44-51 (1997)). Like Drosphila Pc-G genes, the CLF genes encodes for a SET domain and two cysteine rich regions. CLF, while not being necessary for initial specification of stamen and carpel development, is reportedly necessary to later stages of development plants and represses a second transcription factor AGAMOUS (Goodrich et al., Nature 386:44-51 (1997); Schumacher and Magnuson, Trends in Genetics 13(5):167-170 (1997)).

[0471] A further class of transcription factors, those containing an AP2 domain, a conserved motif first identified in Arabidopsis (a floral mutant), has been identified in a number of plants (Jofuka et al., Plant Cell 6:1211-1225 (1994); Weigal et al., Plant Cell 7:388-389 (1995)). The AP2 domain, which is a DNA-binding motif of about 60 amino acid has been reported, for example, to be present in the Arabidopsis transcription factors CBF1, APETALA2, AINTEGUMENTA, and TINY; as well as the tobacco ethylene response element binding proteins (Moose and Sisco, Genes and Development 10:3018-3027 (1996)). Weigal et al., reports a 24 amino acid AP2 consensus domain which is predicted to form an amphipathic α-helix that may mediate protein-protein interactions (Weigal et al., Plant Cell 7.388-389 (1995)).

[0472] Mutations of transcription factors containing an AP2 domain have been to effect floral and ovule development (Meyerowitz et al., Cell 88:299-308 (1997)). Other transcription factors from this family have been reported to play a role in cold- and dehydration-regulated gene expression (Stockinger et al., Proc. Natl. Acad. Sci. (U.S.A.) 94(3):035-1040 (1997)).

[0473] Zinc-finger proteins have been isolated from plants (Takatsuji and Matsumoto, J. Biol. Chem. 271:23368-23373 (1996); Messner, Plant Mol. Biol. 33:615-624 (1997); Dietrich et al., Cell 88:685-694 (1997); Pater et al., Nucleic Acid Research 24:4624-4631 (1996); Tague and Goodman, Plant Mole. Biol. 28:267-279 (1995); Putterill et al., Cell 80:847-857 (1995); Takatsuji et al., Plant Cell 6:947-958 (1994)). Zinc-finger proteins have been associated with a number of processes in plants including cell death (Dietrich et al., Cell 88:685-694 (1997)) and flower morphology (Pater et al., Nucleic Acid Research 24:462-44631 (1996)).

[0474] The term zinc-finger has been applied to a broad set of protein motifs. Zinc-finger transcription factors may be subdivided into a number of categories. A category of zinc-finger transcription factors referred to as the C₂H₂ zinc finger transcription factors (also referred to as either TFIIA or Krüpell-like zinc fingers) (Meissner and Michael, Plant Molecular Biology 33:615-624 (1997); Takatsuji et al., EMBO J. 11: 241-249 (1994); Tague and Goodman, Plant Mol. Biol. 28:267-279 (1995); Takasuji et al., Plant Cell 6:947-948 (1994), Sakamoto et al., Eur. J. Biochem. 217:1049-1056 (1993); Saki et al., Nature 378:199-203 (1995)). C₂H₂ zinc finger transcription factors have been reported, which contain one, two or three zinc fingers. These zinc fingers are maintained by cysteine and/or histidine residues organized around a zinc metal ion (Meissner and Michael, Plant Molecular Biology 33:615-624 (1997)).

[0475] Examples of C₂H₂ zinc finger transcription factors include: the petunia Epf1 product which binds to an inverted repeat found in the promoter of EPSP, the W2f1 product from wheat, which binds to a nonameric motif found in the histone H3 promoter; the Arabidopsis AtZFP1 product associated with shoot development; and the Arabidopsis SUPERMAN product that is associated with negative regulation of B-function floral organ identity (Meissner and Michael, Plant Molecular Biology 33:615-624 (1997); Takatsuji et al., EMBO J. 11:241-249 (1994); Tague and Goodman, Plant Mol. Biol. 28:267-279 (1995); Takasuji et al., Plant Cell 6:947-948 (1994), Sakamoto et al., Eur. J. Biochem. 217:1049-1056 (1993); Saki et al., Nature 378:199-203 (1995)).

[0476] Another category of zinc-finger transcription factor include plant relatives of the GATA-1 transcription factor (Dietrich et al., Cell 88: 685-694 (1997); Evans and Felsenfeld, Cell 58:877-885 (1989); Putterill et al., Cell 80:847-857 (1995); Yanagisawa et al., Nucleic Acid Research 23:3403-3410 (1995); De Paolis et al., Plant J. 10:215-224 (1996); Lippuner et al., J. Biol. Chem. 271:12859-12866 (1996)). GATA-1 like transcription factors have been associated with, for example, the regulation of cell death and the regulation of expression associated with salt stress.

[0477] 6. R-Gene Products

[0478] Plant disease resistance is often a consequence of the induction of certain defense responses in the plant. One such defense response is the hypersensitive response (HR), which is induced in infected plant cells, resulting in cell wall depositions and localized cell death. The HR is reported to prevent pathogens from spreading throughout the plant by depriving the pathogen of a living host cell. From genetic analysis of plant-pathogen interactions, it has been reported that HR-associated resistance is dependent on the presence of active resistance genes (R-genes) in the plant and corresponding avirulence genes (avr) in the pathogen (Flor, Annu. Rev. Phytopathol. 28:275-296 (1971)). In yeast cells, it has been reported that an R-gene product and it's cognate avr gene product directly interact. In the absence of either of these genes, the interaction between plant and pathogen may result in disease. A second defense response, linked to R-gene triggered HR, results in the systemic induction of a number of host defense proteins and the establishment of systemic acquired resistance (SAR).

[0479] In addition to avr genes, hrp genes have been shown to be involved in the production and secretion of bacterial virulence/avirulence proteins, including harpin of Erwinia amylovora and harpinPss of Pseudomonas syringae (Gopolan et al., Plant J. 10:591-600 (1996)).

[0480] Isolated R-genes, or fragments thereof, have been used to identify R-gene homologues in plants (Kanazin et al., Proc. Natl. Acad. Sci. (U.S.A.) 93:11746-11750 (1996); Leister et al., Nature Genetic 14:421-429 (1996)). A number of R-gene homologues have been identified by Southern analysis using R-gene probes. Other R-genes have been identified and isolated using primers that anneal to the conserved regions of R-genes (Staskawicz et al., Science 268:661-667 (1995)).

[0481] It has also been reported that HR can be induced by overexpression of R-genes. Tobacco elicitor-binding proteins and tobacco genes with unknown function have also been reported to induce or enhance HR (Karrer et al., unpublished sequences U66265-U66273 (1996)). An early event in HR is reported to be the rapid production of reactive oxygen products such as hydrogen peroxide. The enhancement of hydrogen peroxide production by overexpression of certain enzymes such as glucose oxidase from Aspergillus niger has been reported to result in increased resistance to certain pathogens (Wu et al., Plant Cell 7:1357-1368 (1995)).

[0482] It has been reported that cloned R-genes can be transferred from resistant plant species to susceptible plant species. For example, R-genes have been transferred from tomato to tobacco (Rommens et al., Plant Cell 7:1537-1544 (1995); Thilmony et al., Plant Cell 7:1529-1536 (1995)), or tobacco to tomato (Whitham et al., Proc. Natl. Acad. Sci. (U.S.A.) 93:8776-8781 (1996)).

[0483] R-genes involved in HR have been isolated. Sequence comparisons group R-gene products into four different classes. Class I R-genes encode products that can be characterized by the presence of a leucine rich repeat, a nucleotide binding site and a stretch of amino acids with the consensus sequence “GLPLAL”. R-genes that belong to this class include: Arabidopsis Rps2, Arabidopsis Rpm1, Arabidopsis Rpp5, tomato Prf, tomato I2, flax L6, flax M, tobacco N, and wheat Cre3 (Hammond-Kosack and Jones, Plant Cell 8:1773-1791 (1996)). Other reported members of this class include tomato Mi and potato Rx1. The class I R-gene products can be further divided into two subclasses that are characterized by either (A) the presence of an N-terminal leucine zipper (e.g., Rps2 and Rpm1), or (B) the presence of a Drosophila Toll/Human interleukin-1 cytoplasmic like domain (e.g., L6, tobacco N and Rpp5). For example, 12, an R-gene product that contains a leucine zipper, confers Lycopersicon esculentum resistance against the fungus Fusarium oxysporum f. sp. lycopersici race 2 in tomato (Segal et al., Mol. Gen. Genet. 231:179-185 (1992)).

[0484] An L6 rust resistance gene from flax has been cloned after tagging with the maize transposable element Activator (Lawrence et al., Plant Cell 7:1195-1206 (1995); Lawrence et al., Plant J. 4:659-669 (1993). An M rust resistance gene has been cloned from flax (Anderson et al., Plant Cell 9:641-651 (1997)). The cloned M rust resistance gene encodes a protein of the nucleotide binding site leucine-rich repeat class and is related to the unlinked L6 rust resistance gene (86% nucleotide identity).

[0485] A N gene of tobacco mediates resistance to the pathogen tobacco mosaic virus (TMV) (Dinesh-Kumar et al., Proc. Natl. Acad. Sci. (U.S.A.) 92:4175-4180 (1995)). It has been reported that N confers a hypersensitive response and effectively localizes tobacco mosaic virus to the site of inoculation in transgenic tomato, as it does in tobacco. An N gene has been isolated by transposon tagging using the maize Activator transposon (Whitham et al., Cell 78:1101-1115 (1994)). Transgenic tomato plants bearing an N gene have been reported (Whitham et al., Proc. Natl. Acad. Sci. (U.S.A.) 93:8776-8781 (1996)).

[0486] Other characterized Class I R-genes are reported to contain a leucine-rich repeat. This leucine rich repeat has been implicated in protein-protein interactions, and it has been reported that it may confer specificity on the R-gene product. The leucine rich repeat is conserved in R-gene proteins. Two mutant proteins of Rps2 and Rpm1 are reported to be nonfunctional because of a single amino change within the leucine rich repeat (Bent et al., Science 265:1856-1860 (1994); Grant et al., Science 269:843-846 (1995)). Plant galacturonase inhibitors (PGIs) contain leucine rich repeats that share homology with the leucine repeats of R-genes. PGIs are induced by plant pathogens and can trigger plant defense responses (Bergmann et al., Plant J. 5:625-634 (1994)). It has been reported that the mode of action of PGIs is similar to that of R-genes.

[0487] Plant with inactivated genes that function downstream from the point where different R-gene cascades merge are not reported to induce spontaneous lesions and are not reported to affect a plant's ability to generate HR to avirulent pathogens. However, reported mutations in these genes result in a loss of specific resistances to certain pathogens. Examples of these genes are the Arabidopsis genes Ndr1 (Century et al., Proc. Natl. Acad. Sci. (U.S.A.) 92:6597-6601 (1995)) and Eds1 (Parker et al., Plant Cell 8:2033-2046 (1996)). R-gene products that trigger the Ndr1 pathway often contain, apart from a leucine rich repeat and a nucleotide binding site, a leucine zipper (e.g., Rpm1, Rps2). A tobacco protein, Hin1, is reported to share homology with Ndr1 and to be upregulated by pathogen elicitors (Gopalan et al., Plant J. 10:591-600 (1996)). It has been reported that Hin1 may have a similar role in plant defense as Ndr1.

[0488] A Eds1 pathway can be activated by R-gene products that lack a leucine zipper (e.g., Rpp5). An Arabidopsis Rpp5 gene specifying resistance to the downy mildew pathogen Peronospora parasitica has been positionally cloned and encodes a protein that possesses a putative nucleotide binding site and leucine-rich repeats and exhibits structural similarity to the plant resistance gene products N and L6 (Parker et al., Plant Cell. 9:879-894 (1997); Reignault et al., Mol. Plant. Microbe Interact. 9:464-473 (1996)).

[0489] Class II R-gene products contain a leucine rich repeat and a putative conserved membrane anchor. Members of this class include the tomato genes Cf2, Cf4, Cf5, and Cf9 (Hammond-Kosack and Jones, Plant Cell 8:1773-1791 (1996)). Tomato Cf genes confer resistance to C. fulvum. These genes reside in complex loci and encode predicted membrane-bound proteins with extracytoplasmic leucine-rich repeats (Parniske et al., Cell 91:821-832 (1997)). Cf4, which also encodes a membrane-anchored extracellular glycoprotein, has been cloned and characterized (Thomas et al., Plant Cell 9:2209-2224 (1997)). Cf4 contains 25 leucine-rich repeats, which is two fewer than the number of leucine rich repeats in Cf9. The Cf9 resistance gene encodes a membrane-anchored extracellular glycoprotein that contains leucine-rich repeats (de Wit et al., Antonie Van Leeuwenhoek 71:137-141 (1997)). A Cf9 gene has been isolated by transposon tagging with the maize transposable element Dissociation (Jones et al., Science 266:789-793 (1994)). It has been reported that the avr gene product avr9 of Cladosporium fulvum, which functions as an elicitor of the tomato resistance response, binds to cell walls of both resistant Cf9/Cf9 and susceptible cf9/cf9 plants (Kooman-Gersmann et al., Plant Cell 8:929-938 (1996)).

[0490] A tomato resistance locus Cf2 has been isolated by positional cloning and is reported to contain two almost identical genes, each conferring resistance to isolates of tomato leaf mold (C. fulvum) expressing the corresponding Avr2 gene (Dixon et al., Cell 84:451-459 (1996)). These two Cf2 genes encode protein products that differ from each other by only three amino acids and contain 38 leucine-rich repeat motifs. In the two reported Cf2 genes, 20 of the leucine-rich repeat motifs are reported to contain conserved alternating repeats. The C-terminus of Cf2 carries regions of pronounced homology to the protein encoded by the unlinked Cf9 gene.

[0491] A third class of R-gene products consists of serine/threonine protein kinases which share homology to the human interleukin-1 receptor associated protein kinase, IRAK, that is essential for the activation of the transcription factor NF-kB (Cao et al., Science 271:1128-1131 (1996)). Class III R-genes include Pto and Lrk10 (Feuillet et al., Plant J. 11:45-52 (1997)). Pto, which lacks a leucine rich repeat, is reported to interact, directly or indirectly, with another protein in the Pto pathway, Pseudomonas resistance and fenthion sensitivity (Prf) protein, which contains a leucine rich repeat (Salmeron et al., Cell 86:123-133 (1996); Salmeron et al., Plant Cell 6:511-520 (1994)). Prf also contains leucine-zipper, and nucleotide-binding motifs (Salmeron et al., Cell 86:123-133 (1996)). Lrk10, which encodes a receptor-like protein kinase, has been isolated from wheat by screening a set of near-isogenic lines carrying different leaf rust resistance genes with a wheat probe encoding a serine/threonine protein kinase (Feuillet et al., Plant J. 11:45-52 (1997)).

[0492] A tomato serine/threonine protein kinase, Pto, binds to the avrPto protein of Pseudomonas syringae pv. tomato and functions as an elicitor receptor (Tang et al., Science 274:2060-2063 (1996)). The Pto gene encodes a serine/threonine protein kinase with an N-terminal myristoylation site. Pto is reported to play a role in signaling and membrane targeting (Martin et al., Science 262:1432-1436 (1993)). Pto is reported to exhibit similarity to SRK6, which is associated with cell recognition during pollination.

[0493] The protein kinase encoded by Pto has been shown to bind to a number of different proteins in vivo are reported to be associated with different aspects of the defense pathway. Pto physically interacts with a second IRAK-like kinase, Pti1 (Pto interacting protein). Pti1 is reported to function downstream of Pto in a kinase cascade and has been implicated in the pathway leading to HR cell death (Zhou et al., Cell 83:925-935 (1995)). Pto has also been reported to interact with a second class of proteins which includes, for example, Pti4, Pti5, and Pti6. The second class of proteins is reported to operate in the pathway leading to activation of defense proteins and SAR (Zhou et al., EMBO J. 16:3207-3218 (1997)). On the basis of sequence homology and DNA binding studies, Pti4, Pti5, and Pti6 are reported to be associated with the transcriptional activation of genes encoding defense proteins, called pathogenesis related (PR) genes, that play a role in establishing SAR.

[0494] A fourth class of R-genes encode receptor kinases having an extracellular leucine rich repeat and a cytoplasmic kinase domain. The fourth class of R-genes include, for example, the rice gene Xa21 (Hammond-Kosack and Jones, Plant Cell 8:1773-1791 (1996)). The rice gene Xa21, which confers resistance to Xanthomonas oryzae pv. oryzae (Xoo), has been isolated using a map-based cloning strategy (Ronald, Plant Mol. Biol. 35:179-186 (1997); Wang et al., Mol. Plant Microbe Interact. 9:850-855 (1996)). The protein has both a leucine-rich repeat motif and a serine-threonine kinase-like domain (Song et al., Science 270:1804-1806 (1995)). A putative receptor kinase with homology to Xa21 is the Brassica protein SFR2, which has been implicated in the autoincompatibility response that leads to rejection of self pollen. Thus, both Xa21 and SRF2 are reported to be involved in cell-cell interactions. It has been reported that SFR2 mRNA accumulates in response to infiltration with bacteria and salicylic acid (Pastuglia et al., Plant Cell 9:49-60 (1997)).

[0495] A fifth class of R-genes encodes for proteins with a leucine rich repeat-like structure. The fifth class of R-genes include, for example, the sugar beet Hs1 gene (Cai et al., Science 275:832-34 (1997)). Hs1 is reported to confer resistance to the beet cyst nematode (Heterodera schachtii Schmidt).

[0496] Systemic acquired resistance is linked to R-gene defense, but extends host “immunity” beyond the primary site of pathogen attack. SAR is triggered at infection sites undergoing HR, and becomes systemically established, often over the course of about one week. Since many pathogenesis related (PR) proteins synthesized during this response display antimicrobial activity, SAR is associated with broad-spectrum control of many biotrophic pathogens.

[0497] Mutations that lead to spontaneous formation of HR lesions and constitutive expression of SAR proteins have identified genes associated with HR and SAR. Examples of such genes include in Arabidopsis Cpr5 (Bowling et al., Plant Cell 9:1573-1584 (1997)), Acd2 (Greenberg et al., Cell 7:551-63 (1994)), and Lsd1 (Dietrich et al., Cell 88:685-94 (1997)). The Lsd1 gene encodes a protein with three zinc finger domains, suggesting a role in transcriptional regulation. Lsd1 mutants are hyper-responsive to cell death and fail to limit the extent of death regulation (Dietrich et al., Cell 88:685-694 (1997)).

[0498] Inactivation of genes functioning downstream of the HR/SAR branchpoint, such as the Arabidopsis Cpr1, Cpr6, Cim2 and Cim3 genes, result in constitutive expression of SAR (Bowling et al., Plant Cell 6:1845-1857 (1994); Ryals et al., Plant Cell 8:1809-1819 (1996)).

[0499] The activating function of mutant genes on SAR is correlated with increased salicylic acid (SA) levels (Ryals et al., Plant Cell 8:1809-1819 (1996)). It has been reported that SA plays a role in both SAR signaling and disease resistance. An increased SA level is associated with SAR in tobacco and cucumber, as well as other plant species. Depletion of SA has been reported to be associated with the breakdown of SAR in tobacco and Arabidopsis (Ryals et al., Plant Cell 8:1809-1819 (1996)). SA is a product of phenylpropanoid metabolism formed via decarboxylation of trans-cinnamic acid to benzoic acid and its subsequent 2-hydroxylation to SA. Newly synthesized SA is rapidly metabolized to SA O-beta-D-glucoside and methyl salicylate. Two enzymes involved in SA biosynthesis and metabolism are benzoic acid 2-hydroxylase (BA2H), which converts benzoic acid to SA, and UDPglucose:SA glucosyltransferase (SA GTase (EC 2.4.1.35)), which catalyzes the conversion of SA to SA glucoside.

[0500] A BA2H enzyme has been partially purified and characterized as a soluble protein of 160 kDa that belongs to a class of cytochrome P450 monoxygenases (Leon et al., Proc. Natl. Acad. Sci. (U.S.A.) 92:10413-10417 (1995)). Pathogen infection has been associated with increases in BA2H levels that parallel free SA levels. BA2H has been reported to have a regulatory role in SA accumulation during the development of SAR (Leon et al., Plant Phys. 103:323-28 (1993)).

[0501] Another group of proteins with a function in the plant pathogen-response are mitogen-activated protein kinases (MAPKs) that share structural and/or functional homology to the mammalian stress-activated protein kinase, SAPK. SAPK is the dominant c-Jun amino-terminal protein kinase activated in response to cellular stress, such as treatment with tumor-necrosis factor-alpha and interleukin-beta (Sanchez et al., Nature 372:794-798 (1994)). In tobacco, SA was shown to induce a rapid and transient activation of a 48 kD MAPK called p48 SIP kinase (for SA-Induced Protein kinase). Biologically active analogs of SA, which induce pathogenesis-related genes and enhanced resistance, also activated this kinase. The SIP kinase is phosphorylated on a tyrosine residue(s), and treatment with either tyrosine or serine/threonine phosphatases abolished its activity. Analysis of the SIP kinase sequence indicates that it belongs to the MAP kinase family and that it is distinct from the other plant MAP kinases previously implicated in stress responses (Zhang and Klessig, Plant Cell 9:809-824 (1995)). Another MAPK has been reported to accumulate one minute after mechanical wounding in tobacco. Inactivation of the endogenous homologous gene resulted in the inhibition of both wound-induced gene transcription and biosynthesis of jasmonic acid (Seo et al., Science 270:1988-1992 (1995)).

[0502] An Arabidopsis Npr1 gene is reported to act downstream of SA. Mutants that contain an inactivated Npr1 gene accumulate high levels of SA, but are unable to establish SAR. The Arabidopsis Npr1 gene controls the onset of systemic acquired resistance (SAR), a plant immunity, to a broad spectrum of pathogens that is normally established after a primary exposure to avirulent pathogens (Cao et al., Cell 88:57-63 (1997)). Mutants with defects in Npr1 fail to respond to various SAR-inducing treatments and display limited expression of PR genes and exhibit increased susceptibility to infections.

[0503] An Npr1 gene has been cloned from Arabidopsis (Cao et al., Cell 88:57-63 (1997)). Npr1 mutants are susceptible to a variety of pathogens. Npr1 may function in the signal transduction pathway after the specific R-gene pathways converge. Overexpression of Npr1 protein in Arabidopsis is reported to lead to a faster defense response and heightened resistance to both fungal and bacterial pathogens. Protein motifs in Npr1 include ankyrin repeats that have been reported to mediate protein-protein interactions, and putative nuclear localization signals.

[0504] The Npr1 protein has been reported to have a regulatory role as a transcriptional activator of defense genes. A Npr1/green fluorescent protein (GFP) fusion has been reported to restore wild type Npr1 activity in Arabidopsis mutants. After challenge with an avirulent pathogen or chemical elicitor, the Npr1-GFP fusion is translocated from the cytoplasm to the nucleus of the challenged plant cells. Other putative transcription factors that may play a role in the activation of plant defense genes are the tomato proteins Pti4, Pti5 and Pti6. These proteins contain an ethylene-responsive element-binding domain, EREBP, and bind to several promoters of pathogenesis-related genes (Zhou et al., EMBO J. 16:3207-3218 (1997)). Also, the parsley elicitor-inducible DNA binding proteins BPF1, which binds to the P box of certain defense related promoters (da Costa e Silva et al., Plant J. 4:125-135 (1993)), and WRKY1-WRKY3, which bind to the promoter of PR1 (Rushton et al., EMBO J. 15:5690-5700 (1996)), are reported to function in plant defense responses. Furthermore, heat stress-inducible transcription factors hsf8 and hsf30 (Treuter et al., Mol. Gen. Genet. 240:113-125 (1993)) and hsfA1 and hsfA2 (Boscheinen et al., Mol. Gen. Genet. 255:322-331 (1997) are reported to play a role in the plant stress and pathogen response.

[0505] Additional pathways in the downstream defense response signaling events have been reported in plants. Inactivation of the Arabidopsis Cpr6 gene results in constitutive expression of PR genes that are SA-dependent and independent of the presence of a functional Npr1 gene (Clark et al., Plant Cell, in press). In addition, Cpr6 (and Cpr5) inactivation results in constitutive expression of defense genes such as plant defensin PDF1.2 and plant thionin THI2.1 genes, which in wild type plants, are induced by an SAR pathway in a manner that is independent from SA (Bowling et al., Plant Cell 9:1573-1584 (1997); Penninckx et al., Plant Cell 8:2309-23 (1996)). This SA-independent SAR pathway can be activated by infection of plants with certain necrotrophic pathogens such as Fusarium oxysporum (Epple et al., Plant Cell 9:509-520 (1997)), and Alternaria brassicicola (Penninckx et al., Plant Cell 8:2309-2323 (1996)). Chemical agents such as jasmonic acid and coronatin can induce this pathway leading to acquired resistance against both necrotrophic pathogens and biotrophic pathogens, such as Peronospora parasitica (Bowling et al., Plant Cell 9:1573-1584 (1997); Cao et al., Cell 88:57-63 (1997)). SA has been reported to inhibit jasmonic acid (JA) biosynthesis (Pena-Cortes et al., Biochem. Soc. Symp. 60:143-148 (1994)) and high SA levels may block the induction of defense genes effective against certain necrotrophic pathogens.

[0506] Another gene, PAD4, reported to play a role in both SAR and SA-independent SAR pathway, is involved in accumulation of SA and biosynthesis of the phytoalexin calmodulin. Inactivation of PAD4 is reported to cause sensitivity to downy mildews (Glazebrook et al., Genetics 146:381-392 (1997)).

[0507] Phytoalexin production, which can be triggered by SA-independent SAR, can be decreased by, e.g., suppression of phenylalanine ammonium lyase (PAL) or by expression of tryptophan decarboxylase. Transgenic plants generated in this way have been reported to display an enhanced sensitivity to Cercospora nicotianae and Phytophthora infestans (Dixon and Paiva, Plant Cell 7:1085-1097 (1995)). Expression of a grapevine stilbene synthase (SS) gene in tobacco resulted in synthesis of the stilbene phytoalexin resveratrol and increased resistance to Botrytis cinerea (Hain et al., Nature 361:153-156 (1993)).

[0508] Another class of proteins with a function in phytoalexin production comprise proteins in the tryptophan pathway including anthranilate synthase alpha, anthranilate synthase beta, phosphoribosyl anthranilate transferase (PAT), tryptophan synthase beta, phosphoribosyl anthranilate isomerase and tryptophan synthase alpha, all of which are pathogen-inducible (Zhao and Last, Plant Cell 8:2235-2244 (1996)). Enzymes active in other phytoalexin biosynthesis pathways are 3-deoxy-D-arbino heptulosonate-7-phosphate synthase (shikimate pathway), which is induced by pathogens (Zhao and Last, Plant Cell 8:2235-2244 (1996)), and the elicitor-inducible tobacco enzymes 3-hydroxy-3-methylglutaryl-CoA-reductase, sesquiterpene cyclase and sesquiterpene capsidiol (Chappel and Noble, Plant Phys. 85:467-473 (1987); Vogeli and Chappel, Plant Phys. 88:1291-1296 (1988)).

[0509] Additional pathogen- and/or elicitor inducible enzymes with a function in phytoalexin biosynthesis are tobacco 5-epi-aristolchene synthase (Facchini et al., Proc. Natl. Acad. Sci. (U.S.A.) 89:11088-11092 (1992)), Medicago 6-phosphogluconate dehydrogenase (Fahrendorf et al., Plant Mol. Biol. 28:885-990 (1995)), carnation benzoyl CoA:anthranilate N benzoyltransferase (Yang et al., Plant Mol. Biol. 35:777-789 (1997)), cotton delta cadinine synthase (Chen et al., Arch. Biochem. Biophys. 324:255-266 (1995)), alfalfa isoflavone reductase (Paiva et al., Plant Mol. Biol. 17:653-657 (1991)), NAD(P)H dependent 6′-deoxychalcone synthase (Welle et al., Eur. J. Biochem. 196:423-430 (1991)), Glycyrrhiza polyketide reductase (Plant Phys. 111:347-348 (1996)), and Vitis sesquiterpene synthase (Garcia-Espana et al., Arch. Biochem. Biophys. 288:414-420 (1991)).

[0510] Phenylalanine ammonia-lyase (PAL (EC 4.3.1.5)) catalyzes the first reported reaction in the general phenylpropanoid pathway leading to the production of phenolic compounds which exhibit a range of biological function (Fukasawa-Akada et al., Plant Mol. Biol. 30:711-722 (1996)). PAL transcript levels are reported to be higher in flowers and roots than in leaves and stems of mature plants. PAL transcripts accumulate differentially during flower and leaf maturation. PAL mRNA levels decline during flower maturation but increase during leaf maturation. In leaves, PAL transcripts rapidly accumulate after wounding. Clones for phenylalanine ammonia-lyase (PAL) have been reported in maize, rice (Oryza sativa L.), Stylosanthes humilis, parsley, Arabidopsis thaliana, tobacco, (Nicotiana tabacum L. cv Samsun NN), and soybean (Rosler et al., Plant Physiol 113:175-179 (1997); Zhu et al., Plant Mol. Biol. 29:535-550 (1995); Manners et al., Plant Physiol. 108:1301-1302 (1995); Logemann et al., Proc. Natl. Acad. Sci. (U.S.A.) 92:5905-5909 (1995); Wanner et al., Plant Mol. Biol. 27:327-338 (1995); Pellegrini et al., Plant Physiol. 106:877-886 (1994); Frank and Vodkin, DNA Seq. 1:335-346 (1991)).

[0511] Lignin is a phenolic polymer based on cinnamyl alcohol subunits derived from phenyl propanoid metabolism. Lignin is reported to play a role in plant defense by strengthening cell walls (Dougles, Trends Plant Sci. 1:171-178 (1996)). Lignin biosynthesis includes hydroxylation reactions catalyzed by cinnamate-4-hydroxylase (C4H) and ferulate-5-hydroxylase (F5H) and methylation reactions catalyzed by the bispecific caffeic acid/5-hydroxyferulic acid O-methyltransferase (COMT). Reduction of ferulic acid and sinapic acid to their corresponding alcohols is reported to occur in three steps: formation of activated thioesters by the action of 4-coumarate:coenzyme A ligase (4CL), and reduction to the aldehydes and alcohols by the action of cinnamyl-CoA reductase and cinnamyl alcohol dehydrogenase (CAD (E.C. 1.1.1.195)), respectively. Alternatively, methylation can occur at the level of the CoA esters, such as 5-hydroxy-feruloyl-CoA, rather than that of the free acids by the action of caffeoyl-CoA O-methyltransferase (CCoOMT), or by O-methyltransferases on hydroxycinnamyl aldehydes or alcohols (Lee et al., Plant Cell 9:1985-1998 (1997); Grima-Pettenati et al., Phytochemistry 37:941-947 (1994); Grima-Pettenati et al., Plant Mol. Biol. 21:1085-1095 (1993)). CAD genes are expressed in response to different developmental and environmental cues (MacKay et al., Mol. Gen. Genet. 247:537-545 (1995)). Clones of CAD have been reported from the loblolly pine (Pinus taeda L.), Arabidopsis thaliana, Eucalyptus botryoides, and tobacco (MacKay et al., Mol. Gen. Genet. 247:537-545 (1995); Sommers et al., Plant Physiol. 108:1309-1310 (1995); Hibino et al., Plant Physiol. 104:305-306 (1994); Knight et al., Plant Mol. Biol. 19:793-801 (1992)). A bean CAD gene is reported to be share homology with a maize malic enzyme (Walter et al., Plant Mol. Biol. 15:525-526 (1990)).

[0512] Cinnamate 4-hydroxylase (C4H) is the first reported Cyst P450-dependent monooxygenase of the phenylpropanoif pathway (Bell-Lelong et al., Plant Physiol. 113:729-738 (1997)). A cDNA for C4H has been isolated from Arabidopsis thaliana using a C4H cDNA from mung bean as a hybridization probe (Mizutani et al., Plant Physiol. 113:755-763 (1997)).

[0513] Ferulate-5-hydroxylase (F5H) is a cytochrome P450-dependent monooxygenase (P450) of the general phenylpropanoid pathway (Meyer et al., Proc. Natl. Acad. Sci. (U.S.A.) 93:6869-6874 (1996)).

[0514] Caffeoyl-CoA 3-O-methyltransferase (CCoAOMT) cDNA clones have been isolated from RNA extracted from TMV-infected tobacco leaves (Martz et al., Plant Mol. Biol. 36:427-437 (1998)). Two members of the CCoAOMT gene family are reported to be constitutively expressed in plant organs and tissues whereas another two members are reported to be preferentially expressed in flower organs, after tobacco mosaic virus (TMV) infection or elicitor treatment of leaves.

[0515] Caffeic acid O-methyltransferase (COMT (EC 2.1.1.6)), which is associated with lignin biosynthesis, exists as an active monomer of subunit molecular weight of 41,000 daltons (Vignols et al., Plant Cell 7:407-416 (1995)). The pattern of expression that results from the use of a COMT gene zea mays gene has been studied by histochemical and fluorometric beta-glucuronidase (GUS) analysis in transgenic maize and tobacco plants (Capellades et al., Plant Mol. Biol. 31:307-322 (1996)). This COMT promoter directs GUS expression to the xylem and the other tissues undergoing lignification, and it is unregulated in respond to wounding and to elicitors. COMT can be separated into two forms on the basis of its isoelectric points and relative affinities for S-adenosyl-methionine and S-adenosylhomocysteine (Edwards and Dixon, Arch Biochem Biophys 287:372-379 (1991)).

[0516] The phenylpropanoid enzyme 4-coumarate:coenzyme A ligase (4CL (EC 6.2.1.12)) is reported to activate the hydroxycinnamic acids for the biosynthesis of the coniferyl and sinapyl alcohols that are subsequently polymerized into lignin (Lee et al., Plant Cell 9:1985-1998 (1997)). 4CL clones have been reported from loblolly pine (Pinus taeda L.) (Zhang and Chiang, Plant Physiol 113:65-74 (1997)), Glycine max (Uhlmann and Ebel, Plant Physiol. 102:1147-1156 (1993)), Lithospermum erythrorhizon (Yazaki et al., Plant Cell Physiol. 36:1319-1329 (1995)), Arabidopsis thaliana (Lee et al., Plant Mol. Biol. 28:871-884 (1995)), and tobacco (Lee and Douglas, Plant Physiol 112:193-205 (1996)). 4CL antisense lines have been reported in Arabidopsis and tobacco (Kajita et al., Plant Cell Physiol. 37:957-965 (1996).

[0517] 4CL has been reported to catalyze the activation of 4-coumaric acid but benzoic acids (Barillas and Beerhues, Planta 202:112-116 (1997)). 4CL expression is activated early during seedling development and has been reported to be correlated with the onset of lignin deposition in cotyledons and roots 2-3 days after germination. mRNA accumulation is transiently activated by wounding of mature Arabidopsis leaves. 4CL has been purified from differentiating xylem of loblolly pine (Pinus taeda L.) and cambial sap of spruce (Picea abies). (Luderitz et al., Eur J Biochem 123:583-586 (1982)). The pine 4CL has been reported to have an apparent molecular mass of 64 kD (Voo et al., Plant Physiol. 108:85-97 (1995)). Ferulic, 4-coumaric and caffeic acids are reported to be substrates for 4CL.

[0518] Other enzymes that are involved in cell wall strengthening are elicitor- and/or pathogen inducible peroxidases, isolated from, e.g., Medicago (Cook et al., Plant Cell 7:43-55 (1995)) and tomato (Vera et al., Mol. Plant. Microbe Interact. 6:790-794 (1993)). In addition, wound- or pathogen inducible hydroxyproline-rich proteins have been isolated from plants such as pea (Banik et al., Plant Mol. Biol. 31:1163-1172 (1996)) and sunflower.

[0519] Plant defense response can also limit damage caused by oxidative stress and/or cell death. Enzymes that play a role in protection against free radicals include, but are not limited to, glutathione-S-transferase (Dudler et al., Mol. Plant-Microbe Interact. 4:14-18 (1991)), blue copper protein and iron superoxide dismutase. DAD1 is a human protein that is reported to play a role in preventing programmed cell death.

[0520] An early plant signal reported to be involved in the induction of defense responses is a tomato 18-amino acid polypeptide systemin. This polypeptide is reported to activate defense genes at levels as low as fmols/plant. As with animal polypeptide hormones, systemin is derived from a larger precursor protein, called prosystemin, by limited proteolysis. Systemin has been reported, by autoradiography experiments, to be phloem mobile and, by antisense experiments, to be a component of the wound-inducible, systemic signal transduction system leading to the transcriptional activation of the defensive genes (Schaller and Ryan, Bioessays 18:27-33 (1996)). It has also been reported that systemin is a wound hormone.

[0521] Other early signals for plant defense responses are salicylic acid and jasmonic acid. Several enzymes are reported to play a role in jasmonic acid biosynthesis. One of these enzymes is lipoxygenase (LOX (EC 1.13.11.12)). LOX is also reported to induce tuberization in potato (Royo et al., J. Biol. Chem. 271:21012-21019 (1996)). Purified soybean plasma membranes exhibit lipoxygenase activity with a pH optimum of 5.5-6.0 and a Kₘ value of 200 μM for both linolenic and linoleic acids (Macri et al., Biochim. Biophys. Acta 1215:109-114 (1994)). Lipoxygenase (LOX) clones have been reported from maize embryos (Jensen et al., Plant Mol. Biol. 33:605-614 (1997)), rice (Ohta et al., Eur. J. Biochem. 206:331-336 (1992)), tobacco (Veronesi et al., Plant Physiol. 112:997-1004 (1996)), cucumber seeds (Hohne et al., Eur. J. Biochem. 241:6-11 (1996)), potato (Royo et al., J. Biol. Chem. 271:21012-21019 (1996)), soybean (Saravitz and Siedow, Plant Physiol. 110:287-299 (1996)), and Arabidopsis (Melan et al., Biochim. Biophys. Acta 1210:377-380 (1994); Bell and Mullet, Plant Physiol. 103:1133-1137 (1993)).

[0522] LOX is a non-heme iron containing enzyme that catalyzes the formation of hydroperoxylinolenate from linolenic. Multiple forms of LOX are found in plants. Different LOX forms are reported to vary in their organ and tissue distribution and also differ in their substrate specificity and production of hydroperoxylinolenate isomers. LOX is generally found in multiple subcellular compartments. Plant LOX produces two linolenic acid derived isomers, 9-hydroperoxylinolenate and 13-hydroperoxylinolenate. 13-hydroperoxylinolenate is reported to be a precursor to jasmonic acid. An enzyme catalyzing the formation of 13-hydroperoxylinolenate for inducible jasmonic acid production is located in the plastid (Creelman and Mullet, Ann. Rev. Plant Physiol. Plant Mol. Biol. 48:335-381 (1997)). A rice LOX, with a plastid transit sequence has been reported (Peng et al., J. Biol. Chem. 269:3755-3761 (1994)). Transgenic Arabidopsis with a reduced accumulation of plastidic LOX2 failed to produce jasmonic acid in response to wounding (Bell et al., Proc. Natl. Acad. Sci. (U.S.A.) 92:8675-8679 (1995)). Non-plastidic LOX may play a role in constitutive production of jasmonic acid.

[0523] A second enzyme reported to be involved in jasmonic acid biosynthesis is allene oxide synthase (AOS (EC 4.2.1.92)), which converts 13-hydroperoxylinolenate to 12,13-epoxy-octadecatrienoic acid. Allene oxide synthase has been cloned from flax (Song et al., Proc. Natl. Acad. of Sci. (U.S.A.) 90:8519-8523 (1993)), guayule (Pan et al., J. Biol. Chem. 270:8487-8494 (1995)), and Arabidopsis (Laudert et al., Plant Molecular Biology 31:323-335 (1996)). AOS is a cytochrome P450 enzyme with a heme binding region in the C-terminal portion of the protein. Both the flax and Arabidopsis reported clones encode proteins with plastid transit sequences (Song et al., Proc. Natl. Acad. Sci. (U.S.A.) 90:8519-8523 (1993); Laudert et al., Plant Molecular Biology 31:323-335 (1996)). The flax clone has been expressed in potato, and the AOS protein was reported to accumulate in plastids. Transgenic potato plants expressing flax AOS are reported to have elevated levels of jasmonic acid. These elevated jasmonic acid levels did not result in constitutive expression of wound induced transcripts (Harms et al., Plant Cell 7:1645-1654 (1995)). The cloned Arabidopsis AOS gene has been expressed in E. coli, and is reported to accept either 13-hydroperoxylinolenate or 13-hydroperxoylinoleate as substrates (Laudert et al., Plant Molecular Biology 31:323-335 (1996)). The cloned guayule AOS is homologous to clones from Arabidopsis and flax and is associated with rubber particles in the bark parenchyma (Pan et al., J. Biol. Chem. 270:8487-8494 (1995)).

[0524] The epoxide product of AOS, 12,13-epoxy-octadecatrienoic acid, is converted to the enantiomerically pure 12-oxo-phytodienoic acid by the action of allene oxide cyclase (AOC (EC 5.3.99.6)). Activity of AOC been reported in the seed coat of immature soybean seeds (Simpson and Gardner, Plant Physiology 108:199-202 (1995)) and dry maize seeds (Ziegler et al., Plant Physiology 114:565-573 (1997)). The maize enzyme is reported to be soluble, with an approximate molecular weight of 45-47 kD. It is further reported that the maize enzyme is specific for 12,13-epoxy-octadecatrienoic acid derived from linolenic acid, and exhibits little activity with 12,13-epoxy-octadecadienoic acid, which is derived from linoleic acid (Ziegler et al., Plant Physiology 114:565-573 (1997)).

[0525] Mutation-induced recessive alleles (mlo) of the barley Mlo locus confer a leaf lesion phenotype and broad spectrum resistance to the fungal pathogen, Erysiphe graminis f. sp. hordei. A Mlo gene has been isolated from barley using a positional cloning approach (Buschges et al., Cell 88:695-705 (1997)). It has been reported that expression of mlo is restricted to a subcellular, highly localized cell wall apposition site directly beneath the site of abortive fungal penetration (Wolter et al., Mol. Gen. Genet. 239:122-128 (1993)). The deduced 60 kDa protein is reported to be membrane-anchored by at least six membrane-spanning helices. It has also been reported that mlo exhibits a dual negative control function of the Mlo protein in leaf cell death and in the onset of pathogen defense. It has also been reported that the absence of Mlo primes the responsiveness for the onset of multiple defense functions.

[0526] Chalcone synthase (EC 2.3.1.74) is an enzyme that catalyses the first reported reaction dedicated to the flavonoid pathway in higher plants. Chalcone synthase provides the C₁₋₅ chalcone intermediates from which other flavonoids originate by catalyzing the condensation of three molecules of malonyl-CoA with 4-coumaroyl-CoA. The chalcone synthase reaction results in the formation of 2′,4′,6′,4-tetrahydroxychalcone. Chalcone synthase has been purified from several species and antibodies to chalcone synthase have been produced. Chalcone synthase is reported to be expressed during different developmental stages and in response to various stress conditions (Cramer et al., EMBO J. 4:285-289 (1985); Koes et al., Plant Mol. Biol. 12:213-225 (1989)). Chalcone synthase clones have been reported from potato (Jeon et al., Biosci. Biotechnol. Biochem. 60:1907-1910 (1196)), rice (Reddy et al., Plant Mol. Biol. 32:735-743 (1996)), Pueraria lobata (Nakajima et al., Biol. Pharm. Bull 19:71-76 (1996)), Camellia sinensis (Takeuchi et al., Plant Cell Physiol. 35:1011-1018 (1994)), tomato (O'Neill et al., Mol. Gen. Genet. 224:279-288 (1990)), and buckwheat (Hrazdina et al., Arch. Biochem. Biophys. 247:414-419 (1986)).

[0527] Chaperones are proteins that bind to and stabilize other proteins to facilitate the correct folding of these proteins by mediating protein folding, unfolding, oligomerization, subcellular localization and proteolytic removal. Chaperones affect an array of cellular processes required for both normal cell function and survival of stress conditions (Boston et al., Plant Mol. Biol. 32:191-222 (1996)). Major classes of cytoplasmic chaperones include the heat shock proteins (HSPs) 100, 90, 80 and 70. Chaperones that are implicated in protein-protein interactions in the endoplasmic reticulum (ER) include glucose-regulated proteins (GRPs) 94 and 78, disulfide isomerase, the membrane-bound calcium-dependent protein calnexin (Boyce et al., Plant Phys. 106:1691 (1994)), and a calcium-binding protein calreticulin (Nelson et al., Plant Phys. 114:29-37 (1997)). Another class of chaperones comprise the cytosolic peptidyl-prolyl isomerases (cyclophilins).

[0528] Also involved in chaperone-mediated processes are immunoglobulin-binding proteins, thioredoxins, the Sec61 protein required for protein translocation across the ER membrane (Broughton et al., J. Cell Sci. 110:2715-2727 (1997)), and cytoplasmic proteasomes that degrade proteins from the ER. INA-treatment of Arabidopsis plants is reported to result in an upregulation of the expression of homologues of HSP90s, calreticulin, calnexin, cyclophilin, thioredoxins, Sec61, immunoglobulin-binding proteins and proteasomes.

[0529] Several proteins are reported to be upregulated upon pathogen infection, elicitor challenge or treatment with SAR-inducing chemicals, such as INA. These proteins are reported to play active roles in plant defense. One of the elicitor-inducible proteins is omega-6 fatty acid desaturase (FAD). Treatment of cultured parsley cells with a structurally defined peptide elicitor of fungal origin has been associated with changes in the levels of various desaturated fatty acids (Kirsch et al., Plant Phys. 115:283-289 (1997)).

[0530] Other elicitor and/or pathogen-inducible proteins include ahydrophilic regulatory protein with homology to 14-3-3 that regulates the plasma membrane H⁺ATPase (Jahn et al., Plant Cell 9:1805-1814 (1997)), tomato 1-aminocyclopropane-1-1-carboxylate synthase (ACC synthase) (Oetiker et al., Plant Mol. Biol. 34:275-286 (1997)), parsley chorismate mutase 1 (Sequence deposited with Genbank by O. Batz in 1997), licorice cytochrome P450 (CYP Ge-3) (Plant Phys. 115:1288 (1997)), pea disease resistance response protein 206-d (Culley et al., Plant Phys. 107:301-302 (1995)), pea disease resistance response protein DRRG49-c (Chiang et al., Mol. Plant Microbe Interact. 3:78-85 (1990)), rice GDP-dissociating inhibitor OsGDI1 (Sequence deposited with Genbank by C. Y. Kim in 1997), potato hydroxymethylglutaryl CoA reductase (Choi et al., Plant Cell 4:1333-1334 (1992)), parsley S-adenosylhomocysteine hydrolase (Kawalleck et al., Proc. Natl. Acad Sci. (U.S.A.) 89:471-34717 (1992)), tomato subtilisin-like endoprotease PR-P69 (Tornero et al., Proc. Natl. Acad. Sci. (U.S.A.) 93:6332-6337 (1996)), carrot ENOD8 homologous glycoproteins (Bertinetti et al., Mol. Plant Microbe Interact. 9:658-663 (1996)), and parsley tyrosine carboxylase (Kawalleck et al., J. Biol. Chem. 268:2189-2194 (1993)).

[0531] Additional proteins that are reported to be induced by jasmonic acid and/or salicylic acid (analogs) include wheat WCI1, wheat WCI5, and thiolprotease (Gorlach et al., Plant Cell 8:629-643 (1996)), Sauromatum alternative oxidase (Gorlach et al., Plant Mol. Biol. 21:615 (1993)), glucosyltransferase (Horvath et al., Plant Mol. Biol. 31:1061-1072(1996)), barley thionins (Andreson et al., Plant Mol. Biol. 19:193-204 (1992)), and pea disease resistance response protein PI206 (Plant Mol. Biol. 11:713-715 (1988)).

[0532] Another group of proteins with a function in the plant pathogen-response are the downstream components of the defense signaling pathway. This group of proteins can be divided into 5 classes. Members of the first class of defense genes are induced by a variety of biotic and abiotic agents, including salicylic acid, and encode the pathogenesis related (PR) proteins acidic PR1 (PR1a, PR1b, PR1c), acidic β-1,3-glucanase (PR2a, PR2b, PR2c), acidic class II chitinase (PR3a, PR3b, PRQ), hevein-like protein (PR4a, PR4b), thaumatin-like PR5, acidic- and basic isoforms of class III chitinase, extracellular β-1,3-glucanase, basic PR1, and SAR 8.2. In some cases, overexpression of individual PR genes has been reported to enhance disease control. For instance, overexpression of PR1a in tobacco was reported to result in increased resistance to the Oomycete pathogen Peronospora (Alexander et al., Proc. Natl. Acad. Sci. (U.S.A.) 90:7327-7331 (1993)). Overexpression of a tobacco osmotin-like PR5 in potato was reported to result in partial control of Phytophthora infestans (Liu et al., Proc. Natl. Acad. Sci. (U.S.A.) 91:1888-1892 (1994)).

[0533] A second class of defense genes induced by jasmonic acid encode for thionins (Andreson et al., Plant Mol. Biol. 19:193-204 (1992)). A third class of defense genes is also induced by jasmonic acid and encodes for protease inhibitors, some of which display activity against insects and nematodes.

[0534] A fourth class of defense genes are induced by pathogen infection and encode small basic lipid transfer proteins (LTPs), which are reported to participate in cutin biosynthesis, surface wax formation, adaptation of plants to environmental changes and pathogen-defense reactions (Kader, Trends Plant Sci., in press (1998)). A barley LTP applied on tobacco leaves eliminated symptoms caused by infiltration of Pseudomonas syringae. A fifth class of defense genes encodes for defensins or antifungal proteins.

[0535] 7. Plant Proteases

[0536] Proteases are reported to be found within a number of plant cell compartments, including the nucleus, cytosol, golgi, mitochondria, chloroplast, and vacuole/protein body. In photosynthetic tissue, nearly 50% of total cell protein is localized in the chloroplast (Vierstra, Plant Mol. Biol. 32:275-302 (1996)). Although the bulk of plant proteases are located in the vacuole, inhibition of proteases located in the vacuole has not been reported to result in a rapid phytotoxic effect (Moriyasu, Plant Physiol. 109:1309-1315 (1995)). Proteases have been reported to play a role in apoptosis or programmed cell death (Duriez and Shah, Biochem. Cell Biol. 75:337-349 (1997)).

[0537] Proteolysis is reported to be essential for many aspects of plant physiology and development. For example, it has been reported to be responsible for cellular housekeeping and stress response by removing abnormal/misfolded proteins, for supplying amino acids for protein synthesis, for assisting in the maturation of zymogens and peptide hormones by selective cleavage, for controlling metabolism, homeosis, and development by reducing the abundance of key enzymes and regulatory proteins, and for programmed cell death of specific plant cells or organs.

[0538] The cytosol contains the 20S and 26S proteasome, and the ubiquitin proteolytic or ubiquitin conjugating pathway. The proteasome has been reported to be highly conserved, but components of the ubiquitin conjugating pathway have been reported to be diverse. The ubiquitin conjugation pathway involves an E2 enzyme and/or an E3 enzyme. Seventeen reported Arabidopsis U2 genes have been assigned to six different groups (Vierstra, Plant Mol. Biol. 32:275-302 (1996)).

[0539] Inhibition of the 20S and 26S proteasome has been reported to modify plant senescence processes (Devereaux et al., J. Biol. Chem. 270:29660-29663 (1995)). Proteolytic pathways have been engineered to remove specific proteins by modification of ubiquitin conjugating enzymes (E2s) (Gosink and Vierstra, Proc. Natl. Acad. Sci. (U.S.A.) 92:9117-9121 (1995)). A protein-binding domain specific to a target protein has been fused to the C-terminus of E2, thus facilitating ubiquitination and ATP-dependent degradation of the target protein. It has been reported that a plant can be “immunized” against pathogen attack by targeting key pathogen proteins for destruction (Vierstra, Plant Mol. Biol. 32:275-302 (1996)).

[0540] Cysteine and serine proteases have been reported to be induced during xylogenesis in Zinnia elegans (Ye and Varner, Plant Mol. Biol. 30:1233-1246 (1996)). During the process of xylogenesis, autolysis has been reported to be essential to the formation of a tubular system in the plant for conductance of water and solutes. A thermostable serine protease from melon fruit (Cucumis melo), cucumisin, has been reported (Yamagata et al., J. Biol. Chem. 269:32725-32731 (1994)).

[0541] SPARC (secreted protein acidic and rich in cysteine) is a conserved metal-binding extracellular matrix glycoprotein expressed during embryogenesis. It has been reported that SPARC plays a role in the regulation of cell adhesion and proliferation (Damjanovski et al., Dev. Genes Evol. 207:453-461 (1998); Gilmour et al., EMBO J. 17:1860-1870 (1998); Shiba et al., J. Cell. Physiol. 174:194-205 (1998)). SPARC has been reported to be a secreted Ca²⁺-binding glycoprotein (Gilmour et al., EMBO J. 17:1860-1870 (1998)).

[0542] Nth1, neutral trehalase, functions to make trehalose and has been reported to play a role in germination of spores (Nwaka et al., J. Biol. Chem. 270:10193-10198 (1995)). Nth1 has also been reported to be induced in response to heat or chemical stress (Zaehringer et al., FEBS Lett. 412:615-620 (1997)), as well as osmotic stress (Hounsa et al., Microbiology 144:671-680 (1998)).

[0543] α-Amylase is a catabolic enzyme that degrades starch. α-Amylase in barley aleurone cells is expressed under control of the plant hormones gibberellic acid and abscisic acid, along with aleurain, a thiol (Whittier et al., Nucleic Acids Res. 15:2515-2535 (1987)). A cDNA encoding alpha amylase has been reported from rice (Terashima et al., Appl. Microbiol. Biotechnol. 43:1050-1055 (1995); Huang et al., Plant Mol. Biol. 14:655-668 (1990)), and barley (Khursheed et al., J. Biol. Chem. 263:18953-18960 (1988)).

[0544] An ATP-dependent protease, La, has been reported in E. coli; for reviews see Tanaka, Tanpakushitsu Kakusan Koso 30:441-459 (1985); Goldber et al., Biochem. Soc. Trans. 15:809-811 (1987); Goldberg et al., Methods Enzymol. 244:350-375 (1994). La protease has been reported to be ubiquitous (Goldberg, Eur. J. Biochem. 203:9-23 (1992)). The complete nucleotide sequence of protease La from E. coli K12 has been reported (Amerik et al., Bioorg. Khim. 16:869-880 (1990)). One reported activity of La protease is its participation in the removal of aggregated proteins, such as those that result from heat shock (Laskowska et al., Mol. Microbiol. 22:555-571 (1996)). An E. coli protease La has been reported to have a DNA-binding site (Baker, FEBS Lett. 244:31-33 (1989)).

[0545] Saccharomyces cerevisiae Pim1 nuclear gene encodes a mitochondrial ATP-dependent protease that exhibits over 30% identity with ATP-dependent protease La, and has been reported to be required for mitochondrial function (Kutejova et al., FEBS Lett. 329:47-50 (1993)). Pim1 has also been reported to play a role in the heat shock response (Van Dyck et al., J. Biol. Chem. 269:238-242 (1994)).

[0546] Subtilisin-like processing proteases have been reported to be associated with pre-protein and pro-hormone processing (Komano and Fuller, Proc. Natl. Acad. Sci. (U.S.A.) 92:10752-10756 (1995), and have mammalian and plant homologues (Bathurst et al., Science 235:348-350 (1987); Brennan et al., J. Biol. Chem. 265:21494-21497 (1990); Hatsuzawa et al., J. Biol. Chem. 265:22075-22078 (1990); Thomas et al., J. Biol. Chem. 265:10821-10824 (1990); Vierstra, Plant Mol. Bio. 32:275-302 (1996)).

[0547] An aspartyl protease, Mkc7, along with yeast aspartic acid protease 3 (Yap3) are processing proteases located in the golgi apparatus of Saccharomyces cerevisiae (Komano and Fuller, Proc. Natl. Acad. Sci. (U.S.A.) 92:10752-10756 (1995); Zhang et al., Biochim. Biophys. Acta 1359:110-122 (1997)). Mkc7 has been reported to be a membrane associated protein. Aspartic acid YAP3 is an endoprotease that has been reported to cleave at paired basic residues (Azaryan et al., J. Biol. Chem. 268:11968-11975 (1993); Copley et al., Biochem. J. 330:1333-1340 (1998)). In yeast, Yap3 has been reported to be associated with the secretory pathway and the cleavage of a pro-alpha-mating factor (Ledgerwood et al., FEBS Lett. 383:67-71 (1996)).

[0548] Kex2 endoprotease of the yeast Saccharomyces cerevisiae has been reported to be a prototype of a family of eukaryotic subtilisin homologues (Gluschankof and Fuller, EMBO J. 13:22808 (1994)). Kex2 and Yap3 endoproteases have been reported to have distinct, but overlapping, substrate specificities (Bourbonnais et al., Biochimie 76:226-233 (1994)). Some subtilisin-like proteases, such as P69, are induced in plant hosts upon virus pathogen attack (Tornero et al., Proc. Natl. Acad. Sci. (U.S.A.) 93:6332-6337 (1996); Tornero et al., J. Biol. Chem. 272:14412-14419 (1997)). P69 has been reported to be a secreted calcium-activated endopeptidase.

[0549] Subtilases have also been reported to be involved in both symbiotic and nonsymbiotic processes in plant development. A subtilisin protease Ag12 has been reported to be associated with actinorhizal nodule development in root nodules of Alnus glutinos (Ribeiro et al., Plant Cell 7:785-794 (1995)). A homologue of Ag12, Ara12, has been reported in Arabidopsis. Ara12 has been reported to be expressed in all organs, and its expression levels were highest during silique development (Ribeiro et al., Plant Cell 7:785-794 (1995)). A virally encoded antifungal toxin in transgenic tobacco, KP6 killer toxin, has been reported to be processed by the subtilisin-like processing protease, Kex2p that is present in both fungal and plant cells (Kinal et al., Plant Cell 7:677-688 (1995)).

[0550] Plant homologues to E. coli FtsH protease, an ATP-dependent metalloprotease, have also been reported (Lindahl et al., J. Biol. Chem. 271:29329-29324 (1996)). FtsH protease has been reported to be involved in photosystem assembly (Ostersetzer and Adam, Plant Cell 9:957-965 (1997)).

[0551] Bacterial FtsH proteases have been reported to be membrane-bound, ATP-dependent zinc-metalloproteinases (Akiyama et al., Guidebook Mol. Chaperones. Protein-Folding Catal, Oxford University Press (1997); Akiyama et al., Mol. Microbiol. 28:803-812 (1998)). FtsH has been reported to act on a subset of unstable proteins, and function as a molecular chaperone ((Akiyama et al., Guidebook Mol. Chaperones. Protein-Folding Catal, Oxford University Press (1997); Suzuki et al., Trends Biochem. Sci. 22:118-123 (1997)). In bacteria, FtsH protease has been reported to participate in a secretory pathway (Ito et al., Membrane Proteins: Structure, Function, Expression Control, International Symposium (Basel, Switzerland) (1997)), and it has been reported to participate in at least two pathways for protein degradation (Kihara et al., J. Mol. Biol. 279:175-188 (1998)). In Bacillus subtilis FtsH is a general stress gene which has been reported to be transiently induced after thermal or osmotic upshift (Deuerling et al., Mol. Microbiol. 23:921-933 (1997)).

[0552] FtsH homologues have been reported in the plastids of higher plants both by immunological cross reactivity (Lindahl et al., J. Biol. Chem. 271:29329-29334 (1996); Ostersetzer et al., Plant Cell 9:957-965 (1997)), and DNA sequence homology (Lindahl et al., J. Biol. Chem. 271:29329-29334 (1996); Wolfe, Curr. Genet. 25:379-383 (1994)). A chloroplast FtsH has been reported to be associated with the degradation of improperly assembled Rieske FeS protein (RISP) imported into in vitro chloroplasts (Ostersetzer et al., Plant Cell 9:957-965 (1997)). FtsH has also been reported to have chaperone-like activity (Akiyama et al., Guidebook Mol. Chaperones. Protein-Folding Catal, Oxford University Press (1997)). FtsH has been reported to participate in the assembly of protein into and through the membrane (Akiyama et al., J. Biol. Chem. 269:5218-5224 (1994)). An Arabidopsis cDNA encoding FtsH has been reported (Lindahl et al., J. Biol. Chem. 271:29329-29334 (1996)).

[0553] The D1 protein of the photosystem II (PSII) complex in the thylakoid membrane of oxygenic photosynthetic organisms has been reported to be synthesized as a precursor polypeptide (pD1) with a C-terminal extension (Anbudurai et al., Proc. Natl. Acad. Sci. (U.S.A.), 91:8082-8086 (1994)). Post-translational processing of the pD1 protein has been reported to be essential to establish water oxidation activity of the PSII complex. CtpA (photosystem II Dl protease) is a carboxyl terminal processing protease that cleaves a carboxyl terminal 9 residue peptide (in higher plants) from pre-DI protein, forming the active D1 (Anbudurai et al., Proc. Natl. Acad. Sci. (U.S.A.), 91:8082-8086 (1994); Bowyer et al., J. Biol. Chem. 267:5424-5433 (1992); Taylor et al., FEBS Lett. 237:229-233 (1988)). Active CtpA protease has been reported to be required for photosynthetic activity in both the blue green algae Synechocystis sp. (Shestakov et al., J. Biol. Chem. 269:19354-19359 (1994)), as well as the green algae Scenedesmus obliquus (Diner et al., J. Biol. Chem. 263:8972-8980 (1988); Taylor et al., FEBS Lett. 237:229-233 (1988)). Failure to correctly process the pre-DI protein has been reported to result in a non-functional manganese cluster responsible for photosynthetic water oxidation (Trost et al., J. Biol. Chem. 272:20348-20356 (1997)).

[0554] Homologues to CtpA have been reported in Bartonella bacilliformis (Mitchell and Minnick, Microbiology 143:1221-1233 (1997)), and E. coli (Tsp protease) (Silber et al., Proc. Natl. Acad. Sci. (U.S.A.) 89:295-299 (1992)). A full-length CtpA cDNA from barley (Pakrasi et al., Photosynth.: Light Biosphere, Proc. Intl. Photosynth. Congr., 10^{th} (Dordrecht, Netherlands) (1995); EMBL accession No. X90558) and from spinach have been reported (Inagaki et al., Photosynt.: Light Biosphere, Proc. Intl. Photosynth. Congr., 10^{th} (Dordrecht, Netherlands); Inagaki et al., Plant Mol. Biol. 30:39-50 (1996)). It has been reported that inhibition of CtpA activity results in phytotoxicity. It has been reported that D1 protease has been cloned and sequenced from wheat, Scenedesmjus obliquus and Synechocystis.

[0555] Processing proteases other than CtpA, such as leader peptidases have been reported in plants (Barbook et al., FEBS Lett. 398:198-200 (1996)). In addition to processing protease CtpA, there has been another reported proteolytic mechanism for removing photo-damaged D1 protein from photosystem II reaction centers. Chloroplast homologues to E. coli ATP-dependent Clp protease and cyanobacterial Ca²⁺-stimulated protease have been reported (Ostersetzer et al., Eur. J. Biochem. 236:932-936 (1996)).

[0556] ClpP has been reported to be a protease subunit of a two-component, ATP-dependent protease reported in E. coli (Katayama et al., J. Biol. Chem. 263:15226-15236 (1988)). The regulatory subunit has been reported to be ClpA, and the complex has been reported to require Mg²⁺ and ATP for activity (Katayama et al., J. Biol. Chem. 263:15226-15236 (1988)). It has also been reported that ClpA exhibits chaperonin-like activity (Kessel et al., J. Mol. Biol. 250:587-594 (1995); Suzuki et al., Trends Biochem. Sci. 22:18-123 (1997)). ATP hydrolysis by ClpA has been reported as being required for both the assembly and dissociation of the ClpA/P complex (Chung et al., Biol. Chem. 377:549-554 (1996)). In bacteria, a ClpA/P complex has been reported to be associated with a number of cellular processes including degradation of carbon starvation proteins (Damerau and St. John, J. Bacteriol. 175:53-63 (1993)), regulation of the sigma starvation factor (σ-s) (Schweder et al., J. Bacteriol. 178:470-476 (1996)), removal of heat shock damaged proteins (Laskowska et al., Mol. Microbiol. 22:555-571 (1996)), and degradation of proteins arising from truncated open reading frames (Herman et al., Genes Dev. 12:1348-1355 (1998)). It has been reported that the function of ClpP protease is similar to that of the eukaryotic 20S proteosome. It has been reported that ClpP component of E. coli enzyme is a structural homologue of the 20S proteosome, consisting of two heptamers, stacked on top of each other in a head-to-head fashion to form a tetradecamer (Shin et al., Proc. Natl. Acad. Sci. (U.S.A.) 262:71-76 (1996)).

[0557] Homologues of bacterial ClpA/P genes have been reported in both algae and plastids of higher plants (Desimone et al., Bot. Acta 110:234-239 (1997); Gray et al., Plant Mol. Biol. 15:947-950 (1990); Weiss-Wichert et al., Photosynthesis: Light Biosphere, Proc. Int. Photosynth. Cong., 10^{th} (Dordrecht, Netherlands) (1995); Berges and Freeman, J. Phycol. 32:566-574 (1996); Ostersetzer et al., Eur. J. Biochem. 236:932-936 (1996)). A clpA plastid homologue has also been termed ‘clpC’. A clpP gene in the green algae Chlamydomonas reinhardtii gene has been reported to be essential for cell growth (Huang et al., Mol. Gen. Genet. 244:151-159 (1994)). The function of plastid ClpA/P has been reported to be similar to the bacterial complex. ClpA has been reported to be induced both by water stress and during senescence in Arabidopsis thaliana (Nakashima et al., Plant J. 12:851-861 (1997)). A cDNA, ERD1, isolated from one-hour dehydrated Arabidopsis thaliana plants has been reported to be homologous to ClpA (Nakashima et al., Plant J. 12:851-861 (1997)). In barley leafs, transcript levels of clpP have been reported to be higher in photosynthetically active leaves but decrease during senescence (Humbreck and Krupinska, J. Photochem. Photobiol. 36:321-326 (1996); Ostersetzer et al., Eur. J. Biochem. 236:932-936 (1996)). In pea seedlings, levels of the regulatory subunit clpC have been reported to be regulated by both light intensity and temperature (Ostersetzer and Adam, Plant Mol. Biol. 31:673-676 (1996)).

[0558] Lysosomal cysteine proteinases are proteolytic enzymes that in the mature form are localized in lysosomes and the catalytic activity of which is based on a cysteine residue in the active site (Runeberg-Roos et al., Eur. J. Biochem. 202:1021-1027 (1991)). Aleurain is a reported barley thiol protease closely related to mammalian cathepsin H (cathepsins B and H are involved in the processing of precursor proteins). Aleurone thiol protease mRNA has been reported to be regulated by the plant hormones gibberellic acid and abscisic acid. Aleurone thiol protease mRNA has also been reported to be expressed at high levels in leaf and root tissue. Aleurone thiol protease has been reported to represent the equivalent of a plant lysosomal thiol protease (Rogers et al., Proc. Natl. Acad. Sci. (U.S.A.), 82:6512-6516 (1985)). Barley aleurone layers have been reported to synthesize and secrete several proteases in response to gibberellic acid (GA3) (Whittier et al., Nucleic Acids Res. 15:2515-2535 (1987); Koehler and Ho, Plant Cell 2:769-783 (1990)).

[0559] Pseudotzain from Pseudotsuga menziesii (Douglas fir) is a protease reported to be involved in storage protein mobilization (g2118132; Tranbarger and Misra, Gene 172:221-226 (1996)). REP-1 has been reported to digest in vitro both the acidic and basic subunits of rice glutelin, the major seed storage protein of rice (g1514952; Kato and Minamikawa, Eur. J. Biochem. 239:310-316 (1996)). A vacuolar processing enzyme has been reported in soybean protein bodies that converts proproteins to the corresponding mature forms (g511937; Shimada et al., Plant Cell Physiol. 35:713-718 (1994)). CCP1 and CCP2 are two reported cDNA clones encoding maize seed cysteine proteinases. CCP1 has been reported to be homologous to pea 15a CP and Arabidopsis thaliana RD 19 CP, both of which have been reported to be induced in response to dehydration of the plant. CCP1 has been reported to be expressed in ripened maize seeds. CCP2 protease mRNA from maize seed is expressed only during germination, with maximum expression at the 3-day stage (g1688044; Domoto et al., Biochim. Biophys. Acta 1263:241-244 (1995)).

[0560] Granzymes are neutral serine proteases that are stored in specialized lytic granules of cytotoxic lymphocytes (Greenberg, Cell Death Differ. 3:269-274 (1996)). Granzyme B has been reported to play a role in lymphocyte-mediated target cell apoptosis (Smyth et al., J. Leukocyte Biol. 60:555-562 (1996); Pham and Ley, Semin. Immunol. 9:127-133 (1997)). It has been reported that granzymes have features that are strongly conserved, including consensus sequences at their N-termini and around 3 catalytic residues, activation from a zymogenic form, and conserved disulfide bridges (Smyth et al., J. Leukocyte Biol. 60:555-562 (1996)). A family of cysteine proteases homologous to the Caenorhabditis elegans cell death protein CED-3 has been reported to play an effector role in the process of apoptosis in mammals (Kumar and Lavin, Cell death Differ. 3:255-267 (1996); Kumar, Int. J. Biochem. Cell Biol. 29:393-396 (1997)). APAF-1 (apoptotic protease activating factor 1) participates in a caspase activation cascade triggered by cytochrome C release from mitochondria, leading to cell death (Asoh and Ohta, Shinkei Seishin Yakuri 19:967-970 (1997); Zou et al., Cell 90:405-413 (1997)).

[0561] Proteases have been reported to play a role apoptosis; late stages are connected with the activation of a cascade of intracellular proteases, which leads to massive protein destruction (Sukharev et al., Cell Death Differ. 4:457-462 (1997)). In mammals, two general protease classes involved in programmed cell death have been reported; serine proteases (granzymes) and cysteine proteases (caspases) (Sukharev et al., Cell Death Differ. 4:457-462 (1997)). Caspase family genes encode proenzyme forms that require proteolytic cleavage for activation. Cell death signaling has been reported to involve mutual activation of several proteases, which in turn cleave several structural and catalytic proteins, resulting in the cleavage of proteins involved in the cellular repair system.

[0562] Leaf senescence has been studied under both natural conditions and in a model system. Under natural conditions, flag leaves of field-grown barley plants have been characterized according to different parameters indicating the onset and course of senescence (Humbeck and Krupinska, J. Photochem. Photobiol. 36:321-326 (1996)). Under the model system, senescence has been studied with barley primary foliage leaves which are induced to senescence by transfer of young plants to darkness (Humbeck and Krupinska, J. Photochem. Photobiol. 36:321-326 (1996)). It has been reported that senescence in plants is a developmental process that falls into two major senescent mechanisms, nutrient deficiencies and genetic programming (Nooden et al., Physiol. Plant 101:746-753 (1997)).

[0563] In plants, one of the reported cell death model systems is the differentiation of Zinnia elegans mesophyll cells into tracheary elements (TEs). During this process a transient and specific expression of a cysteine endopeptidase activity similar to papain associated with developmentally programmed cell death has been reported (Minami and Fukuda, Plant Cell Physiol. 36:1599-1606 (1996); Ye and Varner, Plant Mol. Biol. 30:1233-1246 (1996)). Three proteinases have been reported to be exclusive to differentiating TEs, and a fourth proteinase has been reported to be most active in differentiating TEs (Beers and Freeman, Plant Physiol. 113:873-880 (1997)). In barley, nucellar cells undergo programmed cell death after ovule fertilization. A gene that encodes an aspartic protease-like protein termed ‘nucellin’ has been reported to be expressed in nucellar cells during their degeneration (Chen and Foolad, Plant Mol. Biol. 35:821-831 (1997)).

[0564] In pharmaceutical drug discovery proteases have been reported to be attractive targets for the discovery of small molecule inhibitors. Human proteases including matrix metalloproteinases and thrombin, and the viral processing proteases including HIV-1 protease and assemblin, have all been targets of chemical discovery efforts (see, e.g., Hilpert et al., J. Med. Chem. 37:3889-3901 (1994); Weston and Sindelar, Curr. Med. Chem. 3:37-46 (1996); Whittle and Blundell, Annu. Rev. Biophys. Biomol. Struct. 23:349-375 (1994)). Proteases or components of protease pathways have application toward crop improvement, such as modification of protein content, and pathogen defense (see, e.g., Hondred and Vierstra, Curr. Opin. Biotechnol. 3:147-151 (1992)).

[0565] 8. Protein Kinases

[0566] Protein kinases are enzymes that transfer a phosphate group from a phosphate donor onto an acceptor protein. Based on the amino acid specificity, protein kinases can be grouped into at least five categories (Hunter, Methods Enzymol. 200:3-37 (1991)) protein-serine/threonine kinases that phosphorylate serine or threonine on target proteins; 2) protein-tyrosine kinases that transfer phosphate to tyrosine of target proteins; 3) protein-histidine kinases that phosphorylate histidine, arginine, or lysine of target proteins; 4) protein-cysteine kinases that phosphorylate cysteine of target proteins and 5) protein-aspartyl or glutamyl kinases that are phosphotransferases with a protein acyl group as acceptor. As the number of reported protein-kinases increases, such classification has been found to be problematic. For example, some protein kinases have been found to have the ability to phosphorylate both serine/threonine and tyrosine on target proteins (Featherstone and Russell, Nature 349:808-811 (1991); Stem et al., Mol. Cell. Biol. 11:987-1001 (1991); Feng et al., Biochem. Biophys. Acta 1172:200-204 (1993)).

[0567] Protein kinases have catalytic and regulatory domains or subunits. In most single subunit protein kinases, the catalytic domain usually lies near the carboxyl terminus, stretching from 250 to 300 amino acids in length, while the amino terminus is devoted to a regulatory role. In protein kinases having a multiple subunit structure, subunits consisting almost entirely of catalytic domain are common. Hanks and Quinn, (Methods Enzymol. 200:38-63 (1991)) have reported that there are 11 conserved regions referred to as subdomains, some of which contain invariant or near invariant residues. Eukaryotic serine/thronine and tyrosine protein kinases have been reported, from phylogenetic analysis, to fall into one of five supergroups: (a) an “AGC” group, consisting of cyclic nucleotide-dependent protein kinase A (PKA), protein kinase G (PKG), calcium-phospholipid-dependent protein kinase C (PKC) and ribosomal S6 kinase families; (b) a CaMK” group, consisting of calcium-/calmodulin-dependent kinases and SNF1/AMP-activated protein kinase families; (c) a “CMGC” group, consisting of cyclin-dependent kinase (CDP), mitogen-activated protein kinase (MAPK), glycogen synthetase kinase (GSK-3), and casein kinase II (CKII) families; (d) a protein tyrosine kinase (PTK) group and (e) an other group which contains protein kinases having no clear structural similarity to any of the above groups (Hanks and Hunter, In: Protein Kinase Factsbook, pp. 7-47, Hardie and Hanks eds, Academic Press, London (1995)).

[0568] Protein kinases play roles in the regulation of protein and enzyme activity in the transduction of environmental, developmental, and metabolic signals in animals and simple eukaryotes. It has been reported that protein kinases also act as signal transducers in plants. Activities of plant protein kinases have been reported to be responsive to various environmental stimuli and developmental changes (see reviews by Ranjeva and Boudet, Ann. Rev. Plant Physiol. 38:73-93 (1987); Roberts and Harmon, Annu. Rev. Plant Physiol. Plant Mol. Bio. 43:37-414 (1992); Huber et al., Int. Rev. Cytol. 149:47-98 (1994)). Although most of reported plant protein kinases serine/threonine-protein kinases (Stone and Walker, Plant Physiol. 108:451-457 (1995)) other types of protein kinases have been reported in plants. For example, histidine protein kinase-like sequence has been reported in plant phytochrome (Schneider-Poetsch, Photochem. Photobiol. 56:839-846 (1992)). The Arabidopsis ETR1 gene has been reported to encode a histidine-kinase ethylene receptor (Chang et al., Science 262:539-568 (1993)). Activities of tyrosine-specific protein kinases also have been found in plants (Torruella et al., J. Biol. Chem. 261:6651-6653 (1986); Trojanek et al., Eur. J. Biochem. 235:338-344 (1996)).

[0569] PVPK-1 (Lawton et al., Proc. Natl. Acad. Sci. (USA) 86:3140-3144 (1989)) and APTKs (Zhang et al., J. Biol. Chem. 269:17586-17592 (1994)) are plant protein kinases which have been reported to belong to the AGC group. PVPK-1 is a member of a group of protein kinases that have putative catalytic domains most closely related to PKA and PKC. PVPK-1 exhibits no homology to regulatory domains of PKA and PKC or other protein kinases. APTK1 has been reported to be expressed in all tissues and all developmental stages, with the greatest expression in metabolic active tissues. Arabidopsis aptk genes have been reported to encode protein kinases with sequence similarity in the catalytic domain to animal S6 protein kinase, PKA and PKC (Hayashida et al., Gene 124:251-255 (1993); Zhang et al., Biol. Chem. 269:17586-17592 (1994).

[0570] In yeast, SNF1 protein kinases regulate carbon catabolite repression/depression (Gancedo, Eur. J. Biochem. 206:297-313 (1992)). SNF1 protein kinases have been reported to play a major role in the control of lipid metabolism in mammals (Hardie, Biochem. Biophys. Acta 1123:231-238 (1992); Hardie et al., Trends Biochem. Sci. 14:20-23 (1989)). SNF1 protein kinases have a N-terminal catalytic domain and a C-terminal region that interacts with other proteins. A SNF1-like clone, cRKIN1, has been reported from a rye endosperm cDNA library (Alderson et al., Proc. Natl. Acad. Sci. (USA) 88:8602-8605 (1991)). Wheat WPK4 is another member of the SNF1 kinase family. WPK4 has been reported to have increased transcript levels in response to multiple stimuli such as light, nutrient deprivation, and cytokinin application (Sano and Youssefian, Proc. Natl. Acad. Sci. (USA) 91:2582-2586 (1994)). Many SNF1-like genomic and cDNA clones have been isolated from Arabidopsis (Le Guen et al., Gene 120:249-254 (1992)); barley (Halford et al., Plant. J. 2:87-96 (1992)); tobacco (Muranaka et al., Mol. Cell. Biol. 14:2958-2965 (1994)) and Mesembryanthemum crystallinum L. (Baur et al., Plant Physiol. 106:1225-1226 (1994)).

[0571] In mammalian cells, AMP-activated protein kinase is activated allosterically by 5′-AMP. AMP-activated protein kinases play an important role in the regulation of lipid metabolism by phosphorylating acetyl-CoA carboxylase. Acetyl-CoA carboxylase catalyses the first committing step in fatty acid synthesis. AMP-activated protein kinase also phosphorylates 3-hydroxy-3-methylglutaryl-CoA reductase (HMG-CoA reductase), a regulatory enzyme in isoprenoid biosynthesis. Activity of HMG-CoA reductase kinase (also known as HRK-A) (Ball et al., Eur. J. Biochem, 219:743-750 (1994)) has been reported from a number of plant extracts.

[0572] Plant possesses very unique calcium-dependent but calmodulin-independent protein kinase families (CDPKs). A soybean CDPK-α was the first CDPK gene isolated (Harper et al., Science 252:951-954 (1991); Roberts and Harmon, Annu. Rev. Plant Physiol. Plant Mol. Bio. 43:375-414 (1992)). The N-terminal region of CDPK-α exhibits homology with the protein kinase catalytic domain of the CaMK family, the central part has an autoinhibitory junction domain, and the C-terminal region has homology to calmodulin with EF-hand, calcium binding sites. CDPKs have been reported to be present in many plant species and are encoded by multigene families. CDPKs are associated with many physiological events that respond to transient changes in intracellular calcium levels (Roberts and Harmon, Annu. Rev. Plant Physiol. Plant Mol. Bio. 43:375-414 (1992); Gilroy and Trewavas, Bioassays 16:677-682 (1994)). An example of CDPK's role in the regulation of plant physiological events is that the opening of an iron channel is modulated by the phosphorylation of soybean nodulin 26 by CDPK (Lee et al., J. Biol. Chem. 270:27051-27057 (1995)). CDPKs are important components in stress signal transduction in maize protoplasts (Sheen, Science 274:1900-1902 (1996)). CDPKs also have been reported to phosphorylate sucrose synthetase, an important carbon metabolic enzyme in many sink tissues. Phosphorylation of the sucrose synthetase changes the kinetics of sucrose synthetase (Huber et al., Plant Physiol. 112:793-802 (1996)).

[0573] Processes through the eukaryotic cell cycle have been reported to be regulated by cyclin-dependent protein kinase, along with its regulatory subunit, cyclin. In yeast, a single CDK gene (cdc2 in Schizosaccharomyces pombe and cdc28 in Saccharomyces cerevisiae) is required for cell cycle transition (Norbury and Nurse, Rev. Biochem. 61:441-470 (1992); Nasmyth, Curr. Opin. Cell Biol. 5:166-179 (1993)). In human cells, a family of CDK1 to CDK8 kinases have been reported to control the cell cycle (Pines, Biochem. Soc. Trans. 24:15-33 (1996)). CDKs have been reported to have a conserved PSTAIRE motif in subdomain III of the catalytic domain. Plant cells are similar to animal cells in that they contain multiple cyclin-dependent kinases. An Arabidopsis gene, AFC1, has been reported to complement a yeast mutant defective in the STE12-dependent signal transduction pathway (Bender and Fink, Proc. Natl. Acad. Sci. (USA) 91:12105-12109 (1994)). Highly homologous cdc2 genes have been reported from several other plant species, including maize, rice, alfalfa, soybean, Antirrhinum, and pea (Colasanti et al., Proc. Natl. Acad. Sci. (USA) 88:337-3381 (1991); Hashimoto et al., Mol. Gen. Genet. 233:10-16 (1992); Hirt et al., Plant J. 4:61-69 (1993); Miao et al., Proc. Natl. Acad. Sci. (USA) 90:943-947 (1993); Fobert et al., EMBO J. 13:616-624 (1994); Jacobs, Annu. Rev. Physiol. Mol. Biol. 46:317-339 (1995); Magyar et al., Plant Cell 9:223-235 (1997)).

[0574] Mitogen-activated protein kinase (MAPK) (also known as extracellular signal regulated kinase or ERK) signaling cascade is one of the pathways by which extracellular stimuli are transduced in intracellular responses. Activation of MAPKs requires both tyrosine and threonine phosphorylation by a dual specific MAP kinase kinase that in turn has to be activated by a serine/threonine MAP kinase kinase kinase (Posada and Cooper, Science 255:212-215 (1992); Marshall, Curr. Opin. Genet. Dev. 4:82-89 (1994)). The highly conserved threonine and tyrosine residues are located close to MAP kinase domain VIII. The MAPK family has been reported from a diverse array of organisms, including mammals, Xenopus, Drosophila, yeast, Dictyostelium, and plants (Durr et al., Plant Cell 5:87-96 (1993); Nishihama et al., Plant Cell. Physiol. 36:749-757 (1995); Raz and Fluhr, Plant Cell 5:523-530 (1995)). Polymerase chain reaction (PCR)-based homology clones from a variety of MAPK genes have been reported from several plant species, including MMK1 (also known as MsERK1 and Msk7), MMK2, MMK3, and MMK4 from alfalfa (Durr et al., Plant Cell 5:87-96 (1993); Jonak et al., Plant J. 3:611-617 (1993); Jonak et al., Mol. Gen. Genet. 248:686-694 (1995); Jonak et al., Proc. Natl. Acad. Sci. (USA) 93:11274-11279 (1996)), atMPK1 to atMPK7 from Arabidopsis (Mizoguchi et al., Plant. Mol. Biol. 21:279-289 (1993); Mizoguchi et al., Plant. J. 5:111-122 (1994); Mizoguchi et al., Proc. Natl. Acad. Sci. (USA) 93:765-769 (1996)), D5 (also known as PsMAPK) from pea (Stafstrom et al., Plant Mol. Biol. 22:83-90 (1993); Popping et al., Plant. Mol. Biol. 31:355-363 (1996)), Aspk9 (also known as AsMAP1) from oat (Huttly and Phillips, Plant Mol. Biol. 27:1043-1052 (1995)), NPK1 and NPK2 from tobacco (Banno et al., Mol. Cell. Biol., 13:4745-4752 (1993); Shibata et al., Mol. Gen. Genet. 246:401-410 (1995)) and PMEK1 from petunia (Decroocq-Ferrant et al, Plant Mol. Biol. 27:339-350 (1995)). MAPKs are involved in a variety of signaling processes in plants such as cell proliferation (Jonak et al., Plant. J. 3:611-617 (1993); Mizoguchi et al., Plant Mol. Biol. 21:279-289 (1994)), cold, drought, dehydration, salinity stress responses (Jonak et al., Proc. Natl. Acad. Sci. (USA) 93:11274-11279 (1996); Mizoguchi et al., Proc. Natl. Acad. Sci. (USA) 93:765-769 (1996)), and pathogen eliciting (Suzuki and Shinshi, Plant Cell 7:639-647 (1995); Mizoguchi et al., Trends Biotechnol. 15:15-19 (1997)).

[0575] In mammals, glycogen synthetase kinase-3 (GSK-3) has been reported to phosphorylate glycogen synthetase (Woodgett and Cohen, Biochem. Biophys. Acta 788:339-347 (1984)) and transcription factors such as c-jun, and c-myb (Boyle et al., Cell 64:573-584 (1991)) and L-myc (Saksela et al., Oncogen 7:347-353 (1992)). GSK-3 is identical to factor A, the activator protein phosphotase-1 (Hughes et al., EMBO J. 12:803-808 (1993)) and has been reported to show functional homology to a Drosophila gene, shaggy/zeste-white 3 which is required for several developmental processes in the embryo, larvae and adult. In the budding yeast, Saccharomyces cerevisiae, meiosis and expression of early meiotic genes are dependent upon Rim11p, a protein kinase related to GSK-3 (Malathi et al., Mol. Cell. Biol. 17:7230-7236 (1997)). GSK-3 also has been reported to be important for dorsoventral patterning in Xenopus embryos (He et al., Nature 374:617-622 (1995)). Plant members of GSK-3 family have been reported to be encoded by small multigene families. Arabidopsis clones of at least five GSK-3 homologous genes, asks, have been reported (Bianchi et al., Mol. Gen. Genet. 242:337-345 (1994)). Three msks clones from alfalfa have been reported to have 65-70% identity to GSK-3 (Pay et al., Plant J. 3:847-856 (1993)). ASKs and MSKs have both been reported to perform similar functions as mammalian GSK-3.

[0576] Casein kinase II (CKII) is a multifunctional protein kinase that plays a role in the control of cellular functions such as cell division and growth, gene expression, and DNA replication in all eukaryotes (Meisner and Czech, Curr. Opin. Cell. Biol. 3:474-483 (1991); Kikkawa et al., Mol. Cell. Biol. 12:5711-5723 (1992)). CKII has been reported to be a predominantly nuclear enzyme (Krek et al., J. Cell Biol. 116:43-55 (1992)). CKII isolated from animals and yeast possess a conserved characteristic tetrameric structure, α₂β₂, composed of two catalytic α subunits and two β regulatory subunits (Tuazon and Traugh, Adv. Sec. Mess. Phosphoprotein Res. 23:123-164 (1991)). In contrast, plant CKII has been reported in two different forms: a monomeric form and an oligomeric form whose subunit composition has not been investigated (Dobrowolska et al., Biochem. Biophys. Acta 1129:139-140 (1991); Dobrowolska et al., Eur. J. Biochem. 204:299-303 (1992); Li and Roux, Plant. Physiol. 99:686-692 (1992)). CKII clones from plants for both the catalytic protein kinase a and the regulatory β subunits have been reported (Dobrowoska et al., Biochem. Biophys. Acta 1129:139-140 (1991); Mizoguchi et al., Plant. Mol. Biol. 21:279-289 (1993); Colinge and Walker, Plant Mol. Biol. 25:629-658 (1994). Arabidopsis CKII has been reported to phosphorylate and promote the DNA-binding activity of a transcription factor that binds to the G-box promoter element found in various plant promoters (Klimczak et al., Plant Cell 7:105-115 (1995)). CKII has been reported to be associated with the phosphorylation of chloroplast photosystem II subunit (Testi et al., FEBS Letters 399:245-250 (1996)).

[0577] Many reported plant protein kinases do not fall into classical kinase families. For example, TSL from Arabidopsis is a serine/threonine kinase with limited similarity to other kinases (Roe et al. Cell 75:939-950 (1993)). TSL has been reported to be required in the floral meristem for correct initiation of the floral organ primordia and for proper development of organ primordia. Arabidopsis CTR1, cloned by insertional mutagenesis, is a putative serine/threonine protein kinase that has been reported to be similar to the Raf protein kinase found in mammals (Kieber et al., Cell 72:427-441 (1993)) and is a negative regulator of ethylene signal transduction.

[0578] Receptor-like protein kinases (RLKS) represent a group of unique plant protein kinases. RLKs are composed of an extracellular domain that functions in ligand binding, a transmembrane domain, and a localized serine/threonine protein kinase domain which is responsible for transducing signals. RLKs are structurally similar to animal growth factor receptor protein kinases. Based on the structural similarities of the extracellular domains the RLKs fall into three categories: the S-domain class, the leucine-rich-repeat class and a third class with epidermal-growth-factor-like repeats (Walker, Plant Mol. Biol. 26:1599-1609 (1994)). An additional type of RLK homologous proteins has been reported with the extracellular region related to plant defense proteins (Wang et al., Proc. Natl. Acad. Sci. (USA) 93:2598-2602 (1996)).

[0579] ZmPK1 was a first putative RLK isolated from the root of maize (Walker and Zhang, Nature 345:743-746 (1990)). The predicted extracellular domain of ZmPK1 has been reported to show homology with S-locus glycoprotein from Brassica and also has been reported to be involved in self-incompatibility (Stein et al., Proc. Natl. Acad. Sci. (USA) 88:8816-8820 (1991); Walker, Plant Mol. Biol. 26:1599-1609 (1994); Kumar and Trick, Plant J. 6:807-813 (1994)). RLKs also have been reported to play functional roles in disease resistance and plant development (Song et al., Science 270:1804-1806 (1995); Torri et al., Plant Cell 8:735-746 (1996); Becraft et al., Science 273:1406-1409 (1996); Lee et al., J. Biol. Chem. 270:27051-27057 (1996)).

[0580] Pto is another unique plant serine/threonine protein kinase. Pto plays roles in signaling and membrane targeting, and functions as an elicitor receptor (Martin et al., Science 262:1432-1436 (1993); Martin et al., Plant Cell 6:1432-1436 (1994); Tang et al., Science 274:2060-2063 (1996)). Pto has been reported to interact, directly or indirectly, with another protein in the Pto pathway, Pseudomonas resistance and fenthion sensitivity (Prf) protein which contains a leucine rich repeat (Salmeron et al., Cell 86:123-133 (1996); Salmeron et al., Plant Cell 6:511-520 (1994)). Pto has been reported to interact with a second serine/threonine protein kinase, Pti1, which is located downstream in the signal transduction pathway for bacterial speck-resistance in tomato and has been implicated in the pathway leading to the hypersensitive response and cell death (Zhou et al., Cell 83:925-935 (1995)). Pto also has been reported to interact with Pti4, Pti5, and Pti6. Pti4, Pti5, and Pti6 have been reported to be associated with the transcriptional activation of genes encoding defense proteins, called pathogenesis related genes, which play a role in establishing systemic acquired resistance (Zhou et al., EMBO J. 16:3207-3218 (1997)).

[0581] 9. Antifungal Proteins

[0582] Plants protect themselves from fungal and microbial attack via several metabolic mechanisms. These include physiological changes that cause the plant surface to become impenetrable, the biosynthesis of enzymes that convert substrates in the plant to small organic molecules that are toxic to microbial invaders and the expression of proteins that have direct antimicrobial activity.

[0583] It has been reported that upon pathogen attack and other stresses, plants will alter their metabolism to express genes that enable them to cope with the new hostile environment. These genes are termed pathogenesis-related (PR) genes. PR genes have been characterized from several plant-pathogen systems and have been found in the majority of cases to encode proteins that have direct antifungal activity (Bowles, Annu. Rev. Biochem. 59:873-907 (1990), Bol et al., Annu. Rev. Phytopathol. 28:113-138 (1990)).

[0584] In contrast, plants have genes that constitutively express active antifungal proteins in various tissues. Most of the reported antifungal proteins have even numbers of cysteine residues, are small (less than 10 kDa for the monomeric unit) and basic (Broekaert et al., Crit. Rev. in Plant Sci. 16:297-323 (1997)).

[0585] PR1 protein was first reported in tobacco mosaic virus infected tobacco (Van Loon and Van Kammen, Virology 40:199-201 (1970)). This class of protein is represented by both basic and acidic members of approximately 14 to 15 kDa. Three reported versions of PR1 have in vitro activity against the fungal pathogen of tomato, Phytophthora infestans (Niderman et al., Plant Physiol. 108:17-27 (1995)).

[0586] β-1,3-glucanases (EC 3.2.1.39) are hydrolytic enzymes that digest the substrate β-1,3-glucan to glucose residues. β-1,3-glucanases are effective against plant pathogenic fungi of the Oomycete family as the cell walls of Oomycete members are composed of primarily β-1,3-glucans. Acidic and basic forms of β-1,3-glucanases have been reported as pathogenesis-related proteins in several plants including potato (Kombrink et al., Proc. Natl. Acad. Sci. (USA) 85:782-786 (1988)) and tomato (Joosten and de Wit, Plant Physiol. 89:945-951 (1989)). β-1,3-glucanases have been reported to be approximately 31 to 35 kDa. β-1,3-glucanases have also been reported to exert direct antifungal activity by inhibiting hyphal growth (Mauch et al., Plant Physiol. 88:936-942 (1988)).

[0587] Chitinases have been found in several plants as pathogenesis-related proteins that have direct antifungal activity (Schlumbaum et al., Nature 324:365-367 (1986)). Chitinases are hydrolases (EC 3.2.1.14) that can digest chitin, (also known as β-1,4-N-acetylglucosamine), a constituent of the cell wall of many plant pathogenic fungi. Chitinases have been reported to range from 27 to 34 kDa and exist as both basic and acidic isoforms (Kombrink et al., Proc. Natl. Acad. Sci. USA 85:782-786 (1988)).

[0588] Osmotin/thaumatin-like class of pathogenesis-related proteins have been reported in a variety of plants. Osmotin/thaumatin-like proteins have been reported as existing as both basic and acidic isoforms ranging from 22 to 26 kDa which exert direct antifungal activity (Vigers et al., Mol. Plant-Microbe Interact. 4:315-323 (1991)). Promoters that control expression of certain gene family members of this class have been reported to be wound-inducible (Zhu et al., Plant Physiol. 108:929-937 (1995)).

[0589] Plant defensins are 45 to 54 amino acids in length and possess eight disulfide linked cysteines. The disulfide linkage pattern has been reported to be X₃CX₁₀CX₅CX₃CX₁₀CX₈CXCX₃C, wherein the first cysteine residue (amino acid residue 4) is linked to the last cysteine residue (amino acid position 51, the second cysteine residue (amino acid residue 15) is linked to fifth cysteine residue in position 36, the third cysteine residue (amino acid residue 21) is linked to the sixth cysteine (amino acid residue 45) and the fourth cysteine residue (amino acid residue 25) is linked the seventh cysteine residue in position 47.

[0590] Plant defensins exhibiting direct antifungal activity have been reported from radish seed plant defensin (Terras et al., J. Biol. Chem., 267:15301-15309 (1992)). Inducible isoforms of defensins have also been reported in fungal pathogen-infected tissue (Terras et al., Plant Cell 7:573-588 (1995)). Dimeric forms of defensins have also been reported. Antifungal activity of some defensins are sensitive to calcium and potassium ions in the 1 and 50 millimolar range, respectively.

[0591] Thionins are 45 to 47 amino acids in length and possess six or eight disulfide linked cysteines. An eight cysteine residue thionin disulfide linkage pattern is reported to be X₂C₂X₇CX₃CX₁₀CXCX₇CX₆, where the first cysteine residue (amino acid residue 3) is linked to the last cysteine (amino acid residue 41), the second cysteine residue (amino acid residue 4) is linked to the seventh cysteine residue (amino acid residue 33), the third cysteine residue (amino acid residue 12) is linked to the sixth cysteine residue in position 31 and the fourth cysteine residue (amino acid position 16) is linked to the fifth cysteine residue in position 21. A six cysteine residue thionin disulfide linkage pattern has been reported to be X₂C₂X₁₁CX₁₀CX₅CX₇CX₆, where the first cysteine residue (amino acid residue 3) is linked to the last (sixth) cysteine residue at position 40, the second cysteine residue (amino acid residue 4) is linked to the fifth cysteine residue (amino acid residue 32) and the third cysteine (amino acid residue 16) is linked to the fourth cysteine residue (amino acid residue 26).

[0592] Direct in vitro antifungal and antibacterial activities of thionin from wheat have been reported (Stuart and Harris, Cereal Chem. 19:288-300 (1942)). A pathogen-inducible thionin gene from Arabidopsis thaliana, Thi2.1, encodes a thionin protein which displays antifungal activity in planta when expressed transgenic plants from a constitutive promoter (Epple et al., Plant Cell 9:509-520 (1997)).

[0593] Phospholipid transfer proteins have been characterized as proteins that mediate the transfer of phospholipid moieties from liposomes to mitochondrial membranes. These proteins occur in two subgroups, the more common one consists of approximately 9 kilodalton proteins and the other of approximately 7 kilodalton proteins. Both forms contain 8 disulfide-linked cysteine residues. A 9 kilodalton subgroup disulfide linkage pattern has been reported to be X₂CX₉CX₁₃C₂X₁₉CXCX₂₂CX₁₃CX₃, where the first cysteine residue (amino acid residue 2) is linked to the sixth cysteine (amino acid residue 50), the second cysteine residue (amino acid residue 13) is linked to the third cysteine residue (amino acid residue 27), the fourth cysteine residue (amino acid residue 12) is linked to the seventh cysteine residue in position 72 and the fifth cysteine residue (amino acid position 48) is linked to the last cysteine residue in position 86.

[0594] There are several examples of phospholipid transfer proteins that have direct antifungal activity. A reported phospholipid transfer protein has been isolated from radish seeds (Terras et al., Plant Physiol. 100: 1055-1058 (1992)). A protein from onion seeds with homology to phospholipid transfer protein has been reported to have direct antifungal activity but no lipid transfer activity (Cammue et al., Plant Physiol. 109:445-455 (1995)). The antifungal activity of some phospholipid transfer proteins are sensitive to calcium and potassium ions in the 1 and 50 millimolar range, respectively.

[0595] The hevein-type class of antifungal proteins are chitin-binding proteins of about 40 amino acid residues in length. Many proteins of this class are made with carboxyterminal extensions of approximately 9 residues that are removed upon maturation. A eight cysteine residue disulfide linkage pattern has been reported to be X₂CX₈CX₄C₂X₅CX₆CX₄CX₃CX, where the first cysteine residue (amino acid residue 3) is linked to the fourth cysteine (amino acid residue 18), the second cysteine residue (amino acid residue 12) is linked to the fifth cysteine residue (amino acid residue 24), the third cysteine residue (amino acid residue 17) is linked to the sixth cysteine residue in position 32 and the seventh cysteine residue (amino acid position 36) is linked to the last cysteine residue in position 40.

[0596] Hevein is a protein constituent of rubber tree latex and exhibits weak antifungal activity (Van Parijs et al., Planta 183:258-264 (1991)). Homologues from the seeds of Amaranthus caudatus have been reported to exhibit significantly more potent antifungal activity (Broekaert et al., Biochemistry 31:4380-4314 (1992)). In vitro antifungal activity of this class of protein is sensitive to calcium and potassium ions in the 1 and 50 millimolar range, respectively.

[0597] The class of knottin-type proteins are 36 to 37 residues in length and contain 6 disulfide linked cysteine residues. A six cysteine residue disulfide linkage pattern has been reported to be XCX₆CX₈C₂X₃CX₁₀CX₂, where the first cysteine residue (amino acid residue 2) is linked to the fourth cysteine (amino acid residue 19), the second cysteine residue (amino acid residue 9) is linked to the fifth cysteine residue (amino acid residue 23), the third cysteine residue (amino acid residue 18) is linked to the sixth cysteine residue in position 32.

[0598] Knottin-type antifungal protein has been reported from the seeds of Mirabilis jalapa and was characterized as inhibiting a broad range of fungi (Cammue et al., J. Biol. Chem. 267:2228-2233 (1992)). In vitro antifungal activity of this class of protein is sensitive to calcium and potassium ions in the 1 and 50 millimolar range, respectively.

[0599] Ib-AMPs are a set of four different types of antimicrobial peptides that have been reported from the seeds of Impatients balsamina. These peptides are about 20 residues in length and are the smallest reported antifungal peptides. They contain 4 disulfide linked cysteine residues. These peptides have been reported to be encoded in a multipeptide precursor form containing 6 units of the antifungal peptide motif separated by conserved propeptide domains. A four cysteine residue pattern has been reported to be X₂C₂X₈CX₃C.

[0600] Direct antifungal activity of Ib-AMPs was demonstrated to be broad spectrum and sensitive to calcium and potassium ions in the 1 and 50 millimolar range respectively (Tailor et al., J. Biol. Chem. 272:24480-24487 (1997)).

[0601] MBP-1 is a protein isolated from maize that is 33 amino acid residues long and contains 4 disulfide linked cysteine residues. A four cysteine residue pattern has been reported to be X₆CX₃CX₁₃CX₃CX₄. MBP-1 has been reported to have antifungal activity against several fungi (Duvick et al., J. Biol. Chem. 25718814-18820 (1992)).

[0602] 2S albumins are seed storage proteins found in many plants specied. A 2S albumin has been reported from radish seed with antifungal activity against several plant pathogens including Alternaria brassicola and Verticillium dahliae and some bacteria species (Terras et al., J. Biol. Chem. 267:15301-15309 (1992)).

[0603] A purified preparation of trypsin and chymtrypsin inhibitors from cabbage foliage has been reported to have antifungal activity in vitro. The inhibitors suppressed spore germination and germ tube elongation of two phytopathogenic fungi species, Botrytis cinerea and Fusarium solani, by causing the leakage of the intracellular content of the fungi (Lorito et al., Mol. Plant-Microbe Interact. 7:525-527 (1994)). A proteinase inhibitor clone has been reported from cabbage (Williams et al. Plant Physiol. 114:747 (1997)).

[0604] It has been reported that exposure of tobacco suspension culture cells to pathogenic fungi induce expression of proteinase inhibitor genes (Richauer et al. Plant Physiol. Biochem. 306:579-584 (1992)). The production of proteinase inhibitors is affected by the age of the cell culture. Lipoxygenase has also been reported to play a role in the regulation of plant defense reactions.

[0605] 10. Nitrogen and Sugar Transportation

[0606] Membrane proteins can function as signal transducers or as transporters. Transport proteins (transporters or permeases) transfer molecules across cell membranes, which can have nutritional or informational value for the cell. Use of these transduction pathways by external signals such as sugars, nitrogenous compounds, or other metabolites is associated with the control of biochemical processes inside the cell. Molecules can be a nutrient and a regulatory signal at the same time, and biochemical pathways can be induced or repressed by metabolites. Transporters themselves can act as substrate inducible or catabolite repressable. This positive and negative regulation provides a mechanism by which the metabolism can respond to multiple sources of nutrients. Transport systems that are required in a given environmental or developmental condition are active.

[0607] Cells, tissues, and organs of higher plants can be characterized as autotrophic or heterotrophic. Autotrophic regions of the plant may be widely separated from heterotrophic regions, as is the case with leaves and roots, or adjacent, as with the epidermis and the underlying mesophyll cells in the leaf. Pathways involved with movement of photoassimilates and nitrogenous compounds from sites of photosynthesis (source) or assimilation, respectively, to the sites of storage or use (sinks) can be by direct, symplastic connections through plasmodesmata or through complex pathways involving membrane carriers (transporters) and plant vascular elements. Photoassimilate captured by photosynthesis are exported from the leaf in the forms of sucrose and amino acids in order to satisfy the biochemical needs of heterotrophic cells which specialize in important processes such as nutrient acquisition (roots) or reproduction (flowers, seed, fruit) or growth (sink leaves, stems). Partitioning of C and N assimilates plays a role in crop yield. Plant transporters involved in the movement of sugars and nitrogenous compounds are essential molecules for improving assimilate partitioning, which plays a crucial role in plant productivity and crop yield.

[0608] Reviews on transporters in plants include Buckhout and Tubbe, In: Photoassimilate Distribution In: Plants And Crops, Zamski and Schaffer, eds, Marcel Dekker Inc., New York, 229-260 (1996), Frommer et al., Transporters for nitrogenous compounds in plants. Plant Mo. Biol. 26:1651-1670 (1994).

[0609] Transporters mechanisms have been reported as follows. Active transport requires the input of energy and in primary active transport the transporter is directly coupled to an energy source, such as a membrane ATPase. Secondary active transport involves the indirect coupling of energy from a cotransporter, and an energetically uphill transport of one molecule that is linked to the energetically downhill transport of another. Symports refer to transport of both molecules in the same direction. Antiports refer to transport of molecules in opposite directions (Buckhout and Tubbe, In: Photoassimilate Distribution In: Plants And Crops, Zamski and Schaffer, eds., Marcel Dekker Inc., New York, 229-260 (1996)).

[0610] Many of the reported sugar transporters found in plants, animals, and bacteria are catalytically, mechanistically, and structurally similar. They are integral membrane proteins with at least 12 reported hydrophobic transmembrane segments (Buckhout and Tubbe, In: Photoassimilate Distribution In: Plants And Crops, Zamski and Schaffer, eds., Marcel Dekker Inc., New York, 229-260 (1996)). Based on genes encoding these proteins from bacteria, yeast, mammals, and plants a general structure has been reported. The amino acid sequence is not necessarily conserved in transporters (Buckhout and Tubbe, In: Photoassimilate Distribution In: Plants And Crops, Zamski and Schaffer, eds., Marcel Dekker Inc., New York, 229-260 (1996)).

[0611] Triose sugars are the initial stable products of photosynthesis and their net efflux from the chloroplast provides carbon and energy for metabolic processes in the cell. Triose sugar transport across the inner chloroplast membrane is catalyzed by a carrier that is coupled to Pi counter transport, linking the metabolic requirements of the cell to the synthetic machinery of the chloroplast (Flugge and Heldt 1991; Heldt et al., Plant Physiol. 95:341-343 (1991)). This triose phosphate-Pi transporter (known as the phosphate translocator) has been reported to be an antiporter. This transporter has also been reported to control the levels of triose-phosphate and Pi in the cytosol and chloroplasts of photosynthesizing cells. These metabolites in turn are associated with the regulation of starch biosynthesis and sucrose synthesis and diurnal partitioning of photoassimilate between starch and sucrose in photosynthetically active tissues (Preiss, In: The Biochemistry of Plants, Stumpf and Conn, eds., Vol. 14, Preiss, ed., 181-254 (1988)).

[0612] Phosphate translocators from different plant species and plant cell types can differ in their substrate specificities, due to the specialization of cell types in a tissue or species. C3 plants have been reported to have phosphate translocators in their chloroplasts with highest specificities to triose-3-phosphates (3-PGA) versus triose-2-phosphates (PEP) (Fliege et al., Biochim. Biophys. Acta, 502:232-247 (1978)). C4 plant phosphate translocators transport PEP and 2-PGA as well as 3-PGA, facilitating C4 photosynthesis and the specialization of bundle sheath and mesophyll cells for 3-PGA and PEP transport, respectively (Ohnishi et al., Plant Physiol. 91:1507-1511 (1989)). Crassulacean acid metabolism (CAM) plants have phosphate translocators which have been reported to transport 3-PGA or PEP (Neuhaus et al., Plant Physiol. 87:64-68 (1988)). Phosphate translocators in plastids other than chloroplasts have been reported to have substrate specificities for hexose sugars, such as in maize kernel amyloplasts (glucose-1-P or glucose-6-P; Overlach et al., Plant Physiol. 101:1201-1207 (1993); Neuhaus et al., Plant Physiol. 101:573-578 (1993)).

[0613] A gene for a phosphate translocator protein was reported from spinach (Flugge et al., 1989). In addition, genes in pea (Willey et al., Planta 183:451-461 (1991)), potato (Schulz et al., Mol. Gen. Genet. 238:357-361 (1993)), maize, and Flaveria (Fischer et al., Plant J. 5:215-226 (1994)) have been reported. Deduced amino acids of these reported genes were 85 to 87% identical and encoded 35-37 kDa proteins. The reported functional translocators have been dimers and structural modeling from these cloned genes suggests that two hydrophilic transport channels are formed from a total of 12 transmembrane domains. The potato gene is not expressed in other tissues than leaves. Antisense experiments in potato show that reducing the phosphate translocator expression inhibits chloroplastic export of triose phosphate, and increases the amount of photoassimilate partitioned into starch (Riesmeier et al., Proc. Natl. Acad. Sci. (USA) 90:6160-6164 (1993)).

[0614] Both active and passive transport has been reported for sugar transport across the plasma membrane for cell to cell transport. Passive transport has been reported to involve transporter proteins, but direction of transport is determined solely by concentration gradient of the substrate, not by energy coupled transport (active). Active transport has been reported (Bush, Annu. Rev. Plant Physiol. Plant Mol. Biol. 44:513-542 (1993)). Active transport is driven by the electrochemical gradient across the plasma membrane established by a proton (H⁺) pumping ATPase, transporting H⁺ out of the plant cell and creating a pH gradient (acid outside). In reported cases to date, active uptake of sugars across the plasma membrane utilizes an H⁺-sugar symporter, with examples being the sucrose symporter and glucose symporter (Buckhout and Tubbe, In: Photoassimilate Distribution In: Plants And Crops, Zamski and Schaffer, eds., Marcel Dekker Inc., New York, 229-260 (1996)).

[0615] Many plants utilize sucrose as the chemical form to distribute photosynthetically derived energy and carbon to nonphotosynthetic organs. Long distance transport of sucrose through the plant has been reported to be catalyzed by a series of partial reactions ranging from diffusion between mesophyll cells in the leaf to active transport of sucrose into the sieve tube-companion cell complex, a step in phloem loading. Carrier-mediated transport of sucrose in phloem loading and this phenomenon has been reported in a variety of tissues and species (Sovonick et al., Plant Physiol. 54:886-891 (1974); Maynard and Lucas, Plant Physiol. 70:1436-1443 (1982); Lemoine et al., Plant Physiol. 86:575-580 (1988); Bush, Annu. Rev. Plant Physiol. Plant Mol. Biol. 44:513-542 (1993)). It has been reported that phloem loading of sucrose across the plasma membrane (into the sieve tube-companion cell) is carrier mediated by coupled symport with protons (Buckhout and Tubbe, In: Photoassimilate Distribution In: Plants And Crops, Zamski and Schaffer, eds., Marcel Dekker Inc., New York, 229-260 (1996)). An in vitro assay for sucrose transport has been reported (Bush, Plant Physiol. 89:1318-1323 (1989); Buckhout, Planta 178:393-399 (1989)).

[0616] Reported characteristics of sucrose transporters from isolated plasma membranes include saturable uptake, Kₘ for sucrose ranging from 0.5 to 2 mM sucrose, and sucrose accumulating in isolated vesicles to a concentration of up to two to five times greater than the surrounding media. A negative membrane potential has been reported to drive sucrose transport. The stoichiometry for sucrose/H⁺ was measured at nearly 1:1 (Buckhout and Tubbe, In: Photoassimilate Distribution In: Plants And Crops, Zamski and Schaffer, eds., Marcel Dekker Inc., New York, 229-260 (1996)). Specificity of the sucrose symporter for sucrose has been reported for in vivo for phloem transport in sugar beet (Fondy et al., Plant Physiol. 59:953-960 (1977)) and maize (Giaquinta, Annu. Rev. Plant Physiol. 34:347-387 (1983)). Uptake of sucrose into soybean protoplasts and sugar beet leaf disks has been reported to be inhibited by 100 fold maltose excess (Maynard and Lucas, Plant Physiol. 70:1436-1443 (1982)). Studies with sucrose derivatives and inhibition experiments in soybean cotyledons report that the glucose moeity of sucrose is solely responsible for the substrate recognition (Hitz et al., J. Biol. Chem. 261:11986-11991 (1986)). Sucrose has been reported the preferred substrate for a sucrose symporter with minor differences in substrate specificity in different tissues or species (Buckhout and Tubbe, In: Photoassimilate Distribution In: Plants And Crops, Zamski and Schaffer, eds., Marcel Dekker Inc., New York, 229-260 (1996)).

[0617] A sucrose transporter protein has been reported using chemical labeling of a 62 kDa protein from a preparation of plasma membranes from soybean cotyledons at a developmental stage where sucrose is actively imported (Ripp et al., Plant Physiol. 88:1435-1445 (1988)). Antibodies raised against this protein recognized antigens on the sieve tube plasma membrane of spinach leaves (Warmbrodt et al., Planta 180:105-115 (1989)), and antigens of the plasma membrane of companion cells of soybean cotyledons (Grimes et al., Plant Cell 4:1561-1574 (1992)). A gene was isolated and sequenced for this 62 kDa protein and shows little sequence identity to other sucrose symporters (Grimes et al., Plant Cell 4:1561-1574 (1992). A reported sucrose symport gene from a spinach cDNA library isolated by complementation of a yeast mutant encodes a protein with predicted mass of 55 kDa, has 12 hydrophobic regions typical of plasma membrane symport proteins, but no sequence similarity to other sugar cotransporters (Riesmeier et al., EMBO J. 11:4705-4713 (1992)). A potato cDNA has also been reported and isolated by a similar approach, with 60% amino acid identity to the spinach gene. Expression of the potato gene was reported in leaf minor veins, reported regions of phloem unloading. The reported gene is strongly expressed in source leaves and roots with little or no expression in sink leaves and stems and tubers and flowers (Riesmeier et al., EMBO J. 13:1-7 (1994)). Antisense reduction of this gene in potatoes resulted in transgenic potato plants that were growth retarded in juvenile stages and that accumulated carbohydrates in leaves, along with reductions in export of sucrose from source leaves and reduction in tuber development (Riesmeier et al., EMBO J. 13:1-7 (1994)). A role for sucrose symporter in phloem loading and export of carbohydrates from source leaves in defining photoassimilate partitioning and flow of carbon from source to sink in plants has been reported.

[0618] Other carbon forms in some plant species may be used to transport energy. Sorbitol, is a primary photoassimilate in some members of Rosaceae, such as Malus, Prunus, and Pyrus (Bieleski, Aust. J. Plant Physiol. 4:11-24 (1977)). Sorbitol uptake into phloem has been reported to be carrier mediated (Buckhout and Tubbe, In: Photoassimilate Distribution In: Plants And Crops, Zamski and Schaffer, eds., Marcel Dekker Inc., New York, 229-260 (1996)). Other plants may transport mannitol as photoassimilate (Loescher, Physiol. Plant 70:553-557 (1987)), and others may utilize sucrosylgalacto sides (raffinose, stachyose, and verbascose; Van Bel, Annu. Rev. Plant Physiol. Plant Mol. Biol. 44:253-281 (1993)), but little is known about their transport.

[0619] Glucose and other hexoses are intermediates in the storage of carbon and energy and hexose transport has been reported to play a role in heterotrophic tissues such as roots, stems, and reproductive organs (seeds, fruit) that form metabolic sinks. In Zea mays, sucrose phloem unloading occurs in the apoplast, where invertases hydrolyze to glucose and fructose, both of which are transport sugars (Doehlert and Felker, Physiol. Plant. 70:51-57 (1987)). First studies on glucose uptake indicated a carrier mediated process, and studies initially in Chlorella (Komor, E., FEBS Lett. 38:16-18 (1973)), indicated a glucose symport with +, and substrate specificity for other hexoses as well.

[0620] Plasma membrane transport of hexose in higher plants has been reported (Komor, In: Encyclopedia of plant physiology, new series, Pearson and Zimmermann, eds., Springer-Verlag, Berlin, 635-676 (1982); Rausch, Physiol. Plant 82:134-142 (1991)). In Streptanthus cells two transport systems have been reported, one with affinity and specificity for glucose, the other transporting either glucose or fructose (Rausch et al., Plant Physiol. 85:996-999 (1987)). Plasma membrane isolation studies have investigated the specificity of transport for hexoses with sugar beet cells being more specific for glucose (Zamski and Wyse, Plant Physiol. 78:291-295 (1985)), and other species having variable specificities for hexoses. A family of genes for hexose transport, with differential expression of the genes in each cell type defining hexose transport have been reported (Sauer and Tanner, Bot. Acta 106:277-286 (1993)).

[0621] A hexose symporter gene (HUP1) from Chlorella with typical 12 membrane domains has been cloned with similar kinetic characteristics and substrate preferences to those in vivo, when expressed in yeast (Sauer et al., Proc. Natl. Acad. Sci. (USA) 87:7949-7952 (1990); Sauer et al., EMBO J. 9:3045-3050 (1990)). Since then several genes ranging in amino acid identity from 45-80% have been reported from Arabidopsis (STP1) and other species (Sauer and Tanner, Bot. Acta 106:277-286 (1993); Bugos et al., Plant Physiol. 103:1468-1470 (1993)). Certain gene family members have been reported to be strongly expressed in roots in Arabidopsis and tobacco. Other gene family members have been reported to be expressed only in leaves (Sauer et al., EMBO J. 9:3045-3050 (1990)).

[0622] The vacuole provides temporary storage for photoassimilate in photosynthetically active mesophyll cells or a compartment for long term storage in organs such as tap roots or hypocotyls of beet or storage cells of sugar cane (Buckhout and Tubbe, In: Photoassimilate Distribution In: Plants And Crops, Zamski and Schaffer, eds., Marcel Dekker Inc., New York, 229-260 (1996)). Transport of sugars across the vacuolar membrane has been reported to be passive or active, the latter driven by a H⁺ gradient generated by an ATPase or PPiase.

[0623] In dormant tubers of Japanese artichoke (Stachys) it has been reported that stachyose is stored against a concentration gradient in vacuoles (Keller and Matile, J. Plant Physiol. 119:369-380 (1985)). It has further been reported that uptake of both sucrose and stachyose into the vacuole is active by means of a H⁺-sugar antiporter (Greutert and Keller, Plant Physiol. 101:1317-1322 (1993)).

[0624] Glucose transport into isolated pea mesophyll vacuoles has been reported as H⁺-driven glucose antiport (Guy et al., Plant Physiol. 64:61-64 (1979)). Similar mechanism has been suggested for sugar cane protoplasts (Thom et al., Plant Physiol. 69:1320-1325 (1982)), and maize coleoptile tonoplasts (Rausch et al., Plant Physiol. 85:996-999 (1987)).

[0625] Accumulation of sucrose in sugar beets and sugar cane vacuoles, because of huge economic importance has been given more study. Sucrose transport into sugar beet vacuoles has been reported to be by a sucrose-H⁺ antiport (Willenbrink and Doll, Planta 147:159-162 (1979); Briskin et al., Plant Physiol. 78:871-875 (1985)). In sugar cane, vacuole transport is also consistent with sucrose-H⁺ antiport. In barley mesophyll cells and other C3 plants, much of the photoassimilate produced is stored in leaf mesophyll cells soon after photosynthesis as sucrose in the vacuole. It has been reported that this transport of sucrose occurs by passive transport with a facilitated carrier (facilitated diffusion) (Martinoia, Bot. Acta 105:232-245 (1992)), and that sink cells utilize active transport for vacuolar storage of sucrose with source cells using facilitated diffusion.

[0626] The growth of a plant is limited by the nutrient present in limiting amounts. Nitrogen is often a limiting nutrient in the soil.

[0627] Uptake can involve three major sources of nitrogen including nitrate, ammonium, and to a lesser extent amino acids occurs if the nitrogenous substance is not permeable, across the membrane in the outer cell layers of the root (root hairs and cortex). Reduction, fixation and use may take place directly or in neighboring cells or transported to other organs (Frommer et al., Plant Mo. Biol. 26:1651-1670 (1994)). This translocation can occur by apoplastic transport through the cortex, then symplastically to the stele, and then transferred to the xylem by additional transport systems (Pitman, Annu Rev Plant Physiol. 28:71-88 (1977)).

[0628] Translocation and processing of nitrogenous compounds into amino acids and proteins is dependent on the plant species. Nitrate may be taken up and reduced directly in the root or it can be transported through the xylem to the leaves where photosynthate can be used to make amino acids. Ammonium assimilation has been reported to occur directly in the root. It has been reported that reduced nitrogen is transported in the form of amino acids, amides and ureides within the xylem and phloem (Frommer et al., Plant Mo. Biol. 26:1651-1670 (1994)).

[0629] Reduced nitrogen is stored transiently as vegetative storage protein or storage proteins in seeds, and this reduced nitrogen is reallocated during plant development from exporting sources such as roots, leaves, or endosperm or cotyledons (in early development). Transport may occur by xylem or phloem and may involve several types of nitrogenous compounds (amino acids) (Frommer et al., Plant Mo. Biol. 26:1651-1670 (1994)). Carrier mediated transport has been reported for uptake and transfer of nitrate, ammonium, and amino acids in plants.

[0630] Nitrate uptake has been reported to be mediated by specific transport systems and acts as a symport with at least two protons (Doddema and Telkamp, Physiol Plant. 45:332-338 (1979); Glass et al., Plant Physiol. 99:456-463 (1992); Goyal and Huffaker, Plant Cell Environ. 9:209-215 (1986)). Mutants and gene cloning studies have identified an amino acid transporter/pump with membrane spanning domains from Aspergillus (CRNA; Unkles et al., PNAS 88:204-208 (1991)), and an amino acid transporter/pump in Arabidopsis, an integral membrane protein (CHL1; Tsay et al., Cell 72:705-713 (1993). In higher plants, absorbed nitrate or nitrite is either reduced in the roots and exported in the form of amino acids or transported to the leaves, where it is reductively assimilated to produce amino acids.

[0631] Under agronomic conditions that inhibit nitrification, such as rice cultivation or cold or acidic soils for other species, ammonium may be the most prevalent source of nitrogen (Wang et al., Plant Physiol. 103:1249-1258 (1993)). Ammonium occurs in bound forms in the soil and requires efficient release systems. Plant systems in place for uptake including a saturable carrier mediated system at low ammonium concentrations and a linear diffusive component at elevated ammonium concentrations have been reported (Fried et al., Physiol Plant. 18:313-320 (1965); Wang et al., Plant Physiol. 103:1259-1267 (1993)). A high affinity ammonium transport system has been reported from plants (Ninneman et al., EMBO J. 13:3464-3471 (1994)). Similar to nitrate transport, ammonium transport has been reported to involve transporters for cortex uptake, transfer and release into/from the vessels and specific retrieval systems to prevent loss in the form of ammonia (Frommer et al. Plant Mo. Biol. 26:1651-1670 (1994)).

[0632] Plants which undergo symbiosis with nitrogen fixing organisms accept dinitrogen reduced in the nitrogen fixing organism and transfer to the plant cytoplasm. Ammonium is a major transport form for movement across the rhizobium (dinitrogen fixers) membranes and this occurs by diffusion into the more acidic plant cell wall (Kleiner, In: Alkali Cation Transport Systems in Procaryotes, Bakker, ed., CRC Press, London, 379-396 (1993)). Ammonium taken up or produced by nitrogen fixation feeds into amino acid biosynthesis and these amino acids can by exported by the vascular tissue to organs and cells that are dependent on external supply (Frommer et al., Plant Mo. Biol. 26:1651-1670 (1994)).

[0633] Export of amino acids have been reported via the xylem in species where amino acid biosynthesis occurs in the roots. Roots have also been reported to have uptake systems for amino acids and an active transport system (Schobert and Komor, Planta 177:342-349 (1989)). The major amino acids reported in root exudates have been glutamine (Allen and Raven, J. Exp. Bot. 38:580-596 (1987)), asparagine and glutamate (Shelp, J. Exp. Bot. 38:1619-1636 (1987)).

[0634] In barley it has been reported that the concentration of amino acids in the leaf mesophyll cells mimics that found in the phloem sap (Winter et al., Plant Physiol. 99:996-1004 (1992)). In addition the composition of xylem sap and phloem sap has been reported to be similar indicating that loading of phloem is not selective and that a transport system with broad substrate specificity exists (Frommer et al., Plant Mo. Biol. 26:1651-1670 (1994).

[0635] It has been reported that amino acids arrive to developing seeds by phloem, and that a xylem to phloem transfer can occur before phloem unloading, at least in species where root tissue is responsible for most amino acid synthesis (Thorne, Annu Rev Plant Physiol 36:317-343 (1985)). Embryo tissue symplastically isolated from the maternal tissue in developing seeds, and amino acids have to pass the apoplastic space before entering seeds, suggesting possible roles for transporters. Arabidopsis transporter genes AAP1 and AAP2 are expressed in developing seed pods both a role in phloem unloading or assimilate transfer (Kwart et al., Plant J. 4:993-1002 (1993)). AAP1 and AAP2 are also expressed in the vascular tissue of developing cotyledons and it has been reported that these play a role in supplying germinating seedlings with reduced nitrogen (Frommer et al. Plant Mo. Biol. 26:1651-1670 (1994)).

[0636] Studies in Chlorella have reported that amino acids are inducible and divided into one specific for basic amino acids, one specific for neutral amino acids, and one system for a number of amino acids (Langmuller and Springer-Lederer, Planta. 120:189-196 (1974)). In Nicotiana and Commelina, a low affinity and high affinity transport system have been reported (Borstlap, In: Fundamental Ecological and Agricultural Aspects of Nitrogen Metabolism in Higher Plants, Lambers, Neeteson, and Stulen, eds. Martinus Nijhoff Publishers, Dordrecht, 115-117, (1986); van Bel et al., Planta. 186:518-525 (1992)), with a tissue specific in function, i.e., different from mesophyll to the vascular tissue. In sugar beet, the uptake of several amino acids has been reported to be coupled to cotransport of protons (Li and Bush, Plant Physiol. 94:268-277 (1990)). Transport systems are associated with uptake into roots, mobilization from roots in the xylem, unloading of phloem and possibly transfer from xylem to phloem. Sink organs have been reported to require two systems, one in maternal tissue for phloem unloading and one for uptake into the developing embryo or seed tissue.

[0637] Several gene families from Arabidopsis have been identified as encoding amino acid transporters (Frommer et al., PNAS. 90:5944-5948 (1993)). These include at least two reported gene families with integral membrane proteins able to mediate amino acid transport, with the first group being named amino acid permease (AAP) ((Frommer et al., PNAS. 90:5944-5948 (1993); Kwart et al., Plant J. 4:993-1002 (1993)). Two members of this family have been reported to contain 9-12 membrane domains and encode polypedtides of 53 kDa (Frommer et al. Plant Mo. Biol. 26:1651-1670 (1994)). Amino acid permeases from bacteria, animals, and fungi can be grouped into several categories including those specific for neutral and acidic amino acids and proline (Kanai and Hediger, Nature 360:467-471 (1992)), the cationic and aromatic amino acid transporters (Heatwole and Somerville, J. Bact. 173:108-115 (1991); Honore and Cole, Nucl. Acids Res. 18:653 (1990)), those related to the plant AAP family (see above), and the transporters which contain ATP-binding cassettes (Higgins et al., J. Bioenerg. Biomembr. 22:571-592 (1990)).

[0638] Chlorella has been reported to have up to seven transport systems with different substrate specificities (Frommer et al. Plant Mo. Biol. 26:1651-1670 (1994)). In higher plants the numbers of systems may range from one to several. Three distinct transport systems, one for neutral including glutamine, asparagine, and histidine, one for acidic and one for basic amino acids, were reported in sugar cane suspension cells (Wyse and Komor, Plant Physiol. 76:865-870 (1984)). Reported Arabidopsis carriers in the AAP family differ in substrate specificity with respect to basic amino acids, but have a general or broad specificity which has been reported to cover the transport of the major components found in xylem and phloem (Frommer et al. Plant Mo. Biol. 26:1651-1670 (1994)).

[0639] A direct export of small peptides has been reported to enhance the transport efficiency of tissues which store proteins. Transport activities for peptides were reported in a variety of plant tissues (Higgins and Payne, Planta 138:217-221 (1978)), especially localized in tissues like germinating seedlings. Peptide transporter genes have been reported from yeast (Dubois and Grenson, Mol. Gen. Genet. 175:67-76) and Arabidopsis.

[0640] F. Phenolic Metabolism

[0641] 1. Shikimate Pathway

[0642] The shikimate, or common aromatic, pathway is reported to play a role in the production of precursors for aromatic compounds in microbes and plants (Herrmann, Plant Cell 7:907-919 (1995); and Herrmann, Plant Physiology 107:7-12 (1995)). As used herein, the term shikimate pathway is used generically to refer to pathways that lead to the biosynthesis of chorismate, phenylalanine, tyrosine, and tryptophan.

[0643] In fungi, except for the first enzyme of the shikimate pathway, all reactions are catalyzed by a pentafunctional arom complex that produces chorismate. In bacteria and plants, enzymes of the shikimate pathway are monofunctional. In microbes, the pathway serves primarily for the production of aromatic amino acids for protein biosynthesis. In plants the pathway generates not only phenylalanine, tyrosine, and tryptophan, but also other aromatic compounds derived from chorismate, the end product of the shikimate pathway, or from phenylalanine, tyrosine, and tryptophan (Dewick, Natural Product Reports 11:173-203 (1994)).

[0644] A plastidic location for the shikimate pathway and the terminal pathways to phenylalanine, tyrosine, and tryptophan has been reported based on biochemical (Bickel and Schultz, Phytochemistry 18:498-499 (1979)) and molecular analysis (Schmid and Amrhein, Phytochemistry 39:737-749 (1995); Della-Cioppa et al., Proc. Natl. Acad. Sci. (U.S.A.) 83:6873-6877 (1986); and Schmid et al., Plant Journal 2:375-383 (1992)). Cytosolic enzyme activities for the first enzyme of the shikimate pathway and the first enzyme of the pathways leading to tyrosine and phenylalanine have also been reported. A “dual pathway” hypothesis has been proposed, with a plastidic shikimate pathway responsible for the production of aromatic amino acids, and a cytosolic one responsible for the production of chorismate required for the synthesis of secondary metabolites.

[0645] In plants, the formation of chorismate from the shikimate pathway is reported to consist of seven reactions catalyzed by six enzymes. Chorismate is subsequently converted to phenylalanine or tyrosine in three reactions, and to tryptophan in five reactions.

[0646] The first reported step in the production of chorismate is reported to begin with the condensation of phosphoenolpyruvate (“PEP”) and erythrose-4-phosphate (“E4P”) to form the seven carbon sugar, 3-deoxy-D-arabino heptulosonate 7-phosphate (“DAHP”). This reaction is catalyzed by the enzyme 3-deoxy-D-arabino heptulosonate 7-phosphate synthase (also referred to as DAHP synthase, and DAHPS (E.C. 4.1.2.15)). Multiple isoenzymes of DAHPS are reported to exist in plants. Enzyme activity has been reported in cytosol and plastid (Ganson et al., Plant Physiology 82:203-210 (1986)). The cytosolic form of the enzyme is reported to have a broad substrate specificity and to be associated with cytosolic functions other than the production of DAHP (Doong et al., Physiologia Plantarum 84:351-360 (1992)). A plastidic DAHPS isoenzyme has been reported to be inhibited by arogenate, a post-shikimate pathway intermediate of plant phenylalanine and tyrosine biosynthesis (Doong et al., Plant Cell and Environment 16:393-402 (1993)). A hysteretic enzyme whose activity is enhanced by tyrosine and tryptophan (Doong et al., Plant Cell and Environment 16:393-402 (1993); Herrmann, Plant Physiology 107:7-12 (1995)). Genes encoding plastidic DAHPS have been reported and contain a chloroplast transit sequence.

[0647] Two types of plastidic DAHPS, having about 80-85% sequence identity at the amino acid level, have been reported in plants (Zhao and Herrmann, Plant Physiology 100: 1075-1076 (1992)). One enzyme has been reported to increase in response to environmental changes such as nutritional stress, light, wounding, and pathogen attack at the transcriptional level which leads to an accumulation of the enzyme and an increase in activity (Keith et al., Proc. Natl. Acad. Sci. (U.S.A.) 88:8821-8825 (1991); Görlach et al., Plant Molecular Biology 23:697-706 (1993); Umeda et al., Plant Molecular Biology 25:469-478 (1994); Guyer et al., Proc. Natl. Acad. Sci. (U.S.A.) 92:4997-5000 (1995); Henstrand et al., Plant Physiology 98:761-763 (1992); Dyer et al., Proc. Natl. Acad. Sci. (U.S.A.) 86:7370-7373 (1989); Jones et al., Plant Physiology 108:1413-1421 (1995); Conn and McCue, Studies in Plant Sciences 4:95-102 (1994); Görlach et al., Proc. Natl. Acad. Sci. (U.S.A.) 92:3166-3170 (1995)). In tomato, an inducible DAHPS isoenzyme is reported to be expressed at higher levels in roots and flowers, lower levels in stems, and lowest levels in leaves and cotyledons. A second class of plastidic DAHPS, which is constitutively expressed, accumulates to higher levels in flowers and lower levels in the stems of tomato (Görlach et al., Planta 193:216-223 (1994)).

[0648] A second enzyme of the shikimate pathway is encoded by dehydroquinate synthase (“DHQS” (E.C. 4.6.1.3)). DHQS has been reported from a plant source, and both biochemical and molecular evidence indicate that this enzyme is located in the chloroplast (Bickel and Schultz, Phytochemistry 18:498-499 (1979); Bischoff et al., Plant Molecular Biology 31:69-76 (1996)). DHQS mRNA has been reported to be expressed at high levels in roots, low levels in leaves, and at moderate levels in other organs. It has also been reported that DHQS mRNA levels increase about 5-fold in response to fungal elicitor (Bischoff et al., Plant Molecular Biology 31:69-76 (1996)). Dehydroquinate synthase catalyzes the conversion of 3-deoxy-D-arabino-heptulosonate 7-phosphate (DAHP) to 3-dehydroquinate (Yamamoto and Minamikawa, J Biochem (Tokyo) 80:633-635 (1976)).

[0649] The third and fourth reactions of the plant shikimate pathway are catalyzed by a bifunctional enzyme: dehydroquinase (E.C. 4.2.1.10) and shikimate dehydrogenase (“DHQ/SDH” (E.C. 1.1.1.25)). Partial cDNA sequences coding for the carboxy terminal portion of the protein have been isolated from pea and tobacco (Deka et al., FEBS Letters 349:397-402 (1994); Bonner and Jensen, Biochemical Journal 302:11-14 (1994)). It has also been reported that DHQ/SDH activity in pea is subject to light regulation (Rothe and Hengst, Z. Pflanzenphysiol. 101:223-232 (1981)).

[0650] A product of the bifunctional DHQ/SDH is converted to shikimate-3-phosphate by shikimate kinase (“SK” (E.C. 2.7.1.71)). Shikimate kinase is reported to convert shikimate to shikimate 3-phosphate (Griffin and Gasson, DNA Seq. 5:195-197 (1995)). In tomato, the SK gene has been reported to be encoded by only a single gene per haploid genome. SK contains a plastid or chloroplast transit sequence, and has been reported to be imported into chloroplasts in vitro (Schmid et al., Plant Journal 2:375-383 (1992)). SK is reported to be induced by fungal elicitors. It has also been reported that under fungal elicitation in tomato cell culture, SK transcript accumulation reaches a peak approximately at the same time as phenylalanine ammonia lyase message, and earlier than peak transcript accumulation for other enzymes of the shikimate pathway (Bischoff et al., Plant Molecular Biology 31:69-76 (1996); Görlach et al., Proc. Natl. Acad. Sci. (U.S.A.) 92:3166-3170 (1995)).

[0651] The penultimate reported reaction of the shikimate pathway is the conversion of shikimate 5-phosphate to 3-enolpyruvyl shikimate 5-phosphate (“EPSP”), catalyzed by 3-enolpyruvyl shikimate 5-phosphate synthase (also referred to as EPSP synthase or “EPSPS” (E.C. 2.5.1.19)). EPSPS has been characterized (Herrmann, Plant Cell 7:907-919 (1995); Herrmann, Plant Physiology 107:7-12 (1995); Dewick, Natural Product Reports 11: 173-203 (1994)). It has been reported that EPSPS, synthesized in vitro from plant cDNA can be imported into isolated chloroplasts (Della-Cioppa et al., Proc. Natl. Acad. Sci. (U.S.A.) 83:6873-6877 (1986)). EPSPS activity and transcripts are reported to respond to developmental and environmental conditions. Two isozymes have been reported in maize, one of which changes in response to the growth stage of cell cultures (Forlani et al., Plant Physiology 105:1107-1114 (1994)). In tomato, EPSPS transcript expression patterns in various organs essentially parallel that of the inducible DAHPS (Görlach et al., Planta 193:216-223 (1994)). EPSPS transcripts are also reported to accumulate in response to nutritional stress (Guyer et al., Proc. Natl. Acad. Sci. (U.S.A.) 92:4997-5000 (1995)) and fungal elicitors (Görlach et al., Proc. Natl. Acad. Sci. (U.S.A.) 92:3166-3170 (1995)). In Euglena gracilis, plastidic EPSPS is reported to be differentially expressed in response to light (Reinbothe et al., Mol. Gen. Genet. 245:616-622 (1994)).

[0652] The final reported reaction of the shikimate pathway is catalyzed by chorismate synthase (“CS” (E.C. 4.6.1.4)). CS catalyses the conversion of 5-enolpyruvylshikimate 3-phosphate (EPSP) to form chorismate (Henstrand et al., Mol. Microbiol. 22:859-866 (1996)). A cDNA for CS has been reported from tomato (Braun et al., Planta 200:64-70 (1996)). Like DAHPS, CS has been reported to be encoded by two genes, and exhibit differential induction by fungal elicitors (Görlach et al., Plant Mol. Biol. 23:707-716 (1993)) and varying transcript levels in plant organs (Görlach et al., Planta 193:216-223 (1994)). A reported CS cDNA contains plastid transit sequences and a CS protein is reported to contain an unclipped transit sequence that is enzymatically inactive (Henstrand et al., Plant Physiology 108:1127-1132 (1995)).

[0653] An end product of the shikimate pathway, chorismate, is converted to phenylalanine or tyrosine by three enzymatic reactions that are reported to differ only in the final step. In addition to protein synthesis, phenylalanine and tyrosine are also reported to be the precursors to several secondary metabolites. Since these secondary metabolites are often produced in the cytosol, multiple subcellular locations for this pathway have been reported.

[0654] Chorismate mutase (“CM” (E.C. 5.4.99.5)), the first reported enzyme in the terminal pathway leading to phenylalanine and tyrosine, has been characterized at the biochemical and molecular level. Higher plants generally have two CM isozymes, and two activities, one activity, CM1, has been reported in the plastid, while the second, CM2, is reported in the cytosol (d'Amato et al., Planta 162:104-108 (1984); Benesova and Bode, Phytochemistry 31:2983-2987 (1992)). Plant CM, a monofunctional enzyme, is reported to not exhibit substantial sequence homology to microbial CM, which is part of a bifunctional protein (Eberhard et al., Plant Journal 10:815-821 (1996)). Like DAHPS and CS, the two reported isozymes of CM exhibit differential responses to environmental factors. In Arabidopsis, transcripts encoding CM1 are reported to accumulate at higher levels in roots, with lower levels accumulating in leaves (Eberhard et al., Plant Journal 10:815-821 (1996)). CM1 transcripts have been reported to be induced by pathogens (Eberhard et al., Plant Journal 10:815-821 (1996)). Plastidic CM1 activity has been reported to increase in response to wounding in potato (Kuroki and Conn, Plant Physiology 89:472-476 (1989)). CM1 activity is also reported to be regulated by the aromatic amino acids; phenylalanine and tyrosine, which inhibit activity, and tryptophan which, activates it (Romero et al., Phytochemistry 40:1015-1025 (1995)). Cytosolic CM, CM2, has not been reported to show a similar response to environmental conditions reported for CM1 (Eberhard et al., Plant Journal 10:815-821 (1996); Kuroki and Conn, Plant Physiology 89:472-476 (1989); Romero et al., Phytochemistry 40:1015-1025 (1995)).

[0655] The product of CM, prephenate, is converted to arogenate by the action of prephenate aminotransferase (“PAT” (E.C. 2.6.1.-)). PAT has been reported from Anchusa officinalis (De-Eknamkul et al., Archives of Biochemistry and Biophysics 267:87-94 (1988)) and in tobacco cell culture (Bonner et al., Physiologia Plantarum 73:451-456 (1988)). A purified PAT has a native molecular weight of 220 kD and consists of heteromeric subunits with molecular weights of 44 and 57 kD, indicating an α₂β₂ subunit structure De-Eknamkul et al., Archives of Biochemistry and Biophysics 267:87-94 (1988)). PAT has been reported to be thermotolerant (Bonner and Jensen, Planta 172:417-423 (1987)), specific for prephenate, and capable of utilizing either aspartate or glutamate as the amino donor (De-Eknamkul et al., Archives of Biochemistry and Biophysics 267:87-94 (1988)). Greater than 90% of PAT activity is reported to be found in the plastid (Siehl et al., Plant Physiology 81:711-713 (1986)).

[0656] Arogenate, produced by PAT, is the last reported common intermediate of phenylalanine and tyrosine synthesis. Arogenate is converted to phenylalanine by the action of arogenate dehydratase (E.C. 4.2.1.-), and to tyrosine by the action of arogenate dehydrogenase (E.C. 1.3.1.43). Arogenate dehydratase has been partially purified from Sorghum. Sorghum arogenate dehydratase activity has been reported to be inhibited by its product, phenylalanine (Kᵢ 24 μM), and stimulated by tyrosine (Kₐ 2.5 μM) (Siehl and Conn, Archives of Biochemistry and Biophysics 260:822-829 (1988)). Arogenate dehydrogenase activity from Sorghum has been reported to be inhibited by tyrosine (Kᵢ 61 μM), but unaffected by phenylalanine (Connelly and Conn, Z. Naturforsch. Biosciences 41:69-78 (1986)). Both arogenate dehydrogenase and arogenate dehydratase are reported to have a Kₘ for arogenate of about 300 μM-350 μM (Connelly and Conn, Z. Naturforsch. Biosciences 41:69-78 (1986); Siehl and Conn, Archives of Biochemistry and Biophysics 260:822-829 (1988)).

[0657] Synthesis of tryptophan from chorismate has been reported to involve five reactions. These five reported reactions are conserved between microbes and plants. In addition to tryptophan, this pathway can lead to the biosynthesis of secondary metabolites including auxin, indole alkaloids, phytoalexins, cyclic hydroxamic acids, indole glucosinolates and acridone alkaloids. The functions of these secondary metabolites have been reported to include regulating plant growth, disease and insect resistance, and pollinator attractant.

[0658] Genes and/or cDNA's coding for each of the enzymes in the tryptophan synthetic pathway have been reported. It has also been reported that the tryptophan biosynthetic pathway is located in the plastid (Zhao and Last, Journal of Biological Chemistry 270:6081-6087 (1995); Radwanski and Last, Plant Cell 7:921-934 (1995)).

[0659] The first reported enzyme to be involved in the synthesis of tryptophan is anthranilate synthase (“AS” (E.C. 4.1.3.27)). This enzyme converts chorismate to anthranilate by elimination of the enolpyruvyl side chain, followed by an amino transfer from glutamine. AS has been reported to comprise non-identical subunits in an α₂β₂ structure (Romero et al., Phytochemistry 39:263-276 (1995)). In plants, multiple isozymes of AS have been reported to exist. AS has been reported to be feedback inhibited by tryptophan (Radwanski and Last, Plant Cell 7:921-934 (1995); Romero et al., Phytochemistry 39:263-276 (1995)). In Arabidopsis and R. graveolens, two cDNAs coding for the α subunit (ASA1 or ASα1 and ASA2 or ASα2, respectively) have been reported. The proteins encoded by these genes exhibit about 30-40% amino acid identity to an E. coli AS α subunit. ASA1 or ASα1 and ASA2 or ASα2 contain putative plastid transit sequences, and fall into two classes having approximately 70-80% amino acid identity. In Arabidopsis, three genes coding for the β subunit have been reported (ASB1, ASB2, ASB3) (Radwanski and Last, Plant Cell 7:921-934 (1995); Romero et al., Phytochemistry 39:263-276 (1995)).

[0660] The genes that constitute AS have been reported to be differentially expressed. The mRNA for ASA1 and ASB1 have been reported to be more abundant than the mRNA coding for other AS subunits. The ASA1 and ASB 1 genes are reported to be involved in a response to microbial attack (Radwanski and Last, Plant Cell 7:921-934 (1995); Romero et al., Phytochemistry 39:263-276 (1995); Schmid and Amrhein, Phytochemistry 39:737-749 (1995)). ASA1 and ASA2 have been reported to exhibit different organ expression (Radwanski and Last, Plant Cell 7:921-934 (1995)), and in R. graveolens, only ASα1 is reported to be feedback inhibited by tryptophan (Bohlmann et al., Plant Physiology 111:507-514 (1996)). An Arabidopsis mutant, trp5-1, has been reported to be defective in the feedback inhibition of AS by tryptophan. Free tryptophan levels in the leaf of the trp5-1 mutant have been reported to be three times higher than that of the wild type (Li and Last, Plant Physiol. 110:51-59 (1996)).

[0661] A phosphoribosyl moiety is attached to the amino group of anthranilate by phosphoribosyl anthranilate transferase (“PRAT” (E.C. 2.4.2.18)). A cDNA that encodes PRAT, termed PAT1, has been reported (Elledge et al., Proc. Natl. Acad. Sci. (U.S.A.) 88:1731-1735 (1991)). It has been reported that a PRAT enzyme activity is deficient in the trp1 mutant of Arabidopsis (Last and Fink, Science 240:305-310 (1988)). PRAT is reported to be encoded by a single gene in Arabidopsis (Rose et al., Plant Physiology 100:582-592 (1992)). Mutants in this gene are reported to reduce fertility and severe alleles are auxotrophs (Radwanski and Last, Plant Cell 7:921-934 (1995)).

[0662] Phosphoribosyl anthranilate is converted to enol-1-carboxyphenylamino-1-deoxyribulose 5-phosphate by the action of phosphoribosyl anthranilate isomerase (“PRAI” (E.C. 5.3.1.-)). In contrast to microbes, a plant PRAI is a monofunctional protein. This enzyme has been reported to be encoded by three genes in Arabidopsis, with 90% or greater amino acid identity. In fact, two of these genes are reported to differ by only a single amino acid (Li et al., Plant Cell 7:447-61 (1995)).

[0663] Indole-3-glycerol phosphate synthase (“IGPS” (E.C. 4.1.1.48)) produces an indole ring structure that is a precursor to tryptophan, auxin, and other indole-containing compounds in plants. In microbes, PRAI and IGPS activities occur in a bifunctional protein, in contrast to plants, where these activities are found as monofunctional enzymes. Utilizing E. coli mutants, a cDNA encoding Arabidopsis IGPS has been reported. Arabidopsis IGPS is reported to share low homology to its microbial counterparts (20-40% amino acid identity) (Li et al., Plant Physiology 108:877-878 (1995); Eberbhard et al., Biochemistry 34:5419-5428 (1995); Li et al., Plant Cell 7:447-461 (1995)).

[0664] The final reported reaction of tryptophan synthesis is catalyzed by tryptophan synthase (“TS” (E.C. 4.2.1.20)). TS consists of non-identical subunits, α and β. The α subunit produces indole, and the β subunit utilizes serine to produce tryptophan. A tryptophan synthase α subunit clone (TSA1) has been isolated from Arabidopsis, and it has been reported to share 30-40% identity with microbial TSα subunits (Radwanski et al., Mol. Gen. Genet. 248:657-667 (1995)). The reported β subunit shares 50-65% amino acid identity between microbes and plants (Schmid and Amrhein, Phytochemistry 39:737-749 (1995)). A cDNA coding for the TSβ subunit has been cloned from Arabidopsis (Berlyn et al., Proc. Natl. Acad. Sci. (U.S.A.) 86:4604-4608 (1989)). Two reported genes, TSB1 and TSB2, which exist in Arabidopsis and maize, exhibit homology (Last et al., Plant Cell 3:345-358 (1991); Wright et al., Plant Cell 4:711-719 (1992)). In Arabidopsis, TSB1 has been reported to be expressed at higher levels than TSB2 (Last et al., Plant Cell 3:345-358 (1991)).

[0665] The tryptophan pathway has been reported to be induced by various stress conditions including pathogen infection, oxidative stress, amino acid starvation, herbicide treatments and elicitor treatment (Zhao and Last, Plant Cell 8:2235-2244 (1996); Guyer et al., Proc. Natl. Acad. Sci. (U.S.A.) 92:4997-5000 (1995); Zhao et al., Plant Cell 10:359-370 (1998)). Accumulation of certain secondary metabolites has been reported to be coordinately regulated with expressing tryptophan pathway enzymes under inducing conditions.

[0666] 2. Isoflavone Pathway

[0667] Isoflavones belong to a group of compounds called flavonoids that originate from phenylalanine and malonyl-CoA through the phenylpropanoid pathway and the flavonoid pathway. After the appropriate flavanone intermediates have been synthesized in the flavonoid pathway, isoflavones can be synthesized through two additional steps in the isoflavone pathway.

[0668] The phenylpropanoid pathway provides substrates for biosynthesis of several classes of phenolic compounds including lignins and flavonoids. For the phenylpropanoid pathway, phenylalanine ammonia-lyase (EC 4.3.1.5) is reported as both the first committed step in the pathway and a rate-limiting step. Phenylalanine ammonia-lyase catalyzes the removal of the ammonia group from phenylalanine and produces a double bond in the side chain. Phenylalanine ammonia-lyase protein has been purified from cell cultures of several species, antibodies have been produced, and the gene has been cloned in several species (Hahlbrock et al., Plant Physiol. 67:768-773 (1981); Cramer et al., EMBO J. 4:285-289 (1985); Bell et al., Mol. Cell. Biol. 5:1615-1623 (1986)).

[0669] The product of phenylalanine ammonia-lyase reaction, trans-cinnamate, is converted to 4-coumarate by cinnamate-4-hydroxylase (EC 1.14.13.11) through the introduction of a hydroxyl group into position 4 of trans-cinnamate. An isolated cinnamate-4-hydroxylase has been reported from H. tuberosus tissue and from cell cultures of Glycine max (Gabriac et al., Arch. Biochem. Biophys. 288:302-309 (1991); Kochs and Grisebach, Arch. Biochem. Biophys. 273:543-553 (1989)). A cloned cinnamate-4-hydroxylase gene has been reported from Phaseolus aureus and Arabidopsis thaliana (Mizutani et al., Biochem. Biophy. Res. Commun. 190:875-880 (1993); Bell-Lelong et al., Plant Physiol. 113:729-738, (1997)). An activation step by 4-coumarate:CoA ligase (EC 6.2.1.12) has been reported to be required before 4-coumarate can be condensed into chalcone. A cloned 4-coumarate:CoA ligase gene has been reported (Dangl, Plant Gene Res. 8:303-326 (1992)).

[0670] For the flavonoid pathway, chalcone synthase (EC 2.3.1.74) is reported as the committed and rate-limiting enzyme. Chalcone synthase provides the basic C₁₅ chalcone intermediates from which other flavonoids originate. Chalcone synthase catalyzes the condensation of three molecules of malonyl-CoA with 4-coumaroyl-CoA. Chalcone synthase reaction results in the formation of 2′,4′,6′,4-tetrahydroxychalcone. Purified chalcone synthase, antibodies that bind chalcone synthase, as well as nucleic acid sequences that encode chalcone synthase has been reported from several species (Cramer et al., EMBO J. 4:285-289 (1985); Koes et al., Plant Mol. Biol. 12:213-225 (1989)). Chalcone synthase has been reported to exist as a gene family with several genes that are differentially expressed during plant development. Chalcone synthase levels are reported to vary in response to various stress conditions.

[0671] Chalcone reductase is a NADPH-dependent polyketide reductase. The catalytic activity of chalcone reductase in combination with chalcone synthase, results in the reduction of one hydroxyl group from 2′,4′,6′,4-tetrahydrochalcone and the formation of 2′,4′,4-trihydroxychalcone (isoliquiritigenin). Chalcone reductase is required for the production of daidzin and the phytoalexins derived from it. Chalcone reductase has been reported to be induced concomitantly with chalcone synthase, after elicitor challenge, in soybean cell culture or after infection of seedlings with pathogens (Welle and Grisebach, Arch. Biochem. Biophys. 272:97-102 (1989)). Chalcone reductase protein has been purified from soybean cell culture and the isolation of a cDNA for chalcone reductase has been reported from Glycine max (Welle et al., Eur. J. Biochem. 196:423-430 (1991)).

[0672] Chalcone isomerase (EC 5.5.1.6) stereospecifically converts a chalcone into a flavanone, with the formation of an additional ring structure. Purified chalcone isomerase, antibodies that bind chalcone isomerase, as well as nucleic acid molecules that encode chalcone isomerase, have been reported from Phaseolus vulgaris and Petunia (Dixon et al., Phytochemistry 27:2801-2808 (1988)). Chalcone isomerase catalyzes the conversion of 2′,4′,6′,4-tetrahydroxychalcone and 2′,4′,4-trihydroxychalcone into naringenin and liquiritigenin, respectively. Naringenin and liquiritigenin serve as intermediates for the biosynthesis of isoflavones, anthocyanins, and other flavonoid compounds.

[0673] Isoflavanone synthase is the first reported committed enzyme for isoflavone biosynthesis. Isoflavanone synthase is a membrane-bound enzyme. Isoflavanone synthase catalyzes a cytochrome-P450-dependent oxidation in combination with a 1,2-aryl shift of the flavonoid B ring, leading to a 2-hydroxyisoflavanone intermediate. In a second reported step, isoflavanone dehydratase acts on the 2-hydroxyisoflavanone intermediate, eliminating one molecule of water. These two reactions result in the formation of genestin or daidzin, with naringenin and liquiritingenin as substrate, respectively. Both isoflavanone synthase and isoflavanone dehydratase have been partially purified from Puteraria lobata cell cultures (Hakamatsuka et al., Chem. Pharm. Bull. 37:249-258 (1989); Hashim et al., FEBS Letters 271:219-222 (1990)).

[0674] In soybean, daidzin and genestin are usually the major end products of isoflavone biosynthesis. Under pathogen attack, daidzin can be converted into phytoalexins by isoflavone reductase. Isoflavone reductase reduces isoflavones with NADPH for phytoalexin production. Isoflavone reductase is induced in response to elicitor treatment or pathogen attack. Nucleic acid sequences that encode isoflavone reductase have been reported from elicitor-challenged Medicago sativa cell cultures (Paiva et al., Plant Mol. Biol. 17:653-667 (1991)). In some species of clover, genestin and daidzin can be methylated on the 4-hydroxy group by isoflavone methyltransferase and converted into biochanin A and formononetin, respectively. The methyl donor for the reaction is S-adenosylmethionine. Methylation may also occur in the other hydroxyl positions of genestin or daidzin catalyzed by other isoflavone methyltransferases, yielding other methylated isoflavone products. Several isolated isoflavone methyltransferase enzymes with different specificity toward the hydroxyl groups of isoflavones have been reported. Only the isoflavone methyltransferase with specificity to the 4-O position can convert genestin and daidzin into biochanin A and formononetin, respectively (Khouri et al., Arch. Biochem. Biophys. 262:592-598 (1988); Edwards and Dixon, Arch. Biochem. Biophys. 287:372-379 (1991)). It has been reported the biosynthesis of isoflavones occurs in endoplasmic reticulum and the products are moved by transfer vesicles to the vacuole for storage.

[0675] 3. Phenylpropanoid Pathway

[0676] Phenylpropanoid compounds are structures having a three carbon side chain on an aromatic ring derived from phenylalanine. These compounds represent a wide range of diverse phytochemicals (For reviews, see Dixon and Paiva, Plant Cell 7:1085-1097 (1995); Hahlbrock and Scheel, Annu. Rev. Plant Phys. Plant Mol. Biol. 40:347-369 (1989); Strack, In: Plant Biochemistry, Phenolic Metabolism, Dey and Harborne eds., Academic Press, pp. 387-416 (1997); Harborne, In Secondary Plant Products, Plant Phenolics, Bell and Charlwood eds., Springer-Verlag, pp. 329-402 (1988)). Phenylpropanoids are derived from cinnamic acids, which are formed from phenylalanine by the action of phenylalanine ammonia-lyase (PAL, EC 4.3.1.5) the reported branch point enzyme between the primary shikimate pathway and the secondary phenylpropanoid pathway (Chapple et al., Arabidopsis, Secondary Metabolism in Arabidopsis, Meyerowitz and Somerville eds., CSH Laboratory Press, pp. 989-1030 (1994). phenylpropanoid compounds have diverse functions due to the variations in their structures. For example, anthocyanins, as exemplified by cyanidin-3-glucoside, are low molecular weight flower pigments. Flavones, like kaempferol, are UV protectants, while glyceollin, which is a pterocarpan, act as insect repellents. Phenolic compounds, like salicyclic acid, function as signal molecules in plants. Lignins, such as coniferin, are polymeric constituents of surface and support structures and lignans, like secoisolariciresinol, are phytoestogens.

[0677] Enzymes of the phenylpropanoid pathway have been targets for herbicide screens (i.e., EPSPS and chalcone synthase (CHS)). Lignin, a phenylpropanoid compound, is important in forestry. Lignin is an undesirable component in the conversion of wood into pulp and paper. Removal of lignin is a major step in the paper making process. In addition, the digestability of herbaceous crops is affected by differences in lignin content. Phenylpropanoid pathway enzymes have also been investigated for possible nutritional applications (i.e., phytoestrogens, lignans, coumestans, and isoflavones). Reports from animals, humans, and cell culture systems have suggested that dietary phytoestrogens have an important role in the prevention of osteoporosis, cancer, and heart disease. Although there are no dietary recommendations for individual phytoestrogens, there may be a significant benefit to increase consumption (Kurzer and Xu, Annu. Rev. Nut. 17:353-381 (1997); Anderson et al., Nutrition Today 32:232-239 (1997); Kardinaal et al., Trends Food Sci. and Tech. 8:327-333, (1997)).

[0678] Erythrose-4-phosphate is biosynthesized from glucose-6-phosphate by reactions of the pentose phosphate pathway (also know as the phosphogluconate pathway). The pentose phosphate pathway has been reported to be localized in the cytosol of both photosynthetic and non-photosynthetic cells. For example, Schnarrenberger et al. (Plant Physiol. 108:609-614 (1995)) have reported that in spinach leaves the majority of the enzymatic activities of the pentose phosphate pathway were localized in the cytosol of the chloroplast. However, enzymatic activity of the pentose phosphate pathway has not been reported to be limited to photosynthetic cells. Non-photosynthetic pentose phosphate pathway enzymes have been reported to correspond to known isoforms of cytosolic pentose phosphate pathway enzymes. There are two phases of the pentose phosphate pathway, an oxidative phase resulting in the conversion of glucose-6-phosphate to ribulose-5-phosphate and a non-oxidative phase resulting in the conversion of ribulose-5-phosphate to hexose phosphate and triose phosphate (Brownleader, et al, Plant Biochemistry, In: Carbohydrate Metabolism: Primary Metabolism of Monosaccharides, Dey and Harborne eds., Academic Press, pp. 111-141 (1997); Dennis et al., Plant Metabolism, In: Glycolysis, The Pentose Phosphate Pathway and Anaerobic Respiration, Dennis et al., eds, Addison Wesley Longman Ltd., 1997, pp. 105-123 (1997)).

[0679] The first reported step in the biosynthesis of erythrose-4-phosphate is the conversion of glucose-6-phospahate to gluconolactone-6-phosphate by the NADP⁺ requiring enzyme glucose-6-phosphate dehydrogenase (EC 1.1.1.49). This reaction also generates NADPH and is reversible. Gluconolactone-6-phosphate dehydrogenase has been purified (heterotetramer of 244 kDa) from pea seedlings and has been reported to have a Kₘ for NADP⁺ of 14 μM and a Kₘ for glucose-6-phosphate of 120 μM. In E. coli, glucose-6-phosphate dehydrogenase is encoded by zfw.

[0680] Gluconolactone-6-phosphate is converted to gluconate 6-phosphate by the Mg²⁺ requiring enzyme gluconate-6-phosphate lactonase (EC 3.1.1.31). This reaction is irreversible and can also occur non-enzymatically. In E. coli, gluconate-6-phosphate lactonase is encoded by pgl.

[0681] Gluconate-6-phosphate is converted to ribulose-5-phosphate releasing CO₂ by the NADP⁺ dependent enzyme gluconate-6-phosphate dehydrogenase (EC 1.1.1.4). This reaction also generates NADPH and is irreversible. The enzyme requires divalent ions for maximum catalytic activity and is specific to NADP⁺. In E. coli, gluconate-6-phosphate dehydrogenase is encoded by gnd.

[0682] Ribulose 5-phosphate can be converted to either ribose-5-phosphate or xylulose-5-phosphate by the action of ribose-5-phosphate isomerase (EC 5.3.1.6) or ribulose-5-phosphate-3-epimerase (EC 5.1.3.1) respectively. Ribulose-5-phosphate isomerase has been reported from alfalfa shoots and spinach leaf chloroplasts and exists as dimers, trimers, or tetramers with molecular weights ranging from 40-228 kDa. The Kₘ of the ribose-5-phosphate isomerase has been reported to be between 0.5-5.0 mM. In E. coli, ribose-5-phosphate isomerase is encoded by the rpiA and rpiB genes and ribulose-5-phosphate-3-epimerase is encoded by rpe.

[0683] A transketolase (EC 2.2.1.1) requiring Mg²⁺ and thiamine pyrophosphate (TPP) catalyzes the conversion of ribulose-5-phosphate and xylulose-5-phosphate to glyceraldehyde-3-phosphate and sedoheptulose-7-phosphate. This transketolase transfers a C₂-moiety from xylulose-5-phosphate to ribose-5-phosphate yielding a C₇ keto-sugar-phosphate, (sedoheptulose-7-phosphate) and a C₃ aldo-sugar-phosphate (glycerol-3-phosphate) and is reversible. The tightly bound cofactors Mg²⁺ and TPP are required for activity. The transketolase has been purified from spinach. Both cytosolic and plastid forms of transketolase exist with the predominant activity being located in the plastid. The monomeric molecular weight of the enzyme has been reported to be 37.6 kDa and in its native form exists as a 150 kDa protein. It has a Kₘ of 100 μM for xylulose-5-phosphate and ribose-5-P. In E. coli, transketolase is encoded by tktA and tktB.

[0684] A transaldolase (EC 2.2.1.2) catalyzes the freely reversible reaction converting sedoheptulose-7-phosphate and glyceraldehyde-3-phosphate to erythrose-4-phosphate and fructose-6-phosphate. In E. coli, transaldolase is encoded by talB.

[0685] Phosphoenolpyruvate (PEP) is the precursor of pyruvate in the glycolytic pathway. The glycolytic pathway has been review in Brownleader et al., Plant Biochemistry, In: Carbohydrate Metabolism: Primary Metabolism of Monosaccharides, Dey and Harborne eds., Academic Press, pp. 111-141 (1997); Dennis et al, Plant Metabolism, In: Glycolysis, The Pentose Phosphate Pathway and Anaerobic Respiration, Dennis et al., eds., Addison Wesley Longman Ltd., pp. 105-123 (1997).

[0686] The shikamate/arogenate pathway leads to three aromatic amino acids, L-phenylalanine, L-tyrosine and L-tryptophan (Bentley, In: The Shikimate Pathway—A Metabolic Tree with Many Branches, CRC Press, 25:307-384 (1990)). These amino acids are important precursors for auxin-type plant hormones and various secondary compounds including the phenylpropanoids. There are also a number of unusual compounds that are derived from the shikimate pathway (Floss, In: Natural Product Reports 433-452, (1997)). The biosynthesis of phenylalanine which is the amino acid precursor for the biosynthesis of 4-coumaroyl-CoA, the common branch point metabolite of the phenylpropanoid pathway, involves ten reported enzyme catalyzed steps.

[0687] The first reported committed reaction in the shikimate pathway is catalyzed by the enzyme 3-deoxy-D-arabino-heptulosonate 7-phosphate synthase (DAHP synthase, EC 4.1.2.15) which controls carbon flow into the shikimate pathway. The plastid localized DAHP synthase catalyzes the formation of 3-deoxy-D-arabino-heptulosonate-7-phosphate by condensing D-erythrose-4-phosphate with phosphoenolpyruvate. DAHP synthase has been reported from plant sources including carrot and potato and has also been reported to have a substrate specificity for D-erythrose 4-phosphate and phosphoenolpyruvate. DAHP synthase has been reported to be a dimer with subunits of Mr=53,000 and is activated by Mn²⁺ (Herrmann, Plant Physiol. 107:7-12 (1995)). DAHP has not been reported to be regulated by aromatic amino acids, however, purified DAHP has been reported to be regulated tryptophan and to a lesser extent by tyrosine in a hysteric fashion (Suzich et al., Plant Physiol. 79:765-770 (1985)). In E. coli, DAHP synthase is encoded by aroF, aroG and aroH.

[0688] The next enzyme in the shikimate pathway, 3-dehydroquinate synthase (EC. 4.6.1.3), catalyzes the formation of dehydroquinate, the first carbocyclic metabolite in the biosynthesis of aromatic amino acids, from D-erythrose-4-phosphate with phosphoenolpyruvate. 3-dehydroquinate synthase reaction involves NAD cofactor dependent oxidation-reduction, β-elimination and intramolecular aldol condensation. 3-dehdroquinate synthase has been purified from Phaseolus mungo seedlings and pea seedlings and has a native molecular weight of 66,000 with a dimer subunit (Yamamoto, Phytochem. 19:779 (1980); Pompliano et al., J. Am. Chem. Soc. 111:1866 (1989)). In E. coli, 3-dehydroquinate synthase is encoded by aroB.

[0689] 3-dehydroquinate dehydratase (EC 4.2.1.10) catalyzes the stereospecific syn-dehydration of dehydroquinate to dehydroshikimate and is responsible for initiating the process of aromatization by introducing the first of three double bond of the aromatic ring system. An E. coli 3-dehdroquinate dehydratase clone has been reported (Duncan, et al., Biochem. J. 238:485 (1986)). In E. coli, 3-dehydroquinate dehydratase is encoded by aroD.

[0690] Shikimate 3-dehydrogenase (EC 1.1.1.25) catalyzes the NADPH-dependent conversion of dehydroshikimate to shikimate. Bifunctional dehydroquinate dehydratase (EC 4.2.1.10) shikimate dehydrogenase has been reported in spinach, pea seedling, and corn (Bentley, Critical Rev. Biochem. Mol. Biol. 25:307-384 (1990); Kishore and Shah, Ann. Rev. Biochem. 57:67-663 (1988)). The E. coli shikimate 3-dehydrogenase has been reported to be a monomeric, monofunctional protein of molecular weight 32,000 (Chaudhuri and Coggins, Biochem. J. 226:217-223 (1985)). In E. coli shikimate 3-dehydrogenase is encoded by aroE.

[0691] Shikimate kinase (EC 2.7.1.71) catalyzes the phosphorylation of shikimate to shikimate-3-phosphate. Shikimate kinase exists in isoforms in E. coli and S. typhimurium and plant shikimate kinase has been reported from mung bean and sorghum (Bentley, Critical Rev. Biochem. Mol. Biol. 25:307-384 (1990), Kishore and Shah, Ann. Rev. Biochem. 57:67-663 (1988)). In E. coli, shikimate kinase is encoded by aroK (EC 2.7.1.71) and aroL.

[0692] 5-enolpyruvyl-shikimate-3-phosphate synthase (EPSPS) (EC 2.5.1.19) catalyzes the reversible transfer of the carboxyvinyl moiety of phosphoenolpyruvate to shikimate-3-phosphate, yielding 5-enolpyruvyl-shikimate-3-phosphate. 5-enolpyruvyl-shikimate-3-phosphate synthase is the major target for inhibition by the broad spectrum, nonselective, postemergence herbicide, glyphosate. Chemical modification studies indicate that Lys, Arg, and His residues are essential for activity of the enzyme (Kishore and Shah, Ann. Rev. Biochem. 57:67-663 (1988)). 5-enolpyruvyl-shikimate-3-phosphate synthase has been isolated and characterized from microbial and plant sources including tomato, petunia, Arabidopsis, and Brassica (Kishore and Shah, Ann. Rev. Biochem. 57:67-663 (1988)). In E. coli, 5-enolpyruvyl-shikimate-3-phosphate synthase is encoded by aroA.

[0693] Chorismate synthase (EC 4.6.1.4) catalyzes the conversion of 5-enolpyruvyl-shikimate-3-phosphate to chorismate and introduces the second double bond of the aromatic ring in an trans-1,4-elimination of inorganic phosphorous. Chorismate is the last common intermediate in the biosynthesis of aromatic compounds via the shikimate pathway. Although the enzyme reaction involves no change in the oxidation state of the substrate, chorismate synthase from various sources is unusual in requiring a reduced flavin cofactor, FMNH2 or FADH2, for catalytic activity (Bentley, Critical Rev. Biochem. Mol. Biol., 25:307-384 (1990); Kishore and Shah, Ann. Rev. Biochem. 57:67-663 (1988)). In E. coli, chorismate synthase is encoded by aroC.

[0694] Tryptophan is synthesized from chorismate by the sequential action of six enzymes. The first reported step is the conversion of which begins with chorismate to anthranilate by anthranilate synthase (EC 4.1.3.27) (Radwanski and Last, Plant Cell 7:921-934 (1995)). Anthranilate is converted by phosphoribosylanthranilate synthase (EC 2.4.2.18) to 5-phosphoribosyl-anthranilate. Following this reaction phosphoribosylanthranilate isomerase catalyzes the conversion 5-phosphoribosyl-anthranilate to 1-(O-carboxyphenylamino)-1-deoxy-ribulose-5-phosphate (CdRP). Indole-3-glycerolphosphate synthase (EC 4.1.1.48) catalyzes the conversion of CdRP to indole-3-glycerolphosphate. Tryptophan synthase a (EC 4.2.1.20) catalyses the conversion indole-3-glycerolphosphate to indole. The final reported step is the conversion of indole to tryptophan by tryptophan synthase β.

[0695] Tryptophan is also the substrate for monoterpenoid indole alkaloid biosynthesis (Kutchan, Plant Cell 7:1059-1070 (1995)). Some monoterpenoid indole alkaloids of commercial importance include quinine, camptothecin, strychnine, vincristine and vinblastine. Tryptophan decarboxylase (EC 4.1.1.28) catalyzes the first reported step in monoterpenoid indole alkaloid biosynthesis, the decarboxylation of the amino acid L-tryptophan to the protoalkaloid tryptamine. A tryptophan decarboxylase clone has been reported from C. roseus (De Luca et al., Proc. Natl. Acad. Sci. (USA) 88:9969-9973 (1989)). It has homology with other aromatic L-amino acid decarboxylases from diverse plant origins. Overexpression of the tryptophan decarboxylase in tobacco (Songstad et al., Plant Physiol., 94:1410-1413 (1990); Songstad et al., Phytochemistry 30:3245-3246 (1991)) has been reported to increase production of tryptamine and tyramine (the product of L-tyrosine decarboxylation). In Brassica napus, the C. roseus tryptophan decarboxylase was reported to reduce the levels of indole glucosinolates by redirecting tyrosine pools away from indole glucosinolates (Chavadej et al., Proc. Natl. Acad. Sci. (USA) 91:2166-2170 (1994)).

[0696] Strictosidine synthase (srt1) (EC 4.3.3.2) catalyzes the first reported committed step in the biosynthesis of monterpenoid indole alkaloid. Srt1 catalyzes the stereospecific condensation of a primary amino group to tryptamine (produced via tryptophan decarboxylase) and the aldehyde moiety of the iridoid glucoside secologanin to form monoterpenoid indole alkaloid, 3α (S)-strictosidine. A strictosidine synthase cDNA clone has been has been reported from R. serpentina (Kutchan et al., FEBS Lett. 257:40-44 (1988)) and C. roseus (McKnight et al., Nucleic Acids Res. 18:4939(1990)).

[0697] Chorismate mutase (EC 5.4.99.5) catalyzes the conversion of chorismic acid to prephenic acid. Chorismic acid is a substrate for a number of enzymes involved in the biosynthesis of aromatic compounds. Plant chorismate mutase has been reported to exist as two isoforms, chorismate mutase-1 and chorismate mutase-2, that differ in feed back regulation by aromatic amino acids (Singh et al., Arch. Biochem. Biophys. 243:374-384 (1985); Goers et al., Planta 162:109-124 (1984)). It has been reported that chloroplastic chorismate mutase-1 plays a role in biosynthesis of aromatic amino acids as this enzyme is activated by tyrosine and phenylalanine. The cytosolic isozyeme chorismate mutase-2 is not regulated by aromatic amino acids and has been reported to play a role in providing the aromatic nucleus for synthesis of aromatic secondary metabolites including tocopherol (d'Amato et al., Planta 162:104-108 (1984)). In E. coli, chorismate mutase is encoded by pheA.

[0698] Prephenate dehydratase (EC 4.2.1.51, EC 5.4.99.5), in E. coli, has been reported to be a bifunctional protein with chorismate mutase (EC 5.4.99.5). In E. coli the chorismate mutase-prephenate dehydratase multi-functional protein catalyzes the conversion from chorismate to phenylpyruvate and is encoded pheA. The multifunctional chorismate mutase-prephenate dehydratase in E. coli has been reported to have a Km of 45 μM.

[0699] Prephenate dehydrogenase (EC 1.3.1.12, EC 5.4.99.5), in E. coli, is also reported to be a bifunctional protein with chorismate mutase (EC 5.4.99.5). In E. coli the chorismate mutase-prephenate dehydrogenase multi-functional protein catalyzes the conversion from chorismate to 4-hydroxyphenylpyruvate and is encoded tyrA. The multifunctional chorismate mutase-prephenate dehydrogenase in E. coli has been reported to have a Km of 92 μM and 50 μM for prephenate.

[0700] Tyrosine aminotransferase (EC 2.6.1.5), in E. coli, is encoded by tyrB. Tyrosine aminotransferase catalyzes the last reported step in phenylalanine and tyrosine biosynthesis by transferring an amino group from glutamate to either phenylpyruvate or 4-hydroxyphenylpyruvate, releasing 2-ketoglutarate, and generating phenylalanine and tyrosine respectively. There are other amino transferases in E. coli have been reported to catalyze the reaction, for example, aspartate amino transferase (aspC) (EC 2.6.1.1) or the branched chain amino acid aminotransferase (ilvE) (EC 2.6.1.42)

[0701] Prephenate aminotransferase catalyzes the conversion of prephenate to L-arogenate by transferring an amino group from glutamate to prephenate and releasing 2-ketoglutarate. Prephenate aminotransferase is dependent on pyridoxial 5′-phosphate and glutamate.

[0702] Arogenate dehydratase (EC 4.2.1.91) catalyzes the conversion of L-arogenate to tyrosine. Arogenate dehydratase is inhibited by phenylalanine. Arogenate dehydratase is utilized by plants and certain microbes for the production of tyrosine.

[0703] Arogenate dehydrogenase (EC 1.3.1.43) catalyzes the conversion of L-arogenate to phenylalanine. Arogenate dehydrogenase is inhibited by tyrosine. Arogenate dehydrogenase is utilized by plants and certain microbes for the production of phenylalanine.

[0704] Phenylalanine ammonium lyase (PAL) (EC 4.3.1.5) catalyzes the reported committed step in phenylpropanoid biosynthesis. In certain grasses and fungi, PAL may also act on tyrosine to produce 4-coumarate directly. PAL is a tetrameric enzyme of native MW 270,000 to 330,000 Kd and a pH optimum of 8-9. Phenylalanine analogues such as L-2-amino-oxy-3-phenylpropionic acid (L-AOPP) or 2-amino-indan-2-phosphonic acid (A1P) inhibit PAL activity in nanomole concentrations. PAL has been reported to be localized in the microsomal compartment suggesting that it is associated with the endoplasmic reticulum. In certain grasses and fungi, PAL, or another enzyme designated TAL (tyrosine ammonium lyase), may also act on tyrosine leading directly to 4-coumarate.

[0705] Cinnamate-4-hydroxylase (C4H) (EC 1.14.13.11) is a cytochrome P450-linked monooxygenase (molecular oxygen is cleaved during this reaction, one oxygen transferred to the aromatic ring the other to water). Cinnamate-4-hydroxylase catalyzes the hydroxylation of cinnamic acid to 4-coumarate. C4H clones have been reported (Fahrendorf and Dixon, Arch. Biochem. Biophys. 305:509-515 (1993); Mizutani et al., Biochem. Biophys. Res. Comm. 190:875-880 (1993); Teutsch et al., Proc. Natl. Acad. Sci. (USA), 90:4102-4106(1993)) from several different plant species and functionally expressed in yeast (Fahrendorf and Dixon, Arch. Biochem. Biophys. 305:509-515 (1993); Pierrel et al., Eur. J. Biochem. 224:835-844 (1994)). It has been reported that metabolic channeling of substrates between PAL and C4H exist (Hrazdina and Jensen, Annu. Rev. Plant. Physiol. Plant Mol. Biol. 43:241-267 (1992)).

[0706] Hydroxycinnamate:CoA ligase (also known as 4-coumarate:CoA ligase or AMP forming) (4CL) (EC 6.2.1.12) catalyzes the formation of CoA thioesters of cinnamic acids in the biosynthesis of a wide variety of phenolic derivatives. 4CL is an ATP dependent enzyme, and different isoforms with different substrate specificities can exist. Most reported 4CL enzymes have broad specificity. 4CL displays low reported activity with sinapic acid. 4CL clones have been reported from several plant species, including Arabidopsis (Lee et al., Plant Mol. Biol. 28:871-884 (1995)). Anti-sensed experiments of PAL transcription in Arabidopsis have been reported to reduce lignin content (Lee et al., Plant Cell 9:1985-1998 (1997)).

[0707] Lignins are polymers of aromatic subunits that are usually derived from phenylalanine. Lignins serve as a matrix around the polysaccharide components of some plant cell walls providing strength and water impermeability and defense against pathogens. Lignin is one of the world's most abundant polymers along with cellulose and chitin. Lignin monomer (monolignol) biosynthesis occurs in the cytosol of plants and precursors to lignin formation are typically stored in vacuoles (Whetten and Sederoff, Plant Cell 7:1001-1013 (1995); Campbell and Sederoff, Plant Physiol. 110:3-13 (1996)).

[0708] 4-hydroxycinnamate 3-hydroxylase (C3H) catalyzes the hydroxylation of 4-coumarate to form caffeate. Several plant oxidases can carry out the hydroxylation of phenolic molecules. It has been reported that the reaction is catalyzed by a phenolase (EC 1.10.3.1), however inhibitor studies of the phenolase have not been reported to cause a decrease on caffeic acid synthesis in mung bean seedlings (Duke and Vaughn, Physiol. Plant 54:381-385 (1982)).

[0709] S-adenosylmethionine:caffeate/5-hydroxylase-O-methylransferase (C-OMT) (EC 2.1.1.68) catalyzes the methylation of caffeic acid to produce ferulic acid using S-adenosyl methionine as the methyl group donor. C-OMT has also been reported to catalyze the methylation of 5-hydroxyferulate to form sinapate. C-OMT clones have been reported from several plant species. C-OMT role in monolignin biosynthesis has been confirmed in both monocots and dicots. There have been reports of different substrate specificities of C-OMT (from crude extracts) isolated from gymnosperms with a reported substrate preference for caffeate and angiosperms with a reported substrate preference for 5-hydroxyferulate with respect to both caffeic acid and 5-hydroxyferulate methylation.

[0710] Ferulate 5-hydroxylase (F5H) has been reported to be catalyzed by a cytochrome P-450-linked monooxygenase in the conversion of ferulate to 5-hydroxyferulate. An Arabidopsis mutant (fah-1) has been reported (Shapple et al., Plant Cell 4:1413-1424 (1992)). F5H has been reported to also be associated with the regulation of lignin content in angiosperms and gymnosperms.

[0711] 4-hydroxycinnamoyl-CoA 3-hydroxylase (CCoA-3H) is an alternative enzyme to the hydroxylation of free 4-coumarate by directly hydroxylating 4-coumaroyl-CoA to caffeoyl-CoA. CCoA-3H has been reported to be a FAD (and possibly NADPH dependent) enzyme in lignin biosynthesis (Kamsteeg et al., Pflanzenphysiol. 102:435-442 (1981); Boniwell and Butt, Z. Naturforsch 41C:56-60 (1986)).

[0712] S-adenosylmethionine:caffeoyl-CoA/5-hydroxyferulate-CoA-O-methyltransferase (CCoA-OMT) (EC 2.1.1.104) is another methylating enzyme distinct from C-OMT. CCoA-OMT has been reported to play a role in the methylation of both caffeoyl-CoA and 5-hydroxyferuloyl-CoA during monolignol biosynthesis. Several CCoA-OMT cDNA clones have been reported (Schmitt et al., J. Biol. Chem. 266:17416-17423 (1991); Ye et al., Plant Cell 6:1427-1439 (1994)).

[0713] Hydroxycinnamoyl-CoA:NADPH oxidoreductase (CCR) (EC 1.2.1.44) catalyzes the reduction of the hydroxycinnamoyl-CoA thioesters to their corresponding aldehydes. The enzyme has been reported to be generally non-specific for hydroxycinnamoyl-CoA thioesters, although in some plant species CCR has a reported preference for feruloyl-CoA. CCR may play a key regulatory role as the first reported committed step in the biosynthesis of monolignols from the phenylpropanoids (Goffner et al., Plant Physiol. 106:625-632 (1994)).

[0714] Hydroxycinnamyl alcohol dehydrogenase (CAD) (EC 1.1.1.195) catalyzes the reduction of hydroxycinnamaldehydes to hydroxycinnamyl alcohols. CAD is regulated by both developmental and environmental factors, much like other well studied enzymes of the phenylpropanoid pathways. CAD can exist as a single gene or as multiple isoforms. CAD from gymnosperms have been reported to be more active on coniferaldehyde, whereas angiosperm CAD have equal activities on either coniferaldehyde or sinapaldehyde.

[0715] Conifer alcohol dehydrogenase (EC 1.1.1.194) catalyzes the reduction of coniferaldehyde to coniferyl alcohol (Mansell et al., Phytochemistry 37:683-688 (1976); Wyrambik and Grisebach, Eur. J. Biochem. 59:9-15 (1976)).

[0716] UDP-Glc:coniferyl alcohol 4-O-glucosyltransferase (EC 2.4.1.111) catalyzes the glycosylation on the phenolic hydroxy group to form the monolignol glucosides (4-hydroxycinnamyl alcohol glucoside, coniferin and syringin (i.e., UDP glucose plus conifer alcohol yields coniferin plus glucose). These glucosides accumulate in some species of plants (i.e., conifers) and have been reported to be localized in the vacuole. Monolignol compounds are relatively toxic and unstable and do not accumulate to high levels, therefore the glycosylation of the monolignols renders them nontoxic and stabilizes the molecule. Monolignol glucosides have been reported to be primary candidates for transport across cell membranes. The glucosyltransferases have been purified from several species of trees, but the gene has not yet been identified.

[0717] Coniferin-β-glucosidase (EC 3.2.1.126; EC 3.2.1.21) is involved in the hydrolysis of the monolignol glucosides to the corresponding alcohols, releasing glucose in the process (i.e., coniferin plus water yields conifer alcohol plus glucose). Coniferin-β-glucosidase has been reported to be localized in the cell walls, the reported site of lignin biosynthesis.

[0718] Peroxidase (EC 1.11.1.7), a H₂O₂-dependent hemoprotein and an oxygen-dependent oxidase containing four copper atoms, laccase (EC 1.10.3.2), oxidize monolignols in vitro to their respective free radicals for initiation of the polymerization reaction. Reviews by O'Malley et al., Plant J 4:751-757 (1993); Dean and Eriksson, Holzforschung 48:21-33 (1994); Liu et al., Plant J 6:213-224 (1994); McDougall et al., Phytochemistry 37:683-688 (1994), have reported various roles for peroxidases and laccases in lignin polymerization.

[0719] Lignans are a widely distributes class of natural products. Reported functions of lignans in plants are mainly involved in pathogen defense mechanisms. Until recently the biochemical pathways leading to lignan formation, more specifically to secoisolaricresinol, was unknown. There are three enzymes involved in the biosynthesis of secoisolariciresinol in Forsythia intermedia (laccase, dirigent protein, and pinoresinol/laricresinol reductase). There are several classes of lignans, neolignans and related compounds (Ward, Natural Product Reports 43-74 (1997). A role for lignans as a form of cancer chemotherapy and prevention have been suggested. The plant lignans, secoisolariciresinol and matairesinol are precursors to the mammalian lignans, enterodiol and enterolactone which are formed through bioconversion of the plant lignans by microbes colonizing the gastrointestinal tract.

[0720] The dirigent protein is a protein that has no detectable enzymatic activity (Davin et al., Science 275:362-366 (1997)). Dirigent protein reported physiological role is to bind and orient free radicals generated in conifer alcohol by the laccase to allow for stereoselective bimolecular phenoxyradical coupling to occur to generate (+) pinoresinol in Forsythia. The dirigent protein has a native molecular weight of about 78 kDa (about 27 kDa subunit MW suggesting that the protein is a trimer) and appears to be glycosylated.

[0721] Laccase (EC 1.10.3.2) or oxidase (EC 1.11.1.7) has been reported to produce the free radical in the conifer alcohol required for phenoxyradical coupling (Davin et al., Science 275:362-366 (1997)). Laccase (native Mw 120 kDa) has been reported from several different plant species involved in lignification. Laccase is involved in lignification and works with the dirigent protein to form (+)-pinoresinol in Forsythia. In the absence of a dirigent protein, the reaction proceeded by the radical formation generates a racemic mixture of (+/−)-pinoresinol.

[0722] Pinoresinol/lariciresinol reductase has been reported to exist as two isofunctional forms in Forsythia intermedia (Dinkova-Kostova et al., J. Biol. Chem. 271:29473-29482 (1996)). Both reported isoforms catalyze the sequential reduction of (+)-pinoresinol to (+)-lariciresinol to (−)-secoisolariciresinol and have similar kinetic properties. Pinoresinol/lariciresinol reductase has a reported monomeric molecular weight of 36 kDa. Pinoresinol/lariciresinol reductase has been expressed in E. coli.

[0723] Secoisolariciresinol dehydrogenase has been reported to be a 57 kDa NADP dependent enzyme that produces (−)-matairesinol from the precursor molecule (−)-secoisolariciresinol in Forsythia. Matairesinol is metabolized to the mammalian lignan enterolactone by gastrointestinal flora (i.e., Clostridia sp.) or human fecal flora. This conversion can be through a number of independent pathways requiring a reduction step, a dehydration step, a demethylation step and finally a racemization step.

[0724] Secoisolariciresinol glucosyltransferase catalyzes the conversion of secoisolariciresinol to secoisolariciresinol diglucoside (SDG). The point of attachment of the glucose residues is C₉/C₉ rather than to the phenolic group.

[0725] Flavonoids are a large class of compounds ubiquitous in plants (usually occurring as glycosides). Flavonoids contain several phenolic hydroxyl functions attached to ring structures designated A, B, and C. Flavonoids are classified according to the oxidation state of the heterocyclic ring C (pyran ring) which connects the two benzene rings A and B. Structural variations within the ring structure subdivide the flavonoids into several classes. Flavonols (with the 3-OH pyran-4-one ring), flavones (lacking the 30H group), flavanols (lacking the 2,3 double bond and the 4-one structure), and isoflavones (B ring is located in the 3 position on the C ring). The flavone, naringenin, is the precursor to three different flavonoid classes (flavones, isoflavones, and dihydroflavonols). The precursors for the synthesis of all reported flavonoids are malonyl-CoA (derived from the carboxylation of acetyl-CoA using the enzyme acetyl-CoA carboxylase (EC 6.4.1.2)) and 4-coumaroyl-CoA. Flavanoid biosynthesis and flavanoid compounds perform a wide range of functions ranging from pigment, UV protectors, antioxidants, and phytoestrogens (Dixon and Paiva, Plant Cell 7:1085-1097 (1995); Rice-Evans et al., Trends in Plant Sciences 2:152-159, (1997); Kardinaal et al., Trends in Food Sci. and Tech. 8:327-333 (1997); Anderson and Garner, Nutrition Today 32:232-239 (1997); Kurzer and Xu, Annu Rev. Nutr. 17:353-381 (1997); Holton and Cornish, Plant Cell 7:1071-1083 (1995)).

[0726] Chalcone synthase (CHS) (EC 2.3.1.74) (also know as malonyl-CoA:4-coumaroyl-CoA malonyltransferase) catalyzes the stepwise condensation of three acetate units from malonyl-CoA with 4-coumaroyl-CoA to form chalcone (4,2′, 4′, 6′-tetrahydroxychalcone). CHS as been reported to be the rate limiting enzyme in flavonoid synthesis, channeling hydroxycinnamates into flavonoid biosynthesis. Chalcone synthase has been reported to be a dimeric protein (two identical subunits) with a Mw of 78 kDa to 88 kDa. Genes encoding CHS have been cloned from several different species of plants and in some cases is part of a huge multigene family. CHS is highly specific for 4-coumaroyl-CoA but others are accepted in the reaction. Another enzyme that is reported to be closely related to chalcone synthase is stilbene synthase. Stilbene synthase or resveratrol synthase catalyzes through a different folding mechanism the formation of resveratrol a compound implicated to be beneficial for human health.

[0727] Chalcone isomerase CHI) (EC 5.5.1.6) catalyzes the isomerization (ring closure) of chalcone to naringenin (5, 7, 4′-trihydroxyflavanone). Naringenin is considered the progenitor of essentially all other flavonoid structures. Chalcone isomerase has been cloned from a number of different plant species. Isomerization of chalcone to form naringenin can occur spontaneously, but at a much slower rate. Plants devoid of chalcone isomerase activity accumulate chalcone, and produce yellow pigments.

[0728] Chalcone reductase (CHR) catalyzes the reduction of chalcone to form 4, 2′, 4′-trihydroxychalcone an important precursor to the isoflavone daidzein. Isoflavone synthase (IFS) (also known as 2-hydroxyisoflavone synthase) is an NADPH: oxygen oxidoreductase with a dehydratase reaction. Isoflavone synthase catalyzes the oxidative 2,3-aryl shift of naringenin or 7,4′-dihydroxyflavanone to yield genistein or daidzein respectively. The initiating step in isoflavone can be an epoxidation that is catalyzed by a cytochrome P450-dependent monooxygenase. After the structural rearrangement, aryl shift, and addition of a C2 hydroxyl group, elimination of H₂O by a dehydratase yields the isoflavone structure. The dehydratase is most likely a separate enzyme. In alfalfa for example, the isoflavones daidzein and genistein can be methylated at the 4′ position by a 4′ methyltransferase to generate formononetin and biochanin A respectively. In soybean for example the isoflavones are glycosylated at the 7 position and are further malonylated or acetylated to yield the malonyl and acetyl glycones. The isoflavones daidzein and genistein are metabolized by gastrointestinal flora to yield equol and p-ethylphenol respectively.

[0729] Flavone synthase I (FLSI) (also known as 2-hydroxyflavanone synthase, flavanone 2-oxoglutarate:oxidoreductase) and flavone synthase II (FLSII) catalyze the conversion of naringenin to flavone.

[0730] Flavonol synthase I (dioxygenase) (also known as dihydroflavonol and 2-oxoglutarate-L-oxidoreductase) catalyzes the formation of kaempferol from dihydrokaempferol.

[0731] Flavanone 3-hydroxylase (F30H) (EC 1.14.11.9) catalyzes the hydroxylation of the 3 position of naringenin to yield dihydrokaempferol. Flavanone 3-hydroxylase clones from snapdragon (Martin et al., Plant J. 1:3749 (1991)) and petunia petals (Britsch et al., J. Biol. Chem. 267:5380-5387 (1992)), have been reported.

[0732] Another reported function of the flavonoid pathway involves the biosynthesis of pigment dyes known as anthocyanins. Anthocyanin biosynthesis in petals is involved in attracting pollinators or in fruits for seed dispersal. Anthocyanins are also protectors against UV irradiation or feeding related damages (Holton and Cornish, Plant Cell 7:1071-1083 (1995)).

[0733] Flavanoid 3′-hydroxylase (F3′OH) (EC 1.14.13.21) catalyzes the 3′ hydroxylation of naringenin or dihydrokaempferol.

[0734] Flavanoid 3′,5′-hydroxylase (F3′5′OH) (EC 1.14.13.21) catalyzes the 3′ and 5′ hydroxylation of dihydrokaempferol. A flavanoid 3′,5′-hydroxylase clone has been reported from petunia (Holton et al., Nature 366:276-279 (1993)).

[0735] Dihydroflavonol 4-reductase (DFR) catalyzes the reduction of the colorless dihydroflavonols (dihydrokaempferol, dihydroquercetin, and dihydromyricetin) to produce the flavan-3,4-cis diols (leucoanthocyanidins). Further oxidation and dehydration of the different leucoanthocyanidins (i.e., leucopelargonidin) is catalyzed by anthocyandin synthase (ANS). Glycosylation of the 3 position by anthocyanin glycosyltransferase (3GT) yields the corresponding brick red pelargonidin, red cyanidin, and blue delphinidin pigments. Depending on the plant species, 3-glucosides can undergo further methylation or acylation or glycosylation by anthocyanin methyltransferase.

[0736] Isoflavone daidzein is the precursor to pterocarpans (infection induced phytoalexins) involved in plant defense responses. One example of pterocatpan biosynthesis is glyceollinsins from Glycine max (soybean). This seven enzyme pathway results in the formation of glyceollin I, II, and III.

[0737] Isoflavone 2′-hydroxylase (also known as isoflavone NADPH:oxygen oxidoreductase) and 2′-hydroxyisoflavone reductase (also know as 2′-hydroxyisoflavone:NADPH oxidoreductase), pterocarpan synthase (also known as 2′-hydroxyisoflavone:NADPH oxidoreductase), and pterocarpan 6α-hydroxylase (also known as pterocarpan:NADPH oxidoreductase) catalyze the conversion of daidzein to glycinol. The oxygenases involved are membrane bound cytochrome P450 monooxygenases.

[0738] Prenyltransferase I (DMAPP) (also known as dimethylallylpyrophosphate), glycinol 2-dimethylallyltransferase and pterocarpan cyclase (also known as dimethylallylglycinol NADPH:oxidoreductase) catalyze the conversion of glycinol to glyceollin I. Both prenyltransferases are Mn²⁺ dependent and catalyzes the transfer of a dimethylallyl moiety from DMAPP to C2 or C4 of glycinol. Pterocarpan cyclase catalyzes the cyclization of both 2 and 4 dimethylallylglycinols and appears to be a P-450-monooxygenase.

[0739] Prenyltransferase II (also known as DMAPP:glycinol 4-dimethylallyltransferase) and pterocarpan cyclase (also known as dimethylallylglycinol NADPH:oxidoreductase) catalyze the conversion of glycinol to either glyceollin II or glyceollin III.

[0740] 4. Isoprenoid Metabolism

[0741] i. Carotenoid Pathway

[0742] Carotenoids are synthesized in higher plants via a portion of the isoprenoid pathway that starts with the formation of phytoene from geranylgeranyl pyrophosphate (GGPP). This is the first reported committed step for carotenoid biosynthesis and is part of a larger isoprenoid pathway. A basic isoprenoid precursor for the entire pathway, isopentenyl pyrophosphate (IPP), may be formed via two pathways, the mevalonate and non-mevalonate pathway. The non-mevalonate pathway predominates in plastids where carotenoid, tocopherols, xanthophylls, etc., are synthesized. This pathway has been studied in algae and higher plants (Schwender et al., Biochem. J. 316:73-80 (1996), Arigoni et al., Proc. Natl. Acad. Sci. (U.S.A.) 94:10600-10605 (1997)). In the non-mevalonate pathway, isopentenyl pyrophosphate is formed from pyruvate and glyceraldehyde-3-phopsphate via a multi-step enzyme reaction. In the first step in this pathway, 1-deoxyxyulose-5-phosphate synthase forms 1-deoxyxylulose-5-phosphate.

[0743] Isopentenyl pyrophosphate isomerase catalyzes the reversible isomerization between IPP and dimethylallyl pyrophosphate (DMAPP). This enzyme has been cloned from plant sources (Blanc and Pichersky, Plant Physiol. 108:855-856 (1995)). Utilizing a pool of IPP and DMAPP, geranylgeranyl pyrophosphate synthase (GGPPS) catalyzes the formation of GGPP(C20). GGPPS has been cloned from peppers (Kuntz et al., Plant J. 2:25-34 (1992)) where it is reported to increase in activity and transcript level during the ripening and carotenoid deposition phase of pepper fruit. It has also been cloned from other plants including Arabidopsis thaliana (Zhu et al., Plant Cell Physiol. 38:357-361 (1997)) and lupin (Aitken et al., Plant Physiol. 108:837-838 (1995)).

[0744] GGPP is reported to be a precursor to carotenoid, tocopherols and chlorophyll in the plastids. Phytoene synthase catalyses the formation of phytoene from two GGPP molecules. This step is the first reported committed step in carotenoid biosynthesis. Phytoene synthase (EC 2.5.1.32) has been cloned from a number of plants including tomato (Fray et al., Plant Mol. Biol. 22:589-602 (1993)), melon (Karvouni et al., Plant Mol. Biol. 27:1153-1162 (1995)) and maize (Buckner et al., Genetics 143:479-488 (1996)). Phytoene has 9 double bonds.

[0745] The next reported major carotenoid in the pathway, lycopene, has 13 double bonds. In bacteria, one enzyme, phytoene desaturase (EC1.3.99.-), performs all 4 desaturations. In plants, phytoene desaturase adds two double bonds generating zeta-carotene.

[0746] Phytoene desaturase has been cloned from tomato and other plants species and is reported to be developmentally regulated by carotenoid accumulation (Pecker et al., Proc. Natl. Acad. Sci. (U.S.A.) 89:4962-4966 (1992); Li et al., Plant Mol. Biol. 30:269-279 (1996); Hugueney et al., Eur. J. Biochem. 209:399-407 (1992)). A second enzyme, zeta-carotene desaturase, adds two additional double bonds yielding lycopene, has been cloned from pepper (Klein et al., FEBS Lett. 372:199-202 (1995)). Once lycopene has been formed, lycopene beta cyclase catalyzes the formation of 6 membered rings at either end of lycopene. Beta rings are formed via lycopene beta-cyclase to yield beta-carotene (two rings) or gamma-carotene (one ring). Lycopene beta-cyclase has been cloned from Arabidopsis thaliana (Cunningham et al., The Plant Cell 8:1613-1626 (1996)) and tomato (Pecker et al., Plant Mol. Biology 30:807-819 (1996)). Lycopene epsilon-cyclase catalyzes a reaction that adds an epsilon ring to either lycopene or neurosporene. The addition of a beta ring and an epsilon ring to lycopene generates alpha-carotene. In addition, lycopene beta-cyclase can cyclize an end of neurosporene. Lycopene epsilon cyclase has also been cloned from Arabidopsis thaliana (Cunningham et al., The Plant Cell 8:1613-1626 (1996)).

[0747] Xanthophylls are a class of carotenoids having oxygen-containing groups. The cyclohexene rings of both alpha and beta-carotene can be further modified by the action of different enzymes. One such class of enzymes, generically named carotene hydroxylases, introduces hydroxyl groups into specific positions in the cyclohexene rings of the carotene molecule. The resulting products are hydroxyl xanthophylls, examples of which include zeaxanthin and cryptoxanthin. A cloned beta-carotene hydroxylase gene from plants is reported in Sun et al., J. Biol. Chem. 271:24349-24352 (1996). Beta-carotene hydroxylase catalyses the addition of hydroxyl groups to beta rings of beta-carotene.

[0748] Several compounds result from the hydroxylation of beta-carotene. For example, beta-cryptoxanthin is formed by hydroxylation of beta-carotene. Hydroxylation of beta-cryptoxanthin results in zeaxanthin (two hydroxylations). When a hydroxyl group is added to both the beta and epsilon rings of alpha-carotene, a xanthophyll lutein is formed. An Arabidopsis thaliana epsilon hydroxylase mutant that adds a hydroxyl group to an epsilon ring has been reported (Pogson et al., Plant Cell 8:1627-1639 (1996)).

[0749] Another class of enzymes that acts on carotene cyclohexene rings is ketolases. These enzymes introduce keto groups at specific positions of the carotene cyclohexene rings. Genes encoding some of these ketolase enzymes have been reported in marine bacteria and algae. One such enzyme, beta-carotene ketolase, produces echinenone from beta-carotene with the addition of a keto group and further oxidation of echinenone produces canthaxanthin (two keto groups added). Ketolase genes have been cloned from marine bacteria (Misawa et al., J. Bacteriol. 177:6575-6584 (1995)), and from the green algae, Haematococcus pluvialis (Lotan and Hirschberg, FEBS Lett. 364:125-128 (1995)).

[0750] Certain hydroxylase and ketolase enzymes have been reported to act asymmetrically on one of the cyclohexene rings of the carotene molecule resulting in accumulation of specific classes of xanthophylls with reduced oxidation, such as echinenone (Fernandez-Gonzalez et al., J. Biol. Chem. 272:9728-9733 (1997)). Hydroxylases and ketolases can act simultaneously on the same substrate carotene molecule to generate different compounds that contain both hydroxy and keto groups. Examples of such mixed hydroxy and keto xanthophylls include compounds such as hydroxyechinenone, phoenicoxanthin adonixanthin and astaxanthin. Although astaxanthin is not typically found in plants, it is found in the petals of Adonis aestivalis.

[0751] In photosynthesis the violaxanthin cycle inter-converts xanthophylls zeaxanthin, antheraxanthin and violaxanthin. The violaxanthin cycle is reported to modulate excess light energy that can damage the photosynthetic apparatus. Two genes are reported to be associated with the violaxanthin cycle. Zeaxanthin epoxidase converts zeaxanthin to antheraxanthin and antheraxanthin to violaxanthin. Violaxanthin deepoxidase converts violaxanthin to antheraxanthin and antheraxanthin to zeaxanthin. Genes for both of these enzymes have been isolated from plants (Bugos et al., Proc. Natl. Acad. Sci. (U.S.A.) 93:6320-5325 (1996), Marin et al., EMBO J. 15:2331-2342 (1996)). Abscisic acid can be formed from carotenoid. An abscisic acid biosynthesis mutant of Arabidopsis thaliana was reported to correspond to the zeaxanthin epoxidase gene.

[0752] Antheraxanthin and violaxanthin can be converted into the ketocarotenoid capsanthin and capsorubin, respectively. Capsanthin and capsorubin are reported to be responsible for imparting the characteristic bright red color to peppers. The gene encoding this enzyme has been isolated from peppers (Bouvier et al., Plant J. 6:45-54 (1994)).

[0753] In plants and bacteria xanthophylls can be esterified to sugar moieties. A gene for an enzyme capable of esterifying zeaxanthin has been cloned from Erwinia (Misawa et al., J. Bacti. 172:6704-6712 (1990)). Carotenoids in green tissues are reported to be found in the plastids associated with cellular membranes and also sequestered into discrete structures in tissues, such as petals or fruits, that accumulate large amounts of carotenoid. These discrete structures are composed of carotenoid, lipids and proteins termed carotenoid binding proteins. Carotenoid binding proteins have been isolated from peppers, and have been reported to aid in the sequestration of carotenoid, (Deruere et al., Plant Cell 6:119-133 (1994)) and cucumbers (Vishnevetsky et al., Plant Journal 10:1111-1118 (1996)).

[0754] Zeta-carotene desaturase catalyzes the conversion of zeta-carotene to lycopene. It has been reported that there is a relationship between zeta-carotene desaturase and phytoene desaturase from bacteria and fungi (Misawa et al., Plant Mol. Biol. 24:369-379 (1994)). Zeta-carotene desaturase has been isolated in Escherichia coli (Albrecht et al., Eur. J. Biochem. 236:115-120 (1996)).

[0755] ii. Tocopherol Synthesis Pathway

[0756] The chloroplast of higher plants exhibit interconnected biochemical pathways that lead to secondary metabolites, including tocopherols, that not only perform functions in plants but can also be important for mammalian nutrition. In plastids, tocopherols account up to 40% of the total quinone pool. The biosynthetic pathway of α-tocopherol in higher plants involves condensation of homogentisic acid and phytylpyrophosphate to form 2-methyl-6 phytylbenzoquinol (Fiedler et al., Planta 155:511-515 (1982); Soll et al., Arch. Biochem. Biophys. 204:544-550 (1980); Marshall et al., Phytochem. 24:1705-1711 (1985)). The plant tocopherol biosynthetic pathway can be divided into four parts: synthesis of homogentisic acid, which contributes to the aromatic ring of tocopherol; synthesis of phytylpyrophosphate, which contributes to the side chain of tocopherol; cyclization which plays a role in chirality and chromanol substructure of the vitamin E family; and S-adenosyl methionine dependent methylation of an aromatic ring, which effects the compositional quality of the vitamin E family.

[0757] Homogentisate is an aromatic precursor in the biosynthesis of tocopherols in chloroplasts and is formed from the aromatic shikimate metabolite, p-hydroxyphenylpyruvate. The aromatic amino acids phenylalanine, tyrosine, and tryptophan are formed by a reaction sequence that initiates from the two carbohydrate precursors, D-erythrose 4-phosphate and phosphoenolpyruvate, via shikimate, and forms prearomatic and aromatic compounds (Bentley, Critical Rev. Biochem. Mol. Biol. 25:307-384 (1990)). Approximately 20% of the total carbon fixed by green plants is routed through the shikimate pathway with end products being aromatic amino acids and other aromatic secondary metabolites such as flavonoids, vitamins, lignins, alkaloids, and phenolics (Herrmann, Plant Physiol. 107:7-12 (1995), Kishore and Shah, Ann. Rev. Biochem. 57:67-663 (1988)). Various aspects of the shikimate pathway have been reviewed (Bentley, Critical Rev. Biochem. Mol. Biol. 25:307-384 (1990); Herrmann, Plant Physiol. 107:7-12 (1995); Kishore and Shah, Ann. Rev. Biochem. 57:67-663 (1988)).

[0758] The first reported committed reaction in the shikimate pathway is catalyzed by the enzyme 3-deoxyarabino-heptulosonate 7-phosphate synthase (also known as 3-deoxy-D-arabino-heptulosonate 7-phosphate synthase, deoxyarabino-heptulosonate-P-synthase, and DAHP synthase (EC. 4.1.2.15)), which has been reported to control carbon flow into the shikimate pathway. The plastid localized DAHP synthase catalyzes the formation of 3-deoxy-D-arabino-heptulosonate 7-phosphate by condensing D-erythrose 4-phosphate with phosphoenolpyruvate. DAHP synthase has been isolated from plant sources including carrot and potato. DAHP synthase has substrate specificity for D-erythrose 4-phosphate and phosphoenolpyruvate, is a dimer of subunits having a molecular weight of 53 KD and is activated by Mn²⁺ (Herrmann, Plant Physiol. 107:7-12 (1995)). Aromatic amino acids are not reported to act as feedback regulators. Purified DAHP synthase is activated by tryptophan and, to a lesser extent, by tyrosine in a hysteric fashion (Suzich et al., Plant Physiol. 79:765-770 (1985)).

[0759] The next reported enzyme in the shikimate pathway is 3-dehydroquinate synthase (EC 4.6.1.3), which catalyzes the formation of dehydroquinate, the first carbocyclic metabolite in the biosynthesis of aromatic amino acids, from the substrates D-erythrose 4-phosphate and phosphoenolpyruvate. The enzyme reaction involves a NAD (nicotinamide adenine dinucleotide) cofactor dependent oxidation-reduction, β-elimination, and an intramolecular aldol condensation. 3-Dehydroquinate synthase has been purified from Phaseolus mungo seedlings and pea seedlings, has a native molecular weight of 66 KD and is a dimer (Yamamoto, Phytochem. 19:779-802 (1980); Pompliano et al., J. Am. Chem. Soc. 111:1866-1871-1871 (1989)).

[0760] 3-Dehydroquinate dehydratase (EC 4.2.1.10) catalyzes the stereospecific syn-dehydration of dehydroquinate to dehydroshikimate and has been reported to be responsible for initiating the process of aromatization by introducing the first of three double bonds of the aromatic ring system. 3-Dehydroquinate dehydratase has been cloned from E. coli (Duncan et al., Biochem. J. 238:475-483 (1986)).

[0761] Shikimate dehydrogenase (EC 1.1.1.25) catalyzes the NADPH (reduced nicotinamide adenine dinucleotide phosphate)-dependent conversion of dehydroshikimate to shikimate. Bifunctional 3-dehydroquinate dehydratase-shikimate dehydrogenase has been reported in spinach, pea seedling, and maize (Bentley, Critical Rev. Biochem. Mol. Biol. 25:307-384 (1990), Kishore and Shah, Ann. Rev. Biochem. 57:67-663 (1988)). E. coli shikimate dehydrogenase has been reported to be a monomeric, monofunctional protein with a molecular weight of 32,000 daltons (Chaudhuri and Coggins, Biochem. J. 226:217-223 (1985)).

[0762] Shikimate kinase (EC 2.7.1.71) catalyzes the phosphorylation of shikimate to shikimate-3-phosphate. Shikimate kinase exists as isoforms in E. coli and S. typhimurium. Plant shikimate kinase has been partially purified from mung bean and sorghum (Bentley, Critical Rev. Biochem. Mol. Biol. 25:307-384 (1990); Kishore and Shah, Ann. Rev. Biochem. 57:67-663 (1988)). Certain plant species accumulate shikimate and shikimate kinase may play a role in regulating flux in the tocopherol pathway.

[0763] 5-Enolpyruvyl-shikimate-3-phosphate synthase (also known as enolpyruvyl-shikimate-P-synthase, and EPSPS (EC 2.5.1.19)) catalyzes the reversible transfer of the carboxyvinyl moiety of phosphoenolpyruvate to shikimate-3-phosphate, yielding 5-enolpyruvyl-shikimate-3-phosphate. 5-Enolpyruvyl-shikimate-3-phosphate synthase is a target of the broad spectrum, nonselective, postemergence herbicide, glyphosate. Chemical modification studies indicate that lysine, arginine, and histidine residues are essential for activity of the enzyme (Kishore and Shah, Ann. Rev. Biochem. 57:67-663 (1988)). 5-Enolpyruvyl-shikimate-3-phosphate synthase has been isolated and characterized from microbial and plant sources including tomato, petunia, Arabidopsis, and Brassica (Kishore and Shah, Ann. Rev. Biochem, 57:67-663 (1988)).

[0764] Chorismate synthase (EC 4.6.1.4) catalyzes the conversion of 5-enolpyruvyl-shikimate-3-phosphate to chorismic acid and introduces a second double bond in an aromatic ring and a trans-1,4-elimination of inorganic phosphorous. Chorismate is the last reported common intermediate in the biosynthesis of aromatic compounds via the shikimate pathway. The enzyme reaction involves no change in the oxidation state of the substrate. Chorismate synthase from various sources requires a reduced flavin cofactor, FMNH2 (reduced flavin mononucleotide) or FADH2 (reduced flavin adenine dinucleotide), for catalytic activity (Bentley, Critical Rev. Biochem. Mol. Biol. 25:307-384 (1990); Kishore and Shah, Ann. Rev. Biochem. 57:67-663 (1988)).

[0765] The next reported enzyme in the tocopherol biosynthetic pathway is chorismate mutase (EC 5.4.99.5), which catalyzes the conversion of chorismic acid to prephenic acid. Chorismic acid is a substrate for a number of enzymes involved in the biosynthesis of aromatic compounds. Plant chorismate mutase exists in two isoforms, chorismate mutase-1 and chorismate mutase-2, that differ in feedback regulation by aromatic amino acids (Singh et al., Arch. Biochem. Biophys. 243:374-384 (1985); Goers et al., Planta 162:109-124 (1984)). It has been reported that chloroplastic chorismate mutase-1 may play a role in biosynthesis of aromatic amino acids as this enzyme is activated by tyrosine and phenylalanine. Cytosolic isozyme chorismate mutase-2 is not regulated by aromatic amino acids and may play a role in providing the aromatic nucleus for synthesis of aromatic secondary metabolites including tocopherol (d′Amato et al., Planta, 162:104-108 (1984)).

[0766] The metabolic pathways branch after prephenic acid and lead not only to phenylalanine and tyrosine, but also to a number of secondary metabolites. Tyrosine is synthesized from prephenate via either 4-hydroxyphenylpyruvate or arogenate. Both routes have been reported in plants (Bentley, Critical Rev. Biochem. Mol. Biol. 25:307-384 (1990)).

[0767] The formation of 4-hydroxyphenylpyruvate from prephenate is catalyzed by prephenate dehydrogenase (EC 1.3.1.12 for NAD specific prephenate dehydrogenase and EC 1.3.1.13 for NADP specific prephenate dehydrogenase). 4-Hydroxyphenylpyruvate associated with tocopherol biosynthesis may also come from tyrosine pool by the action of tyrosine transaminase (EC 2.6.1.5) or L-amino acid oxidase (EC 1.4.3.2). Tyrosine transaminase catalyzes the pyridoxal-phosphate dependent conversion of L-tyrosine to 4-hydroxyphenylpyruvate. This reversible enzyme reaction transfers the amino group of tyrosine to 2-oxoglutarate to form 4-hydroxyphenylpyruvate and glutamate. L-amino acid oxidase (EC 1.4.3.2) catalyzes the conversion of tyrosine to 4-hydroxyphenylpyruvate by acting on the amino group of tyrosine with oxygen acting as an acceptor. L-amino acid oxidase is not specific to tyrosine. In E. coli, aromatic amino acid amino transferase (also referred to as aromatic-amino-acid transaminase (EC 2.6.1.57)) converts 4-hydroxyphenylpyruvate to tyrosine and plays a role in phenylalanine and tyrosine biosynthesis (Oue et al., J. Biochem. (Tokyo) 121:161-171 (1997); Soto-Urzua et al., Can. J. Microbiol. 42:294-298 (1996); Hayashi et al., Biochemistry 32:12229-12239 (1993)).

[0768] Aspartic acid amino transferase or transaminase A (EC 2.6.1.1) exhibits a broad substrate specificity and may utilize phenylpyruvate or p-hydroxyphenylpyruvate to form phenylalanine and tyrosine, respectively. Transaminase A has been characterized in Arabidopsis (Wilkie et al., Biochem J. 319:969-976 (1996); Wilkie et al., Plant Mol. Biol. 27:1227-1233 (1995)), rice (Song et al., DNA Res. 3:303-310 (1996)), Panicum miliaceum L (Taniguchi et al., Arch. Biochem. Biophys. 318:295-306 (1995)), Lupinus angustifolius (Winefield et al., Plant Physiol. 104:417-423 (1994)), and soybean (Wadsworth et al., Plant Mol. Biol. 21:993-1009 (1993)).

[0769] A precursor molecule, homogentisic acid, is produced in the chloroplast from the shikimate pathway intermediate p-hydroxyphenylpyruvate. p-Hydroxyphenylpyruvate dioxygenase (also known as 4-hydroxyphenylpyruvate dioxygenase (EC 1.13.11.27)) catalyzes the formation of homogentisate from hydroxyphenylpyruvate through an oxidative decarboxylation of the 2-oxoacid side chain accompanied by hydroxylation of the aromatic ring and a 1,2 migration of the carboxymethyl group. Norris et al. reported functional identification of a pdsI gene that encodes p-Hydroxyphenylpyruvate dioxygenase (Norris et al., Plant Cell 7:2139-2149 (1995)). p-Hydroxyphenylpyruvate dioxygenase has been cloned from Arabidopsis and carrot (GenBank accession numbers U89267, AF000228, and U87257; Garcia et al., Biochem. J. 325:761-769 (1997)). Fiedler et al. reported the localization and presence of this enzyme in both isolated spinach chloroplast and the peroxisome (Fiedler et al., Planta, 155:511-515 (1982)). Garcia et al. reported the purification of the cytosolic form of hydroxyphenylpyruvate dioxygenase from cultured carrot protoplast (Garcia et al., Biochem. J. 325:761-769 (1997)). It has been reported that the chloroplastic isoform may be involved in the biosynthesis of prenylquinones, and that the peroxisomal and cytosolic isoform may be involved in the degradation of tyrosine.

[0770] The carbon flow to the pool of phytol, i.e., the isoprene-derived side chain of tocopherol, occurs via the mevalonate pathway or non-mevalonate pathway. Geranylgeranyl-pyrophosphate synthase (GGPP synthase (EC 2.5.1.29)) catalyzes the formation of geranylgeranylpyrophosphate by prenyltransferring an isoprene moiety from isopentenylpyrophosphate to farnesylpyrophosphate. A gene encoding geranylgeranyl-pyrophosphate synthase has been isolated from Arabidopsis and Cantharanthus roseus (Zhu et al., Plant Cell Physiol. 38:357-361 (1997), Bantignies et al., Plant Physiol. 110:336-336 (1995)). Geranylgeranylpyrophosphate synthesized by GGPP synthase is used in the carotenoid and tocopherol biosynthesis pathways.

[0771] The NADPH-dependent hydrogenation of geranylgeranylpyrophosphate is catalyzed by geranylgeranylpyrophosphate hydrogenase (also called geranylgeranylpyrophosphate reductase) to form phytylpyrophosphate (Soll et al., Plant Physiol. 71:849-854 (1983)). Geranylgeranylpyrophosphate hydrogenase appears to be localized to two sites: the chloroplast envelope and the thylakoids. The chloroplast envelope form is reported to be responsible for the hydrogenation of geranylgeranylpyrophosphate to a phytyl moiety. The thylakoids form is reported to be responsible for the stepwise reduction of chlorophyll esterified with geranylgeraniol to chlorophyll esterified with phytol. The chloroplast envelope form of geranylgeranylpyrophosphate may play a role in tocopherol and phylloquinone synthesis. A chlP gene cloned from Synechocystis has been functionally assigned by complementation in Rhodobactor sphaeroids to catalyze the stepwise hydrogenation of geranylgeraniol to phytol (Addlesse et al., FEBS Lett. 389:126-130 (1996)).

[0772] Homogentisate:phytyl transferase (also referred to as phytyl/prenyltransferase) catalyzes the decarboxylation followed by condensation of homogentisic acid with a phytol moiety from phytylpyrophosphate to form 2-methyl-6 phytylbenzoquinol. Prenyltransferase activity has been reported in spinach chloroplasts and such activity is located in chloroplast envelope membranes (Fiedler et al., Planta 155:511-515 (1982)). A reported prenyltransferase gene, termed pdsII, specific to tocopherol biosynthesis has been identified in Arabidopsis (Norris et al., Plant Cell 7:2139-2149 (1995)).

[0773] Tocopherol cyclase catalyzes the cyclization of 2,3-dimethyl-6-phytylbenzoquinol to form γ-tocopherol and plays a role in the biosynthesis of enantioselective chromanol substructure of the vitamin E subfamily (Stocker et al., Bioorg. Medic. Chem. 4:1129-1134 (1996)). The preferred substrate specificity of tocopherol cyclase may be either 2,3-dimethyl-6-phytylbenzoquinol or 2-methyl-5-phytylbenzoquinol or both. The substrate, 2-methyl-6 phytylbenzoquinol, is formed by prenyltransferase and requires methylation by an S-adenosylmethionine-dependent methyltransferase before cyclization. Tocopherol cyclase has been purified from green algae chlorella protothecoids, Dunaliella salina and from wheat leafs (U.S. Pat. No. 5,432,069).

[0774] Synthesis of γ-tocopherol from 2-methyl-6 phytylbenzoquinol occurs by two pathways with either δ-tocopherol or 2,3 dimethyl-5-phytylbenzoquinol acting as an intermediate. α-Tocopherol is then synthesized from γ-tocopherol in a final methylation step with S-adenosylmethionine. These steps of γ-tocopherol biosynthesis are located in the chloroplast membrane in higher plants. Formation of α-tocopherol from other tocopherols is catalyzed by S-adenosyl methionine (SAM)-dependent γ-tocopherol methyltransferase (EC 2.1.1.95). This enzyme has been partially purified from Capsicum and Euglena gracilis (Shigeoka et al., Biochim. Biophys. Acta 1128:220-226 (1992), d′Harlingue and Camara, J. Biol. Chem. 260:15200-15203 (1985)).

[0775] Tocotrienols are similar to tocopherols in molecular structure except that there are three double bonds in the isoprenoid side chain. Although tocotrienols have not been reported in soybean, they are found within in the plant kingdom. The tocotrienol biosynthetic pathway is similar to that of tocopherol up to the formation of homogentisic. It has been reported that homogentisate:phytyl transferase is able to transfer geranylgeranyl-pyrophosphate (“GGPP”) to homogentisic acid. A side chain of GGPP may be desaturated by the addition of phytylpyrophosphate to homogentisate. Stocker et al. report that a reduction of the side chain's double bond occurs at an earlier stage of the biosynthesis. Phytylpyrophosphate or GGPP are condensed with homogentisic acid (“HGA”) to yield different hydroquinone precursors which are cyclized by the same enzyme (Stocker et al., Bioorg. Medicinal Chem. 4:1129-1134 (1996)).

[0776] The primary oxidation product of tocopherol is tocopheryl quinone, which can be conjugated to yield glucuronate after prior reduction to the hydroquinone. In animals, glucuronate can be excreted into bile or further catabolized to tocopheronic acid in the kidney and processed for urinary excretion (Traber and Sies, Ann. Rev. Nutr. 16:321-347 (1996)).

[0777] In Aspergillus nidulans, the aromatic amino acid catabolic pathway involves formation of homogentisic acid followed by aromatic ring cleavage by an homogentisic acid dioxygenase (EC 1.13.11.5) to yield, after an isomerization step, fumarylacetoacetate (Fernandez-Canon et al., Anal. Biochem. 245:218-22 (1997); Hudecova et al., Int. J. Biochem. Cell Biol. 27:1357-1363 (1995); Fernandez-Canon et al., J. Biol. Chem. 270:21199-21205 (1995)). Fumarylacetoacetate, is then split by fumarylacetoacetate (Fernandez-Canon and Penalva, J. Biol. Chem. 270:21199-21205 (1995)). Homogentisic acid dioxygenase uses a tocopherol biosynthetic metabolite homogentisic acid for hydrolysis.

[0778] Tocopherol levels are reported to vary in different plants, tissues, and developmental stages. The production of homogentisic acid by p-hydroxyphenylpyruvate dioxygenase may be a regulatory point for bulk flow through the pathway due to the irreversible nature of the enzyme reaction and due to the fact that homogentisic acid production is the first committed step in tocopherol biosynthesis (Norris et al., Plant Cell 7:2139-2149 (1995)). Another regulatory step in tocopherol biosynthesis may be associated with the availability of phytylpyrophosphate pool. Feeding studies in Safflower callus culture showed 1.8-fold and 18-fold increase in tocopherol synthesis by feeding homogentisate and phytol, respectively (Fury et al., Phytochem. 26:2741-2747 (1987)). In meadow rescue leaf, vitamin E increases in the initial phase of senescence when phytol is cleaved off from the chlorophylls and when a free phytol pool is available (Peskier et al., J. Plant Physiol. 135:428-432 (1989)).

[0779] iii. Phytosterol Synthesis Pathway

[0780] Phytosterols are a class of natural products that have a tetracyclic ring system. They are synthesized by plants, and algae, via the isoprenoid pathway, which also generates molecules such as carotenoids, gibberellins, terpenes, a phytol side chain of tocopherol, chlorophyll and abscisic acid. Phytosterols can be distinguished from animal sterols (e.g., cholesterol) by the presence of alkyl groups at C-24 in the sterol side chain (Nes and Venkatramesh, Biochemistry and Function of Sterols, ed. Nes and Parish, CRC Press, 111-122 (1997)).

[0781] The phytosterol biosynthesis pathway has two distinct components. The early pathway reactions, leading from acetyl-CoA to squalene via mevalonic acid, are common to other isoprenoids. The later pathway reactions, leading from squalene to the major plant sterols such as sitosterol, campesterol and stigmasterol, are committed phytosterol biosynthesis reactions.

[0782] These early pathway reactions have been studied in fungi and plants (Lees et al., Biochemistry and Function of Sterols, ed. Nes and Parish, CRC Press, 85-99 (1997); Newman and Chappell, Biochemistry and Function of Sterols, ed. Nes and Parish, CRC Press, 123-134 (1997); Bach et al., Biochemistry and Function of Sterols, ed. Nes and Parish, CRC Press, 135-150 (1997)).

[0783] Acetoacetyl CoA thiolase (EC 2.3.1.9) catalyzes the first reported reaction which consists of the formation of acetoacetyl CoA from two molecules of acetyl CoA (Dixon, et al., J. Steroid Biochem. Mol. Biol. 62:165-171 (1997)). This enzyme has been purified from radish. A radish cDNA has been isolated by functional complementation in Saccharomyces cerevisiae (GeneBank Accession # X78116). A radish cDNA has also been screened against a cDNA library of Arabidopsis thaliana (Vollack and Bach, Plant Physiology 111: 1097-1107 (1996)).

[0784] HMGCOA synthase (EC 4.1.3.5) catalyzes the production of HMGCoA. This reaction condenses acetyl CoA with acetoacetyl CoA to yield HMGCoA. HMGCoA synthase has been purified from yeast. A plant HMGCoA synthase cDNA has been isolated from Arabidopsis thaliana (Montamat et al., Gene 167:197-201 (1995)).

[0785] HMGCoA reductase, also referred to as, 3-hydroxy-3-methyglutaryl-coenzyme A, (EC 1.1.1.34) catalyzes the reductive conversion of HMGCoA to mevalonic acid (MVA). This reaction is reported to play a role in controlling plant isoprenoid biosynthesis (Gray, Adv. Bot. Res. 14:25-91 (1987); Bach et al., Lipids 26:637-648 (1991); Stermer et al., J. Lipid Res. 35:1133-1140 (1994)). Plant HMGCoA reductase genes are often encoded by multigene families. The number of genes comprising each multigene family varies, depending on species, ranging from two in Arabidopsis thaliana to at least seven in potato. Overexpression of plant HMGCoA reductase genes in transgenic tobacco plants has been reported to result in the overproduction of phytosterols (Schaller et al., Plant Physiol. 109:761-770 (1995)).

[0786] Mevalonate kinase (EC 2.7.1.36) catalyzes the phosphorylation of mevalonate to produce mevalonate 5-phosphate. It has been reported that mevalonate kinase plays an role in the control of isoprenoid biosynthesis (Lalitha et al., Indian. J. Biochem. Biophys. 23:249-253 (1986)). A mevalonate kinase gene from Arabidopsis thaliana has been cloned (GeneBank accession number X77793; Riou et al., Gene 148:293-297 (1994)).

[0787] Phosphomevalonate kinase (EC 2.7.4.2) (MVAP kinase) is an enzyme associated with isoprene and ergosterol biosynthesis that converts mevalonate 5-phosphate to mevalonate 5-pyrophosphate utilizing ATP (Tsay et al., Mol. Cell. Biol. 11:620-631 (1991)).

[0788] Mevalonate pyrophosphate decarboxylase (“MVAPP decarboxylase”) (EC 4.1.1.33) catalyses the conversion of mevalonate pyrophosphate to isopentenyl diphosphate (“IPP”). The reaction is reported to be a decarboxylation/dehydration reaction which hydrolyzes ATP and requires Mg²⁺. A cDNA encoding Arabidopsis thaliana MVAPP decarboxylase has been isolated (Toth et al., J. Biol. Chem. 271:7895-7898 (1996)). An isolated Arabidopsis thaliana MVAPP decarboxylase gene was reported to be able to complement the yeast MVAPP decarboxylase.

[0789] A second pathway has been reported for the synthesis of IPP from pyruvate without the formation of MVA. This so-called “alternative pathway” or “non-mevalonate pathway” is reported to be the predominant route in the chloroplast for the synthesis of isoprenoids such as terpenes, carotenoids and tocopherol.

[0790] Isopentenyl diphosphate isomerase (“IPP:DMAPP”) (EC 5.3.3.2) catalyzes the formation of dimethylallyl pyrophosphate (DMAPP) from isopentenyl pyrophosphate (IPP). Plant IPP:DMAPP isomerase gene sequences have been reported for this enzyme. It has also been reported that IPP:DMAPP isomerase is involved in rubber biosynthesis in a latex extract from Hevea (Tangpakdee et al., Phytochemistry 45:261-267 (1997)).

[0791] Farnesyl pyrophosphate synthase (EC 2.5.1.1) is a prenyltransferase which has been reported to play a role in providing polyisoprenoids for sterol biosynthesis as well as a number of other pathways (Li et al., Gene 17:193-196(1996)). Farnesyl pyrophosphate synthase combines DMAPP with IPP to yield geranyl pyrophosphate (“GPP”). The same enzyme condenses GPP with a second molecule of IPP to produce farnesyl pyrophosphate (“FPP”). FPP is a molecule that can proceed down the pathway to sterol synthesis or can be shuttled through other pathways leading to the synthesis of quinones or sesquiterpenes.

[0792] Squalene synthase (EC 2.5.1.21) reductively condenses two molecules of FPP in the presence of Mg²⁺ and NADPH to form squalene. The reaction involves a head-to-head condensation and forms a stable intermediate, presqualene diphosphate. The enzyme is subject to sterol demand regulation similar to that of HMGCoA reductase. The activity of squalene synthase has been reported to have a regulatory effect on the incorporation of FPP into sterols and other compounds for which it serves as a precursor (Devarenne et al., Arch. Biochem. Biophys. 349:205-215 (1998)).

[0793] Squalene epoxidase (EC 1.14.99.7) (also called squalene monooxygenase) catalyzes the conversion of squalene to squalene epoxide (2,3-oxidosqualene), a precursor to the initial sterol molecule in phytosterol biosynthetic pathway, cycloartenol. This is the first reported step in the pathway where oxygen is required for activity. The formation of squalene epoxide is also the last common reported step in sterol biosynthesis of animals, fungi and plants.

[0794] The later pathway of phytosterol biosynthetic steps starts with the cyclization of squalene epoxide and end with the formation of Δ5-24-alkyl sterols in plants.

[0795] 2,3 oxidosqualene cycloartenol cyclase (EC 5.4.99.8) (also called cycloartenol synthase) is the first step in the sterol pathway that is plant specific. The cyclization of 2,3 oxidosqualene leads to lanosterol in animals and fungi while in plants the product is cycloartenol. Cycloartenol contains a 9,19-cyclopropyl ring. The cyclization is reported to proceed from the epoxy end in a chair-boat-chair-boat sequence that is mediated by a transient C-20 carbocationic intermediate.

[0796] S-adenosyl-L-methionine:sterol C-24 methyl transferase (“SMTI”) (EC 2.1.1.41) catalyzes the transfer of a methyl group from a cofactor, S-adenosyl-L-methionine, to the C-24 center of the sterol side chain (Grebenok et al., Plant Mol. Biol. 34:891-896 (1997)). This is the first of two methyl transfer reactions that has been reported to be an obligatory and rate-limiting step of the sterol-producing pathway in plants. The second reaction, a methyl transfer reaction, occurs further down in the pathway after the Δ⁸^{_{—}}⁷ isomerase. Both these methyl transfers are catalyzed by SMTI. An isoform, SMTII, catalyzes the conversion of cycloartenol to a Δ²³⁽²⁴⁾-24-alkyl sterol, cyclosadol.

[0797] Sterol C-4 demethylase catalyses the first of several demethylation reactions, which results in the removal of the second methyl groups at C-4. While in animals and fungi the removal of the second C-4 methyl groups occurs consecutively, in plants it has been reported that there are other steps between the first and second C4 demethylations. The C4 demethylation is catalyzed by a complex of microsomal enzymes consisting of a monooxygenase, an NAD⁺-dependent sterol 4-decarboxylase and an NADPH-dependent 3-ketosteroid reductase.

[0798] Cycloeucalenol-obtusifoliol isomerase (“COI”) catalyzes the opening of the cyclopropyl ring at C-9. The opening of the cyclopropyl ring at C-9 creates a double bond at C-8.

[0799] Sterol C-14 demethylase catalyzes demethylation at C-14 which removes the methyl group at C-14 and creates a double bond at that position. In both fungi and animals this is the first step in the sterol synthesis pathway. Sterol 14-demethylation is mediated by a cytochrome P450 complex.

[0800] Sterol C-14 reductase catalyzes a C-14 demethylation that results in the formation of a double bond at C-14 (Ellis et al., Gen. Microbiol. 137:2627-2630 (1991)). This double bond is removed by a Δ¹⁴ reductase. The normal substrate is 4α-methyl-8,14,24 (24¹)-trien-3β-ol. NADPH is the normal reductant.

[0801] Sterol C-8 isomerase catalyzes a reaction that involves further modification of the tetracyclic rings or the side chain (Duratti et al., Biochem. Pharmacol. 34:2765-2777 (1985)). Kinetics of the sterolisomerase catalyzed reaction favor a Δ⁸→Δ⁷ isomerase reaction that produces a Δ⁷ group.

[0802] Sterol C-5 desaturase catalyzes the insertion of the Δ⁵-double bond that normally occurs at the Δ⁷-sterol level, thereby forming a Δ^{5,7}-sterol (Parks et al., Lipids 30:227-230 (1995)). The reaction has been reported to involve the stereospecific removal of the 5α and 6α hydrogen atoms, biosynthetically derived from the 4 pro-R and 5 pro-S hydrogens of the (+) and (−)R-mevalonic acid, respectively. The reaction is obligatorily aerobic and requires NADPH or NADH. The desaturase has been reported to be a multienzyme complex present in microsomes. It consists of the desaturase itself, cytochrome b₅ and a pyridine nucleotide-dependent flavoprotein. The Δ^{5,7}-desaturase is reported to be a mono-oxygenase that utilizes electrons derived from a reduced pyridine nucleotide via cytochrome b₅.

[0803] Sterol C-7 reductase catalyzes the reduction of a r⁷-double bond in r^{5,7}-sterols to generate the corresponding r⁵-sterol. It has been reported that the mechanism involves, like many other sterol enzymes, the formation of a carbocationic intermediate via the electrophilic “attack” by a proton.

[0804] Sterol C-24(28) isomerase catalyzes the reduction of a Δ²⁴⁽²⁸⁾→Δ²⁴, a conversion that modifies the side chain. The product is a Δ²⁴⁽²⁵⁾-24-alkyl sterol. Sterol C-24 reductase catalyzes the reduction of the Δ²⁴⁽²⁵⁾ double bond at C-24 which produces sitosterol.

[0805] Sterol C-22 desaturase (EC 2.7.3.9) catalyzes the formation of a double bond at C-22 on the side chain. This formation of a double bond at C-22 on the side chain marks the end of the sterol biosynthetic pathway and results in the formation of stigmasterol (Lees et al., Lipids 30:221-226 (1995)). The C-22 desaturase in yeast, which is the reported final step in the biosynthesis of ergosterol in that organism, requires NADPH and molecular oxygen. In addition, the reaction is reported to also involve a cytochrome P450 that is distinct from a cytochrome P450 participating in demethylation reactions.

[0806] Phytosterols are biogenetic precursors of brassinosteroids, steroid alkaloids, steroid sapogenins, ecdysteroids and steroid hormones. This precursor role of phytosterols is often described as a “metabolic” function. A common transformation of free sterols in tissues of vascular plants is the conjugation at the 3-hydroxy group of sterols with long-chain fatty acids to form steryl esters, or with a sugar, usually with a single molecule of β-D-glucose, to form steryl glycosides. Some of the steryl glycosides are in addition esterified, at the 6-hydroxy group of the sugar moiety, with long-chain fatty acids to form acylated steryl glycosides.

[0807] The presence of several enzymes have been reported that are specifically associated with the synthesis and breakdown of conjugated sterols (Wojciechowski, Physiology and Biochemistry of Sterols, eds. Patterson, Nes, AOCS Press, 361 (1991)). Enzymes involved in this process include: UDPGlc:Sterol glucosyltransferase, phospho(galacto)glyceride steryl glucoside acyltransferase, sterylglycoside and sterylester hydrolases.

[0808] UDPGlc:sterol glucosyltransferase (EC 2.4.1.173) catalyzes glucosylation of phytosterols by glucose transfer from UDP-glucose (“UDPGl”). The formation of steryl glycosides can be measured using UDP-[14C]glucose as the substrate. Despite certain differences in their specificity patterns, all reported UDPGlc:sterol glucosyltransferases preferentially glucosylate only sterols or sterol-like molecules that contain a C-3 hydroxy group, a β-configuration and which exhibit a planar ring. It has been reported that UDPGlc:sterol glucosyltransferases are localized in the microsomes.

[0809] Phospho(galacto)glyceride steryl glucoside acyltransferase catalyze the formation of acylated steryl glycosides from the substrate steryl glycoside by transfer of acyl groups from some membranous polar acyllipids to steryl glycoside molecules.

[0810] Acylglycerol:sterol acyltransferase (EC 2.3.1.26) catalyzes the reaction where certain acylglycerols act as acyl donors in a phytosterol esterification. In plants the activity of acylglycerol:sterol acyltransferase is reported to be associated with membranous fractions. A pronounced specificity for shorter chained unsaturated fatty acids was reported for all acyltransferase preparations studied in plants. For example, acylglycerol:sterol acyltransferases from spinach leaves and mustard roots can esterify a number of phytosterols.

[0811] Sterylglycoside and sterylester hydrolases (“SG-hydrolases”) catalyze the enzymatic hydrolysis of sterylglycosides to form free sterols. The SG-hydrolase activity is not found in mature, ungerminated seeds and is reported to emerge only after the third day of germination, and is found mainly in the cotyledons. It has been reported that phospho(galacto)glyceride:SG acyltransferase may catalyze a reversible reaction. Enzymatic hydrolysis of sterylester in germinating seeds of mustard, barley and corn is reported to be low in dormant seeds but increases during the first ten days of germination. This activity is consistent with a decrease in sterylesters and increase in free sterols over the same temporal period.

[0812] iv. Brassinosteroids

[0813] Brassinosteroids are steroidal compounds with plant growth regulatory properties, including modulation of cell expansion and photomorphogenesis (Artecal, Plant Hormones, Physiology, Biochemistry and Molecular Biology ed. Davies, Kluwer, Academic Publishers, 66 (1995); Yakota, Trends in Plant Science 2:137-143 (1997)). Brassinolide (2α, 3α, 22α, 23α-tetrahydroxy-24-methyl-B-homo-7-oxa-5α-cholestan-6-one) is a biologically active brassinosteroid. More than 40 natural analogs of brassinolide have been reported and these analogues differ primarily in substitutions of the A/B ring system and side chain at position C-17 (Fujioka and Sakurai, Natural Products Report 14:1-10 (1997)).

[0814] The pathway leading to brassinolide branches from the synthesis and catabolism of other sterols at campesterol. A synthetic pathway has been reported to campesterol, (24R)-24-methylcholest-4-en-3-one, (24R)-24-5α-methylcholestan-3-one, campestanol, cathasterone, teasterone, 3-dehydroteasterone, typhasterol, castasterone, brassinolide (Fujioka et al., Plant Cell 9:1951-1962 (1997)). An alternative pathway branching from campestanol has also been reported where the 6-oxo group is lacking and not introduced until later in the sequential conversion process. 6-deoxy brassinosteroids have low biological activity and may be catabolic products. However, enzymatic activity converting 6-deoxocastasterone to castasterone has been reported and thus links the alternative pathway to production of bioactive brassinolide.

[0815] Two genes encoding BR biosynthetic enzymes have been cloned from Arabidopsis. The earliest acting gene is DET2, which encodes a steroid 5α-reductase with homology to mammalian steroid 5 α-reductases (Li et al., Science 272:398-401 (1996)). The only reductive step in the brassinolide pathway occurs between campesterol and campestanol. A det2 mutation is reported to block the second step in the BR (24R)-24-methylcholest-4-en-3-one to (24R)-24-5-methylcholestan-3-one conversion (Fujioka et al., Plant Cell 9:1951-1962 (1997)).

[0816] A second gene, CPD, encodes a cytochrome P450 that has domains homologous to mammalian steroid hydroxylases (Szekeres et al., Cell 85:171-182 (1996)). CPD has been reported to be a teasterone-23-hydroxylase. Mutation of this gene blocks the cathasterone to teasterone conversion. Additional cytochrome P450 enzymes may to participate in brassinolide biosynthesis including the tomato DWARF gene that encodes a P450 cytochrome with 38% identity to CPD (Bishop, Plant Cell 8:959-969 (1996)).

[0817] G. Lipid Metabolism

[0818] 1. β-Oxidation Pathway

[0819] The degradation of fatty acids occurs by the β-oxidation pathway. Several inherited human diseases have been reported as genetic deficiencies of β-oxidation enzymes (Roe and Coates, In: Metabolic Basis of Inherited Disease (Scriver et al., eds.) 6^{th} ed. pp. 889-914 (1989)). Fatty acid oxidation is reported in three systems; mitochondrial, peroxisomal and bacterial. Mitochondrial and peroxisomal β-oxidation occurs in animal cells, peroxisomal β-oxidation occurs in plant cells and bacterial β-oxidation is reported to differ from eukaryotic β-oxidation. Peroxisomal β-oxidation is similar to the mitochondrial β-oxidation, except that carnitine has not been reported to be required. In mitochondria, long chain fatty acids are activated by acyl-CoA synthetase on the mitochondrial outer membrane and acyl groups of the CoA esters are transported into the matrix by carnitine acyltransferase. Mitochondrial β-oxidation has been reported as cyclic repetition of four basic reactions catalyzed by a long, medium and short chain acyl-CoA dehydrogenase, an enoyl-CoA hydratase, a 3-hydroxyacyl CoA dehydrogenase and 3-ketoacyl-CoA thiolase. The reported substrates of β-oxidation enzymes are coenzyme A (CoA) derivatives of fatty acid. In peroxisomes, fatty acids have been reported to be activated by acyl-CoA synthetase (Shindo and Hashimoto, J. Biochem. 84:1177-1181 (1978); Krisans et al., J. Biol. Chem. 255:9599-9607 (1980)). Acyl-CoA esters have been reported to be degraded by β-oxidation cycle. β-oxidation has been reported to be catalyzed by acyl-CoA oxidase, enoyl CoA isomerase/enoyl-CoA hydratase/3-hydroxylacyl-CoA dehydrogenase.

[0820] Acyl-CoA oxidase (EC 1.3.3.6) is the first reported enzyme of the fatty acid β-oxidation pathways. This enzyme catalyzes the desaturation of acyl-CoAs longer than eight carbons to 2-trans-enoyl-CoAs, by donating electrons directly to molecular oxygen and releasing H₂O₂ (Lazarow et al., 1976). A reported human deficiency of the peroxisomal enzyme results in a lethal disorder called pseudoneonatal adrenoleukodystrophy (Poll—The et al., Am. J. Hum. Genet. 42:422-434 (1988)). Acyl-CoA oxidase isoforms have been reported in human and rat liver (Vanhove et al., J. Biol. Chem. 268:10335-10344 (1993); Schepers et al., J. Biol. Chem. 265:5242-5246 (1990); Osumi et al., J. Biol. Chem. 262:8138-8143 (1987)). Three acyl-CoA oxidases, almitoyl-CoA oxidase, pristanoyl-CoA oxidase and trihydroxycoprostanoyl-CoA oxidase, have been reported to occur within rat liver peroxisomes. Each of the peroxisomal acyl-CoA oxidases is reported to be substrate specific. Acyl-CoA oxidase substrate has been reported as acyl moieties of more than eight carbon atoms (Osumi et al., J. Biochem. 87:1735-1746 (1980)). Clones of rat and human acyl-CoA oxidases have been reported (Osumi et al., J. Biol. Chem. 262:8138-8143 (1987); Reddy et al., Proc. Natl. Acad. Sci. (USA) 84:3214-3218 (1987)). Clones of rat pristanoyl-CoA oxidase and trihydroxycoprostanoyl-CoA oxidase and human branched-chain acyl-CoA oxidase have also been reported (Vanhove et al., J. Biol. Chem. 268:10335-1034 (1993); van Veldhoven et al., Eur. J. Biochem. 222:795-801 (1995)).

[0821] Bifunctional protein enoyl-CoA hydratase/3-hydroxyacyl-CoA dehydrogenase is the second reported enzyme of the peroxisomal β-oxidation pathway. Enoyl-CoA hydratase catalyzes hydration of double bond to form 3-L-hydroxyacyl-CoA. 3-hydroxyacyl-CoA dehydrogenase catalyzes NAD⁺ dependent dehydrogenation of β-hydroxy-acyl-CoA resulting in the formation of the corresponding β-ketoacyl-CoA. Originally, bifunctional protein enoyl-CoA hydratase/3-hydroxyacyl-CoA dehydrogenase was reported in rat liver as a monomeric protein with two enzyme activities (Osumi and Hashimoto, Biochem. Biophys. Res. Commun. 89:580-584 (1979)). Enoyl-CoA hydratase/3-hydroxyacyl-CoA dehydrogenase has also been reported as a trifunctional protein with an enoyl-CoA isomerase activity in addition to hydratase and dehydrogenase activity (Palorassi and Hiltunen, J. Biol. Chem. 265:2446-2449 (1990)). Enoyl CoA isomerase/enoyl-CoA hydratase/3-hydroxylacyl-CoA dehydrogenase has also been reported in bovine liver, pig heart and human liver (Fong and Schulz, Methods Enzymol. 71:390-398 (1981); Furuta et al., J. Biochem. 88:1059-1070 (1980); Reddy et al., Proc. Natl. Acad. Sci. (USA) 84:3214-3218 (1987); Osumi and Hashimoto, J. Biol. Chem. 262:8138-8143 (1979)). Rat enoyl-CoA hydratase/3-hydroxyacyl-CoA dehydrogenase/enoyl-CoA isomerase has been reported to contain seven exons. Exons one through five, are reported at the amino terminal to constitute a hydratase domain. 3-hydroxyacyl CoA dehydrogenase activity is reported in exons six and seven. 3-hydroxyacyl CoA dehydrogenase activity has been reported to be present in a 722 amino acid polypeptide (Ishii et al, J. Biol. Chem. 262:8144-8150 (1987); Osumi et al., J. Biol. Chem. 260:8905-8910 (1985)).

[0822] 3-Ketoacyl-CoA thiolase is reported to catalyze the last step of fatty acid β-oxidation, resulting in Cα-Cβ cleavage yielding acetyl-CoA and new acyl-CoA with two fewer carbons the original one. Two types of mitochondrial thiolases have been reported which differ chain length specificity: 3-ketoacyl CoA thiolase (also known as thiolase I) and acetoacetyl-CoA thiolase (EC 2.3.1.9) (also known as thiolase U). 3-Ketoacyl-CoA-thiolase (EC 2.3.1.16) has reported activity on substrates ranging from acetoacetyl-CoA to long-chain 3-ketoacyl-CoAs at low concentration (Middleton, Methods Enzymol. 35:128-136 (1975; Staack et al, J. Biol. Chem. 253:1827-1931 (1978)). Thiolase has been reported as a tetramer. Rat mitochondrial 3-ketoacyl-CoA thiolase has been reported to have a molecular weight of 41866 Kd (Arakawa et al, EMBO J. 6:1361-1366 (1987)). Peroxisomal 3-ketoacyl-CoA thiolase has been reported in rat liver as a homodimer with a molecular mass of 89 kDa. Mitochondrial 3-ketoacyl-CoA thiolases and mitochondrial and cytosolic acetoacetyl-CoA specific thiolases have been reported as homotetramers, each subunit is about 40 kDa (Miyazawa et al., Eur. J. Biochem. 103:589-596 (1980)). Genes encoding these enzymes have been reported (Hijikata et al., J. Biol. Chem. 262:8151-8158 (1990)). A rat peroxisomal 3-ketoacyl-CoA thiolase and a mitochondrial 3-ketoacyl-CoA thiolase have been reported which contain cysteine residues that are important for substrate binding (Hijikata et al., J. Biol. Chem. 262:8151-8158 (1987); Arakawa et al., EMBO J. 6:1361-1366 (1987)). Thiolases from different species have been reported to have an essential sulfhydryl serving as an acyl acceptor during the thiolytic cleavage (Gilbert et al., J. Biol. Chem. 256:7371-7377 (1981)).

[0823] 2. Fatty Acid Pathway

[0824] In plants, fatty acids are synthesized in the chloroplasts. The pathway is responsible for the formation of fatty acids up to 18 carbons long. The synthesis of fatty acids begins with the reaction between acetyl-CoA and CO₂ to produce malonyl-CoA, which is catalyzed by the enzyme acetyl-CoA carboxylase (ACCase). To form malonyl-Acyl Carrier Proteins (ACP), the transfer of the malonyl moiety from malonyl-CoA is catalyzed by the enzyme malonyl-CoA:ACP transacylase. The first reported elongation step of fatty acid synthesis involves the condensation of a two-carbon unit from malonyl-ACP with acetyl-CoA to form an acetoacetyl-ACP fatty acyl molecule. This reaction is catalyzed by a β-ketoacyl-ACP synthase enzyme which has been designated β-ketoacyl-ACP synthase III (KASIII). Biosynthesis of 16- and 18-carbon fatty acids is followed by the cyclical action of the following sequence of reactions: condensation of acyl-ACP with a two-carbon unit from malonyl-ACP to form elongated β-ketoacyl-ACP (β-ketoacyl-ACP synthase), reduction of the keto-function to an alcohol (β-ketoacyl-ACP reductase), dehydration to form an enoyl-ACP (β-hydroxyacyl-ACP dehydrase), and reduction of an enoyl-ACP to form an elongated saturated acyl-ACP (enoyl-ACP reductase). In plants, this group of dissociated enzymes responsible for the elongation of fatty acids is referred to as fatty acid synthase, or FAS.

[0825] Monounsaturated fatty acids are also produced in the plastid, where a double bond can be introduced into the fatty acid molecules by the action of a soluble acyl-ACP desaturase. Acyl-ACPs are substrates for the formation of plastid glycerolipid acids. Alternatively, termination of FAS in the plastids can be catalyzed by acyl-ACP thioesterases (acyl-ACP hydrolases), which hydrolyze acyl-ACPs to form free fatty acids. Free fatty acids may be exported from the chloroplasts to the cytoplasm, where acyl-CoA synthase esterifies the free fatty acids with coenzymeA (CoA) to produce acyl-CoAs. The derived acyl-CoAs are then available as substrates for glycerolipid acid synthesis in the cytoplasm, or in certain plants, for elongation through the action of fatty acid elongase to form longer chain fatty acids.

[0826] The FAS pathway in plants has been reviewed (Ohlrogge et al., Fatty Acid Metabolism in Plants, ed. Moore, CRC Press, Boca Raton (1993); Ohlrogge and Browse, Plant Cell 7:957-970 (1995); Harwood, Biochimica et Biophysica Acta 1301:7-56 (1996); Slabas and Fawcett, Plant Molecular Biology 19:169-191 (1992)).

[0827] Acetyl-CoA carboxylase, which carries out the first reported committed step in fatty acid synthesis, carboxylates acetyl-CoA to form malonyl-CoA. There are two types of acetyl-CoA carboxylase reported in plants. The first type have been reported to be similar to bacterial enzymes in that it is comprised of four individual and dissociable polypeptides. The four subunits are: biotin carboxylase, biotin carboxyl carrier protein, and two biotin transcarboxylase subunits. The second type of acetyl-CoA carboxylase has been reported to be a large multifunctional protein catalyzing the same three enzyme activities. Dicotyledynous plants and some monocotyledonous plants contain a multisubunit acetyl-CoA carboxylase in their chloroplasts, and a multifunctional acetyl-CoA carboxylase in their cytoplasm. Plants in the graminaceae family have been reported to contain multifunctional acetyl-CoA carboxylase enzymes in both cell compartments.

[0828] The first reported partial reaction catalyzed by ACCase is an ATP dependent carboxylation of a biotin prosthetic group of biotin carboxyl carrier protein. Bicarbonate is the primary reported source of carbon and the reaction has been reported to be ATP dependent. The second reported partial reaction is the transfer of the carboxyl group to acetyl-CoA to form malonyl-CoA. A multisubunit enzyme has been partially purified from pea (Alban et al., Biochemistry Journal 300:557-565 (1994)), and certain cDNAs encoding the subunits have been reported from pea and tobacco (Sasaki et al., Journal of Biological Chemistry 268:25118-25123 (1993)). Multifunctional enzymes have been reported from plants and their corresponding genes have been cloned from wheat, maize, Arabidopsis, alfalfa, and rapeseed (Elborough et al., Plant Molecular Biology 24:21-34 (1994); Elborough et al., Biochemistry Journal 301:599-605 (1994); Somers et al., Plant Physiology 101: 1097-1101 (1993); Shorrish et al., Proc. Natl. Acad. Sci. (U.S.A.) 91:4323-4327 (1994)).

[0829] Acetyl-CoA:ACP transacylase (“ATA”) catalyzes the transfer of an acetyl moiety from CoA to ACP. This activity has been reported to be a side reaction of KASIII (Tsay et al., Journal of Biological Chemistry 267:6807-6814 (1992)). ATA has been reported to play a minor role in fatty acid synthesis. An ATA enzyme has been partially purified from avocado fruit and pea leaves and the activity has been reported to be separable from KASIII (Harwood, Biochimica et Biophysica Acta 1301:7-56 (1996), Gulliver and Slabas, Plant Molecular Biology 25:179-191 (1994)).

[0830] Malonyl CoA:ACP transacylase (MCAT) catalyzes the transfer of a malonyl moiety from CoA to ACP. Malonyl-ACP is the donor of acetate moieties that compose the elongated fatty acyl chains synthesized by FAS. Malonyl-CoA:ACP transacylase has been reported to be present in multiple isoforms and has been partially purified from a number of plant tissues, such as barley (Hoj and Mikkelsen, Carlsberg Research Communication 47:119-141 (1982)), leek (Lessire and Stumpf, Plant Physiology 73:614-618 (1983)), spinach (Stapelton and Jaworski, Biochem. Biophys. Acta 794:240-248 (1984)), and soybean (Guerra and Ohlrogge, Arch. Biochem. Biophys. 246:274-285 (1986)). MCAT has been reported from E. coli (Magnuson et al., FEBS Letters 299:262-266 (1992)).

[0831] In plants, FAS elongates fatty acids esterified to ACP. ACP is a small, acidic protein, which has a phosphopantetheine prosthetic group. Genes encoding ACP have been reported in U.S. Pat. Nos. 5,110,728 and 5,315,001. Genes for ACP have also been reported from more than 15 plant species (Ohlrogge et al., Fatty acid Metabolism in Plants, ed. Moore, CRC Press, Boca Raton (1993)). Holo-ACP synthase catalyzes the pantethenylation of apo-ACP using β-alanine as a donor of the panthetheine group. A gene encoding holo-ACP synthase has been reported from E. coli (Lambalot and Walsh, Journal of Biological Chemistry 270:24658-24661 (1995)).

[0832] β-Ketoacyl-ACP synthase III, also known as 3-ketoacyl-ACP synthase III and KASIII, catalyzes the first reported condensation reaction of FAS. It condenses acetyl-CoA with malonyl-ACP to form acetoacetyl-ACP. cDNAs encoding KASIII have been reported from spinach (Jaworski et al., Prog. Fatty acid Res. 33:47-54 (1994)), Cuphea (Slabaugh et al., Plant Physiology 108:443-444 (1995)), and Arabidopsis (Tai et al., Plant Physiology 106:801-802 (1994)).

[0833] β-Ketoacyl-ACP synthase I and β-ketoacyl-ACP synthase II (also known as 3-ketoacyl-ACP synthase I or KASI and 3-ketoacyl-ACP synthase II or KASII, respectively) catalyze the condensation of the acyl-ACPs with malonyl-ACP to form elongated (by two carbons) β-ketoacyl-ACP. In plants, KASI elongates C4- to C14-ACPs. KASII also elongates the shorter chain substrates. KASII has been reported to exhibit greater activity toward C16-ACP. KASII has been reported to be responsible for the formation of C18 fatty acids. Genes encoding KASI have been reported from barley, castor and rapeseed. Genes encoding a second isoform of the enzyme which has been associated with KASII have been reported from castor and rapeseed (International Patent Application WO 92/03564, U.S. Pat. No. 5,475,099, U.S. Pat. No. 5,510,255).

[0834] β-Ketoacyl-ACP reductase, also known as 3-ketoacyl-ACP reductase, reduces the keto group of β-ketoacyl-ACP to form β-hydroxyacyl-ACP. Genes encoding β-ketoacyl-ACP reductase have been reported from Cuphea (Topfer and Martini, Plant Physiology 143:416-425 (1994)), Arabidopsis and rapeseed (Slabas et al., Biochem. Journal 283:321-326 (1992)).

[0835] β-Hydroxyacyl-dehydrase (also referred to as β-hydroxyacyl-dehydratase) removes water from β-hydroxyacyl-ACP to form enoyl-ACP. β-Hydroxyacyl-dehydrase has been partially purified from spinach (Shimkata and Stumpf, Arch. Biochem. Biophys. 218:77-91 (1982)) and safflower (Shimkata and Stumpf, Arch. Biochem. Biophys. 217:144-154 (1982)). The gene encoding this enzyme have been reported from E. coli (Cronan et al., Journal of Biological Chemistry 263:4641-4646 (1988); Mohan et al., Journal of Biological Chemistry 269:32896-32903 (1994)).

[0836] Enoyl-ACP reductase reduces enoyl-ACP to acyl-ACP. cDNA clones encoding enoyl-ACP reductase have been reported from several plants including rapeseed (Kater et al., Plant Molecular Biology 17:895-909 (1991)) and Cuphea (Walek et al., Biological Chemistry 374:551 (1993)).

[0837] Double bonds can be introduced into acyl-ACPs by soluble desaturases. A common chloroplastic desaturase, stearoyl-ACP desaturase, introduces a 9,10 cis double bond into stearoyl-ACP to produce oleoyl-ACP. The reaction has been reported to require oxygen and an electron source. The immediate electron donor has been reported to be ferredoxin. cDNAs encoding stearoyl-ACP desaturase have been reported from a number of plant species including safflower (Thompson et al., Proc. Natl. Acad. Sci. (U.S.A.) 88:2578-2582 (1991); International Patent Application WO 91/13972), castor (Shanklin and Somerville, Proc. Natl. Acad. Sci. (U.S.A.) 88:2510-2514 (1991)), soybean (Chen et al., Plant Physiology 109:1498 (1994)), and spinach (Nishida et al., Plant Molecular Biology 19:711-713 (1992)).

[0838] Acyl-ACP thioesterases can terminate FAS. In this reaction thioesterases utilize water to hydrolyze the acyl-ACP thioester linkages to form free fatty acids and ACP. Plants have been reported to harbor two classes of thioesterase (Jones et al., Plant Cell 7:359-371 (1995)). Type A thioesterases (FATA) have been reported to have a substrate preference for oleyl-ACP, and type B thioesterases (FATB) have been reported to have a substrate preference for saturated acyl-ACP. In plant tissues with fatty acid compositions comprising primarily of 16 and 18 carbon fatty acids, FATB enzymes have been reported to have substrate preferences for palmitoyl-ACP (Voelker, Genetic Engineering Vol. 18, ed. Setlow, Plenum Press, New York (1996)).

[0839] Free fatty acids released by thioesterases have been reported to be exported from the chloroplast. Acyl-CoA synthetase, an enzyme that has been reported to be associated with the chloroplast envelope, esterifies fatty acids to CoA in an ATP dependent reaction. cDNAs encoding acyl-CoA synthetase have been reported from rapeseed (Fulda et al., Plant Molecular Biology 33:911-922 (1997)).

[0840] Fatty acid elongase (FAE (EC 2.3.1.119)) has been reported to be a multisubunit enzyme. Its component enzyme activities have been reported to be similar to FAS. One reported difference between FAE and FAS is that FAE acts on fatty acids esterified to CoA, while FAS acts on fatty acids esterified to ACP. Another reported difference is that FAE enzymes have been reported to be associated with membranes, while FAS enzymes have been reported to be soluble.

[0841] β-Ketoacyl-CoA synthase (also known as 3-ketoacyl-CoA synthase and KCS) is a condensing enzyme. KCS catalyzes the elongation step of FAE. KCS uses acyl-CoA and malonyl-CoA as substrates to produce β-ketoacyl-CoA, carbon dioxide, and CoA. cDNAs encoding β-ketoacyl-CoA synthase have been reported from several plant species (Lassner et al., Plant Cell 8:281-292 (1996); U.S. Pat. No. 5,679,881; James et al., Plant Cell 7:309-319 (1995)).

[0842] A subsequent reported reaction of FAE is catalyzed by β-ketoacyl-CoA reductase (also known as 3-ketoacyl-CoA reductase). In this NADH or NADPH dependent reaction, β-ketoacyl-CoA is reduced to β-hydroxyacyl CoA. cDNAs encoding β-ketoacyl-CoA reductase have been reported from maize, barley, leek, and Arabidopsis (Xu et al., Plant Physiology 115:501-510 (1997)).

[0843] The next reported reaction of FAE is catalyzed by β-hydroxyacyl-CoA dehydrase. This reaction consists of the removal of water from the β-hydroxyacyl-CoA to form enoyl-CoA.

[0844] The final reported step of FAE is catalyzed by enoyl-CoA reductase. In this NADH or NADPH dependent reaction, the double bond of enoyl-CoA is reduced to form acyl-CoA.

[0845] Glycerolipid acid synthesis has been reviewed (Browse and Somerville, Annual Review of Plant Physiology and Plant Molecular Biology 42:467-506 (1991); Ohlrogge and Browse, Plant Cell 7:957-970 (1995); Harwood, Biochimica et Biophysica Acta 1301:7-56 (1996); Slabas and Fawcett, Plant Molecular Biology 19:169-191 (1992)). Glycerolipid acid synthesis occurs by two reported pathways, a “prokaryotic” pathway and an “eukaryotic” pathway. The term prokaryotic pathway refers to the pathway present in plastids. The term eukaryotic pathway refers to the pathway present in the cytoplasm. The enzymes carrying out the eukaryotic pathway are predominantly associated with microsomal membranes.

[0846] The eukaryotic pathway for triglyceride biosynthesis has four reported enzymes: glycerol-3-phosphate O-acyltransferase (EC 2.3.1.15), 1-acyl-glycerol-3 phosphate O-acyltransferase, (EC 2.3.1.51), phosphatidiate phosphatase (EC 3.1.3.4), and diacylglycerol O-acyltransferase (EC 2.3.1.20).

[0847] Glycerol-3-phosphate O-acyltransferase (also known as soluble glycerol-3-phosphate acyltransferase (EC 2.3.1.15)) catalyzes the transfer of an acyl group from acyl-CoA to glycerol-3 phosphate to form 1-acyl-glycerol-3 phosphate. The plastid form of this enzyme, which has been reported to be associated with the prokaryotic pathway, utilizes acyl-ACP rather than acyl-CoA as a substrate. A plastid form of this enzyme is soluble and has been reported and cloned from a number of plant species (Murata and Tasaka, Biochimica et Biophysica Acta 1348:10-16 (1997)). Genes encoding membrane forms of the enzyme have been reported from E. coli (Lightner et al., Journal of Biological Chemistry 258:10856-108619 (1983)) and mouse (Shin et al., Journal of Biological Chemistry 266:23834-23839 (1991)).

[0848] 1-Acyl-glycerol-3 phosphate O-acyltransferase (also known as lysophosphatidic acid acyltransferase (EC 2.3.1.51)) catalyzes the next reported step of triglyceride synthesis. 1-Acyl-glycerol-3 phosphate O-acyltransferase catalyzes the transfer of an acyl group from acyl-CoA to 1-acyl-glycerol-3 phosphate to form phosphatidic acid. A cytoplasmic form of this enzyme has been reported from several species (Lassner et al., Plant Physiology 109:1389-1394 (1995); Knutzon et al., Plant Physiology 109:999-1006 (1995); International Patent Application WO 95/27791). A second reported class of cDNAs that have been reported to encode 1-acyl-glycerol-3 phosphate O-acyltransferase have been reported from maize and rapeseed (Brown et al., Plant Molecular Biology 26:211-223 (1994)).

[0849] Phosphatidiate phosphatase (also known as phosphatidic acid phosphatase (EC 3.1.3.4)) hydrolyzes the phosphate group from phosphatidic acid to diacylglycerol. Phosphatidiate phosphatase has been reviewed by Kocsis et al., Lipids 31:785-802 (1996). Phosphatidiate phosphatase has been reported in Saccharomyces cerevisiae and Escherichia coli (Carman et al., Biochim Biophys Acta. 1348:45-55 (1997)).

[0850] Diacylglycerol O-acyltransferase (EC 2.3.1.20) catalyzes the final reported step of triglyceride synthesis. Diacylglycerol O-acyltransferase catalyzes the transfer of an acyl group from acyl-CoA to diacylglycerol to form triacylglycerol.

[0851] The eukaryotic pathway for phospholipid acid biosynthesis has been reported to have in common the first three enzymes of its biosynthetic pathway with the pathway for triglyceride synthesis: glycerol-3-phosphate O-acyltransferase (EC 2.3.1.15), 1-acyl-glycerol-3 phosphate O-acyltransferase, (EC 2.3.1.51), and phosphatidiate phosphatase (EC 3.1.3.4). There have been multiple reported pathways that attach polar head groups to the sn-3 position of glycerolipid acids to form phospholipid acids. Phosphatidyl choline has been reported to be the most abundant phospholipid acid in plant membranes. Diacylglycerol cholinephosphotransferase (EC 2.7.8.2) catalyzes the transfer of choline from CDP-choline to diacylglycerol to form phosphatidlycholine and CMP. Diacylglycerol cholinephosphotransferase catalyzes the transfer of ethanolamine from CDP-ethanolamine to form phosphatidlyethanolamine (Dewey et al., Plant Cell 6:1495-1507 (1994)). CDP-choline is formed by the enzyme choline-phosphate cytidyltransferase (also known as phosphocholine cytidyltransferase (EC 2.7.7.15)), which utilizes CTP and choline phosphate to form CDP-choline and phosphate. A cDNA encoding choline-phosphate cytidyltransferase has been reported and isolated from rapeseed by complementation of a yeast mutant (Nishida et al., Plant Molecular Biology 31:205-211 (1996)). Choline phosphate is formed from choline and ATP by the enzyme choline kinase (EC 2.7.1.32). A cDNA encoding choline kinase has been reported from soybean (Dewey et al., Plant Physiology 110:1197-1205 (1996)). Phosphatidyl choline can also be formed by the methylation of the ethanolamine head group of phosphatidyl ethanolamine.

[0852] Phosphatidyl choline is a substrate for phosphatidyl choline desaturases (EC 1.3.1.35). Phosphatidyl choline desaturases introduce double bonds into oleic acid (omega-6 desaturase) and linoleic acid (omega-3 desaturase). Omega-6 desaturase (also referred to as delta-12 desaturase) incorporates a double bond at the omega-6 position of oleic acid in the sn-2 position of phosphatidyl choline. Omega-3 desaturase (also referred to as delta-6 desaturase) incorporates a double bond at the omega-3 position of linoleic acid in the sn-2 position of phosphatidyl choline. Desaturases have been reported from a number of plant species (Somerville and Browse, Trends in Cell Biology 6:148-153 (1996)). Both desaturases use cytochrome B5 as an electron donor. cDNAs encoding cytochrome B5 have been reported from several plant species including Brassica oleracea (Kearns et al., Plant Physiology 99:1254-1257 (1995)) and tobacco (Smith et al., Plant Molecular Biology 25:527-537 (1994)). Cytochrome B5 reductase has been reported to be required as an electron donor to reduce cytochrome B5 in order for it to donate electrons for the desaturation. A cDNA encoding cytochrome B5 reductase has been reported from human placenta (Yubisui et al., Proc. Natl. Acad. Sci. (U.S.A.) 84:3609-3613 (1987)).

[0853] There are several reported mechanisms for exchange of fatty acids between glycerolipid acids. For example, the combined forward and reverse reactions of acyl-CoA:phosphatidyl choline acyltransferase catalyzes an exchange of acyl groups between CoA and phosphatidyl choline (Stymne and Stobart, The Biochemistry of Plants, Vol. 9, ed. Stumpf and Conn, Academic Press, New York (1987)). A second mechanism by which phosphatidyl choline can participate in triacylglycerol synthesis is through the reverse reaction of diacylglycerol cholinephosphotransferase (EC 2.7.8.2).

[0854] Phospholipase C (EC 3.1.4.3) can also catalyze the conversion of phosphatidyl choline to diacylglycerol through a hydrolysis reaction. Diacylglycerol kinase synthesizes phosphatidic acid from diacylglycerol in an ATP dependent reaction. A cDNA encoding diacylglycerol kinase has been reported from Arabidopsis (Katagiri et al., Plant Molecular Biology 30:647-653 (1996)). Phospholipase C also hydrolyzes phosphatidyl inositol. A cDNA encoding phospholipase C has been reported from Arabidopsis (Hiayama et al., Proc. Natl. Acad. Sci. (U.S.A.) 92:3903-3907 (1995)).

[0855] Phospholipase D hydrolyzes phosphatidyl choline to choline and phosphatidic acid. It has been reported that cDNAs encoding phospholipase D have been reported from castor (Wang et al., Journal of Biological Chemistry 269:20312-20317 (1994)), rice, and corn (Ueki et al., Plant Cell Physiology 36:903-914 (1995)).

[0856] Phospholipase A hydrolyzes phosphatidyl choline to lysophosphatidyl choline and free fatty acid. A cDNA encoding phospholipase A2 has been reported (Seilhamer et al., J. Biol. Chem. 264:5335-5338 (1989)). Phospholipase A2 activity has been reported in leaves of Vicia faba (Kim et al., FEBS Lett. 343:213-218 (1994)).

[0857] Phospholipase B, also known as lysophospholipase, has been reported to hydrolyze lysophosphatidyl choline to glycerophosphocholine and free fatty acid. Phospholipase B has been reported in leaves of Vicia faba (Kim et al., FEBS Lett. 343:213-218 (1994)).

[0858] The products of the prokaryotic pathway for glycerolipid acid synthesis have been reported to be primarily glycolipid acids. Like the eukaryotic pathway, the first three reported enzymes are glycerol-3-phosphate O-acyltransferase, 1-acyl-glycerol-3 phosphate O-acyltransferase, and phosphatidiate phosphatase. Unlike the acyltransferases of the eukaryotic pathway which use acyl-CoAs as substrates, the two plastid acyltransferases use acyl-ACPs as acyl donors. The most abundant chloroplast fatty acid has been reported to be monogalactosyldiacylglycerol (MGDG), which is formed from diacylglycerol by UDP-galactose:diacylglycerol galactosyltransferase. A cDNA encoding this enzyme has been reported from cucumber (Shimojima et al., Proc. Natl. Acad. Sci. (U.S.A.) 94:333-337 (1997)). Digalactosyldiacylglycerol (DGDG), a second major plastid lipid, is synthesized by the dismutation of two molecules of MGDG (Heemskerk et al., Plant Physiology 93:1286-1294 (1990)). Other chloroplast fatty acids include phosphatidyl glycerol (PG) and sulphoquinovosyl diacylglycerol (SL) which are synthesized from phosphatidic acid. Plastids have been reported to have unique omega-3 and omega-6 desaturases. Fatty acid desaturase 4 (FAD4) introduces a trans double bond into the delta-3 position of palmitate esterified to the sn-2 position of PG. FAD5 introduces an omega-9 double bond into palmitate and act specifically on palmitate esterified to the sn-2 position of MGDG. FAD6 desaturates 16:1 and 18:1 esterified to either the sn-1 or sn-2 position of plastid glycerolipid acids and introduces a double bond at the omega-6 position of the fatty acids. FAD7 and FAD8 desaturates 16:2 and 18:3 esterified to either the sn-1 or sn-2 position of plastid glycerolipid acids and introduces a double bond at the omega-3 position of the fatty acids.

Sequence Comparisons

[0859] A characteristic feature of a nucleic acid or protein sequence is that it can be compared with other nucleic acid or protein sequences. Sequence comparisons can be undertaken by determining the similarity of the test or query sequence with sequences in publicly available or proprietary databases (“similarity analysis”) or by searching for certain motifs (“intrinsic sequence analysis”)(e.g., cis elements)(Coulson, Trends in Biotechnology 12:76-80 (1994)); Birren et al., Genome Analysis 1: Cold Spring Harbor Laboratory Press, Cold Spring Harbor, N.Y. 543-559 (1997)).

[0860] Similarity analysis includes database search and alignment. Examples of public databases include the DNA Database of Japan (DDBJ)(http://www.ddbj.nig.ac.jp/); Genebank (http://www.ncbi.nlm.nih.gov/Web/Search/Index.htlm); and the European Molecular Biology Laboratory Nucleic Acid Sequence Database (EMBL) (http://www.ebi.ac.uk/ebi_docs/embl_db/embl-db.html). Other appropriate databases include dbEST (http://www.ncbi.nlm.nih.gov/dbEST/index.html), SwissProt (http://www.ebi.ac.uk/ebi_docs/swisprot_db/swisshome.html), PIR (http://www-nbrt.georgetown.edu/pir/) and The Institute for Genome Research (http://www.tigr.org/tdb/tdb.html)

[0861] A number of different search algorithms have been developed, one example of which are the suite of programs referred to as BLAST programs. There are five implementations of BLAST, three designed for nucleotide sequences queries (BLASTN, BLASTX and TBLASTX) and two designed for protein sequence queries (BLASTP and TBLASTN) (Coulson, Trends in Biotechnology 12:76-80 (1994); Birren et al., Genome Analysis 1, Cold Spring Harbor Laboratory Press, Cold Spring Harbor, N.Y. 543-559 (1997)).

[0862] BLASTN takes a nucleotide sequence (the query sequence) and its reverse complement and searches them against a nucleotide sequence database. BLASTN was designed for speed, not maximum sensitivity and may not find distantly related coding sequences. BLASTX takes a nucleotide sequence, translates it in three forward reading frames and three reverse complement reading frames and then compares the six translations against a protein sequence database. BLASTX is useful for sensitive analysis of preliminary (single-pass) sequence data and is tolerant of sequencing errors (Gish and States, Nature Genetics 3:266-272 (1993)). BLASTN and BLASTX may be used in concert for analyzing EST data (Coulson, Trends in Biotechnology 12:76-80 (1994); Birren et al., Genome Analysis 1:543-559 (1997)).

[0863] Given a coding nucleotide sequence and the protein it encodes, it is often preferable to use the protein as the query sequence to search a database because of the greatly increased sensitivity to detect more subtle relationships. This is due to the larger alphabet of proteins (20 amino acids) compared with the alphabet of nucleic acid sequences (4 bases), where it is far easier to obtain a match by chance. In addition, with nucleotide alignments, only a match (positive score) or a mismatch (negative score) is obtained, but with proteins, the presence of conservative amino acid substitutions can be taken into account. Here, a mismatch may yield a positive score if the non-identical residue has physical/chemical properties similar to the one it replaced. Various scoring matrices are used to supply the substitution scores of all possible amino acid pairs. A general purpose scoring system is the BLOSUM62 matrix (Henikoff and Henikoff, Proteins 17:49-61 (1993)), which is currently the default choice for BLAST programs. BLOSUM62 is tailored for alignments of moderately diverged sequences and thus may not yield the best results under all conditions. Altschul, J. Mol. Biol. 36:290-300 (1993), describes a combination of three matrices to cover all contingencies. This may improve sensitivity, but at the expense of slower searches. In practice, a single BLOSUM62 matrix is often used but others (PAM40 and PAM250) may be attempted when additional analysis is necessary. Low PAM matrices are directed at detecting very strong but localized sequence similarities, whereas high PAM matrices are directed at detecting long but weak alignments between very distantly related sequences.

[0864] Homologues in other organisms are available that can be used for comparative sequence analysis. Multiple alignments are performed to study similarities and differences in a group of related sequences. CLUSTAL W is a multiple sequence alignment package that performs progressive multiple sequence alignments based on the method of Feng and Doolittle, J. Mol. Evol. 25:351-360 (1987). Each pair of sequences is aligned and the distance between each pair is calculated; from this distance matrix, a guide tree is calculated and all of the sequences are progressively aligned based on this tree. A feature of the program is its sensitivity to the effect of gaps on the alignment; gap penalties are varied to encourage the insertion of gaps in probable loop regions instead of in the middle of structured regions. Users can specify gap penalties, choose between a number of scoring matrices, or supply their own scoring matrix for both pairwise alignments and multiple alignments. CLUSTAL W for UNIX and VMS systems is available at: ftp.ebi.ac.uk. Another program is MACAW (Schuler et al., Proteins Struct. Func. Genet. 9:180-190 (1991), for which both Macintosh and Microsoft Windows versions are available. MACAW uses a graphical interface, provides a choice of several alignment algorithms and is available by anonymous ftp at: ncbi.nlm.nih.gov (directory/pub/macaw).

[0865] Sequence motifs are derived from multiple alignments and can be used to examine individual sequences or an entire database for subtle patterns. With motifs, it is sometimes possible to detect distant relationships that may not be demonstrable based on comparisons of primary sequences alone. Currently, the largest collection of sequence motifs in the world is PROSITE (Bairoch and Bucher, Nucleic Acid Research 22:3583-3589 (1994)). PROSITE may be accessed via either the ExPASy server on the World Wide Web or anonymous ftp site. Many commercial sequence analysis packages also provide search programs that use PROSITE data.

[0866] A resource for searching protein motifs is the BLOCKS E-mail server developed by Henikoff, Trends Biochem Sci. 18:267-268 (1993); Henikoff and Henikoff, Nucleic Acid Research 19:6565-6572 (1991); Henikoff and Henikoff, Proteins 17:49-61 (1993). BLOCKS searches a protein or nucleotide sequence against a database of protein motifs or “blocks.” Blocks are defined as short, ungapped multiple alignments that represent highly conserved protein patterns. The blocks themselves are derived from entries in PROSITE as well as other sources. Either a protein query or a nucleotide query can be submitted to the BLOCKS server; if a nucleotide sequence is submitted, the sequence is translated in all six reading frames and motifs are sought for these conceptual translations. Once the search is completed, the server will return a ranked list of significant matches, along with an alignment of the query sequence to the matched BLOCKS entries.

[0867] Conserved protein domains can be represented by two-dimensional matrices, which measure either the frequency or probability of the occurrences of each amino acid residue and deletions or insertions in each position of the domain. This type of model, when used to search against protein databases, is sensitive and usually yields more accurate results than simple motif searches. Two popular implementations of this approach are profile searches such as GCG program ProfileSearch and Hidden Markov Models (HMMs) (Krough et al., J. Mol. Biol. 235:1501-1531, (1994); Eddy, Current Opinion in Structural Biology 6:361-365, (1996)). In both cases, a large number of common protein domains have been converted into profiles, as present in the PROSITE library, or HHM models, as in the Pfam protein domain library (Sonnhammer et al., Proteins 28:405-420 (1997)). Pfam contains more than 500 HMM models for enzymes, transcription factors, signal transduction molecules and structural proteins. Protein databases can be queried with these profiles or HMM models, which will identify proteins containing the domain of interest. For example, HMMSW or HMMFS, two programs in a public domain package called HMMER (Sonnhammer et al., Proteins 28:405-420 (1997)) can be used.

[0868] PROSITE and BLOCKS represent collected families of protein motifs. Thus, searching these databases entails submitting a single sequence to determine whether or not that sequence is similar to the members of an established family. Programs working in the opposite direction compare a collection of sequences with individual entries in the protein databases. An example of such a program is the Motif Search Tool, or MoST (Tatusov et al., Proc. Natl. Acad. Sci. (U.S.A.) 91:12091-12095 (1994)). On the basis of an aligned set of input sequences, a weight matrix is calculated by using one of four methods (selected by the user). A weight matrix is simply a representation, position by position of how likely a particular amino acid will appear. The calculated weight matrix is then used to search the databases. To increase sensitivity, newly found sequences are added to the original data set, the weight matrix is recalculated and the search is performed again. This procedure continues until no new sequences are found.

### SUMMARY OF THE INVENTION

[0869] The present invention provides a substantially purified nucleic acid molecule where the nucleic acid molecule comprises a nucleic sequence selected from the group consisting of SEQ ID NO: 1 through SEQ ID NO: 294,310 or complements thereof or fragments of either.

[0870] The present invention provides a substantially purified first nucleic acid molecule, wherein the first nucleic molecule specifically hybridizes to a second nucleic acid molecule having a nucleic acid sequence selected from the group consisting of SEQ ID NO: 1 through SEQ ID NO: 294,310 or complements thereof.

[0871] The present invention provides a marker nucleic acid molecule capable of detecting the level, pattern, occurrence or absence of a biochemical process, wherein the biochemical process is selected from the group consisting of photosynthetic activity, carbohydrate metabolism, amino acid synthesis or degradation, plant hormone or other regulatory molecules, phenolic metabolism, lipid metabolism, biosynthesis of tetrapyrroles, phytochrome metabolism, carbon assimilation, glycolysis metabolism, gluconeogenesis metabolism, sucrose metabolism, starch metabolism, phosphogluconate metabolism, galactomannan metabolism, raffinose metabolism, complex carbohydrate metabolism, phytic acid metabolism, methionine biosynthesis, methionine degradation, lysine metabolism, arginine metabolism, proline metabolism, glutamate/glutamine metabolism, aspartate/asparagine metabolism, cytokinin metabolism, gibberellin metabolism, ethylene metabolism, jasmonic acid metabolism, transcription factors, R-genes, plant proteases, protein kinases, antifungal proteins, nitrogen transporters, sugar transporters, shikimate metabolism, isoflavone metabolism, phenylpropanoid metabolism, isoprenoid metabolism, β-oxidation lipid metabolism, fatty acid metabolism, glycolysis metabolism, gluconeogenesis metabolism, sucrose metabolism, sucrose catabolism, reductive pentose phosphate cycle, regulation of C3 photosynthesis, C4 pathway carbon assimilation, enzymes involved in the C4 pathway, carotenoid metabolism, tocopherol metabolism, phytosterol metabolism, brassinoid metabolism, and proline metabolism.

[0872] The present invention also provides a substantially purified protein or fragment thereof encoded by a first nucleic acid molecule which specifically hybridizes to a second nucleic acid molecule, the second nucleic acid molecule having a nucleic acid sequence selected from the group consisting of a complement of SEQ ID NO: 1 through SEQ ID NO:294,310.

[0873] The present invention also provides a substantially purified protein or fragment thereof encoded by nucleic acid molecule comprising a nucleic acid sequence selected from the group consisting of SEQ ID NO: 1 through SEQ ID NO:294,310.

[0874] The present invention also provides a purified antibody or fragment thereof which is capable of specifically binding to a protein or fragment thereof, wherein the protein or fragment thereof is encoded by a nucleic acid molecule comprising a nucleic acid sequence selected from the group consisting of SEQ ID NO: 1 through SEQ ID NO: 294,310.

[0875] The present invention also provides a transformed plant having a nucleic acid molecule which comprises: (A) an exogenous promoter region which functions in a plant cell to cause the production of a mRNA molecule; (B) a structural nucleic acid molecule comprising a nucleic acid sequence selected from the group consisting of SEQ ID NO: 1 through SEQ ID NO: 294,310; and (C) a 3′ non-translated sequence that functions in the plant cell to cause termination of transcription and addition of polyadenylated ribonucleotides to a 3′ end of the mRNA molecule.

[0876] The present invention also provides a transformed plant having a nucleic acid molecule which comprises: (A) an exogenous promoter region which functions in a plant cell to cause the production of a mRNA molecule; which is linked to (B) a transcribed nucleic acid molecule with a transcribed strand and a non-transcribed strand, wherein the transcribed strand is complementary to a nucleic acid molecule comprising a nucleic acid sequence selected from the group consisting of SEQ ID NO: 1 through SEQ ID NO: 294,310 or fragment thereof; which is linked to (C) a 3′ non-translated sequence that functions in plant cells to cause termination of transcription and addition of polyadenylated ribonucleotides to a 3′ end of the mRNA molecule.

[0877] The present invention provides a microarray comprising a collection of nucleic acid molecules wherein the collection of nucleic acid molecules are capable of detecting or predicting a component or attribute of a biochemical process or activity, where the biochemical process or activity are selected from the group consisting of photosynthetic activity, carbohydrate metabolism, amino acid synthesis or degradation, plant hormone or other regulatory molecules, phenolic metabolism, lipid metabolism, biosynthesis of tetrapyrroles, phytochrome metabolism, carbon assimilation, glycolysis metabolism, gluconeogenesis metabolism, sucrose metabolism, starch metabolism, phosphogluconate metabolism, galactomannan metabolism, raffinose metabolism, complex carbohydrate metabolism, phytic acid metabolism, methionine biosynthesis, methionine degradation, lysine metabolism, arginine metabolism, proline metabolism, glutamate/glutamine metabolism, aspartate/asparagine metabolism, cytokinin metabolism, gibberellin metabolism, ethylene metabolism, jasmonic acid metabolism, transcription factors, R-genes, plant proteases, protein kinases, antifungal proteins, nitrogen transporters, sugar transporters, shikimate metabolism, isoflavone metabolism, phenylpropanoid metabolism, isoprenoid metabolism, β-oxidation lipid metabolism, fatty acid metabolism, glycolysis metabolism, gluconeogenesis metabolism, sucrose metabolism, sucrose catabolism, reductive pentose phosphate cycle, regulation of C3 photosynthesis, C4 pathway carbon assimilation, enzymes involved in the C4 pathway, carotenoid metabolism, tocopherol metabolism, phytosterol metabolism, brassinoid metabolism, and proline metabolism.

[0878] The present invention also provides a method for determining a level or pattern of a plant protein in a plant cell or plant tissue comprising: (A) incubating, under conditions permitting nucleic acid hybridization, a marker nucleic acid molecule having a nucleic acid sequence selected from the group consisting of SEQ ID NO: 1 through SEQ ID NO: 294,310 or complements thereof or fragment of either, with a complementary nucleic acid molecule obtained from the plant cell or plant tissue, wherein nucleic acid hybridization between the marker nucleic acid molecule and the complementary nucleic acid molecule obtained from the plant cell or plant tissue permits the detection of the protein; (B) permitting hybridization between the marker nucleic acid molecule and the complementary nucleic acid molecule obtained from the plant cell or plant tissue; and (C) detecting the level or pattern of the complementary nucleic acid, wherein the detection of the complementary nucleic acid is predictive of the level or pattern of the protein.

[0879] The present invention also provides a method for determining a level or pattern of a plant protein in a plant cell or plant tissue comprising: (A) incubating, under conditions permitting nucleic acid hybridization, a marker acid molecule having a nucleic acid sequence selected from the group consisting of SEQ ID NO: 1 through SEQ ID NO: 294,310 or complements thereof or fragment of either, with a complementary nucleic acid molecule obtained from the plant cell or plant tissue, wherein nucleic acid hybridization between the marker nucleic acid molecule and the complementary nucleic acid molecule obtained from the plant cell or plant tissue permits the detection of the protein; (B) permitting hybridization between the marker nucleic acid molecule and the complementary nucleic acid molecule obtained from the plant cell or plant tissue; and (C) detecting the level or pattern of the complementary nucleic acid, wherein the detection of the complementary nucleic acid is predictive of the level or pattern of the protein.

[0880] The present invention also provides a method for determining a level or pattern of a protein in a plant cell or plant tissue under evaluation which comprises assaying the concentration of a molecule, whose concentration is dependent upon the expression of a gene, the gene specifically hybridizes to a nucleic acid molecule having a nucleic acid sequence selected from the group consisting of a complement of SEQ ID NO: 1 through SEQ ID NO: 294,310, in comparison to the concentration of that molecule present in a reference plant cell or a reference plant tissue with a known level or pattern of the protein, wherein the assayed concentration of the molecule is compared to the assayed concentration of the molecule in the reference plant cell or reference plant tissue with the known level or pattern of the protein.

[0881] The present invention provides a method of determining a mutation in a plant whose presence is predictive of a mutation affecting a level or pattern of a protein comprising the steps: (A) incubating, under conditions permitting nucleic acid hybridization, a marker nucleic acid selected from the group of marker nucleic acid molecules which specifically hybridize to a nucleic acid molecule having a nucleic acid sequence selected from the group of SEQ ID NO: 1 through SEQ ID NO: 294,310 or complements thereof and a complementary nucleic acid molecule obtained from the plant, wherein nucleic acid hybridization between the marker nucleic acid molecule and the complementary nucleic acid molecule obtained from the plant permits the detection of a polymorphism whose presence is predictive of a mutation affecting the level or pattern of the protein in the plant; (3) permitting hybridization between the marker nucleic acid molecule and the complementary nucleic acid molecule obtained from the plant; and (C) detecting the presence of the polymorphism, wherein the detection of the polymorphism is predictive of the mutation.

[0882] The present invention also provides a method of producing a plant containing an overexpressed protein comprising: (A) transforming the plant with a functional nucleic acid molecule, wherein the functional nucleic acid molecule comprises a promoter region, wherein the promoter region is linked to a structural region, wherein the structural region has a nucleic acid sequence selected from group consisting of SEQ ID NO: 1 through SEQ ID NO: 294,310; wherein the structural region is linked to a 3′ non-translated sequence that functions in the plant to cause termination of transcription and addition of polyadenylated ribonucleotides to a 3′ end of a mRNA molecule; and wherein the functional nucleic acid molecule results in overexpression of the protein; and (B) growing the transformed plant.

[0883] The present invention also provides a method of producing a plant containing reduced levels of a protein comprising: (A) transforming the plant with a functional nucleic acid molecule, wherein the functional nucleic acid molecule comprises a promoter region, wherein the promoter region is linked to a structural region, wherein the structural region comprises a nucleic acid molecule having a nucleic acid sequence selected from the group consisting of nucleic acid sequence selected from the group consisting of a complement of SEQ ID NO: 1 through SEQ ID NO: 294,310 or fragment thereof and the transcribed strand is complementary to an endogenous mRNA molecule; and wherein the transcribed nucleic acid molecule is linked to a 3′ non-translated sequence that functions in the plant cell to cause termination of transcription and addition of polyadenylated ribonucleotides to a 3′ end of a mRNA molecule; and (B) growing the transformed plant.

[0884] The present invention also provides a method of determining an association between a polymorphism and a plant trait comprising: (A) hybridizing a nucleic acid molecule specific for the polymorphism to genetic material of a plant, wherein the nucleic acid molecule has a nucleic acid sequence selected from the group consisting of SEQ ID NO: 1 through SEQ ID NO: 294,310 or complements thereof or fragment of either; and (B) calculating the degree of association between the polymorphism and the plant trait.

[0885] The present invention also provides a method of isolating a nucleic acid comprising: (A) incubating under conditions permitting nucleic acid hybridization, a first nucleic acid molecule comprising a nucleic acid sequence selected from the group consisting of SEQ ID NO: 1 through SEQ ID NO: 294,310 or complements thereof or fragment of either with a complementary second nucleic acid molecule obtained from a plant cell or plant tissue; (B) permitting hybridization between the first nucleic acid molecule and the second nucleic acid molecule obtained from the plant cell or plant tissue; and (C) isolating the second nucleic acid molecule.

### DETAILED DESCRIPTION OF THE INVENTION

[0886] Agents

[0887] (a) Nucleic Acid Molecules

[0888] Agents of the present invention include plant nucleic acid molecules and more preferably include maize and soybean nucleic acid molecules and more preferably include nucleic acid molecules of the maize genotypes B73 (Illinois Foundation Seeds, Champaign, Ill. U.S.A.), B73×Mo17 (Illinois Foundation Seeds, Champaign, Ill. U.S.A.), DK604 (Dekalb Genetics, Dekalb, Ill. U.S.A.), H99 (USDA Maize Genetic Stock Center, Urbana, Ill. U.S.A.), RX601 (Asgrow Seed Company, Des Moines, Iowa), Mo17 (USDA Maize Genetic Stock Center, Urbana, Ill. U.S.A.), and soybean types Asgrow 3244 (Asgrow Seed Company, Des Moines, Iowa), C1944 (United States Department of Agriculture (USDA) Soybean Germplasm Collection, Urbana, Ill. U.S.A.), Cristalina (USDA Soybean Germplasm Collection, Urbana, Ill. U.S.A.), FT108 (Monsoy, Brazil), Hartwig (USDA Soybean Germplasm Collection, Urbana, Ill. U.S.A.), BW211S Null (Tohoku University, Morioka, Japan), PI507354 (USDA Soybean Germplasm Collection, Urbana, Ill. U.S.A.), Asgrow A4922 (Asgrow Seed Company, Des Moines, Iowa U.S.A.), PI227687 (USDA Soybean Germplasm Collection, Urbana, Ill. U.S.A.), PI229358 (USDA Soybean Germplasm Collection, Urbana, Ill. U.S.A.) and Asgrow A3237 (Asgrow Seed Company, Des Moines, Iowa U.S.A.).

[0889] A subset of the nucleic acid molecules of the present invention includes nucleic acid molecules that are marker molecules. Another subset of the nucleic acid molecules of the present invention include nucleic acid molecules that encode a protein or fragment thereof. Another subset of the nucleic acid molecules of the present invention are EST molecules.

[0890] Fragment nucleic acid molecules may encode significant portion(s) of, or indeed most of, these nucleic acid molecules. Alternatively, the fragments may comprise smaller oligonucleotides (having from about 15 to about 250 nucleotide residues and more preferably, about 15 to about 30 nucleotide residues, or more preferably about 30 to about 50 nucleotide residues, or again more preferably about 50 to about 100 nucleotide residues).

[0891] The term “substantially purified,” as used herein, refers to a molecule separated from substantially all other molecules normally associated with it in its native state. More preferably a substantially purified molecule is the predominant species present in a preparation. A substantially purified molecule may be greater than 60% free, preferably 75% free, more preferably 90% free, and most preferably 95% free from the other molecules (exclusive of solvent) present in the natural mixture. The term “substantially purified” is not intended to encompass molecules present in their native state.

[0892] The agents of the present invention will preferably be “biologically active” with respect to either a structural attribute, such as the capacity of a nucleic acid to hybridize to another nucleic acid molecule, or the ability of a protein to be bound by an antibody (or to compete with another molecule for such binding). Alternatively, such an attribute may be catalytic and thus involve the capacity of the agent to mediate a chemical reaction or response.

[0893] The agents of the present invention may also be recombinant. As used herein, the term recombinant means any agent (e.g., DNA, peptide, etc.), that is, or results, however indirect, from human manipulation of a nucleic acid molecule.

[0894] It is understood that the agents of the present invention may be labeled with reagents that facilitate detection of the agent (e.g., fluorescent labels, Prober et al., Science 238:336-340 (1987); Albarella et al., EP 144914; chemical labels, Sheldon et al., U.S. Pat. No. 4,582,789; Albarella et al., U.S. Pat. No. 4,563,417; modified bases, Miyoshi et al., EP 119448).

[0895] It is further understood, that the present invention provides recombinant bacterial, mammalian, microbial, insect, fungal and plant cells and viral constructs comprising the agents of the present invention (See, for example, Exemplary Uses of the Agents of the Invention, Section (a) Plant Constructs and Plant Transformants; Section (b) Fungal Constructs and Fungal Transformants; Section (c) Mammalian Constructs and Transformed Mammalian Cells; Section (d) Insect Constructs and Transformed Insect Cells; Section (e) Bacterial Constructs and Transformed Bacterial Cells; and Section (f) Algal Constructs and Algal Transformants).

[0896] Nucleic acid molecules or fragments thereof of the present invention are capable of specifically hybridizing to other nucleic acid molecules under certain circumstances. As used herein, two nucleic acid molecules are said to be capable of specifically hybridizing to one another if the two molecules are capable of forming an anti-parallel, double-stranded nucleic acid structure. A nucleic acid molecule is said to be the “complement” of another nucleic acid molecule if they exhibit complete complementarity. As used herein, molecules are said to exhibit “complete complementarity” when every nucleotide of one of the molecules is complementary to a nucleotide of the other. Two molecules are said to be “minimally complementary” if they can hybridize to one another with sufficient stability to permit them to remain annealed to one another under at least conventional “low-stringency” conditions. Similarly, the molecules are said to be “complementary” if they can hybridize to one another with sufficient stability to permit them to remain annealed to one another under conventional “high-stringency” conditions. Conventional stringency conditions are described by Sambrook et al., Molecular Cloning, A Laboratory Manual, 2nd Ed., Cold Spring Harbor Press, Cold Spring Harbor, N.Y. (1989) and by Haymes et al., Nucleic Acid Hybridization, A Practical Approach, IRL Press, Washington, D.C. (1985). Departures from complete complementarity are therefore permissible, as long as such departures do not completely preclude the capacity of the molecules to form a double-stranded structure. Thus, in order for a nucleic acid molecule to serve as a primer or probe it need only be sufficiently complementary in sequence to be able to form a stable double-stranded structure under the particular solvent and salt concentrations employed.

[0897] Appropriate stringency conditions which promote DNA hybridization, for example, 6.0× sodium chloride/sodium citrate (SSC) at about 45° C., followed by a wash of 2.0×SSC at 50° C., are known to those skilled in the art or can be found in Current Protocols in Molecular Biology, John Wiley & Sons, N.Y. (1989), 6.3.1-6.3.6. For example, the salt concentration in the wash step can be selected from a low stringency of about 2.0×SSC at 50° C. to a high stringency of about 0.2×SSC at 50° C. In addition, the temperature in the wash step can be increased from low stringency conditions at room temperature, about 22° C., to high stringency conditions at about 65° C. Both temperature and salt may be varied, or either the temperature or the salt concentration may be held constant while the other variable is changed.

[0898] In a preferred embodiment, a nucleic acid of the present invention will specifically hybridize to one or more of the nucleic acid molecules set forth in SEQ ID NO: 1 through SEQ ID NO: 294,310 or complements thereof under moderately stringent conditions, for example at about 2.0×SSC and about 65° C.

[0899] In a particularly preferred embodiment, a nucleic acid of the present invention will include those nucleic acid molecules that specifically hybridize to one or more of the nucleic acid molecules set forth in SEQ ID NO: 1 through SEQ ID NO: 294,310 or complements thereof under high stringency conditions such as 0.2×SSC and about 65° C.

[0900] In one aspect of the present invention, the nucleic acid molecules of the present invention comprise one or more of the nucleic acid sequences set forth in SEQ ID NO: 1 through SEQ ID NO: 294,310 or complements thereof or fragments of either. In another aspect of the present invention, one or more of the nucleic acid molecules of the present invention share between 100% and 90% sequence identity with one or more of the nucleic acid sequences set forth in SEQ ID NO: 1 through SEQ ID NO: 294,310 or complements thereof or fragments of either. In a further aspect of the present invention, one or more of the nucleic acid molecules of the present invention share between 100% and 95% sequence identity with one or more of the nucleic acid sequences set forth in SEQ ID NO: 1 through SEQ ID NO: 294,310 or complements thereof or fragments of either. In a more preferred aspect of the present invention, one or more of the nucleic acid molecules of the present invention share between 100% and 98% sequence identity with one or more of the nucleic acid sequences set forth in SEQ ID NO: 1 through SEQ ID NO: 294,310 complements thereof or fragments of either. In an even more preferred aspect of the present invention, one or more of the nucleic acid molecules of the present invention share between 100% and 99% sequence identity with one or more of the sequences set forth in SEQ ID NO: 1 through SEQ ID NO: 294,310 or complements thereof.

[0901] In a further more preferred aspect of the present invention, one or more of the nucleic acid molecules of the present invention exhibit 100% sequence identity with a nucleic acid molecule present within MONN01, SATMON001, SATMON003 through SATMON014, SATMON016, SATMON017, SATMON019 through SATMON031, SATMON033, SATMON034, SATMONN01, SATMONN04 through SATMONN06, LIB36, LIB83 through LIB84, CMz029 through CMz031, CMz033 through CMz037, CMz039 through CMz042, CMz044 through CMz045, CMz047 through CMz050, SOYMON001 through SOYMON038, Soy51 through Soy56, Soy58 through Soy62, Soy65 through Soy77, LIB3054, LIB3087, and LIB3094 (Monsanto Company, St. Louis, Mo. U.S.A.).

[0902] (i) Nucleic Acid Molecules Encoding Proteins or Fragments Thereof

[0903] Nucleic acid molecules of the present invention can comprise sequences that encode a protein or fragment thereof. Such proteins or fragments thereof include homologues of known proteins in other organisms.

[0904] In a preferred embodiment of the present invention, a maize or soybean protein or fragment thereof of the present invention is a homologue of another plant protein. In another preferred embodiment of the present invention, a maize or soybean protein or fragment thereof of the present invention is a homologue of a fungal protein. In another preferred embodiment of the present invention, a maize or soybean protein of the present invention is a homologue of mammalian protein. In another preferred embodiment of the present invention, a maize or soybean protein or fragment thereof of the present invention is a homologue of a bacterial protein. In another preferred embodiment of the present invention, a soybean protein or fragment thereof of the present invention is a homologue of a maize protein. In another preferred embodiment of the present invention, a maize protein or fragment thereof of the present invention is a homologue of a soybean protein.

[0905] In a preferred embodiment of the present invention, the nucleic molecule of the present invention encodes a protein or fragment thereof where the protein and/or nucleic acid molecule exhibits a BLAST probability score of greater than 1E-12, preferably a BLAST probability score of between about 1E-30 and about 1E-12, even more preferably a BLAST probability score of greater than 1E-30 with its homologue.

[0906] In another preferred embodiment of the present invention, the nucleic acid molecule encoding a protein or fragment thereof and/or protein or fragment thereof exhibits a % identity with its homologue of between about 25% and about 40%, more preferably of between about 40 and about 70%, even more preferably of between about 70% and about 90% and even more preferably between about 90% and 99%. In another preferred embodiment of the present invention, the nucleic acid molecule encoding a protein or fragment thereof and/or a protein or fragment thereof exhibits a % identity with its homologue of 100%.

[0907] In a preferred embodiment of the present invention, the nucleic molecule of the present invention encodes a protein or fragment thereof where the protein and/or nucleic acid molecule exhibits a BLAST score of greater than 120, preferably a BLAST score of between about 1450 and about 120, even more preferably a BLAST score of greater than 1450 with its homologue.

[0908] Nucleic acid molecules of the present invention also include non-maize and non-soybean homologues. Preferred non-maize and non-soybean plant homologues are selected from the group consisting of Arabidopsis, alfalfa, barley, Brassica, broccoli, cabbage, citrus, cotton, garlic, oat, oilseed rape, onion, canola, flax, an ornamental plant, pea, peanut, pepper, potato, rice, rye, sorghum, strawberry, sugarcane, sugarbeet, tomato, wheat, poplar, pine, fir, eucalyptus, apple, lettuce, lentils, grape, banana, tea, turf grasses, sunflower, oil palm and Phaseolus.

[0909] In a preferred embodiment, nucleic acid molecules having SEQ ID NO: 1 through SEQ ID NO: 294,310 or complements and fragments of either can be utilized to obtain such homologues.

[0910] The degeneracy of the genetic code, which allows different nucleic acid sequences to code for the same protein or peptide, is known in the literature (U.S. Pat. No. 4,757,006).

[0911] In an aspect of the present invention, one or more of the nucleic acid molecules of the present invention differ in nucleic acid sequence from those encoding protein or fragment thereof in SEQ ID NO: 1 through SEQ ID NO: 294,310 due to the degeneracy in the genetic code in that they encode the same protein but differ in nucleic acid sequence.

[0912] In another further aspect of the present invention, nucleic acid molecules of the present invention can comprise sequences, which differ from those encoding a protein or fragment thereof in SEQ ID NO: 1 through SEQ ID NO: 294,310 due to fact that the different nucleic acid sequence encodes a protein having one or more conservative amino acid changes. It is understood that codons capable of coding for such conservative amino acid substitutions are known in the art.

[0913] It is well known in the art that one or more amino acids in a native sequence can be substituted with another amino acid(s), the charge and polarity of which are similar to that of the native amino acid, i.e., a conservative amino acid substitution, resulting in a silent change. Conserved substitutes for an amino acid within the native polypeptide sequence can be selected from other members of the class to which the naturally occurring amino acid belongs. Amino acids can be divided into the following four groups: (1) acidic amino acids, (2) basic amino acids, (3) neutral polar amino acids, and (4) neutral nonpolar amino acids. Representative amino acids within these various groups include, but are not limited to, (1) acidic (negatively charged) amino acids such as aspartic acid and glutamic acid; (2) basic (positively charged) amino acids such as arginine, histidine, and lysine; (3) neutral polar amino acids such as glycine, serine, threonine, cysteine, cystine, tyrosine, asparagine, and glutamine; and (4) neutral nonpolar (hydrophobic) amino acids such as alanine, leucine, isoleucine, valine, proline, phenylalanine, tryptophan, and methionine.

[0914] Conservative amino acid changes within the native polypeptides sequence can be made by substituting one amino acid within one of these groups with another amino acid within the same group. Biologically functional equivalents of the proteins or fragments thereof of the present invention can have 10 or fewer conservative amino acid changes, more preferably seven or fewer conservative amino acid changes, and most preferably five or fewer conservative amino acid changes. The encoding nucleotide sequence will thus have corresponding base substitutions, permitting it to encode biologically functional equivalent forms of the proteins or fragments of the present invention.

[0915] It is understood that certain amino acids may be substituted for other amino acids in a protein structure without appreciable loss of interactive binding capacity with structures such as, for example, antigent-binding regions of antibodies or binding sites on substrate molecules. Because it is the interactive capacity and nature of a protein that defines that protein's biological functional activity, certain amino acid sequence substitutions can be made in a protein sequence and, of course, its underlying DNA coding sequence and, nevertheless, obtain a protein with like properties. It is thus contemplated by the inventors that various changes may be made in the peptide sequences of the proteins or fragments of the present invention, or corresponding DNA sequences that encode said peptides, without appreciable loss of their biological utility or activity. It is understood that codons capable of coding for such amino acid changes are known in the art.

[0916] In making such changes, the hydropathic index of amino acids may be considered. The importance of the hydropathic amino acid index in conferring interactive biological function on a protein is generally understood in the art (Kyte and Doolittle, J. Mol. Biol. 157, 105-132 (1982), herein incorporated by reference in its entirety). It is accepted that the relative hydropathic character of the amino acid contributes to the secondary structure of the resultant protein, which in turn defines the interaction of the protein with other molecules, for example, enzymes, substrates, receptors, DNA, antibodies, antigens, and the like.

[0917] Each amino acid has been assigned a hydropathic index on the basis of its hydrophobicity and charge characteristics (Kyte and Doolittle, 1982); these are isoleucine (+4.5), valine (+4.2), leucine (+3.8), phenylalanine (+2.8), cysteine/cystine (+2.5), methionine (+1.9), alanine (+1.8), glycine (−0.4), threonine (−0.7), serine (−0.8), tryptophan (−0.9), tyrosine (−1.3), proline (−1.6), histidine (−3.2), glutamate (−3.5), glutamine (−3.5), aspartate (−3.5), asparagine (−3.5), lysine (−3.9), and arginine (4.5).

[0918] In making such changes, the substitution of amino acids whose hydropathic indices are within ±2 is preferred, those which are within ±1 are particularly preferred, and those within ±0.5 are even more particularly preferred.

[0919] It is also understood in the art that the substitution of like amino acids can be made effectively on the basis of hydrophilicity. U.S. Pat. No. 4,554,101, incorporated herein by reference in its entirety, states that the greatest local average hydrophilicity of a protein, as govern by the hydrophilicity of its adjacent amino acids, correlates with a biological property of the protein.

[0920] As detailed in U.S. Pat. No. 4,554,101, the following hydrophilicity values have been assigned to amino acid residues: arginine (+3.0), lysine (+3.0), aspartate (+3.0±1), glutamate (+3.0±1), serine (+0.3), asparagine (+0.2), glutamine (+0.2), glycine (0), threonine (−0.4), proline (−0.5±1), alanine (−0.5), histidine (−0.5), cysteine (−1.0), methionine (−1.3), valine (−1.5), leucine (−1.8), isoleucine (−1.8), tyrosine (−2.3), phenylalanine (−2.5), and tryptophan (−3.4). In making such changes, the substitution of amino acids whose hydrophilicity values are within ±2 is preferred, those which are within ±1 are particularly preferred, and those within ±0.5 are even more particularly preferred.

[0921] In a further aspect of the present invention, one or more of the nucleic acid molecules of the present invention differ in nucleic acid sequence from those encoding a protein or fragment thereof set forth in SEQ ID NO: 1 through SEQ ID NO: 294,310 or fragment thereof due to the fact that one or more codons encoding an amino acid has been substituted for a codon that encodes a nonessential substitution of the amino acid originally encoded.

[0922] A nucleic acid molecule of the present invention can also encode a homologue of a maize or soybean protein. As used herein a homologue protein molecule or fragment thereof is a counterpart protein molecule or fragment thereof in a second species (e.g., maize methionine adenosyltransferase protein is a homologue of Arabidopsis' methionine adenosyltransferase protein).

[0923] A homologue can also be generated by molecular evolution or DNA shuffling techniques, so that the molecule retains at least one functional or structure characteristic of the original (see, for example, U.S. Pat. No. 5,811,238).

[0924] (ii) Nucleic Acid Molecule Markers and Probes

[0925] One aspect of the present invention concerns nucleic acid molecules of the present invention that can act as markers, for example, those nucleic acid molecules SEQ ID NO: 1 through SEQ ID NO: 294,310 or complements thereof or fragments of either that can act as markers or one or more of the marker molecules encoded by other nucleic acid agents of the present invention.

[0926] In a preferred embodiment, the level, pattern, occurrence and/or absence of a nucleic acid molecule and/or collection of nucleic acid molecules of the present invention is a marker, for example, for a developmental, commercial or non-commercially valuable trait such as yield or an environmental condition or treatment. It is noted that many agronomic traits can affect yield. These include, without limitation, pod position on the plant, number of internodes, incidence of pod shatter, grain size, efficiency of nodulation and nitrogen fixation, efficiency of nutrient assimilation, resistance to biotic and abiotic stress, carbon assimilation, plant architecture, resistance to lodging, percent seed germination, seedling vigor, and juvenile traits.

[0927] As used herein, a “collection of nucleic acid molecules” is a population of nucleic acid molecules where at least two of the nucleic acid molecules differ, at least in part, in their nucleic acid sequence. It is understood, that as used herein, an individual species within a collection of nucleic acid molecules may be physically separate or alternatively not physically separate from one or more other species within the collection of nucleic acid molecules. An example of a situation where individual species may be physically separate but considered a collection of nucleic acid molecules is where more than two species are present on a single support such as a nylon membrane or a glass but occupy a different position on such support. Examples of situations where individual species are physically separate on a support include microarrays.

[0928] As used herein, where a collection of nucleic acids is a marker for a particular attribute, the level, pattern, occurrence and/or absence of the nucleic acid molecules associated with the attribute are not required to be the same between species of the collection. For example, the increase in the level of a species when in combination with the decrease in a second species could be diagnostic for a particular attribute.

[0929] In an even more preferred embodiment of the present invention, the level, pattern, occurrence and/or absence of a nucleic acid molecule and/or collection of nucleic acid molecules of the present invention is a marker for a biochemical process or activity where the process or activity is preferably selected from photosynthetic activity, carbohydrate metabolism, amino acid synthesis or degradation, plant hormone or other regulatory molecules, phenolic metabolism, and lipid metabolism, and more preferably selected from the group consisting of biosynthesis of tetrapyrroles, phytochrome metabolism, carbon assimilation, glycolysis and gluconeogenesis metabolism, sucrose metabolism, starch metabolism, phosphogluconate metabolism, galactomannan metabolism, raffinose metabolism, complex carbohydrate synthesis/degradation, phytic acid metabolism, methionine biosynthesis, methionine degradation, lysine metabolism, arginine metabolism, proline metabolism, glutamate/glutamine metabolism, aspartate/asparagine metabolism, cytokinin metabolism, gibberellin metabolism, ethylene metabolism, jasmonic acid synthesis metabolism, transcription factors, R-genes, plant proteases, protein kinases, antifungal proteins, nitrogen and sugar transporters, shikimate metabolism, isoflavone metabolism, phenylpropanoid metabolism, isoprenoid metabolism, β-oxidation lipid metabolism, and fatty acid metabolism, and even more preferably selected from the group consisting of: glycolysis metabolism, gluconeogenesis metabolism, sucrose metabolism, sucrose catabolism, reductive pentose phosphate cycle, regulation of C3 photosynthesis, C4 pathway carbon assimilation, enzymes involved in the C4 pathway, carotenoid metabolism, tocopherol metabolism, phytosterol metabolism, brassinoid metabolism, and proline metabolism.

[0930] Genetic markers of the present invention include “dominant” or “codominant” markers. “Codominant markers” reveal the presence of two or more alleles (two per diploid individual) at a locus. “Dominant markers” reveal the presence of only a single allele per locus. The presence of the dominant marker phenotype (e.g., a band of DNA) is an indication that one allele is present in either the homozygous or heterozygous condition. The absence of the dominant marker phenotype (e.g., absence of a DNA band) is merely evidence that “some other” undefined allele is present. In the case of populations where individuals are predominantly homozygous and loci are predominately dimorphic, dominant and codominant markers can be equally valuable. As populations become more heterozygous and multi-allelic, codominant markers often become more informative of the genotype than dominant markers. Marker molecules can be, for example, capable of detecting polymorphisms such as single nucleotide polymorphisms (SNPs).

[0931] SNPs are single base changes in genomic DNA sequence. They occur at greater frequency and are spaced with a greater uniformly throughout a genome than other reported forms of polymorphism. The greater frequency and uniformity of SNPs means that there is greater probability that such a polymorphism will be found near or in a genetic locus of interest than would be the case for other polymorphisms. SNPs are located in protein-coding regions and noncoding regions of a genome. Some of these SNPs may result in defective or variant protein expression (e.g., as a results of mutations or defective splicing). Analysis (genotyping) of characterized SNPs can require only a plus/minus assay rather than a lengthy measurement, permitting easier automation.

[0932] SNPs can be characterized using any of a variety of methods. Such methods include the direct or indirect sequencing of the site, the use of restriction enzymes (Botstein et al., Am. J. Hum. Genet. 32:314-331 (1980); Konieczny and Ausubel, Plant J. 4:403-410 (1993)), enzymatic and chemical mismatch assays (Myers et al., Nature 313:495-498 (1985)), allele-specific PCR (Newton et al., Nucl. Acids Res. 17:2503-2516 (1989); Wu et al., Proc. Natl. Acad. Sci. (U.S.A.) 86:2757-2760 (1989)), ligase chain reaction (Barany, Proc. Natl. Acad. Sci. (U.S.A.) 88:189-193 (1991)), single-strand conformation polymorphism analysis (Labrune et al., Am. J. Hum. Genet. 48:1115-1120 (1991)), primer-directed nucleotide incorporation assays (Kuppuswami et al., Proc. Natl. Acad. Sci. USA 88:1143-1147 (1991)), dideoxy fingerprinting (Sarkar et al., Genomics 13:441-443 (1992)), solid-phase ELISA-based oligonucleotide ligation assays (Nikiforov et al., Nucl. Acids Res. 22:4167-4175 (1994)), oligonucleotide fluorescence-quenching assays (Livak et al., PCR Methods Appl. 4:357-362 (1995)), 5′-nuclease allele-specific hybridization TaqMan assay (Livak et al., Nature Genet. 9:341-342 (1995)), template-directed dye-terminator incorporation (TDI) assay (Chen and Kwok, Nucl. Acids Res. 25:347-353 (1997)), allele-specific molecular beacon assay (Tyagi et al., Nature Biotech. 16:49-53 (1998)), PinPoint assay (Haff and Smirnov, Genome Res. 7:378-388 (1997)) and dCAPS analysis (Neff et al., Plant J. 14:387-392 (1998)).

[0933] Additional markers, such as AFLP markers, RFLP markers and RAPD markers, can be utilized (Walton, Seed World 22-29 (July, 1993); Burow and Blake, Molecular Dissection of Complex Traits, 13-29, Paterson (ed.), CRC Press, New York (1988)). DNA markers can be developed from nucleic acid molecules using restriction endonucleases, the PCR and/or DNA sequence information. RFLP markers result from single base changes or insertions/deletions. These codominant markers are highly abundant in plant genomes, have a medium level of polymorphism and are developed by a combination of restriction endonuclease digestion and Southern blotting hybridization. CAPS are similarly developed from restriction nuclease digestion but only of specific PCR products. These markers are also codominant, have a medium level of polymorphism and are highly abundant in the genome. The CAPS result from single base changes and insertions/deletions.

[0934] Another marker type, RAPDs, are developed from DNA amplification with random primers and result from single base changes and insertions/deletions in plant genomes. They are dominant markers with a medium level of polymorphisms and are highly abundant. AFLP markers require using the PCR on a subset of restriction fragments from extended adapter primers. These markers are both dominant and codominant are highly abundant in genomes and exhibit a medium level of polymorphism.

[0935] SSRs require DNA sequence information. These codominant markers result from repeat length changes, are highly polymorphic and do not exhibit as high a degree of abundance in the genome as CAPS, AFLPs and RAPDs SNPs also require DNA sequence information. These codominant markers result from single base substitutions. They are highly abundant and exhibit a medium of polymorphism (Rafalski et al., In: Nonmammalian Genomic Analysis, Birren and Lai (ed.), Academic Press, San Diego, Calif., pp. 75-134 (1996)). It is understood that a nucleic acid molecule of the present invention may be used as a marker.

[0936] A PCR probe is a nucleic acid molecule capable of initiating a polymerase activity while in a double-stranded structure to with another nucleic acid. Various methods for determining the structure of PCR probes and PCR techniques exist in the art. Computer generated searches using programs such as Primer3 (www-genome.wi.mit.edu/cgi-bin/primer/primer3.cgi), STSPipeline (www-genome.wi.mit.edu/cgi-bin/www-STS Pipeline), or GeneUp (Pesole et al., BioTechniques 25:112-123 (1998)), for example, can be used to identify potential PCR primers.

[0937] It is understood that a fragment of one or more of the nucleic acid molecules of the present invention may be a probe and preferably a PCR probe.

[0938] (b) Protein and Peptide Molecules

[0939] A class of agents comprises one or more of the protein or fragments thereof or peptide molecules encoded by SEQ ID NO: 1 through SEQ ID NO: 294,310 or one or more of the protein or fragment thereof and peptide molecules encoded by other nucleic acid agents of the present invention. As used herein, the term “protein molecule” or “peptide molecule” includes any molecule that comprises five or more amino acids. It is well known in the art that proteins may undergo modification, including post-translational modifications, such as, but not limited to, disulfide bond formation, glycosylation, phosphorylation, or oligomerization. Thus, as used herein, the term “protein molecule” or “peptide molecule” includes any protein molecule that is modified by any biological or non-biological process. The terms “amino acid” and “amino acids” refer to all naturally occurring L-amino acids. This definition is meant to include norleucine, ornithine, homocysteine and homoserine.

[0940] Non-limiting examples of the protein or fragment molecules of the present invention are a protein or fragment thereof encoded by: SEQ ID NO: 1 through SEQ ID NO: 294,310 or fragment thereof.

[0941] One or more of the protein or fragment of peptide molecules may be produced via chemical synthesis, or more preferably, by expressing in a suitable bacterial or eukaryotic host. Suitable methods for expression are described by Sambrook et al., (In: Molecular Cloning, A Laboratory Manual, 2nd Edition, Cold Spring Harbor Press, Cold Spring Harbor, N.Y. (1989)), or similar texts. For example, the protein may be expressed in, for example, plant, fungal, insect, mammalian and/or bacterial cells (See, for example, Exemplary Uses of the Agents of the Invention, Section (a) Plant Constructs and Plant Transformants; Section (b) Fungal Constructs and Fungal Transformants; Section (c) Mammalian Constructs and Transformed Mammalian Cells; Section (d) Insect Constructs and Transformed Insect Cells; Section (e) Bacterial Constructs and Transformed Bacterial Cells; and Section (f) Algal Constructs and Algal Transformants).

[0942] A “protein fragment” is a peptide or polypeptide molecule whose amino acid sequence comprises a subset of the amino acid sequence of that protein. A protein or fragment thereof that comprises one or more additional peptide regions not derived from that protein is a “fusion” protein. Such molecules may be derivatized to contain carbohydrate or other moieties (such as keyhole limpet hemocyanin, etc.). Fusion protein or peptide molecules of the present invention are preferably produced via recombinant means.

[0943] Another class of agents comprise protein or peptide molecules or fragments or fusions thereof encoded by SEQ ID NO: 1 through SEQ ID NO: 294,310 or fragments thereof in which conservative, non-essential or non-relevant amino acid residues have been added, replaced or deleted. Computerized means for designing modifications in protein structure are known in the art (Dahiyat and Mayo, Science 278:82-87 (1997)).

[0944] The protein molecules of the present invention include plant homologue proteins. Plant homologue proteins of the present invention also include non-maize and non-soybean plant homologues. Preferred non-maize, non-soybean, plant homologues are selected from the group consisting of Arabidopsis, alfalfa, barley, Brassica, broccoli, cabbage, citrus, cotton, garlic, oat, oilseed rape, onion, canola, flax, an ornamental plant, pea, peanut, pepper, potato, rice, rye, sorghum, strawberry, sugarcane, sugarbeet, tomato, wheat, poplar, pine, fir, eucalyptus, apple, lettuce, lentils, grape, banana, tea, turf grasses, sunflower, oil palm and Phaseolus.

[0945] Particularly preferred species for use for the isolation of homologues would include, barley, cotton, oat, oilseed rape, rice, canola, ornamentals, sugarcane, sugarbeet, tomato, potato, wheat and turf grasses. Such a homologue can be obtained by any of a variety of methods. Most preferably, as indicated above, one or more of the disclosed sequences (SEQ ID NO: 1 through SEQ ID NO: 294,310 or complements thereof or fragments of either) will be used to define a pair of primers that may be used to isolate the homologue-encoding nucleic acid molecules from any desired species. Such molecules can be expressed to yield homologues by recombinant means.

[0946] (c) Antibodies

[0947] One aspect of the present invention concerns antibodies, single-chain antigen binding molecules, or other proteins that specifically bind to one or more of the protein or peptide molecules of the present invention and their homologues, fusions or fragments. Such antibodies may be used to quantitatively or qualitatively detect the protein or peptide molecules of the present invention. As used herein, an antibody or peptide is said to “specifically bind” to a protein or peptide molecule of the present invention if such binding is not competitively inhibited by the presence of non-related molecules.

[0948] Nucleic acid molecules that encode all or part of the protein of the present invention can be expressed, via recombinant means, to yield protein or peptides that can in turn be used to elicit antibodies that are capable of binding the expressed protein or peptide. Such antibodies may be used in immunoassays for that protein. Such protein-encoding molecules, or their fragments may be a “fusion” molecule (i.e., a part of a larger nucleic acid molecule) such that, upon expression, a fusion protein is produced. It is understood that any of the nucleic acid molecules of the present invention may be expressed, via recombinant means, to yield proteins or peptides encoded by these nucleic acid molecules.

[0949] The antibodies that specifically bind proteins and protein fragments of the present invention may be polyclonal or monoclonal and may comprise intact immunoglobulins, or antigen binding portions of immunoglobulins fragments (such as (F(ab′), F(ab′)₂), or single-chain immunoglobulins producible, for example, via recombinant means. It is understood that practitioners are familiar with the standard resource materials which describe specific conditions and procedures for the construction, manipulation and isolation of antibodies (see, for example, Harlow and Lane, In: Antibodies: A Laboratory Manual, Cold Spring Harbor Press, Cold Spring Harbor, N.Y. (1988)).

[0950] Murine monoclonal antibodies are particularly preferred. BALB/c mice are preferred for this purpose, however, equivalent strains may also be used. The animals are preferably immunized with approximately 25 μg of purified protein (or fragment thereof) that has been emulsified in a suitable adjuvant (such as TiterMax adjuvant (Vaxcel, Norcross, Ga.)). Immunization is preferably conducted at two intramuscular sites, one intraperitoneal site and one subcutaneous site at the base of the tail. An additional i.v. injection of approximately 25 μg of antigen is preferably given in normal saline three weeks later. After approximately 11 days following the second injection, the mice may be bled and the blood screened for the presence of anti-protein or peptide antibodies. Preferably, a direct binding Enzyme-Linked Immunoassay (ELISA) is employed for this purpose.

[0951] More preferably, the mouse having the highest antibody titer is given a third i.v. injection of approximately 25 μg of the same protein or fragment. The splenic leukocytes from this animal may be recovered 3 days later and then permitted to fuse, most preferably, using polyethylene glycol, with cells of a suitable myeloma cell line (such as, for example, the P3X63Ag8.653 myeloma cell line). Hybridoma cells are selected by culturing the cells under “HAT” (hypoxanthine-aminopterin-thymine) selection for about one week. The resulting clones may then be screened for their capacity to produce monoclonal antibodies (“mAbs”), preferably by direct ELISA.

[0952] In one embodiment, anti-protein or peptide monoclonal antibodies are isolated using a fusion of a protein or peptide of the present invention, or conjugate of a protein or peptide of the present invention, as immunogens. Thus, for example, a group of mice can be immunized using a fusion protein emulsified in Freund's complete adjuvant (e.g. approximately 50 μg of antigen per immunization). At three week intervals, an identical amount of antigen is emulsified in Freund's incomplete adjuvant and used to immunize the animals. Ten days following the third immunization, serum samples are taken and evaluated for the presence of antibody. If antibody titers are too low, a fourth booster can be employed. Polysera capable of binding the protein or peptide can also be obtained using this method.

[0953] In a preferred procedure for obtaining monoclonal antibodies, the spleens of the above-described immunized mice are removed, disrupted and immune splenocytes are isolated over a ficoll gradient. The isolated splenocytes are fused, using polyethylene glycol with BALB/c-derived HGPRT (hypoxanthine guanine phosphoribosyl transferase) deficient P3x63xAg8.653 plasmacytoma cells. The fused cells are plated into 96 well microtiter plates and screened for hybridoma fusion cells by their capacity to grow in culture medium supplemented with hypothanthine, aminopterin and thymidine for approximately 2-3 weeks.

[0954] Hybridoma cells that arise from such incubation are preferably screened for their capacity to produce an immunoglobulin that binds to a protein of interest. An indirect ELISA may be used for this purpose. In brief, the supernatants of hybridomas are incubated in microtiter wells that contain immobilized protein. After washing, the titer of bound immunoglobulin can be determined using, for example, a goat anti-mouse antibody conjugated to horseradish peroxidase. After additional washing, the amount of immobilized enzyme is determined (for example through the use of a chromogenic substrate). Such screening is performed as quickly as possible after the identification of the hybridoma in order to ensure that a desired clone is not overgrown by non-secreting neighbor cells. Desirably, the fusion plates are screened several times since the rates of hybridoma growth vary. In a preferred sub-embodiment, a different antigenic form may be used to screen the hybridoma. Thus, for example, the splenocytes may be immunized with one immunogen, but the resulting hybridomas can be screened using a different immunogen. It is understood that any of the protein or peptide molecules of the present invention may be used to raise antibodies.

[0955] As discussed below, such antibody molecules or their fragments may be used for diagnostic purposes. Where the antibodies are intended for diagnostic purposes, it may be desirable to derivatize them, for example with a ligand group (such as biotin) or a detectable marker group (such as a fluorescent group, a radioisotope or an enzyme).

[0956] The ability to produce antibodies that bind the protein or peptide molecules of the present invention permits the identification of mimetic compounds of those molecules. A “mimetic compound” is a compound that is not that compound, or a fragment of that compound, but which nonetheless exhibits an ability to specifically bind to antibodies directed against that compound.

[0957] It is understood that any of the agents of the present invention can be substantially purified and/or be biologically active and/or recombinant.

Exemplary Uses of the Agents of the Invention

[0958] Nucleic acid molecules and fragments thereof of the present invention may be employed to obtain other nucleic acid molecules from the same species (e.g., ESTs or fragments thereof from maize may be utilized to obtain other nucleic acid molecules from maize). Such nucleic acid molecules include the nucleic acid molecules that encode the complete coding sequence of a protein and promoters and flanking sequences of such molecules. In addition, such nucleic acid molecules include nucleic acid molecules that encode for other isozymes or gene family members. Such molecules can be readily obtained by using the above-described nucleic acid molecules or fragments thereof to screen cDNA or genomic libraries obtained from maize or soybean. Methods for forming such libraries are well known in the art.

[0959] Nucleic acid molecules and fragments thereof of the present invention may also be employed to obtain nucleic acid homologues. Such homologues include the nucleic acid molecule of other plants or other organisms (e.g., Arabidopsis, alfalfa, barley, broccoli, cabbage, citrus, cotton, garlic, oat, oilseed rape, onion, canola, flax, an ornamental plant, pea, peanut, pepper, potato, rice, rye, sorghum, strawberry, sugarcane, sugarbeet, tomato, wheat, poplar, pine, fir, eucalyptus, apple, lettuce, lentils, grape, banana, tea, turf grasses, sunflower, oil palm, Phaseolus, etc.) including the nucleic acid molecules that encode, in whole or in part, protein homologues of other plant species or other organisms, sequences of genetic elements such as promoters and transcriptional regulatory elements.

[0960] Such molecules can be readily obtained by using the above-described nucleic acid molecules or fragments thereof to screen cDNA or genomic libraries obtained from such plant species. Methods for forming such libraries are well known in the art. Such homologue molecules may differ in their nucleotide sequences from those found in one or more of SEQ ID NO: 1 through SEQ ID NO: 294,310 or complements thereof or fragments of either because complete complementarity is not needed for stable hybridization. The nucleic acid molecules of the present invention therefore also include molecules that, although capable of specifically hybridizing with the nucleic acid molecules may lack “complete complementarity.”

[0961] Any of a variety of methods may be used to obtain one or more of the above-described nucleic acid molecules (Zamechik et al., Proc. Natl. Acad. Sci. (U.S.A.) 83:4143-4146 (1986); Goodchild et al., Proc. Natl. Acad. Sci. (U.S.A.) 85:5507-5511 (1988); Wickstrom et al., Proc. Natl. Acad. Sci. (U.S.A.) 85:1028-1032 (1988); Holt et al., Molec. Cell. Biol. 8:963-973 (1988); Gerwirtz et al., Science 242:1303-1306 (1988); Anfossi et al., Proc. Natl. Acad. Sci. (U.S.A.) 86:3379-3383 (1989); Becker et al., EMBO J. 8:3685-3691 (1989)). Automated nucleic acid synthesizers may be employed for this purpose. In lieu of such synthesis, the disclosed nucleic acid molecules may be used to define a pair of primers that can be used with the polymerase chain reaction (Mullis et al., Cold Spring Harbor Symp. Quant. Biol. 51:263-273 (1986); Erlich et al., European Patent 50,424; European Patent 84,796; European Patent 258,017; European Patent 237,362; Mullis, European Patent 201,184; Mullis et al., U.S. Pat. No. 4,683,202; Erlich, U.S. Pat. No. 4,582,788; and Saiki et al., U.S. Pat. No. 4,683,194) to amplify and obtain any desired nucleic acid molecule or fragment.

[0962] Promoter sequence(s) and other genetic elements, including but not limited to transcriptional regulatory flanking sequences, associated with one or more of the disclosed nucleic acid sequences can also be obtained using the disclosed nucleic acid sequence provided herein. In one embodiment, such sequences are obtained by incubating EST nucleic acid molecules or preferably fragments thereof with members of genomic libraries (e.g. maize and soybean) and recovering clones that hybridize to the EST nucleic acid molecule or fragment thereof. In a second embodiment, methods of “chromosome walking,” or inverse PCR may be used to obtain such sequences (Frohman et al., Proc. Natl. Acad. Sci. (U.S.A.) 85:8998-9002 (1988); Ohara et al., Proc. Natl. Acad. Sci. (U.S.A.) 86:5673-5677 (1989); Pang et al., Biotechniques 22:1046-1048 (1997); Huang et al., Methods Mol. Biol. 69:89-96 (1997); Huang et al., Method Mol. Biol. 67:287-294 (1997); Benkel et al., Genet. Anal. 13:123-127 (1996); Hartl et al., Methods Mol. Biol. 58:293-301 (1996)).

[0963] The nucleic acid molecules of the present invention may be used to isolate promoters of cell enhanced, cell specific, tissue enhanced, tissue specific, developmentally or environmentally regulated expression profiles. Isolation and functional analysis of the 5′ flanking promoter sequences of these genes from genomic libraries, for example, using genomic screening methods and PCR techniques would result in the isolation of useful promoters and transcriptional regulatory elements. These methods are known to those of skill in the art and have been described (See, for example, Birren et al., Genome Analysis: Analyzing DNA, 1, Cold Spring Harbor Laboratory Press, Cold Spring Harbor, N.Y., (1997); Birren et al., Genome Analysis: Detecting Genes, 2, (1998), Cold Spring Harbor Laboratory Press, Cold Spring Harbor, N.Y., (1998); Birren et al., Genome Analysis: Cloning Systems, 3, Cold Spring Harbor Laboratory Press, Cold Spring Harbor, N.Y., (1999); Birren et al., Genome Analysis: Mapping Genomes, 4, Cold Spring Harbor Laboratory Press, Cold Spring Harbor, N.Y., (1999). Promoters obtained utilizing the nucleic acid molecules of the present invention could also be modified to affect their control characteristics. Examples of such modifications would include but are not limited to enhanced sequences as reported in Exemplary Uses of the Agents of the Invention, Section (a) Plant Constructs and Plant Transformants. Such genetic elements could be used to enhance gene expression of new and existing traits for crop improvements.

[0964] In one sub-aspect, such an analysis is conducted by determining the presence and/or identity of polymorphism(s) by one or more of the nucleic acid molecules of the present invention and more preferably one or more of the EST nucleic acid molecule or complement thereof or fragment of either which are associated with a phenotype, or a predisposition to that phenotype.

[0965] Any of a variety of molecules can be used to identify such polymorphism(s). In one embodiment, one or more of the EST nucleic acid molecules (or completement thereof or a sub-fragment of either) may be employed as a marker nucleic acid molecule to identify such polymorphism(s). Alternatively, such polymorphisms can be detected through the use of a marker nucleic acid molecule or a marker protein that is genetically linked to (i.e., a polynucleotide that co-segregates with) such polymorphism(s).

[0966] In an alternative embodiment, such polymorphisms can be detected through the use of a marker nucleic acid molecule that is physically linked to such polymorphism(s). For this purpose, marker nucleic acid molecules comprising a nucleotide sequence of a polynucleotide located within 1 mb of the polymorphism(s) and more preferably within 100 kb of the polymorphism(s) and most preferably within 10 kb of the polymorphism(s) can be employed.

[0967] The genomes of animals and plants naturally undergo spontaneous mutation in the course of their continuing evolution (Gusella, Ann. Rev. Biochem. 55:831-854 (1986)). A “polymorphism” is a variation or difference in the sequence of the gene or its flanking regions that arises in some of the members of a species. The variant sequence and the “original” sequence co-exist in the species' population. In some instances, such co-existence is in stable or quasi-stable equilibrium.

[0968] A polymorphism is thus said to be “allelic,” in that, due to the existence of the polymorphism, some members of a species may have the original sequence (i.e., the original “allele”) whereas other members may have the variant sequence (i.e., the variant “allele”). In the simplest case, only one variant sequence may exist and the polymorphism is thus said to be di-allelic. In other cases, the species' population may contain multiple alleles and the polymorphism is termed tri-allelic, etc. A single gene may have multiple different unrelated polymorphisms. For example, it may have a di-allelic polymorphism at one site and a multi-allelic polymorphism at another site.

[0969] The variation that defines the polymorphism may range from a single nucleotide variation to the insertion or deletion of extended regions within a gene. In some cases, the DNA sequence variations are in regions of the genome that are characterized by short tandem repeats (STRs) that include tandem di- or tri-nucleotide repeated motifs of nucleotides. Polymorphisms characterized by such tandem repeats are referred to as “variable number tandem repeat” (“VNTR”) polymorphisms. VNTRs have been used in identity analysis (Weber, U.S. Pat. No. 5,075,217; Armour et al., FEBS Lett. 307:113-115 (1992); Jones et al., Eur. J. Haematol. 39:144-147 (1987); Horn et al., PCT Patent Application WO91/14003; Jeffreys, European Patent Application 370,719; Jeffreys, U.S. Pat. No. 5,175,082; Jeffreys et al., Amer. J. Hum. Genet. 39:11-24 (1986); Jeffreys et al., Nature 316:76-79 (1985); Gray et al., Proc. R. Acad. Soc. Lond. 243:241-253 (1991); Moore et al., Genomics 10:654-660 (1991); Jeffreys et al., Anim. Genet. 18:1-15 (1987); Hillel et al., Anim. Genet. 20:145-155 (1989); Hillel et al., Genet. 124:783-789 (1990)).

[0970] The detection of polymorphic sites in a sample of DNA may be facilitated through the use of nucleic acid amplification methods. Such methods specifically increase the concentration of polynucleotides that span the polymorphic site, or include that site and sequences located either distal or proximal to it. Such amplified molecules can be readily detected by gel electrophoresis or other means.

[0971] The most preferred method of achieving such amplification employs the polymerase chain reaction (“PCR”) (Mullis et al., Cold Spring Harbor Symp. Quant. Biol. 51:263-273 (1986); Erlich et al., European Patent Appln. 50,424; European Patent Appln. 84,796; European Patent Application 258,017; European Patent Appln. 237,362; Mullis, European Patent Appln. 201,184; Mullis et al., U.S. Pat. No. 4,683,202; Erlich, U.S. Pat. No. 4,582,788; and Saiki et al., U.S. Pat. No. 4,683,194), using primer pairs that are capable of hybridizing to the proximal sequences that define a polymorphism in its double-stranded form.

[0972] In lieu of PCR, alternative methods, such as the “Ligase Chain Reaction” (“LCR”) may be used (Barany, Proc. Natl. Acad. Sci. (U.S.A.) 88:189-193 (1991)). LCR uses two pairs of oligonucleotide probes to exponentially amplify a specific target. The sequences of each pair of oligonucleotides is selected to permit the pair to hybridize to abutting sequences of the same strand of the target. Such hybridization forms a substrate for a template-dependent ligase. As with PCR, the resulting products thus serve as a template in subsequent cycles and an exponential amplification of the desired sequence is obtained.

[0973] LCR can be performed with oligonucleotides having the proximal and distal sequences of the same strand of a polymorphic site. In one embodiment, either oligonucleotide will be designed to include the actual polymorphic site of the polymorphism. In such an embodiment, the reaction conditions are selected such that the oligonucleotides can be ligated together only if the target molecule either contains or lacks the specific nucleotide that is complementary to the polymorphic site present on the oligonucleotide. Alternatively, the oligonucleotides may be selected such that they do not include the polymorphic site (see, Segev, PCT Application WO 90/01069).

[0974] The “Oligonucleotide Ligation Assay” (“OLA”) may alternatively be employed (Landegren et al., Science 241:1077-1080 (1988)). The OLA protocol uses two oligonucleotides which are designed to be capable of hybridizing to abutting sequences of a single strand of a target. OLA, like LCR, is particularly suited for the detection of point mutations. Unlike LCR, however, OLA results in “linear” rather than exponential amplification of the target sequence.

[0975] Nickerson et al., have described a nucleic acid detection assay that combines attributes of PCR and OLA (Nickerson et al., Proc. Natl. Acad. Sci. (U.S.A.) 87:8923-8927 (1990)). In this method, PCR is used to achieve the exponential amplification of target DNA, which is then detected using OLA. In addition to requiring multiple and separate, processing steps, one problem associated with such combinations is that they inherit all of the problems associated with PCR and OLA.

[0976] Schemes based on ligation of two (or more) oligonucleotides in the presence of nucleic acid having the sequence of the resulting “di-oligonucleotide”, thereby amplifying the di-oligonucleotide, are also known (Wu et al., Genomics 4:560-569 (1989)) and may be readily adapted to the purposes of the present invention.

[0977] Other known nucleic acid amplification procedures, such as allele-specific oligomers, branched DNA technology, transcription-based amplification systems, or isothermal amplification methods may also be used to amplify and analyze such polymorphisms (Malek et al., U.S. Pat. No. 5,130,238; Davey et al., European Patent Application 329,822; Schuster et al., U.S. Pat. No. 5,169,766; Miller et al., PCT Patent Application WO 89/06700; Kwoh et al., Proc. Natl. Acad. Sci. (U.S.A.) 86:1173-1177 (1989); Gingeras et al., PCT Patent Application WO 88/10315; Walker et al., Proc. Natl. Acad. Sci. (U.S.A.) 89:392-396 (1992)).

[0978] The identification of a polymorphism can be determined in a variety of ways. By correlating the presence or absence of it in a plant with the presence or absence of a phenotype, it is possible to predict the phenotype of that plant. If a polymorphism creates or destroys a restriction endonuclease cleavage site, or if it results in the loss or insertion of DNA (e.g., a VNTR polymorphism), it will alter the size or profile of the DNA fragments that are generated by digestion with that restriction endonuclease. As such, individuals that possess a variant sequence can be distinguished from those having the original sequence by restriction fragment analysis. Polymorphisms that can be identified in this manner are termed “restriction fragment length polymorphisms” (“RFLPs”). RFLPs have been widely used in human and plant genetic analyses (Glassberg, UK Patent Application 2135774; Skolnick et al., Cytogen. Cell Genet. 32:58-67 (1982); Botstein et al., Ann. J. Hum. Genet. 32:314-331 (1980); Fischer et al., PCT Application WO90/13668; Uhlen, PCT Application WO90/11369).

[0979] Polymorphisms can also be identified by Single Strand Conformation Polymorphism (SSCP) analysis. SSCP is a method capable of identifying most sequence variations in a single strand of DNA, typically between 150 and 250 nucleotides in length (Elles, Methods in Molecular Medicine Molecular Diagnosis of Genetic Diseases, Humana Press (1996); Orita et al., Genomics 5:874-879 (1989)). Under denaturing conditions a single strand of DNA will adopt a conformation that is uniquely dependent on its sequence conformation. This conformation usually will be different, even if only a single base is changed. Most conformations have been reported to alter the physical configuration or size sufficiently to be detectable by electrophoresis. A number of protocols have been described for SSCP including, but not limited to, Lee et al., Anal. Biochem. 205:289-293 (1992); Suzuki et al., Anal. Biochem. 192:82-84 (1991); Lo et al., Nucleic Acids Research 20:1005-1009 (1992); Sarkar et al., Genomics 13:441-443 (1992). It is understood that one or more of the nucleic acids of the present invention, may be utilized as markers or probes to detect polymorphisms by SSCP analysis.

[0980] Polymorphisms may also be found using a DNA fingerprinting technique called amplified fragment length polymorphism (AFLP), which is based on the selective PCR amplification of restriction fragments from a total digest of genomic DNA to profile that DNA (Vos et al., Nucleic Acids Res. 23:4407-4414 (1995)). This method allows for the specific co-amplification of high numbers of restriction fragments, which can be visualized by PCR without knowledge of the nucleic acid sequence.

[0981] AFLP employs basically three steps. Initially, a sample of genomic DNA is cut with restriction enzymes and oligonucleotide adapters are ligated to the restriction fragments of the DNA. The restriction fragments are then amplified using PCR by using the adapter and restriction sequence as target sites for primer annealing. The selective amplification is achieved by the use of primers that extend into the restriction fragments, amplifying only those fragments in which the primer extensions match the nucleotide flanking the restriction sites. These amplified fragments are then visualized on a denaturing polyacrylamide gel.

[0982] AFLP analysis has been performed on Salix (Beismann et al., Mol. Ecol. 6:989-993 (1997)), Acinetobacter (Janssen et al., Int. J. Syst. Bacteriol. 47:1179-1187 (1997)), Aeromonas popoffi (Huys et al., Int. J. Syst. Bacteriol. 47:1165-1171 (1997)), rice (McCouch et al., Plant Mol. Biol. 35:89-99 (1997); Nandi et al., Mol. Gen. Genet. 255:1-8 (1997); Cho et al., Genome 39:373-378 (1996)), barley (Hordeum vulgare) (Simons et al., Genomics 44:61-70 (1997); Waugh et al., Mol. Gen. Genet. 255:311-321 (1997); Qi et al., Mol. Gen. Genet. 254:330-336 (1997); Becker et al., Mol. Gen. Genet. 249:65-73 (1995)), potato (Van der Voort et al., Mol. Gen. Genet. 255:438-447 (1997); Meksem et al., Mol. Gen. Genet. 249:74-81 (1995)), Phytophthora infestans (Van der Lee et al., Fungal Genet. Biol. 21:278-291 (1997)), Bacillus anthracis (Keim et al., J. Bacteriol. 179:818-824 (1997)), Astragalus cremnophylax (Travis et al., Mol. Ecol. 5:735-745 (1996)), Arabidopsis (Cnops et al., Mol. Gen. Genet. 253:32-41 (1996)), Escherichia coli (Lin et al., Nucleic Acids Res. 24:3649-3650 (1996)), Aeromonas (Huys et al., Int. J. Syst. Bacteriol. 46:572-580 (1996)), nematode (Folkertsma et al., Mol. Plant. Microbe Interact. 9:47-54 (1996)), tomato (Thomas et al., Plant J. 8:785-794 (1995)) and human (Latorra et al., PCR Methods Appl. 3:351-358 (1994)). AFLP analysis has also been used for fingerprinting mRNA (Money et al., Nucleic Acids Res. 24:2616-2617 (1996); Bachem et al., Plant J. 9:745-753 (1996)). It is understood that one or more of the nucleic acids of the present invention, may be utilized as markers or probes to detect polymorphisms by AFLP analysis or for fingerprinting RNA.

[0983] Polymorphisms may also be found using random amplified polymorphic DNA (RAPD) (Williams et al., Nucl. Acids Res. 18:6531-6535 (1990)) and cleaveable amplified polymorphic sequences (CAPS) (Lyamichev et al., Science 260:778-783 (1993)). It is understood that one or more of the nucleic acid molecules of the present invention, may be utilized as markers or probes to detect polymorphisms by RAPD or CAPS analysis.

[0984] Through genetic mapping, a fine scale linkage map can be developed using DNA markers and, then, a genomic DNA library of large-sized fragments can be screened with molecular markers linked to the desired trait. Molecular markers are advantageous for agronomic traits that are otherwise difficult to tag, such as resistance to pathogens, insects and nematodes, tolerance to abiotic stress, quality parameters and quantitative traits such as high yield potential.

[0985] The essential requirements for marker-assisted selection in a plant breeding program are: (1) the marker(s) should co-segregate or be closely linked with the desired trait; (2) an efficient means of screening large populations for the molecular marker(s) should be available; and (3) the screening technique should have high reproducibility across laboratories and preferably be economical to use and be user-friendly.

[0986] The genetic linkage of marker molecules can be established by a gene mapping model such as, without limitation, the flanking marker model reported by Lander and Botstein, Genetics 121:185-199 (1989) and the interval mapping, based on maximum likelihood methods described by Lander and Botstein, Genetics 121:185-199 (1989) and implemented in the software package MAPMAKER/QTL (Lincoln and Lander, Mapping Genes Controlling Quantitative Traits Using MAPMAKER/QTL, Whitehead Institute for Biomedical Research, Massachusetts (1990). Additional software includes Qgene, Version 2.23, Department of Plant Breeding and Biometry, 266 Emerson Hall, Cornell University, Ithaca, N.Y. (1996). Use of Qgene software is a particularly preferred approach.

[0987] A maximum likelihood estimate (MLE) for the presence of a marker is calculated, together with an MLE assuming no QTL effect, to avoid false positives. A log₁₀ of an odds ratio (LOD) is then calculated as: LOD=log₁₀ (MLE for the presence of a QTL/MLE given no linked QTL).

[0988] The LOD score essentially indicates how much more likely the data are to have arisen assuming the presence of a QTL than in its absence. The LOD threshold value for avoiding a false positive with a given confidence, say 95%, depends on the number of markers and the length of the genome. Graphs indicating LOD thresholds are set forth in Lander and Botstein, Genetics 121:185-199 (1989), and further described by Arús and Moreno-González, Plant Breeding, Hayward et al., (eds.) Chapman & Hall, London, pp. 314-331 (1993).

[0989] Additional models can be used. Many modifications and alternative approaches to interval mapping have been reported, including the use non-parametric methods (Kruglyak and Lander, Genetics 139:1421-1428 (1995)). Multiple regression methods or models can be also be used, in which the trait is regressed on a large number of markers (Jansen, Biometrics in Plant Breeding, van Oijen and Jansen (eds.), Proceedings of the Ninth Meeting of the Eucarpia Section Biometrics in Plant Breeding, The Netherlands, pp. 116-124 (1994); Weber and Wricke, Advances in Plant Breeding, Blackwell, Berlin, 16 (1994)). Procedures combining interval mapping with regression analysis, whereby the phenotype is regressed onto a single putative QTL at a given marker interval and at the same time onto a number of markers that serve as ‘cofactors,’ have been reported by Jansen and Stam, Genetics 136:1447-1455 (1994), and Zeng, Genetics 136:1457-1468 (1994). Generally, the use of cofactors reduces the bias and sampling error of the estimated QTL positions (Utz and Melchinger, Biometrics in Plant Breeding, van Oijen and Jansen (eds.) Proceedings of the Ninth Meeting of the Eucarpia Section Biometrics in Plant Breeding, The Netherlands, pp. 195-204 (1994), thereby improving the precision and efficiency of QTL mapping (Zeng, Genetics 136:1457-1468 (1994)). These models can be extended to multi-environment experiments to analyze genotype-environment interactions (Jansen et al., Theo. Appl. Genet. 91:33-37 (1995)).

[0990] Selection of an appropriate mapping populations is important to map construction. The choice of appropriate mapping population depends on the type of marker systems employed (Tanksley et al., Molecular mapping plant chromosomes. Chromosome structure and function: Impact of new concepts, Gustafson and Appels (eds.), Plenum Press, New York, pp. 157-173 (1988)). Consideration must be given to the source of parents (adapted vs. exotic) used in the mapping population. Chromosome pairing and recombination rates can be severely disturbed (suppressed) in wide crosses (adapted×exotic) and generally yield greatly reduced linkage distances. Wide crosses will usually provide segregating populations with a relatively large array of polymorphisms when compared to progeny in a narrow cross (adapted×adapted).

[0991] An F₂ population is the first generation of selfing after the hybrid seed is produced. Usually a single F₁ plant is selfed to generate a population segregating for all the genes in Mendelian (1:2:1) fashion. Maximum genetic information is obtained from a completely classified F₂ population using a codominant marker system (Mather, Measurement of Linkage in Heredity, Methuen and Co., (1938)). In the case of dominant markers, progeny tests (e.g., F₃, BCF₂) are required to identify the heterozygotes, thus making it equivalent to a completely classified F₂ population. However, this procedure is often prohibitive because of the cost and time involved in progeny testing. Progeny testing of F₂ individuals is often used in map construction where phenotypes do not consistently reflect genotype (e.g., disease resistance) or where trait expression is controlled by a QTL. Segregation data from progeny test populations (e.g., F₃ or BCF₂) can be used in map construction. Marker-assisted selection can then be applied to cross progeny based on marker-trait map associations (F₂, F₃), where linkage groups have not been completely disassociated by recombination events (i.e., maximum disequillibrium).

[0992] Recombinant inbred lines (RIL) (genetically related lines; usually >F₅, developed from continuously selfing F₂ lines towards homozygosity) can be used as a mapping population. Information obtained from dominant markers can be maximized by using RIL because all loci are homozygous or nearly so. Under conditions of tight linkage (i.e., about <10% recombination), dominant and co-dominant markers evaluated in RIL populations provide more information per individual than either marker type in backcross populations (Reiter et al., Proc. Natl. Acad. Sci. (U.S.A.) 89:1477-1481 (1992)). However, as the distance between markers becomes larger (i.e., loci become more independent), the information in RIL populations decreases dramatically when compared to codominant markers.

[0993] Backcross populations (e.g., generated from a cross between a successful variety (recurrent parent) and another variety (donor parent) carrying a trait not present in the former) can be utilized as a mapping population. A series of backcrosses to the recurrent parent can be made to recover most of its desirable traits. Thus a population is created consisting of individuals nearly like the recurrent parent but each individual carries varying amounts or mosaic of genomic regions from the donor parent. Backcross populations can be useful for mapping dominant markers if all loci in the recurrent parent are homozygous and the donor and recurrent parent have contrasting polymorphic marker alleles (Reiter et al., Proc. Natl. Acad. Sci. (U.S.A.) 89:1477-1481 (1992)). Information obtained from backcross populations using either codominant or dominant markers is less than that obtained from F₂ populations because one, rather than two, recombinant gametes are sampled per plant. Backcross populations, however, are more informative (at low marker saturation) when compared to RILs as the distance between linked loci increases in RIL populations (i.e., about 15% recombination). Increased recombination can be beneficial for resolution of tight linkages, but may be undesirable in the construction of maps with low marker saturation.

[0994] Near-isogenic lines (NIL) created by many backcrosses to produce an array of individuals that are nearly identical in genetic composition except for the trait or genomic region under interrogation can be used as a mapping population. In mapping with NILs, only a portion of the polymorphic loci are expected to map to a selected region.

[0995] Bulk segregant analysis (BSA) is a method developed for the rapid identification of linkage between markers and traits of interest (Michelmore et al., Proc. Natl. Acad. Sci. (U.S.A.) 88:9828-9832 (1991)). In BSA, two bulked DNA samples are drawn from a segregating population originating from a single cross. These bulks contain individuals that are identical for a particular trait (resistant or susceptible to particular disease) or genomic region but arbitrary at unlinked regions (i.e., heterozygous). Regions unlinked to the target region will not differ between the bulked samples of many individuals in BSA.

[0996] It is understood that one or more of the nucleic acid molecules of the present invention may be used as molecular markers. It is also understood that one or more of the protein molecules of the present invention may be used as molecular markers.

[0997] In accordance with this aspect of the present invention, a sample nucleic acid is obtained from plants cells or tissues. Any source of nucleic acid may be used. Preferably, the nucleic acid is genomic DNA. The nucleic acid is subjected to restriction endonuclease digestion. For example, one or more nucleic acid molecule or fragment thereof of the present invention can be used as a probe in accordance with the above-described polymorphic methods. The polymorphism obtained in this approach can then be cloned to identify the mutation at the coding region which alters the protein's structure or regulatory region of the gene which affects its expression level.

[0998] In an aspect of the present invention, one or more of the nucleic molecules of the present invention are used to determine the level (i.e., the concentration of mRNA in a sample, etc.) in a plant or pattern (i.e., the kinetics of expression, rate of decomposition, stability profile, etc.) or occurrence or absence (e.g., tissue distribution, development or environmental stage, etc.) of the expression of a protein encoded in part or whole by one or more of the nucleic acid molecule of the present invention (collectively, the “Expression Response” of a cell or tissue). As used herein, the Expression Response manifested by a cell or tissue is said to be “altered” if it differs from the Expression Response of cells or tissues of plants not exhibiting the phenotype. To determine whether a Expression Response is altered, the Expression Response manifested by the cell or tissue of the plant exhibiting the phenotype is compared with that of a similar cell or tissue sample of a plant not exhibiting the phenotype. As will be appreciated, it is not necessary to re-determine the Expression Response of the cell or tissue sample of plants not exhibiting the phenotype each time such a comparison is made; rather, the Expression Response of a particular plant may be compared with previously obtained values of normal plants. As used herein, the phenotype of the organism is any of one or more characteristics of an organism (e.g., disease resistance, pest tolerance, environmental tolerance such as tolerance to abiotic stress, male sterility, quality improvement or yield, etc.). A change in genotype or phenotype may be transient or permanent. Also as used herein, a tissue sample is any sample that comprises more than one cell. In a preferred aspect, a tissue sample comprises cells that share a common characteristic (e.g., derived from root, seed, flower, leaf, stem or pollen, etc.).

[0999] In one aspect of the present invention, an evaluation can be conducted to determine whether a particular mRNA molecule is present. One or more of the nucleic acid molecules of the present invention, preferably one or more of the EST nucleic acid molecules or fragments thereof of the present invention are utilized to detect the presence or quantity of the mRNA species. Such molecules are then incubated with cell or tissue extracts of a plant under conditions sufficient to permit nucleic acid hybridization. The detection of double-stranded probe-mRNA hybrid molecules is indicative of the presence of the mRNA; the amount of such hybrid formed is proportional to the amount of mRNA. Thus, such probes may be used to ascertain the level and extent of the mRNA production in a plant's cells or tissues. Such nucleic acid hybridization may be conducted under quantitative conditions (thereby providing a numerical value of the amount of the mRNA present). Alternatively, the assay may be conducted as a qualitative assay that indicates either that the mRNA is present, or that its level exceeds a user set, predefined value.

[1000] A principle of in situ hybridization is that a labeled, single-stranded nucleic acid probe will hybridize to a complementary strand of cellular DNA or RNA and, under the appropriate conditions, these molecules will form a stable hybrid. When nucleic acid hybridization is combined with histological techniques, specific DNA or RNA sequences can be identified within a single cell. An advantage of in situ hybridization over more conventional techniques for the detection of nucleic acids is that it allows an investigator to determine the precise spatial population (Angerer et al., Dev. Biol. 101:477-484 (1984); Angerer et al., Dev. Biol. 112:157-166 (1985); Dixon et al., EMBO J. 10: 1317-1324 (1991)). In situ hybridization may be used to measure the steady-state level of RNA accumulation. It is a sensitive technique and RNA sequences present in as few as 5-10 copies per cell can be detected (Hardin et al., J. Mol. Biol. 202:417-431 (1989)). A number of protocols have been devised for in situ hybridization, each with tissue preparation, hybridization and washing conditions (Meyerowitz, Plant Mol. Biol. Rep. 5:242-250 (1987); Cox and Goldberg, In: Plant Molecular Biology: A Practical Approach, Shaw (ed.), pp. 1-35, IRL Press, Oxford (1988); Raikhel et al., In situ RNA hybridization in plant tissues, In: Plant Molecular Biology Manual, Vol. B9: 1-32, Kluwer Academic Publisher, Dordrecht, Belgium (1989)).

[1001] In situ hybridization also allows for the localization of proteins within a tissue or cell (Wilkinson, In Situ Hybridization, Oxford University Press, Oxford (1992); Langdale, In Situ Hybridization In: The Maize Handbook, Freeling and Walbot (eds.), pp. 165-179, Springer-Verlag, New York (1994)). It is understood that one or more of the molecules of the present invention, preferably one or more of the EST nucleic acid molecules or complements thereof or fragments of either of the present invention or one or more of the antibodies of the present invention may be utilized to detect the level or pattern of a protein or mRNA thereof by in situ hybridization.

[1002] Fluorescent in situ hybridization allows the localization of a particular DNA sequence along a chromosome which is useful, among other uses, for gene mapping, following chromosomes in hybrid lines or detecting chromosomes with translocations, transversions or deletions. In situ hybridization has been used to identify chromosomes in several plant species (Griffor et al., Plant Mol. Biol. 17:101-109 (1991); Gustafson et al., Proc. Natl. Acad. Sci. (U.S.A.) 87:1899-1902 (1990); Mukai and Gill, Genome 34:448-452 (1991); Schwarzacher and Heslop-Harrison, Genome 34:317-323 (1991); Wang et al., Jpn. J. Genet. 66:313-316 (1991); Parra and Windle, Nature Genetics 5:17-21 (1993)). It is understood that the nucleic acid molecules of the present invention may be used as probes or markers to localize sequences along a chromosome.

[1003] Another method to localize the expression of a molecule is tissue printing. Tissue printing provides a way to screen, at the same time on the same membrane many tissue sections from different plants or different developmental stages. Tissue-printing procedures utilize films designed to immobilize proteins and nucleic acids. In essence, a freshly cut section of a tissue is pressed gently onto nitrocellulose paper, nylon membrane or polyvinylidene difluoride membrane. Such membranes are commercially available (e.g., Millipore, Bedford, Mass. U.S.A.). The contents of the cut cell transfer onto the membrane and the contents and are immobilized to the membrane. The immobilized contents form a latent print that can be visualized with appropriate probes. When a plant tissue print is made on nitrocellulose paper, the cell walls leave a physical print that makes the anatomy visible without further treatment (Varner and Taylor, Plant Physiol. 91:31-33 (1989)).

[1004] Tissue printing on substrate films is described by Daoust, Exp. Cell Res. 12:203-211 (1957), who detected amylase, protease, ribonuclease and deoxyribonuclease in animal tissues using starch, gelatin and agar films. These techniques can be applied to plant tissues (Yomo and Taylor, Planta 112:3543 (1973); Harris and Chrispeels, Plant Physiol. 56:292-299 (1975)). Advances in membrane technology have increased the range of applications of Daoust's tissue-printing techniques allowing (Cassab and Varner, J. Cell. Biol. 105:2581-2588 (1987)) the histochemical localization of various plant enzymes and deoxyribonuclease on nitrocellulose paper and nylon (Spruce et al., Phytochemistry 26:2901-2903 (1987); Barres et al., Neuron 5:527-544 (1990); Reid and Pont-Lezica, Tissue Printing: Tools for the Study of Anatomy, Histochemistry and Gene Expression, Academic Press, New York, N.Y. (1992); Reid et al., Plant Physiol. 93:160-165 (1990); Ye et al., Plant J. 1:175-183 (1991)).

[1005] It is understood that one or more of the molecules of the present invention, preferably one or more of the EST nucleic acid molecules or fragments thereof of the present invention or one or more of the antibodies of the present invention may be utilized to detect the presence or quantity of a protein by tissue printing.

[1006] Further it is also understood that any of the nucleic acid molecules of the present invention may be used as marker nucleic acids and or probes in connection with methods that require probes or marker nucleic acids. As used herein, a probe is an agent that is utilized to determine an attribute or feature (e.g., presence or absence, location, correlation, etc.) of a molecule, cell, tissue or plant. As used herein, a marker nucleic acid is a nucleic acid molecule that is utilized to determine an attribute or feature (e.g., presence or absence, location, correlation, etc.) or a molecule, cell, tissue or plant.

[1007] A microarray-based method for high-throughput monitoring of plant gene expression may be utilized to measure gene-specific hybridization targets. This ‘chip’-based approach involves using microarrays of nucleic acid molecules as gene-specific hybridization targets to quantitatively measure expression of the corresponding plant genes (Schena et al., Science 270:467-470 (1995); Shalon, Ph.D. Thesis, Stanford University (1996)). Every nucleotide in a large sequence can be queried at the same time. Hybridization can be used to efficiently analyze nucleotide sequences.

[1008] Several microarray methods have been described. One method compares the sequences to be analyzed by hybridization to a set of oligonucleotides representing all possible subsequences (Bains and Smith, J. Theor. Biol. 135:303-307 (1989)). A second method hybridizes the sample to an array of oligonucleotide or cDNA molecules. An array consisting of oligonucleotides complementary to subsequences of a target sequence can be used to determine the identity of a target sequence, measure its amount and detect differences between the target and a reference sequence. Nucleic acid molecules microarrays may also be screened with protein molecules or fragments thereof to determine nucleic acid molecules that specifically bind protein molecules or fragments thereof.

[1009] The microarray approach may be used with polypeptide targets (U.S. Pat. No. 5,445,934; U.S. Pat. No. 5,143,854; U.S. Pat. No. 5,079,600; U.S. Pat. No. 4,923,901). Essentially, polypeptides are synthesized on a substrate (microarray) and these polypeptides can be screened with either protein molecules or fragments thereof or nucleic acid molecules in order to screen for either protein molecules or fragments thereof or nucleic acid molecules that specifically bind the target polypeptides (Fodor et al., Science 251:767-773 (1991)). It is understood that one or more of the nucleic acid molecules or protein or fragments thereof of the present invention may be utilized in a microarray based method.

[1010] In a preferred embodiment of the present invention microarrays may be prepared that comprise nucleic acid molecules where preferably at least 10%, preferably at least 25%, more preferably at least 50% and even more preferably at least 75%, 80%, 85%, 90% or 95% of the nucleic acid molecules located on that array are selected from the group of nucleic acid molecules that specifically hybridize to one or more nucleic acid molecule having a nucleic acid sequence selected from the group of SEQ ID NO: 1 through SEQ ID NO: 294,310 or complement thereof or fragments of either.

[1011] In another preferred embodiment of the present invention microarrays may be prepared that comprise nucleic acid molecules where preferably at least 10%, preferably at least 25%, more preferably at least 50% and even more preferably at least 75%, 80%, 85%, 90% or 95% of the nucleic acid molecules located on that array are selected from the group of nucleic acid molecules having a nucleic acid sequence selected from the group of SEQ ID NO: 1 through SEQ ID NO: 294,310 or complements thereof.

[1012] In a preferred embodiment of the present invention microarrays may be prepared that comprise nucleic acid molecules where preferably at least 2%, preferably at least 5%, more preferably at least 10% and even more preferably at least 25%, 50%, 75%, 80%, 85%, 90% or 95% of the nucleic acid molecules located on that array are selected from the group of nucleic acid molecules that specifically hybridize to one or more nucleic acid molecule having a nucleic acid sequence selected from the group of sequences derived from a library where the library is selected from the group consisting of: MONN01, SATMON001, SATMON003 through SATMON014, SATMON016, SATMON017, SATMON019 through SATMON031, SATMON033, SATMON034, SATMONN01, SATMONN04 through SATMONN06, LIB36, LIB83 through LIB84, CMz029 through CMz031, CMz033 through CMz037, CMz039 through CMz042, CMz044 through CMz045, CMz047 through CMz050, SOYMON001 through SOYMON038, Soy51 through Soy56, Soy58 through Soy62, Soy65 through Soy77, LIB3054, LIB3087, and LIB3094 (Monsanto Company, St. Louis, Mo. U.S.A.).

[1013] In a preferred embodiment of the present invention microarrays may be prepared that comprise nucleic acid molecules where preferably at least 2%, preferably at least 5%, more preferably at least 10% and even more preferably at least 25%, 50%, 75%, 80%, 85%, 90% or 95% of the nucleic acid molecules located on that array are selected from the group of nucleic acid molecules having a nucleic acid sequences from the group of a sequences derived from a library where the library is selected from the group consisting of: MONN01, SATMON001, SATMON003 through SATMON014, SATMON016, SATMON017, SATMON019 through SATMON031, SATMON033, SATMON034, SATMONN01, SATMONN04 through SATMONN06, LIB36, LIB83 through LIB84, CMz029 through CMz031, CMz033 through CMz037, CMz039 through CMz042, CMz044 through CMz045, CMz047 through CMz050, SOYMON001 through SOYMON038, Soy51 through Soy56, Soy58 through Soy62, Soy65 through Soy77, LIB3054, LIB3087, and LIB3094 (Monsanto Company, St. Louis, Mo. U.S.A.).

[1014] In an even more preferred embodiment of the present invention, the microarray comprises a nucleic acid molecule and/or collection of nucleic acid molecules of the present invention where the nucleic acid molecule and/or collection of nucleic acid molecules are capable of determining or predicting a component or attribute of a biochemical process or activity where the process or activity is preferably selected from photosynthetic activity, carbohydrate metabolism, amino acid synthesis or degradation, plant hormone or other regulatory molecules, phenolic metabolism, and lipid metabolism, and more preferably selected from the group consisting of biosynthesis of tetrapyrroles, phytochrome metabolism, carbon assimilation, glycolysis and gluconeogenesis metabolism, sucrose metabolism, starch metabolism, phosphogluconate metabolism, galactomannan metabolism, raffinose metabolism, complex carbohydrate synthesis/degradation, phytic acid metabolism, methionine biosynthesis, methionine degradation, lysine metabolism, arginine metabolism, proline metabolism, glutamate/glutamine metabolism, aspartate/asparagine metabolism, cytokinin metabolism, gibberellin metabolism, ethylene metabolism, jasmonic acid synthesis metabolism, transcription factors, R-genes, plant proteases, protein kinases, antifungal proteins, nitrogen transporters, sugar transporters, shikimate metabolism, isoflavone metabolism, phenylpropanoid metabolism, isoprenoid metabolism, β-oxidation lipid metabolism, and fatty acid metabolism, and even more preferably selected from the group consisting of: glycolysis metabolism, gluconeogenesis metabolism, sucrose metabolism, sucrose catabolism, reductive pentose phosphate cycle, regulation of C3 photosynthesis, C4 pathway carbon assimilation, enzymes involved in the C4 pathway, carotenoid metabolism, tocopherol metabolism, phytosterol metabolism, brassinoid metabolism, and proline metabolism.

[1015] In an even more preferred embodiment of the present invention, the microarray comprises a nucleic acid molecule and/or collection of nucleic acid molecules of the present invention where the nucleic acid molecule and/or collection of nucleic acid molecules are capable of detecting or predicting a component or attribute of at least two, more preferable at least three, four, five, six, seven, eight, nine, ten, eleven, twelve, thirteen, fourteen, fifteen, sixteen, seventeen, eighteen, nineteen, twenty, twenty one, twenty two, twenty three, twenty four, twenty five, twenty six, twenty seven, twenty eight, twenty nine, thirty, thirty one, thirty two, thirty three, thirty four, thirty five, thirty six, thirty seven, thirty eight, thirty nine, forty, forty one, forty two, forty three, forty four, forty five or forty six biochemical processes or activities where the biochemical processes or activities are selected from the following: photosynthetic activity, carbohydrate metabolism, amino acid synthesis or degradation, plant hormone or other regulatory molecules, phenolic metabolism, lipid metabolism, biosynthesis of tetrapyrroles, phytochrome metabolism, carbon assimilation, glycolysis and gluconeogenesis metabolism, sucrose metabolism, starch metabolism, phosphogluconate metabolism, galactomannan metabolism, raffinose metabolism, complex carbohydrate synthesis/degradation, phytic acid metabolism, methionine biosynthesis, methionine degradation, lysine metabolism, arginine metabolism, proline metabolism, glutamate/glutamine, aspartate/asparagine metabolism, cytokinin metabolism, gibberellin metabolism, ethylene metabolism, jasmonic acid metabolism, transcription factors, R-genes, plant proteases, protein kinases, antifungal proteins, nitrogen transporters, sugar transporters, shikimate metabolism, isoflavone metabolism, phenylpropanoid metabolism, isoprenoid metabolism, β-oxidation lipid metabolism, fatty acid metabolism, glycolysis metabolism, gluconeogenesis metabolism, sucrose metabolism, sucrose catabolism, reductive pentose phosphate cycle, regulation of C3 photosynthesis, C4 pathway carbon assimilation, enzymes involved in the C4 pathway, carotenoid metabolism, tocopherol metabolism, phytosterol metabolism, brassinoid metabolism, and proline metabolism.

[1016] Site directed mutagenesis may be utilized to modify nucleic acid sequences, particularly as it is a technique that allows one or more of the amino acids encoded by a nucleic acid molecule to be altered (e.g., a threonine to be replaced by a methionine). Three basic methods for site directed mutagenesis are often employed. These are cassette mutagenesis (Wells et al., Gene 34:315-323 (1985)), primer extension (Gilliam et al., Gene 12:129-137 (1980); Zoller and Smith, Methods Enzymol. 100:468-500 (1983); Dalbadie-McFarland et al., Proc. Natl. Acad. Sci. (U.S.A.) 79:6409-6413 (1982)) and methods based upon PCR (Scharf et al., Science 233:1076-1078 (1986); Higuchi et al., Nucleic Acids Res. 16:7351-7367 (1988)). Site directed mutagenesis approaches are also described in European Patent 0 385 962; European Patent 0 359 472; and PCT Patent Application WO 93/07278.

[1017] Site directed mutagenesis strategies have been applied to plants for both in vitro as well as in vivo site directed mutagenesis (Lanz et al., J. Biol. Chem. 266:9971-9976 (1991); Kovgan and Zhdanov, Biotekhnologiya 5:148-154, No. 207160n, Chemical Abstracts 110:225 (1989); Ge et al., Proc. Natl. Acad. Sci. (U.S.A.) 86:4037-4041 (1989); Zhu et al., J. Biol. Chem. 271:18494-18498 (1996); Chu et al., Biochemistry 33:6150-6157 (1994); Small et al., EMBO J. 11: 1291-1296 (1992); Cho et al., Mol. Biotechnol. 8:13-16 (1997); Kita et al., J. Biol. Chem. 271:26529-26535 (1996), Jin et al., Mol. Microbiol. 7:555-562 (1993); Hatfield and Vierstra, J. Biol. Chem. 267:14799-14803 (1992); Zhao et al., Biochemistry 31:5093-5099 (1992)).

[1018] Any of the nucleic acid molecules of the present invention may either be modified by site directed mutagenesis or used as, for example, nucleic acid molecules that are used to target other nucleic acid molecules for modification. It is understood that mutants with more than one altered nucleotide can be constructed using techniques that practitioners are familiar with such as isolating restriction fragments and ligating such fragments into an expression vector (see, for example, Sambrook et al., Molecular Cloning: A Laboratory Manual, Cold Spring Harbor Press (1989)).

[1019] Sequence-specific DNA-binding proteins play a role in the regulation of transcription. The isolation of recombinant cDNAs encoding these proteins facilitates the biochemical analysis of their structural and functional properties. Genes encoding such DNA-binding proteins have been isolated using classical genetics (Vollbrecht et al., Nature 350:241-243 (1991)) and molecular biochemical approaches, including the screening of recombinant cDNA libraries with antibodies (Landschulz et al., Genes Dev. 2:786-800 (1988)) or DNA probes (Bodner et al., Cell 55:505-518 (1988)). In addition, an in situ screening procedure has been used and has facilitated the isolation of sequence-specific DNA-binding proteins from various plant species (Gilmartin et al., Plant Cell 4:839-849 (1992); Schindler et al., EMBO J. 11:1261-1273 (1992)). An in situ screening protocol does not require the purification of the protein of interest (Vinson et al., Genes Dev. 2:801-806 (1988); Singh et al., Cell 52:415-423 (1988)).

[1020] Two steps may be employed to characterize DNA-protein interactions. The first is to identify promoter fragments that interact with DNA-binding proteins, to titrate binding activity, to determine the specificity of binding and to determine whether a given DNA-binding activity can interact with related DNA sequences (Sambrook et al., Molecular Cloning: A Laboratory Manual, 2^{nd} edition, Cold Spring Harbor Laboratory Press, Cold Spring Harbor, N.Y. (1989)). Electrophoretic mobility-shift assay is a widely used assay. The assay provides a rapid and sensitive method for detecting DNA-binding proteins based on the observation that the mobility of a DNA fragment through a nondenaturing, low-ionic strength polyacrylamide gel is retarded upon association with a DNA-binding protein (Fried and Crother, Nucleic Acids Res. 9:6505-6525 (1981)). When one or more specific binding activities have been identified, the exact sequence of the DNA bound by the protein may be determined. Several procedures for characterizing protein/DNA-binding sites are used, including methylation and ethylation interference assays (Maxam and Gilbert, Methods Enzymol. 65:499-560 (1980); Wissman and Hillen, Methods Enymol. 208:365-379 (1991)), footprinting techniques employing DNase I (Galas and Schmitz, Nucleic Acids Res. 5:3157-3170 (1978)), 1,10-phenanthroline-copper ion methods (Sigman et al., Methods Enzymol. 208:414-433 (1991)) and hydroxyl radicals methods (Dixon et al., Methods Enzymol. 208:414-433 (1991)). It is understood that one or more of the nucleic acid molecules of the present invention may be utilized to identify a protein or fragment thereof that specifically binds to a nucleic acid molecule of the present invention. It is also understood that one or more of the protein molecules or fragments thereof of the present invention may be utilized to identify a nucleic acid molecule that specifically binds to it.

[1021] A two-hybrid system is based on the fact that many cellular functions are carried out by proteins, such as transcription factors, that interact (physically) with one another. Two-hybrid systems have been used to probe the function of new proteins (Chien et al., Proc. Natl. Acad. Sci. (U.S.A.) 88:9578-9582 (1991); Durfee et al., Genes Dev. 7:555-569 (1993); Choi et al., Cell 78:499-512 (1994); Kranz et al., Genes Dev. 8:313-327 (1994)).

[1022] Interaction mating techniques have facilitated a number of two-hybrid studies of protein-protein interaction. Interaction mating has been used to examine interactions between small sets of tens of proteins (Finley and Brent, Proc. Natl. Acad. Sci. (U.S.A.) 91:12098-12984 (1994)), larger sets of hundreds of proteins (Bendixen et al., Nucl. Acids Res. 22:1778-1779 (1994)) and to comprehensively map proteins encoded by a small genome (Bartel et al., Nature Genetics 12:72-77 (1996)). This technique utilizes proteins fused to the DNA-binding domain and proteins fused to the activation domain. They are expressed in two different haploid yeast strains of opposite mating type and the strains are mated to determine if the two proteins interact. Mating occurs when haploid yeast strains come into contact and result in the fusion of the two haploids into a diploid yeast strain. An interaction can be determined by the activation of a two-hybrid reporter gene in the diploid strain. An advantage of this technique is that it reduces the number of yeast transformations needed to test individual interactions. It is understood that the protein-protein interactions of protein or fragments thereof of the present invention may be investigated using the two-hybrid system and that any of the nucleic acid molecules of the present invention that encode such proteins or fragments thereof may be used to transform yeast in the two-hybrid system. A preferred sub-group of proteins or fragments thereof are transcription factors or fragments thereof.

[1023] (a) Plant Constructs and Plant Transformants

[1024] One or more of the nucleic acid molecules of the present invention may be used in plant transformation or transfection. Exogenous genetic material may be transferred into a plant cell and the plant cell regenerated into a whole, fertile or sterile plant. Exogenous genetic material is any genetic material, whether naturally occurring or otherwise, from any source that is capable of being inserted into any organism. In a preferred embodiment, the exogenous genetic material includes a nucleic acid molecule of the present invention having a sequence selected from the group consisting of SEQ ID NO: 1 through SEQ ID NO: 294,310 or complements thereof or fragments of either. In another preferred embodiment, the exogenous genetic material includes a nucleic acid molecule of the present invention selected from the group consisting of any nucleic acid molecule of the present invention.

[1025] Such genetic material may be transferred into either monocotyledons and dicotyledons including, but not limited to maize (pp. 63-69), soybean (pp. 50-60), Arabidopsis (p 45), phaseolus (pp. 47-49), peanut (pp. 49-50), alfalfa (p 60), wheat (pp. 69-71), rice (pp. 72-79), oat (pp. 80-81), sorghum (p 83), rye (p 84), tritordeum (p 84), millet (p 85), fescue (p 85), perennial ryegrass (p 86), sugarcane (p 87), cranberry (p 110), papaya (pp. 101-102), banana (p 103), banana (p 103), muskmelon (p 104), apple (p 104), cucumber (p 105), dendrobium (p 109), gladiolus (p 110), chrysanthemum (p 110), liliacea (p 111), cotton (pp 113-114), eucalyptus (p 115), sunflower (p 118), canola (p 118), turfgrass (p 121), sugarbeet (p 122), coffee (p 122) and dioscorea (p 122), (Christou, In: Particle Bombardment for Genetic Engineering of Plants, Biotechnology Intelligence Unit, Academic Press, San Diego, Calif. (1996)).

[1026] In a more preferred embodiment of the present invention, the transgenic plant comprises a nucleic molecule and/or collection of nucleic acid molecules capable of altering a biochemical process where the process or activity is preferably selected from photosynthetic activity, carbohydrate metabolism, amino acid synthesis or degradation, plant hormone or other regulatory molecules, phenolic metabolism, and lipid metabolism, and more preferably selected from the group consisting of biosynthesis of tetrapyrroles, phytochrome metabolism, carbon assimilation, glycolysis and gluconeogenesis metabolism, sucrose metabolism, starch metabolism, phosphogluconate metabolism, galactomannan metabolism, raffinose metabolism, complex carbohydrate synthesis/degradation, phytic acid metabolism, methionine biosynthesis, methionine degradation, lysine metabolism, arginine metabolism, proline metabolism, glutamate/glutamine metabolism, aspartate/asparagine metabolism, cytokinin metabolism, gibberellin metabolism, ethylene metabolism, jasmonic acid metabolism, transcription factors, R-genes, plant proteases, protein kinases, antifungal proteins, nitrogen transporters, sugar transporters, shikimate metabolism, isoflavone metabolism, phenylpropanoid metabolism, isoprenoid metabolism, β-oxidation lipid metabolism, and fatty acid metabolism, and even more preferably selected from the group consisting of: glycolysis metabolism, gluconeogenesis metabolism, sucrose metabolism, sucrose catabolism, reductive pentose phosphate cycle, regulation of C3 photosynthesis, C4 pathway carbon assimilation, enzymes involved in the C4 pathway, carotenoid metabolism, tocopherol metabolism, phytosterol metabolism, brassinoid metabolism, and proline metabolism, and in an even more preferred embodiment the transgenic plant comprises a nucleic molecule and/or collection of nucleic acid molecules selected from the group consisting of a nucleic molecule and/or collection of nucleic acid molecules which encode an mRNA or a collection of mRNA where the level, pattern, occurrence and/or absence of an mRNA and/or a collection of mRNA is a marker for a biochemical process or activity selected from the group consisting of photosynthetic activity, carbohydrate metabolism, amino acid synthesis or degradation, plant hormone or other regulatory molecules, phenolic metabolism, and lipid metabolism, and more preferably selected from the group consisting of biosynthesis of tetrapyrroles, phytochrome metabolism, carbon assimilation, glycolysis and gluconeogenesis metabolism, sucrose metabolism, starch metabolism, phosphogluconate metabolism, galactomannan metabolism, raffinose metabolism, complex carbohydrate synthesis/degradation, phytic acid metabolism, methionine biosynthesis, methionine degradation, lysine metabolism, arginine metabolism, proline metabolism, glutamate/glutamine metabolism, aspartate/asparagine metabolism, cytokinin metabolism, gibberellin metabolism, ethylene metabolism, jasmonic acid metabolism, transcription factors, R-genes, plant proteases, protein kinases, antifungal proteins, nitrogen transporters, sugar transporters, shikimate metabolism, isoflavone metabolism, phenylpropanoid metabolism, isoprenoid metabolism, β-oxidation lipid metabolism, and fatty acid metabolism, and even more preferably selected from the group consisting of: glycolysis metabolism, gluconeogenesis metabolism, sucrose metabolism, sucrose catabolism, reductive pentose phosphate cycle, regulation of C3 photosynthesis, C4 pathway carbon assimilation, enzymes involved in the C4 pathway, carotenoid metabolism, tocopherol metabolism, phytosterol metabolism, brassinoid metabolism, and proline metabolism.

[1027] Transfer of a nucleic acid that encodes for a protein can result in overexpression of that protein in a transformed cell or transgenic plant. One or more of the proteins or fragments thereof encoded by nucleic acid molecules of the present invention may be overexpressed in a transformed cell or transformed plant. Particularly, any of the proteins or fragments thereof may be overexpressed in a transformed cell or transgenic plant. Such overexpression may be the result of transient or stable transfer of the exogenous genetic material.

[1028] Exogenous genetic material may be transferred into a plant cell and the plant cell by the use of a DNA vector or construct designed for such a purpose. Design of such a vector is generally within the skill of the art (See, Plant Molecular Biology: A Laboratory Manual, Clark (ed.), Springier, N.Y. (1997)).

[1029] A construct or vector may include a plant promoter to express the protein or protein fragment of choice. A number of promoters which are active in plant cells have been described in the literature. These include the nopaline synthase (NOS) promoter (Ebert et al., Proc. Natl. Acad. Sci. (U.S.A.) 84:5745-5749 (1987)), the octopine synthase (OCS) promoter (which are carried on tumor-inducing plasmids of Agrobacterium tumefaciens), the caulimovirus promoters such as the cauliflower mosaic virus (CaMV) 19S promoter (Lawton et al., Plant Mol. Biol. 9:315-324 (1987)) and the CaMV 35S promoter (Odell et al., Nature 313:810-812 (1985)), the figwort mosaic virus 35S-promoter, the light-inducible promoter from the small subunit of ribulose-1,5-bis-phosphate carboxylase (ssRUBISCO), the Adh promoter (Walker et al., Proc. Natl. Acad. Sci. (U.S.A.) 84:6624-6628 (1987)), the sucrose synthase promoter (Yang et al., Proc. Natl. Acad. Sci. (U.S.A.) 87:414-44148 (1990)), the R gene complex promoter (Chandler et al., The Plant Cell 1:1175-1183 (1989)) and the chlorophyll a/b binding protein gene promoter, etc. These promoters have been used to create DNA constructs which have been expressed in plants; see, e.g., PCT publication WO 84/02913.

[1030] Promoters which are known or are found to cause transcription of DNA in plant cells can be used in the present invention. Such promoters may be obtained from a variety of sources such as plants and plant viruses. It is preferred that the particular promoter selected should be capable of causing sufficient expression to result in the production of an effective amount of the protein to cause the desired phenotype. In addition to promoters that are known to cause transcription of DNA in plant cells, other promoters may be identified for use in the current invention by screening a plant cDNA library for genes which are selectively or preferably expressed in the target tissues or cells.

[1031] For the purpose of expression in source tissues of the plant, such as the leaf, seed, root or stem, it is preferred that the promoters utilized in the present invention have relatively high expression in these specific tissues. For this purpose, one may choose from a number of promoters for genes with tissue- or cell-specific or -enhanced expression. Examples of such promoters reported in the literature include the chloroplast glutamine synthetase GS2 promoter from pea (Edwards et al., Proc. Natl. Acad. Sci. (U.S.A.) 87:3459-3463 (1990)), the chloroplast fructose-1,6-biphosphatase (FBPase) promoter from wheat (Lloyd et al., Mol. Gen. Genet. 225:209-216 (1991)), the nuclear photosynthetic ST-LS1 promoter from potato (Stockhaus et al., EMBO J. 8:2445-2451 (1989)), the serine/threonine kinase (PAL) promoter and the glucoamylase (CHS) promoter from Arabidopsis thaliana. Also reported to be active in photosynthetically active tissues are the ribulose-1,5-bisphosphate carboxylase (RbcS) promoter from eastern larch (Larix laricina), the promoter for the cab gene, cab6, from pine (Yamamoto et al., Plant Cell Physiol. 35:773-778 (1994)), the promoter for the Cab-1 gene from wheat (Fejes et al., Plant Mol. Biol. 15:921-932 (1990)), the promoter for the CAB-1 gene from spinach (Lubberstedt et al., Plant Physiol. 104:997-1006 (1994)), the promoter for the cab1R gene from rice (Luan et al., Plant Cell. 4:971-981 (1992)), the pyruvate, orthophosphate dikinase (PPDK) promoter from maize (Matsuoka et al., Proc. Natl. Acad. Sci. (U.S.A.) 90:9586-9590 (1993)), the promoter for the tobacco Lhcb1*2 gene (Cerdan et al., Plant Mol. Biol. 33:245-255 (1997)), the Arabidopsis thaliana SUC2 sucrose-H+ symporter promoter (Truernit et al., Planta. 196:564-570 (1995)) and the promoter for the thylakoid membrane proteins from spinach (psad, psaF, psaE, PC, FNR, atpC, atpD, cab, rbcS). Other promoters for the chlorophyll a/b-binding proteins may also be utilized in the present invention, such as the promoters for LhcB gene and PsbP gene from white mustard (Sinapis alba; Kretsch et al., Plant Mol. Biol. 28:219-229 (1995)).

[1032] For the purpose of expression in sink tissues of the plant, such as the tuber of the potato plant, the fruit of tomato, or the seed of maize, wheat, rice and barley, it is preferred that the promoters utilized in the present invention have relatively high expression in these specific tissues. A number of promoters for genes with tuber-specific or -enhanced expression are known, including the class I patatin promoter (Bevan et al., EMBO J. 8:1899-1906 (1986); Jefferson et al., Plant Mol. Biol. 14:995-1006 (1990)), the promoter for the potato tuber ADPGPP genes, both the large and small subunits, the sucrose synthase promoter (Salanoubat and Belliard, Gene. 60:47-56 (1987), Salanoubat and Belliard, Gene. 84:181-185 (1989)), the promoter for the major tuber proteins including the 22 kd protein complexes and proteinase inhibitors (Hannapel, Plant Physiol. 101:703-704 (1993)), the promoter for the granule bound starch synthase gene (GBSS) (Visser et al., Plant Mol. Biol. 17:691-699 (1991)) and other class I and II patatins promoters (Koster-Topfer et al., Mol Gen Genet. 219:390-396 (1989); Mignery et al., Gene. 62:2744 (1988)).

[1033] Other promoters can also be used to express a protein or fragment thereof of the present invention in specific tissues, such as seeds or fruits. The promoter for β-conglycinin (Chen et al., Dev. Genet. 10:112-122 (1989)) or other seed-specific promoters such as the napin and phaseolin promoters, can be used. The zeins are a group of storage proteins found in maize endosperm. Genomic clones for zein genes have been isolated (Pedersen et al., Cell 29:1015-1026 (1982)) and the promoters from these clones, including the 15 kD, 16 kD, 19 kD, 22 kD, 27 kD and γ genes, could also be used. Other promoters known to function, for example, in maize include the promoters for the following genes: waxy, Brittle, Shrunken 2, Branching enzymes I and II, starch synthases, debranching enzymes, oleosins, glutelins and sucrose synthases. A particularly preferred promoter for maize endosperm expression is the promoter for the glutelin gene from rice, more particularly the Osgt-1 promoter (Zheng et al., Mol. Cell. Biol. 13:5829-5842 (1993)). Examples of promoters suitable for expression in wheat include those promoters for the ADPglucose pyrosynthase (ADPGPP) subunits, the granule bound and other starch synthase, the branching and debranching enzymes, the embryogenesis-abundant proteins, the gliadins and the glutenins. Examples of such promoters in rice include those promoters for the ADPGPP subunits, the granule bound and other starch synthase, the branching enzymes, the debranching enzymes, sucrose synthases and the glutelins. A particularly preferred promoter is the promoter for rice glutelin, Osgt-1. Examples of such promoters for barley include those for the ADPGPP subunits, the granule bound and other starch synthase, the branching enzymes, the debranching enzymes, sucrose synthases, the hordeins, the embryo globulins and the aleurone specific proteins.

[1034] Root specific promoters may also be used. An example of such a promoter is the promoter for the acid chitinase gene (Samac et al., Plant Mol. Biol. 25:587-596 (1994)). Expression in root tissue could also be accomplished by utilizing the root specific subdomains of the CaMV35S promoter that have been identified (Lam et al., Proc. Natl. Acad. Sci. (U.S.A.) 86:7890-7894 (1989)). Other root cell specific promoters include those reported by Conkling et al. (Conkling et al., Plant Physiol. 93:1203-1211 (1990)).

[1035] Additional promoters that may be utilized are described, for example, in U.S. Pat. Nos. 5,378,619; 5,391,725; 5,428,147; 5,447,858; 5,608,144; 5,608,144; 5,614,399; 5,633,441; 5,633,435; and 4,633,436. In addition, a tissue specific enhancer may be used (Fromm et al., The Plant Cell 1:977-984 (1989)).

[1036] Constructs or vectors may also include with the coding region of interest a nucleic acid sequence that acts, in whole or in part, to terminate transcription of that region. For example, such sequences have been isolated including the Tr7 3′ sequence and the NOS 3′ sequence (Ingelbrecht et al., The Plant Cell 1:671-680 (1989); Bevan et al., Nucleic Acids Res. 11:369-385 (1983)), or the like.

[1037] A vector or construct may also include regulatory elements. Examples of such include the Adh intron 1 (Callis et al., Genes and Develop. 1:1183-1200 (1987)), the sucrose synthase intron (Vasil et al., Plant Physiol. 91:1575-1579 (1989)) and the TMV omega element (Gallie et al., The Plant Cell 1:301-311 (1989)). These and other regulatory elements may be included when appropriate.

[1038] A vector or construct may also include a selectable marker. Selectable markers may also be used to select for plants or plant cells that contain the exogenous genetic material. Examples of such include, but are not limited to, a neo gene (Potrykus et al., Mol. Gen. Genet. 199:183-188 (1985)) which codes for kanamycin resistance and can be selected for using kanamycin, G418, etc.; a bar gene which codes for bialaphos resistance; a mutant EPSP synthase gene (Hinchee et al., Bio/Technology 6:915-922 (1988)) which encodes glyphosate resistance; a nitrilase gene which confers resistance to bromoxynil (Stalker et al., J. Biol. Chem. 263:6310-6314 (1988)); a mutant acetolactate synthase gene (ALS) which confers imidazolinone or sulphonylurea resistance (European Patent Application 154,204 (Sep. 11, 1985)); and a methotrexate resistant DHFR gene (Thillet et al., J. Biol. Chem. 263:12500-12508 (1988)).

[1039] A vector or construct may also include a transit peptide. Incorporation of a suitable chloroplast transit peptide may also be employed (European Patent Application Publication Number 0218571). Translational enhancers may also be incorporated as part of the vector DNA. DNA constructs could contain one or more 5′ non-translated leader sequences which may serve to enhance expression of the gene products from the resulting mRNA transcripts. Such sequences may be derived from the promoter selected to express the gene or can be specifically modified to increase translation of the mRNA. Such regions may also be obtained from viral RNAs, from suitable eukaryotic genes, or from a synthetic gene sequence. For a review of optimizing expression of transgenes, see Koziel et al., Plant Mol. Biol. 32:393-405 (1996).

[1040] A vector or construct may also include a screenable marker. Screenable markers may be used to monitor expression. Exemplary screenable markers include a β-glucuronidase or uidA gene (GUS) which encodes an enzyme for which various chromogenic substrates are known (Jefferson, Plant Mol. Biol, Rep. 5:387-405 (1987); Jefferson et al., EMBO J. 6:3901-3907 (1987)); an R-locus gene, which encodes a product that regulates the production of anthocyanin pigments (red color) in plant tissues (Dellaporta et al., Stadler Symposium 11:263-282 (1988)); a β-lactamase gene (Sutcliffe et al., Proc. Natl. Acad. Sci. (U.S.A.) 75:3737-3741 (1978)), a gene which encodes an enzyme for which various chromogenic substrates are known (e.g., PADAC, a chromogenic cephalosporin); a luciferase gene (Ow et al., Science 234:856-859 (1986)); a xylE gene (Zukowsky et al., Proc. Natl. Acad. Sci. (U.S.A.) 80:1101-1105 (1983)) which encodes a catechol dioxygenase that can convert chromogenic catechols; an α-amylase gene (Ikatu et al., Bio/Technol. 8:241-242 (1990)); a tyrosinase gene (Katz et al., J. Gen. Microbiol. 129:2703-2714 (1983)) which encodes an enzyme capable of oxidizing tyrosine to DOPA and dopaquinone which in turn condenses to melanin; an α-galactosidase, which will turn a chromogenic α-galactose substrate.

[1041] Included within the terms “selectable or screenable marker genes” are also genes which encode a secretable marker whose secretion can be detected as a means of identifying or selecting for transformed cells. Examples include markers which encode a secretable antigen that can be identified by antibody interaction, or even secretable enzymes which can be detected catalytically. Secretable proteins fall into a number of classes, including small, diffusible proteins which are detectable, (e.g., by ELISA), small active enzymes which are detectable in extracellular solution (e.g., α-amylase, β-lactamase, phosphinothricin transferase), or proteins which are inserted or trapped in the cell wall (such as proteins which include a leader sequence such as that found in the expression unit of extension or tobacco PR-S). Other possible selectable and/or screenable marker genes will be apparent to those of skill in the art.

[1042] There are many methods for introducing transforming nucleic acid molecules into plant cells. Suitable methods are believed to include virtually any method by which nucleic acid molecules may be introduced into a cell, such as by Agrobacterium infection or direct delivery of nucleic acid molecules such as, for example, by PEG-mediated transformation, by electroporation or by acceleration of DNA coated particles, etc (Potrykus, Ann. Rev. Plant Physiol. Plant Mol. Biol. 42:205-225 (1991); Vasil, Plant Mol. Biol. 25:925-937 (1994)). For example, electroporation has been used to transform maize protoplasts (Fromm et al., Nature 312:791-793 (1986)).

[1043] Other vector systems suitable for introducing transforming DNA into a host plant cell include but are not limited to binary artificial chromosome (BIBAC) vectors (Hamilton et al., Gene 200:107-116 (1997)); and transfection with RNA viral vectors (Della-Cioppa et al., Ann. N.Y. Acad. Sci. (1996), 792 (Engineering Plants for Commercial Products and Applications), 57-61). Additional vector systems also include plant selectable YAC vectors such as those described in Mullen et al., Molecular Breeding 4:449-457 (1988).

[1044] Technology for introduction of DNA into cells is well known to those of skill in the art. Four general methods for delivering a gene into cells have been described: (1) chemical methods (Graham and van der Eb, Virology 54:536-539 (1973)); (2) physical methods such as microinjection (Capecchi, Cell 22:479-488 (1980)), electroporation (Wong and Neumann, Biochem. Biophys. Res. Commun. 107:584-587 (1982); Fromm et al., Proc. Natl. Acad. Sci. (U.S.A.) 82:5824-5828 (1985); U.S. Pat. No. 5,384,253); and the gene gun (Johnston and Tang, Methods Cell Biol. 43:353-365 (1994)); (3) viral vectors (Clapp, Clin. Perinatol. 20:155-168 (1993); Lu et al., J. Exp. Med. 178:2089-2096 (1993); Eglitis and Anderson, Biotechniques 6:608-614 (1988)); and (4) receptor-mediated mechanisms (Curiel et al., Hum. Gen. Ther. 3:147-154 (1992), Wagner et al., Proc. Natl. Acad. Sci. (USA) 89:6099-6103 (1992)).

[1045] Acceleration methods that may be used include, for example, microprojectile bombardment and the like. One example of a method for delivering transforming nucleic acid molecules to plant cells is microprojectile bombardment. This method has been reviewed by Yang and Christou (eds.), Particle Bombardment Technology for Gene Transfer, Oxford Press, Oxford, England (1994)). Non-biological particles (microprojectiles) that may be coated with nucleic acids and delivered into cells by a propelling force. Exemplary particles include those comprised of tungsten, gold, platinum and the like.

[1046] A particular advantage of microprojectile bombardment, in addition to it being an effective means of reproducibly transforming monocots, is that neither the isolation of protoplasts (Cristou et al., Plant Physiol. 87:671-674 (1988)) nor the susceptibility of Agrobacterium infection are required. An illustrative embodiment of a method for delivering DNA into maize cells by acceleration is a biolistics α-particle delivery system, which can be used to propel particles coated with DNA through a screen, such as a stainless steel or Nytex screen, onto a filter surface covered with corn cells cultured in suspension. Gordon-Kamm et al., describes the basic procedure for coating tungsten particles with DNA (Gordon-Kamm et al., Plant Cell 2:603-618 (1990)). The screen disperses the tungsten nucleic acid particles so that they are not delivered to the recipient cells in large aggregates. A particle delivery system suitable for use with the present invention is the helium acceleration PDS-1000/He gun is available from Bio-Rad Laboratories (Bio-Rad, Hercules, Calif.) (Sanford et al., Technique 3:3-16 (1991)).

[1047] For the bombardment, cells in suspension may be concentrated on filters. Filters containing the cells to be bombarded are positioned at an appropriate distance below the microprojectile stopping plate. If desired, one or more screens are also positioned between the gun and the cells to be bombarded.

[1048] Alternatively, immature embryos or other target cells may be arranged on solid culture medium. The cells to be bombarded are positioned at an appropriate distance below the microprojectile stopping plate. If desired, one or more screens are also positioned between the acceleration device and the cells to be bombarded. Through the use of techniques set forth herein one may obtain up to 1000 or more foci of cells transiently expressing a marker gene. The number of cells in a focus which express the exogenous gene product 48 hours post-bombardment often range from one to ten and average one to three.

[1049] In bombardment transformation, one may optimize the pre-bombardment culturing conditions and the bombardment parameters to yield the maximum numbers of stable transformants. Both the physical and biological parameters for bombardment are important in this technology. Physical factors are those that involve manipulating the DNA/microprojectile precipitate or those that affect the flight and velocity of either the macro- or microprojectiles. Biological factors include all steps involved in manipulation of cells before and immediately after bombardment, the osmotic adjustment of target cells to help alleviate the trauma associated with bombardment and also the nature of the transforming DNA, such as linearized DNA or intact supercoiled plasmids. It is believed that pre-bombardment manipulations are especially important for successful transformation of immature embryos.

[1050] In another alternative embodiment, plastids can be stably transformed. Methods disclosed for plastid transformation in higher plants include the particle gun delivery of DNA containing a selectable marker and targeting of the DNA to the plastid genome through homologous recombination (Svab et al., Proc. Natl. Acad. Sci. (U.S.A.) 87:8526-8530 (1990); Svab and Maliga, Proc. Natl. Acad. Sci. (U.S.A.) 90:913-917 (1993); Staub and Maliga, EMBO J. 12:601-606 (1993); U.S. Pat. Nos. 5,451,513 and 5,545,818).

[1051] Accordingly, it is contemplated that one may wish to adjust various aspects of the bombardment parameters in small scale studies to fully optimize the conditions. One may particularly wish to adjust physical parameters such as gap distance, flight distance, tissue distance and helium pressure. One may also minimize the trauma reduction factors by modifying conditions which influence the physiological state of the recipient cells and which may therefore influence transformation and integration efficiencies. For example, the osmotic state, tissue hydration and the subculture stage or cell cycle of the recipient cells may be adjusted for optimum transformation. The execution of other routine adjustments will be known to those of skill in the art in light of the present disclosure.

[1052] Agrobacterium-mediated transfer is a widely applicable system for introducing genes into plant cells because the DNA can be introduced into whole plant tissues, thereby bypassing the need for regeneration of an intact plant from a protoplast. The use of Agrobacterium-mediated plant integrating vectors to introduce DNA into plant cells is well known in the art. See, for example the methods described by Fraley et al., Bio/Technology 3:629-635 (1985) and Rogers et al., Methods Enzymol. 153:253-277 (1987). Further, the integration of the Ti-DNA is a relatively precise process resulting in few rearrangements. The region of DNA to be transferred is defined by the border sequences and intervening DNA is usually inserted into the plant genome as described (Spielmann et al., Mol. Gen. Genet. 205:34 (1986)).

[1053] Modern Agrobacterium transformation vectors are capable of replication in E. coli as well as Agrobacterium, allowing for convenient manipulations as described (Klee et al., In: Plant DNA Infectious Agents, Hohn and Schell (eds.), Springer-Verlag, New York, pp. 179-203 (1985). Moreover, technological advances in vectors for Agrobacterium-mediated gene transfer have improved the arrangement of genes and restriction sites in the vectors to facilitate construction of vectors capable of expressing various polypeptide coding genes. The vectors described have convenient multi-linker regions flanked by a promoter and a polyadenylation site for direct expression of inserted polypeptide coding genes and are suitable for present purposes (Rogers et al., Methods Enzymol. 153:253-277 (1987)). In addition, Agrobacterium containing both armed and disarmed Ti genes can be used for the transformations. In those plant strains where Agrobacterium-mediated transformation is efficient, it is the method of choice because of the facile and defined nature of the gene transfer.

[1054] A transgenic plant formed using Agrobacterium transformation methods typically contains a single gene on one chromosome. Such transgenic plants can be referred to as being heterozygous for the added gene. More preferred is a transgenic plant that is homozygous for the added structural gene; i.e., a transgenic plant that contains two added genes, one gene at the same locus on each chromosome of a chromosome pair. A homozygous transgenic plant can be obtained by sexually mating (selfing) an independent segregant transgenic plant that contains a single added gene, germinating some of the seed produced and analyzing the resulting plants produced for the gene of interest.

[1055] It is also to be understood that two different transgenic plants can also be mated to produce offspring that contain two independently segregating added, exogenous genes. Selfing of appropriate progeny can produce plants that are homozygous for both added, exogenous genes that encode a polypeptide of interest. Back-crossing to a parental plant and out-crossing with a non-transgenic plant are also contemplated, as is vegetative propagation.

[1056] Transformation of plant protoplasts can be achieved using methods based on calcium phosphate precipitation, polyethylene glycol treatment, electroporation and combinations of these treatments (See, for example, Potrykus et al., Mol. Gen. Genet. 205:193-200 (1986); Lorz et al., Mol. Gen. Genet. 199:178 (1985); Fromm et al., Nature 319:791 (1986); Uchimiya et al., Mol. Gen. Genet. 204:204 (1986); Marcotte et al., Nature 335:454-457 (1988)).

[1057] Application of these systems to different plant strains depends upon the ability to regenerate that particular plant strain from protoplasts. Illustrative methods for the regeneration of cereals from protoplasts are described (Fujimura et al., Plant Tissue Culture Letters 2:74 (1985); Toriyama et al., Theor Appl. Genet. 205:34 (1986); Yamada et al., Plant Cell Rep. 4:85 (1986); Abdullah et al., Biotechnology 4:1087 (1986)).

[1058] To transform plant strains that cannot be successfully regenerated from protoplasts, other ways to introduce DNA into intact cells or tissues can be utilized. For example, regeneration of cereals from immature embryos or explants can be effected as described (Vasil, Biotechnology 6:397 (1988)). In addition, “particle gun” or high-velocity microprojectile technology can be utilized (Vasil et al., Bio/Technology 10:667 (1992)).

[1059] Using the latter technology, DNA is carried through the cell wall and into the cytoplasm on the surface of small metal particles as described (Klein et al., Nature 328:70 (1987); Klein et al., Proc. Natl. Acad. Sci. (U.S.A.) 85:8502-8505 (1988); McCabe et al., Bio/Technology 6:923 (1988)). The metal particles penetrate through several layers of cells and thus allow the transformation of cells within tissue explants.

[1060] Other methods of cell transformation can also be used and include but are not limited to introduction of DNA into plants by direct DNA transfer into pollen (Hess et al., Intern Rev. Cytol. 107:367 (1987); Luo et al., Plant Mol. Biol. Reporter 6:165 (1988)), by direct injection of DNA into reproductive organs of a plant (Pena et al., Nature 325:274 (1987)), or by direct injection of DNA into the cells of immature embryos followed by the rehydration of desiccated embryos (Neuhaus et al., Theor. Appl. Genet. 75:30 (1987)).

[1061] The regeneration, development and cultivation of plants from single plant protoplast transformants or from various transformed explants is well known in the art (Weissbach and Weissbach, In: Methods for Plant Molecular Biology, Academic Press, San Diego, Calif., (1988)). This regeneration and growth process typically includes the steps of selection of transformed cells, culturing those individualized cells through the usual stages of embryonic development through the rooted plantlet stage. Transgenic embryos and seeds are similarly regenerated. The resulting transgenic rooted shoots are thereafter planted in an appropriate plant growth medium such as soil.

[1062] The development or regeneration of plants containing the foreign, exogenous gene that encodes a protein of interest is well known in the art. Preferably, the regenerated plants are self-pollinated to provide homozygous transgenic plants. Otherwise, pollen obtained from the regenerated plants is crossed to seed-grown plants of agronomically important lines. Conversely, pollen from plants of these important lines is used to pollinate regenerated plants. A transgenic plant of the present invention containing a desired polypeptide is cultivated using methods well known to one skilled in the art.

[1063] There are a variety of methods for the regeneration of plants from plant tissue. The particular method of regeneration will depend on the starting plant tissue and the particular plant species to be regenerated.

[1064] Methods for transforming dicots, primarily by use of Agrobacterium tumefaciens and obtaining transgenic plants have been published for cotton (U.S. Pat. No. 5,004,863; U.S. Pat. No. 5,159,135; U.S. Pat. No. 5,518,908); soybean (U.S. Pat. No. 5,569,834; U.S. Pat. No. 5,416,011; McCabe et al., Biotechnology 6:923 (1988); Christou et al., Plant Physiol. 87:671-674 (1988)); Brassica (U.S. Pat. No. 5,463,174); peanut (Cheng et al., Plant Cell Rep. 15:653-657 (1996), McKently et al., Plant Cell Rep. 14:699-703 (1995)); papaya; and pea (Grant et al., Plant Cell Rep. 15:254-258 (1995)).

[1065] Transformation of monocotyledons using electroporation, particle bombardment and Agrobacterium have also been reported. Transformation and plant regeneration have been achieved in asparagus (Bytebier et al., Proc. Natl. Acad. Sci. (USA) 84:5354 (1987)); barley (Wan and Lemaux, Plant Physiol 104:37 (1994)); maize (Rhodes et al., Science 240:204 (1988); Gordon-Kamm et al., Plant Cell 2:603-618 (1990); Fromm et al., Bio/Technology 8:833 (1990); Koziel et al., Bio/Technology 11:194 (1993); Armstrong et al., Crop Science 35:550-557 (1995); oat (Somers et al., Bio/Technology 10:1589 (1992)); orchard grass (Horn et al., Plant Cell Rep. 7:469 (1988)); rice (Toriyama et al., Theor Appl. Genet. 205:34 (1986); Part et al., Plant Mol. Biol. 32:1135-1148 (1996); Abedinia et al., Aust. J. Plant Physiol. 24:133-141 (1997); Zhang and Wu, Theor. Appl. Genet. 76:835 (1988); Zhang et al., Plant Cell Rep. 7:379 (1988); Battraw and Hall, Plant Sci. 86:191-202 (1992); Christou et al., Bio/Technology 9:957 (1991)); rye (De la Pena et al., Nature 325:274 (1987)); sugarcane (Bower and Birch, Plant J. 2:409 (1992)); tall fescue (Wang et al., Bio/Technology 10:691 (1992)) and wheat (Vasil et al., Bio/Technology 10:667 (1992); U.S. Pat. No. 5,631,152.)

[1066] Assays for gene expression based on the transient expression of cloned nucleic acid constructs have been developed by introducing the nucleic acid molecules into plant cells by polyethylene glycol treatment, electroporation, or particle bombardment (Marcotte et al., Nature 335:454-457 (1988); Marcotte et al., Plant Cell 1:523-532 (1989); McCarty et al., Cell 66:895-905 (1991); Hattori et al., Genes Dev. 6:609-618 (1992); Goff et al., EMBO J. 9:2517-2522 (1990)). Transient expression systems may be used to functionally dissect gene constructs (see generally, Mailga et al., Methods in Plant Molecular Biology, Cold Spring Harbor Press (1995)).

[1067] Any of the nucleic acid molecules of the present invention may be introduced into a plant cell in a permanent or transient manner in combination with other genetic elements such as vectors, promoters, enhancers, etc. Further, any of the nucleic acid molecules of the present invention may be introduced into a plant cell in a manner that allows for overexpression of the protein or fragment thereof encoded by the nucleic acid molecule.

[1068] Cosuppression is the reduction in expression levels, usually at the level of RNA, of a particular endogenous gene or gene family by the expression of a homologous sense construct that is capable of transcribing mRNA of the same strandedness as the transcript of the endogenous gene (Napoli et al., Plant Cell 2:279-289 (1990); van der Krol et al., Plant Cell 2:291-299 (1990)). Cosuppression may result from stable transformation with a single copy nucleic acid molecule that is homologous to a nucleic acid sequence found with the cell (Prolls and Meyer, Plant J. 2:465-475 (1992)) or with multiple copies of a nucleic acid molecule that is homologous to a nucleic acid sequence found with the cell (Mittlesten et al., Mol. Gen. Genet. 244:325-330 (1994)). Genes, even though different, linked to homologous promoters may result in the cosuppression of the linked genes (Vaucheret, C.R. Acad. Sci. III 316:1471-1483 (1993)).

[1069] This technique has, for example, been applied to generate white flowers from red petunia and tomatoes that do not ripen on the vine. Up to 50% of petunia transformants that contained a sense copy of the glucoamylase (CHS) gene produced white flowers or floral sectors; this was as a result of the post-transcriptional loss of mRNA encoding CHS (Flavell, Proc. Natl. Acad. Sci. (U.S.A.) 91:3490-3496 (1994)); van Blokland et al., Plant J. 6:861-877 (1994)). Cosuppression may require the coordinate transcription of the transgene and the endogenous gene and can be reset by a developmental control mechanism (Jorgensen, Trends Biotechnol. 8:340-344 (1990); Meins and Kunz, In: Gene Inactivation and Homologous Recombination in Plants, Paszkowski (ed.), pp. 335-348, Kluwer Academic, Netherlands (1994)).

[1070] It is understood that one or more of the nucleic acids of the present invention may be introduced into a plant cell and transcribed using an appropriate promoter with such transcription resulting in the cosuppression of an endogenous protein.

[1071] Antisense approaches are a way of preventing or reducing gene function by targeting the genetic material (Mol et al., FEBS Lett. 268:427-430 (1990)). The objective of the antisense approach is to use a sequence complementary to the target gene to block its expression and create a mutant cell line or organism in which the level of a single chosen protein is selectively reduced or abolished. Antisense techniques have several advantages over other ‘reverse genetic’ approaches. The site of inactivation and its developmental effect can be manipulated by the choice of promoter for antisense genes or by the timing of external application or microinjection. Antisense can manipulate its specificity by selecting either unique regions of the target gene or regions where it shares homology to other related genes (Hiatt et al., In: Genetic Engineering, Setlow (ed.), Vol. 11, New York: Plenum 49-63 (1989)).

[1072] The principle of regulation by antisense RNA is that RNA that is complementary to the target mRNA is introduced into cells, resulting in specific RNA:RNA duplexes being formed by base pairing between the antisense substrate and the target mRNA (Green et al., Annu. Rev. Biochem. 55:569-597 (1986)). Under one embodiment, the process involves the introduction and expression of an antisense gene sequence. Such a sequence is one in which part or all of the normal gene sequences are placed under a promoter in inverted orientation so that the ‘wrong’ or complementary strand is transcribed into a noncoding antisense RNA that hybridizes with the target mRNA and interferes with its expression (Takayama and Inouye, Crit. Rev. Biochem. Mol. Biol. 25:155-184 (1990)). An antisense vector is constructed by standard procedures and introduced into cells by transformation, transfection, electroporation, microinjection, infection, etc. The type of transformation and choice of vector will determine whether expression is transient or stable. The promoter used for the antisense gene may influence the level, timing, tissue, specificity, or inducibility of the antisense inhibition.

[1073] It is understood that the activity of a protein in a plant cell may be reduced or depressed by growing a transformed plant cell containing a nucleic acid molecule whose non-transcribed strand encodes a protein or fragment thereof.

[1074] Antibodies have been expressed in plants (Hiatt et al., Nature 342:76-78 (1989); Conrad and Fielder, Plant Mol. Biol. 26:1023-1030 (1994)). Cytoplasmic expression of a scFv (single-chain Fv antibodies) has been reported to delay infection by artichoke mottled crinkle virus. Transgenic plants that express antibodies directed against endogenous proteins may exhibit a physiological effect (Philips et al., EMBO J. 16:4489-4496 (1997); Marion-Poll, Trends in Plant Science 2:447-448 (1997)). For example, expressed anti-abscisic antibodies have been reported to result in a general perturbation of seed development (Philips et al., EMBO J. 16:4489-4496 (1997)).

[1075] Antibodies that are catalytic may also be expressed in plants (abzymes). The principle behind abzymes is that since antibodies may be raised against many molecules, this recognition ability can be directed toward generating antibodies that bind transition states to force a chemical reaction forward (Persidas, Nature Biotechnology 15:1313-1315 (1997); Baca et al., Ann. Rev. Biophys. Biomol. Struct. 26:461-493 (1997)). The catalytic abilities of abzymes may be enhanced by site directed mutagenesis. Examples of abzymes are, for example, set forth in U.S. Pat. No. 5,658,753; U.S. Pat. No. 5,632,990; U.S. Pat. No. 5,631,137; U.S. Pat. No. 5,602,015; U.S. Pat. No. 5,559,538; U.S. Pat. No. 5,576,174; U.S. Pat. No. 5,500,358; U.S. Pat. No. 5,318,897; U.S. Pat. No. 5,298,409; U.S. Pat. No. 5,258,289 and U.S. Pat. No. 5,194,585.

[1076] It is understood that any of the antibodies of the present invention may be expressed in plants and that such expression can result in a physiological effect. It is also understood that any of the expressed antibodies may be catalytic.

[1077] (b) Fungal Constructs and Fungal Transformants

[1078] The present invention also relates to a fungal recombinant vector comprising exogenous genetic material. The present invention also relates to a fungal cell comprising a fungal recombinant vector. The present invention also relates to methods for obtaining a recombinant fungal host cell comprising introducing into a fungal host cell exogenous genetic material.

[1079] Exogenous genetic material may be transferred into a fungal cell. In a preferred embodiment the exogenous genetic material includes a nucleic acid molecule of the present invention having a sequence selected from the group consisting of SEQ ID NO: 1 through SEQ ID NO: 294,310 or complements thereof or fragments of either. The fungal recombinant vector may be any vector which can be conveniently subjected to recombinant DNA procedures. The choice of a vector will typically depend on the compatibility of the vector with the fungal host cell into which the vector is to be introduced. The vector may be a linear or a closed circular plasmid. The vector system may be a single vector or plasmid or two or more vectors or plasmids which together contain the total DNA to be introduced into the genome of the fungal host.

[1080] The fungal vector may be an autonomously replicating vector, i.e., a vector which exists as an extrachromosomal entity, the replication of which is independent of chromosomal replication, e.g., a plasmid, an extrachromosomal element, a minichromosome, or an artificial chromosome. The vector may contain any means for assuring self-replication. Alternatively, the vector may be one which, when introduced into the fungal cell, is integrated into the genome and replicated together with the chromosome(s) into which it has been integrated. For integration, the vector may rely on the nucleic acid sequence of the vector for stable integration of the vector into the genome by homologous or nonhomologous recombination. Alternatively, the vector may contain additional nucleic acid sequences for directing integration by homologous recombination into the genome of the fungal host. The additional nucleic acid sequences enable the vector to be integrated into the host cell genome at a precise location(s) in the chromosome(s). To increase the likelihood of integration at a precise location, there should be preferably two nucleic acid sequences which individually contain a sufficient number of nucleic acids, preferably 400 bp to 1500 bp, more preferably 800 bp to 1000 bp, which are highly homologous with the corresponding target sequence to enhance the probability of homologous recombination. These nucleic acid sequences may be any sequence that is homologous with a target sequence in the genome of the fungal host cell and, furthermore, may be non-encoding or encoding sequences.

[1081] For autonomous replication, the vector may further comprise an origin of replication enabling the vector to replicate autonomously in the host cell in question. Examples of origin of replications for use in a yeast host cell are the 2 micron origin of replication and the combination of CEN3 and ARS 1. Any origin of replication may be used which is compatible with the fungal host cell of choice.

[1082] The fungal vectors of the present invention preferably contain one or more selectable markers which permit easy selection of transformed cells. A selectable marker is a gene the product of which provides, for example biocide or viral resistance, resistance to heavy metals, prototrophy to auxotrophs and the like. The selectable marker may be selected from the group including, but not limited to, amdS (acetamidase), argB (ornithine carbamoyltransferase), bar (phosphinothricin acetyltransferase), hygB (hygromycin phosphotransferase), niaD (nitrate reductase), pyrG (orotidine-5′-phosphate decarboxylase) and sC (sulfate adenyltransferase) and trpC (anthranilate synthase). Preferred for use in an Aspergillus cell are the amdS and pyrG markers of Aspergillus nidulans or Aspergillus oryzae and the bar marker of Streptomyces hygroscopicus. Furthermore, selection may be accomplished by co-transformation, e.g., as described in WO 91/17243. A nucleic acid sequence of the present invention may be operably linked to a suitable promoter sequence. The promoter sequence is a nucleic acid sequence which is recognized by the fungal host cell for expression of the nucleic acid sequence. The promoter sequence contains transcription and translation control sequences which mediate the expression of the protein or fragment thereof.

[1083] A promoter may be any nucleic acid sequence which shows transcriptional activity in the fungal host cell of choice and may be obtained from genes encoding polypeptides either homologous or heterologous to the host cell. Examples of suitable promoters for directing the transcription of a nucleic acid construct of the invention in a filamentous fungal host are promoters obtained from the genes encoding Aspergillus oryzae TAKA amylase, Rhizomucor miehei aspartic proteinase, Aspergillus niger neutral alpha-amylase, Aspergillus niger acid stable alpha-amylase, Aspergillus niger or Aspergillus awamori glucoamylase (glaA), Rhizomucor miehei lipase, Aspergillus oryzae alkaline protease, Aspergillus oryzae triose phosphate isomerase, Aspergillus nidulans acetamidase and hybrids thereof. In a yeast host, a useful promoter is the Saccharomyces cerevisiae enolase (eno-1) promoter. Particularly preferred promoters are the TAKA amylase, NA2-tpi (a hybrid of the promoters from the genes encoding Aspergillus niger neutral alpha-amylase and Aspergillus oryzae triose phosphate isomerase) and glaA promoters.

[1084] A protein or fragment thereof encoding nucleic acid molecule of the present invention may also be operably linked to a terminator sequence at its 3′ terminus. The terminator sequence may be native to the nucleic acid sequence encoding the protein or fragment thereof or may be obtained from foreign sources. Any terminator which is functional in the fungal host cell of choice may be used in the present invention, but particularly preferred terminators are obtained from the genes encoding Aspergillus oryzae TAKA amylase, Aspergillus niger glucoamylase, Aspergillus nidulans anthranilate synthase, Aspergillus niger alpha-glucosidase and Saccharomyces cerevisiae enolase.

[1085] A protein or fragment thereof encoding nucleic acid molecule of the present invention may also be operably linked to a suitable leader sequence. A leader sequence is a nontranslated region of a mRNA which is important for translation by the fungal host. The leader sequence is operably linked to the 5′ terminus of the nucleic acid sequence encoding the protein or fragment thereof. The leader sequence may be native to the nucleic acid sequence encoding the protein or fragment thereof or may be obtained from foreign sources. Any leader sequence which is functional in the fungal host cell of choice may be used in the present invention, but particularly preferred leaders are obtained from the genes encoding Aspergillus oryzae TAKA amylase and Aspergillus oryzae triose phosphate isomerase.

[1086] A polyadenylation sequence may also be operably linked to the 3′ terminus of the nucleic acid sequence of the present invention. The polyadenylation sequence is a sequence which when transcribed is recognized by the fungal host to add polyadenosine residues to transcribed mRNA. The polyadenylation sequence may be native to the nucleic acid sequence encoding the protein or fragment thereof or may be obtained from foreign sources. Any polyadenylation sequence which is functional in the fungal host of choice may be used in the present invention, but particularly preferred polyadenylation sequences are obtained from the genes encoding Aspergillus oryzae TAKA amylase, Aspergillus niger glucoamylase, Aspergillus nidulans anthranilate synthase and Aspergillus niger alpha-glucosidase.

[1087] To avoid the necessity of disrupting the cell to obtain the protein or fragment thereof and to minimize the amount of possible degradation of the expressed protein or fragment thereof within the cell, it is preferred that expression of the protein or fragment thereof gives rise to a product secreted outside the cell. To this end, a protein or fragment thereof of the present invention may be linked to a signal peptide linked to the amino terminus of the protein or fragment thereof. A signal peptide is an amino acid sequence which permits the secretion of the protein or fragment thereof from the fungal host into the culture medium. The signal peptide may be native to the protein or fragment thereof of the invention or may be obtained from foreign sources. The 5′ end of the coding sequence of the nucleic acid sequence of the present invention may inherently contain a signal peptide coding region naturally linked in translation reading frame with the segment of the coding region which encodes the secreted protein or fragment thereof. Alternatively, the 5′ end of the coding sequence may contain a signal peptide coding region which is foreign to that portion of the coding sequence which encodes the secreted protein or fragment thereof. The foreign signal peptide may be required where the coding sequence does not normally contain a signal peptide coding region. Alternatively, the foreign signal peptide may simply replace the natural signal peptide to obtain enhanced secretion of the desired protein or fragment thereof. The foreign signal peptide coding region may be obtained from a glucoamylase or an amylase gene from an Aspergillus species, a lipase or proteinase gene from Rhizomucor miehei, the gene for the alpha-factor from Saccharomyces cerevisiae, or the calf preprochymosin gene. An effective signal peptide for fungal host cells is the Aspergillus oryzae TAKA amylase signal, Aspergillus niger neutral amylase signal, the Rhizomucor miehei aspartic proteinase signal, the Humicola lanuginosus cellulase signal, or the Rhizomucor miehei lipase signal. However, any signal peptide capable of permitting secretion of the protein or fragment thereof in a fungal host of choice may be used in the present invention.

[1088] A protein or fragment thereof encoding nucleic acid molecule of the present invention may also be linked to a propeptide coding region. A propeptide is an amino acid sequence found at the amino terminus of aproprotein or proenzyme. Cleavage of the propeptide from the proprotein yields a mature biochemically active protein. The resulting polypeptide is known as a propolypeptide or proenzyme (or a zymogen in some cases). Propolypeptides are generally inactive and can be converted to mature active polypeptides by catalytic or autocatalytic cleavage of the propeptide from the propolypeptide or proenzyme. The propeptide coding region may be native to the protein or fragment thereof or may be obtained from foreign sources. The foreign propeptide coding region may be obtained from the Saccharomyces cerevisiae alpha-factor gene or Myceliophthora thermophila laccase gene (WO 95/33836).

[1089] The procedures used to ligate the elements described above to construct the recombinant expression vector of the present invention are well known to one skilled in the art (see, for example, Sambrook et al., Molecular Cloning, A Laboratory Manual, 2nd ed., Cold Spring Harbor, N.Y., (1989)).

[1090] The present invention also relates to recombinant fungal host cells produced by the methods of the present invention which are advantageously used with the recombinant vector of the present invention. The cell is preferably transformed with a vector comprising a nucleic acid sequence of the invention followed by integration of the vector into the host chromosome. The choice of fungal host cells will to a large extent depend upon the gene encoding the protein or fragment thereof and its source. The fungal host cell may, for example, be a yeast cell or a filamentous fungal cell.

[1091] “Yeast” as used herein includes Ascosporogenous yeast (Endomycetales), Basidiosporogenous yeast and yeast belonging to the Fungi Imperfecti (Blastomycetes). The Ascosporogenous yeasts are divided into the families Spermophthoraceae and Saccharomycetaceae. The latter is comprised of four subfamilies, Schizosaccharomycoideae (for example, genus Schizosaccharomyces), Nadsonioideae, Lipomycoideae and Saccharomycoideae (for example, genera Pichia, Kluyveromyces and Saccharomyces). The Basidiosporogenous yeasts include the genera Leucosporidim, Rhodosporidium, Sporidiobolus, Filobasidium and Filobasidiella. Yeast belonging to the Fungi Imperfecti are divided into two families, Sporobolomycetaceae (for example, genera Sorobolomyces and Bullera) and Cryptococcaceae (for example, genus Candida). Since the classification of yeast may change in the future, for the purposes of this invention, yeast shall be defined as described in Biology and Activities of Yeast (Skinner et al., Soc. App. Bacteriol. Symposium Series No. 9, (1980)). The biology of yeast and manipulation of yeast genetics are well known in the art (see, for example, Biochemistry and Genetics of Yeast, Bacil et al. (ed.), 2nd edition, 1987; The Yeasts, Rose and Harrison (eds.), 2nd ed., (1987); and The Molecular Biology of the Yeast Saccharomyces, Strathern et al. (eds.), (1981)).

[1092] “Fungi” as used herein includes the phyla Ascomycota, Basidiomycota, Chytridiomycota and Zygomycota (as defined by Hawksworth et al., In: Ainsworth and Bisby's Dictionary of The Fungi, 8th edition, 1995, CAB International, University Press, Cambridge, UK) as well as the Oomycota (as cited in Hawksworth et al., In: Ainsworth and Bisby's Dictionary of The Fungi, 8th edition, 1995, CAB International, University Press, Cambridge, UK) and all mitosporic fungi (Hawksworth et al., In: Ainsworth and Bisby's Dictionary of The Fungi, 8th edition, 1995, CAB International, University Press, Cambridge, UK). Representative groups of Ascomycota include, for example, Neurospora, Eupenicillium (=Penicillium), Emericella (=Aspergillus), Eurotiun (=Aspergillus) and the true yeasts listed above. Examples of Basidiomycota include mushrooms, rusts and smuts. Representative groups of Chytridiomycota include, for example, Allomyces, Blastocladiella, Coelomomyces and aquatic fungi. Representative groups of Oomycota include, for example, Saprolegniomycetous aquatic fungi (water molds) such as Achlya. Examples of mitosporic fungi include Aspergillus, Penicilliun, Candida and Alternaria. Representative groups of Zygomycota include, for example, Rhizopus and Mucor.

[1093] “Filamentous fungi” include all filamentous forms of the subdivision Eumycota and Oomycota (as defined by Hawksworth et al., In: Ainsworth and Bisby's Dictionary of The Fungi, 8th edition, 1995, CAB International, University Press, Cambridge, UK). The filamentous fungi are characterized by a vegetative mycelium composed of chitin, cellulose, glucan, chitosan, mannan and other complex polysaccharides. Vegetative growth is by hyphal elongation and carbon catabolism is obligately aerobic. In contrast, vegetative growth by yeasts such as Saccharomyces cerevisiae is by budding of a unicellular thallus and carbon catabolism may be fermentative.

[1094] In one embodiment, the fungal host cell is a yeast cell. In a preferred embodiment, the yeast host cell is a cell of the species of Candida, Kluyveromyces, Saccharomyces, Schizosaccharomyces, Pichia and Yarrowia. In a preferred embodiment, the yeast host cell is a Saccharomyces cerevisiae cell, a Saccharomyces carlsbergensis, Saccharomyces diastaticus cell, a Saccharomyces douglasii cell, a Saccharomyces kluyveri cell, a Saccharomyces norbensis cell, or a Saccharomyces oviformis cell. In another preferred embodiment, the yeast host cell is a Kluyveromyces lactis cell. In another preferred embodiment, the yeast host cell is a Yarrowia lipolytica cell.

[1095] In another embodiment, the fungal host cell is a filamentous fungal cell. In a preferred embodiment, the filamentous fungal host cell is a cell of the species of, but not limited to, Acremonium, Aspergillus, Fusarium, Humicola, Myceliophthora, Mucor, Neurospora, Penicillium, Thielavia, Tolypocladium and Trichoderma. In a preferred embodiment, the filamentous fungal host cell is an Aspergillus cell. In another preferred embodiment, the filamentous fungal host cell is an Acremonium cell. In another preferred embodiment, the filamentous fungal host cell is a Fusarium cell. In another preferred embodiment, the filamentous fungal host cell is a Humicola cell. In another preferred embodiment, the filamentous fungal host cell is a Myceliophthora cell. In another even preferred embodiment, the filamentous fungal host cell is a Mucor cell. In another preferred embodiment, the filamentous fungal host cell is a Neurospora cell. In another preferred embodiment, the filamentous fungal host cell is a Penicillium cell. In another preferred embodiment, the filamentous fungal host cell is a Thielavia cell. In another preferred embodiment, the filamentous fungal host cell is a Tolypocladiun cell. In another preferred embodiment, the filamentous fungal host cell is a Trichoderma cell. In a preferred embodiment, the filamentous fungal host cell is an Aspergillus oryzae cell, an Aspergillus niger cell, an Aspergillus foetidus cell, or an Aspergillus japonicus cell. In another preferred embodiment, the filamentous fungal host cell is a Fusarium oxysporum cell or a Fusarium graminearum cell. In another preferred embodiment, the filamentous fungal host cell is a Humicola insolens cell or a Humicola lanuginosus cell. In another preferred embodiment, the filamentous fungal host cell is a Myceliophthora thermophila cell. In a most preferred embodiment, the filamentous fungal host cell is a Mucor miehei cell. In a most preferred embodiment, the filamentous fungal host cell is a Neurospora crassa cell. In a most preferred embodiment, the filamentous fungal host cell is a Penicillium purpurogenum cell. In another most preferred embodiment, the filamentous fungal host cell is a Thielavia terrestris cell. In another most preferred embodiment, the Trichoderma cell is a Trichoderma reesei cell, a Trichoderma viride cell, a Trichoderma longibrachiatum cell, a Trichoderma harzianum cell, or a Trichoderma koningii cell. In a preferred embodiment, the fungal host cell is selected from an A. nidulans cell, an A. niger cell, an A. oryzae cell and an A. sojae cell. In a further preferred embodiment, the fungal host cell is an A. nidulans cell.

[1096] The recombinant fungal host cells of the present invention may further comprise one or more sequences which encode one or more factors that are advantageous in the expression of the protein or fragment thereof, for example, an activator (e.g., a trans-acting factor), a chaperone and a processing protease. The nucleic acids encoding one or more of these factors are preferably not operably linked to the nucleic acid encoding the protein or fragment thereof. An activator is a protein which activates transcription of a nucleic acid sequence encoding a polypeptide (Kudla et al., EMBO 9:1355-1364(1990); Jarai and Buxton, Current Genetics 26:2238-244(1994); Verdier, Yeast 6:271-297(1990)). The nucleic acid sequence encoding an activator may be obtained from the genes encoding Saccharomyces cerevisiae heme activator protein 1 (hap1), Saccharomyces cerevisiae galactose metabolizing protein 4 (gal4) and Aspergillus nidulans ammonia regulation protein (areA). For further examples, see Verdier, Yeast 6:271-297 (1990); MacKenzie et al., Journal of Gen. Microbiol. 139:2295-2307 (1993)). A chaperone is a protein which assists another protein in folding properly (Hartl et al., TIBS 19:20-25 (1994); Bergeron et al., TIBS 19:124-128 (1994); Demolder et al., J. Biotechnology 32:179-189 (1994); Craig, Science 260:1902-1903(1993); Gething and Sambrook, Nature 355:3345 (1992); Puig and Gilbert, J. Biol. Chem. 269:7764-7771 (1994); Wang and Tsou, FASEB Journal 7:1515-11157 (1993); Robinson et al., Bio/technology 1:381-384 (1994)). The nucleic acid sequence encoding a chaperone may be obtained from the genes encoding Aspergillus oryzae protein disulphide isomerase, Saccharomyces cerevisiae calnexin, Saccharomyces cerevisiae BiP/GRP78 and Saccharomyces cerevisiae Hsp70. For further examples, see Gething and Sambrook, Nature 355:33-45 (1992); Hartl et al., TIBS 19:20-25 (1994). A processing protease is a protease that cleaves a propeptide to generate a mature biochemically active polypeptide (Enderlin and Ogrydziak, Yeast 10:67-79 (1994); Fuller et al., Proc. Natl. Acad. Sci. (U.S.A.) 86:1434-1438 (1989); Julius et al., Cell 37:1075-1089 (1984); Julius et al., Cell 32:839-852 (1983)). The nucleic acid sequence encoding a processing protease may be obtained from the genes encoding Aspergillus niger Kex2, Saccharomyces cerevisiae dipeptidylaminopeptidase, Saccharomyces cerevisiae Kex2 and Yarrowia lipolytica dibasic processing endoprotease (xpr6). Any factor that is functional in the fungal host cell of choice may be used in the present invention.

[1097] Fungal cells may be transformed by a process involving protoplast formation, transformation of the protoplasts and regeneration of the cell wall in a manner known per se. Suitable procedures for transformation of Aspergillus host cells are described in EP 238 023 and Yelton et al., Proc. Natl. Acad. Sci. (U.S.A.) 81:1470-1474 (1984). A suitable method of transforming Fusarium species is described by Malardier et al., Gene 78:147-156 (1989). Yeast may be transformed using the procedures described by Becker and Guarente, In: Abelson and Simon, (eds.), Guide to Yeast Genetics and Molecular Biology, Methods Enzymol. Volume 194, pp. 182-187, Academic Press, Inc., New York; Ito et al., J. Bacteriology 153:163 (1983); Hinnen et al., Proc. Natl. Acad. Sci. (U.S.A.) 75:1920 (1978).

[1098] The present invention also relates to methods of producing the protein or fragment thereof comprising culturing the recombinant fungal host cells under conditions conducive for expression of the protein or fragment thereof. The fungal cells of the present invention are cultivated in a nutrient medium suitable for production of the protein or fragment thereof using methods known in the art. For example, the cell may be cultivated by shake flask cultivation, small-scale or large-scale fermentation (including continuous, batch, fed-batch, or solid state fermentations) in laboratory or industrial fermentors performed in a suitable medium and under conditions allowing the protein or fragment thereof to be expressed and/or isolated. The cultivation takes place in a suitable nutrient medium comprising carbon and nitrogen sources and inorganic salts, using procedures known in the art (see, e.g., Bennett and LaSure (eds.), More Gene Manipulations in Fungi, Academic Press, Calif., (1991)). Suitable media are available from commercial suppliers or may be prepared according to published compositions (e.g., in catalogues of the American Type Culture Collection, Manassas, Va.). If the protein or fragment thereof is secreted into the nutrient medium, a protein or fragment thereof can be recovered directly from the medium. If the protein or fragment thereof is not secreted, it is recovered from cell lysates.

[1099] The expressed protein or fragment thereof may be detected using methods known in the art that are specific for the particular protein or fragment. These detection methods may include the use of specific antibodies, formation of an enzyme product, or disappearance of an enzyme substrate. For example, if the protein or fragment thereof has enzymatic activity, an enzyme assay may be used. Alternatively, if polyclonal or monoclonal antibodies specific to the protein or fragment thereof are available, immunoassays may be employed using the antibodies to the protein or fragment thereof. The techniques of enzyme assay and immunoassay are well known to those skilled in the art.

[1100] The resulting protein or fragment thereof may be recovered by methods known in the arts. For example, the protein or fragment thereof may be recovered from the nutrient medium by conventional procedures including, but not limited to, centrifugation, filtration, extraction, spray-drying, evaporation, or precipitation. The recovered protein or fragment thereof may then be further purified by a variety of chromatographic procedures, e.g., ion exchange chromatography, gel filtration chromatography, affinity chromatography, or the like.

[1101] (c) Mammalian Constructs and Transformed Mammalian Cells

[1102] The present invention also relates to methods for obtaining a recombinant mammalian host cell, comprising introducing into a mammalian host cell exogenous genetic material. The present invention also relates to a mammalian cell comprising a mammalian recombinant vector. The present invention also relates to methods for obtaining a recombinant mammalian host cell, comprising introducing into a mammalian cell exogenous genetic material. In a preferred embodiment the exogenous genetic material includes a nucleic acid molecule of the present invention having a sequence selected from the group consisting of SEQ ID NO: 1 through SEQ ID NO: 294,310 or complements thereof or fragments of either.

[1103] Mammalian cell lines available as hosts for expression are known in the art and include many immortalized cell lines available from the American Type Culture Collection (ATCC, Manassas, Va.), such as HeLa cells, Chinese hamster ovary (CHO) cells, baby hamster kidney (BHK) cells and a number of other cell lines. Suitable promoters for mammalian cells are also known in the art and include viral promoters such as that from Simian Virus 40 (SV40) (Fiers et al., Nature 273:113 (1978)), Rous sarcoma virus (RSV), adenovirus (ADV) and bovine papilloma virus (BPV). Mammalian cells may also require terminator sequences and poly-A addition sequences. Enhancer sequences which increase expression may also be included and sequences which promote amplification of the gene may also be desirable (for example methotrexate resistance genes).

[1104] Vectors suitable for replication in mammalian cells may include viral replicons, or sequences which insure integration of the appropriate sequences encoding HCV epitopes into the host genome. For example, another vector used to express foreign DNA is vaccinia virus. In this case, for example, a nucleic acid molecule encoding a protein or fragment thereof is inserted into the vaccinia genome. Techniques for the insertion of foreign DNA into the vaccinia virus genome are known in the art and may utilize, for example, homologous recombination. Such heterologous DNA is generally inserted into a gene which is non-essential to the virus, for example, the thymidine kinase gene (tk), which also provides a selectable marker. Plasmid vectors that greatly facilitate the construction of recombinant viruses have been described (see, for example, Mackett et al, J. Virol. 49:857 (1984); Chakrabarti et al., Mol. Cell. Biol. 5:3403 (1985); Moss, In: Gene Transfer Vectors For Mammalian Cells (Miller and Calos, eds., Cold Spring Harbor Laboratory, N.Y., p. 10, (1987)). Expression of the HCV polypeptide then occurs in cells or animals which are infected with the live recombinant vaccinia virus.

[1105] The sequence to be integrated into the mammalian sequence may be introduced into the primary host by any convenient means, which includes calcium precipitated DNA, spheroplast fusion, transformation, electroporation, biolistics, lipofection, microinjection, or other convenient means. Where an amplifiable gene is being employed, the amplifiable gene may serve as the selection marker for selecting hosts into which the amplifiable gene has been introduced. Alternatively, one may include with the amplifiable gene another marker, such as a drug resistance marker, e.g., neomycin resistance (G418 in mammalian cells), hygromycin in resistance, etc., or an auxotrophy marker (HIS3, TRP1, LEU2, URA3, ADE2, LYS2, etc.) for use in yeast cells.

[1106] Depending upon the nature of the modification and associated targeting construct, various techniques may be employed for identifying targeted integration. Conveniently, the DNA may be digested with one or more restriction enzymes and the fragments probed with an appropriate DNA fragment which will identify the properly sized restriction fragment associated with integration.

[1107] One may use different promoter sequences, enhancer sequences, or other sequence which will allow for enhanced levels of expression in the expression host. Thus, one may combine an enhancer from one source, a promoter region from another source, a 5′-noncoding region upstream from the initiation methionine from the same or different source as the other sequences and the like. One may provide for an intron in the non-coding region with appropriate splice sites or for an alternative 3′-untranslated sequence or polyadenylation site. Depending upon the particular purpose of the modification, any of these sequences may be introduced, as desired.

[1108] Where selection is intended, the sequence to be integrated will have with it a marker gene, which allows for selection. The marker gene may conveniently be downstream from the target gene and may include resistance to a cytotoxic agent, e.g., antibiotics, heavy metals, or the like, resistance or susceptibility to HAT, gancyclovir, etc., complementation to an auxotrophic host, particularly by using an auxotrophic yeast as the host for the subject manipulations, or the like. The marker gene may also be on a separate DNA molecule, particularly with primary mammalian cells. Alternatively, one may screen the various transformants, due to the high efficiency of recombination in yeast, by using hybridization analysis, PCR, sequencing, or the like.

[1109] For homologous recombination, constructs can be prepared where the amplifiable gene will be flanked, normally on both sides with DNA homologous with the DNA of the target region. Depending upon the nature of the integrating DNA and the purpose of the integration, the homologous DNA will generally be within 100 kb, usually 50 kb, preferably about 25 kb, of the transcribed region of the target gene, more preferably within 2 kb of the target gene. Where modeling of the gene is intended, homology will usually be present proximal to the site of the mutation. The homologous DNA may include the 5′-upstream region outside of the transcriptional regulatory region or comprising any enhancer sequences, transcriptional initiation sequences, adjacent sequences, or the like. The homologous region may include a portion of the coding region, where the coding region may be comprised only of an open reading frame or combination of exons and introns. The homologous region may comprise all or a portion of an intron, where all or a portion of one or more exons may also be present. Alternatively, the homologous region may comprise the 3′-region, so as to comprise all or a portion of the transcriptional termination region, or the region 3′ of this region. The homologous regions may extend over all or a portion of the target gene or be outside the target gene comprising all or a portion of the transcriptional regulatory regions and/or the structural gene.

[1110] The integrating constructs may be prepared in accordance with conventional ways, where sequences may be synthesized, isolated from natural sources, manipulated, cloned, ligated, subjected to in vitro mutagenesis, primer repair, or the like. At various stages, the joined sequences may be cloned and analyzed by restriction analysis, sequencing, or the like. Usually during the preparation of a construct where various fragments are joined, the fragments, intermediate constructs and constructs will be carried on a cloning vector comprising a replication system functional in a prokaryotic host, e.g., E. coli and a marker for selection, e.g., biocide resistance, complementation to an auxotrophic host, etc. Other functional sequences may also be present, such as polylinkers, for ease of introduction and excision of the construct or portions thereof, or the like. A large number of cloning vectors are available such as pBR322, the pUC series, etc. These constructs may then be used for integration into the primary mammalian host.

[1111] In the case of the primary mammalian host, a replicating vector may be used. Usually, such vector will have a viral replication system, such as SV40, bovine papilloma virus, adenovirus, or the like. The linear DNA sequence vector may also have a selectable marker for identifying transfected cells. Selectable markers include the neo gene, allowing for selection with G418, the herpes tk gene for selection with HAT medium, the gpt gene with mycophenolic acid, complementation of an auxotrophic host, etc.

[1112] The vector may or may not be capable of stable maintenance in the host. Where the vector is capable of stable maintenance, the cells will be screened for homologous integration of the vector into the genome of the host, where various techniques for curing the cells may be employed. Where the vector is not capable of stable maintenance, for example, where a temperature sensitive replication system is employed, one may change the temperature from the permissive temperature to the non-permissive temperature, so that the cells may be cured of the vector. In this case, only those cells having integration of the construct comprising the amplifiable gene and, when present, the selectable marker, will be able to survive selection.

[1113] Where a selectable marker is present, one may select for the presence of the targeting construct by means of the selectable marker. Where the selectable marker is not present, one may select for the presence of the construct by the amplifiable gene. For the neo gene or the herpes tk gene, one could employ a medium for growth of the transformants of about 0.1-1 mg/ml of G418 or may use HAT medium, respectively. Where DHFR is the amplifiable gene, the selective medium may include from about 0.01-0.5 μM of methotrexate or be deficient in glycine-hypoxanthine-thymidine and have dialysed serum (GHT media).

[1114] The DNA can be introduced into the expression host by a variety of techniques that include calcium phosphate/DNA co-precipitates, microinjection of DNA into the nucleus, electroporation, yeast protoplast fusion with intact cells, transfection, polycations, e.g., polybrene, polyornithine, etc., or the like. The DNA may be single or double stranded DNA, linear or circular. The various techniques for transforming mammalian cells are well known (see Keown et al., Methods Enzymol. (1989); Keown et al., Methods Enzymol. 185:527-537 (1990); Mansour et al., Nature 336:348-352, (1988)).

[1115] (d) Insect Constructs and Transformed Insect Cells

[1116] The present invention also relates to an insect recombinant vectors comprising exogenous genetic material. The present invention also relates to an insect cell comprising an insect recombinant vector. The present invention also relates to methods for obtaining a recombinant insect host cell, comprising introducing into an insect cell exogenous genetic material. In a preferred embodiment the exogenous genetic material includes a nucleic acid molecule of the present invention having a sequence selected from the group consisting of SEQ ID NO: 1 through SEQ ID NO: 294,310 or complements thereof or fragments of either.

[1117] The insect recombinant vector may be any vector which can be conveniently subjected to recombinant DNA procedures and can bring about the expression of the nucleic acid sequence. The choice of a vector will typically depend on the compatibility of the vector with the insect host cell into which the vector is to be introduced. The vector may be a linear or a closed circular plasmid. The vector system may be a single vector or plasmid or two or more vectors or plasmids which together contain the total DNA to be introduced into the genome of the insect host. In addition, the insect vector may be an expression vector. Nucleic acid molecules can be suitably inserted into a replication vector for expression in the insect cell under a suitable promoter for insect cells. Many vectors are available for this purpose and selection of the appropriate vector will depend mainly on the size of the nucleic acid molecule to be inserted into the vector and the particular host cell to be transformed with the vector. Each vector contains various components depending on its function (amplification of DNA or expression of DNA) and the particular host cell with which it is compatible. The vector components for insect cell transformation generally include, but are not limited to, one or more of the following: a signal sequence, origin of replication, one or more marker genes and an inducible promoter.

[1118] The insect vector may be an autonomously replicating vector, i.e., a vector which exists as an extrachromosomal entity, the replication of which is independent of chromosomal replication, e.g., a plasmid, an extrachromosomal element, a minichromosome, or an artificial chromosome. The vector may contain any means for assuring self-replication. Alternatively, the vector may be one which, when introduced into the insect cell, is integrated into the genome and replicated together with the chromosome(s) into which it has been integrated. For integration, the vector may rely on the nucleic acid sequence of the vector for stable integration of the vector into the genome by homologous or nonhomologous recombination. Alternatively, the vector may contain additional nucleic acid sequences for directing integration by homologous recombination into the genome of the insect host. The additional nucleic acid sequences enable the vector to be integrated into the host cell genome at a precise location(s) in the chromosome(s). To increase the likelihood of integration at a precise location, there should be preferably two nucleic acid sequences which individually contain a sufficient number of nucleic acids, preferably 400 bp to 1500 bp, more preferably 800 bp to 1000 bp, which are highly homologous with the corresponding target sequence to enhance the probability of homologous recombination. These nucleic acid sequences may be any sequence that is homologous with a target sequence in the genome of the insect host cell and, furthermore, may be non-encoding or encoding sequences.

[1119] Baculovirus expression vectors (BEVs) have become important tools for the expression of foreign genes, both for basic research and for the production of proteins with direct clinical applications in human and veterinary medicine (Doerfler, Curr. Top. Microbiol. Immunol. 131:51-68 (1968); Luckow and Summers, Bio/Technology 6:47-55 (1988a); Miller, Annual Review of Microbiol. 42:177-199 (1988); Summers, Curr. Comm. Molecular Biology, Cold Spring Harbor Press, Cold Spring Harbor, N.Y. (1988)). BEVs are recombinant insect viruses in which the coding sequence for a chosen foreign gene has been inserted behind a baculovirus promoter in place of the viral gene, e.g., polyhedrin (Smith and Summers, U.S. Pat. No. 4,745,051).

[1120] The use of baculovirus vectors relies upon the host cells being derived from Lepidopteran insects such as Spodoptera frugiperda or Trichoplusia ni. The preferred Spodoptera frugiperda cell line is the cell line Sf9. The Spodoptera frugiperda Sf9 cell line was obtained from American Type Culture Collection (Manassas, Va.) and is assigned accession number ATCC CRL 1711 (Summers and Smith, A Manual of Methods for Baculovirus Vectors and Insect Cell Culture Procedures, Texas Ag. Exper. Station Bulletin No. 1555 (1988)). Other insect cell systems, such as the silkworm B. mori may also be used.

[1121] The proteins expressed by the BEVs are, therefore, synthesized, modified and transported in host cells derived from Lepidopteran insects. Most of the genes that have been inserted and produced in the baculovirus expression vector system have been derived from vertebrate species. Other baculovirus genes in addition to the polyhedrin promoter may be employed to advantage in a baculovirus expression system. These include immediate-early (alpha), delayed-early (β), late (γ), or very late (delta), according to the phase of the viral infection during which they are expressed. The expression of these genes occurs sequentially, probably as the result of a “cascade” mechanism of transcriptional regulation. (Guarino and Summers, J. Virol. 57:563-571 (1986); Guarino and Summers, J. Virol. 61:2091-2099 (1987); Guarino and Summers, Virol. 162:444-451 (1988)).

[1122] Insect recombinant vectors are useful as intermediates for the infection or transformation of insect cell systems. For example, an insect recombinant vector containing a nucleic acid molecule encoding a baculovirus transcriptional promoter followed downstream by an insect signal DNA sequence is capable of directing the secretion of the desired biologically active protein from the insect cell. The vector may utilize a baculovirus transcriptional promoter region derived from any of the over 500 baculoviruses generally infecting insects, such as for example the Orders Lepidoptera, Diptera, Orthoptera, Coleoptera and Hymenoptera, including for example but not limited to the viral DNAs of Autographa californica MNPV, Bombyx mori NPV, Trichoplusia ni MNPV, Rachiplusia ou MNPV or Galleria mellonella MNPV, wherein said baculovirus transcriptional promoter is a baculovirus immediate-early gene IEl or EN promoter; an immediate-early gene in combination with a baculovirus delayed-early gene promoter region selected from the group consisting of 39K and a HindIII-k fragment delayed-early gene; or a baculovirus late gene promoter. The immediate-early or delayed-early promoters can be enhanced with transcriptional enhancer elements. The insect signal DNA sequence may code for a signal peptide of a Lepidopteran adipokinetic hormone precursor or a signal peptide of the Manduca sexta adipokinetic hormone precursor (Summers, U.S. Pat. No. 5,155,037). Other insect signal DNA sequences include a signal peptide of the Orthoptera Schistocerca gregaria locust adipokinetic hormone precursor and the Drosophila melanogaster cuticle genes CP1, CP2, CP3 or CP4 or for an insect signal peptide having substantially a similar chemical composition and function (Summers, U.S. Pat. No. 5,155,037).

[1123] Insect cells are distinctly different from animal cells. Insects have a unique life cycle and have distinct cellular properties such as the lack of intracellular plasminogen activators in which are present in vertebrate cells. Another difference is the high expression levels of protein products ranging from 1 to greater than 500 mg/liter and the ease at which cDNA can be cloned into cells (Frasier, In Vitro Cell. Dev. Biol. 25:225 (1989); Summers and Smith, In: A Manual of Methods for Baculovirus Vectors and Insect Cell Culture Procedures, Texas Ag. Exper. Station Bulletin No. 1555 (1988)).

[1124] Recombinant protein expression in insect cells is achieved by viral infection or stable transformation. For viral infection, the desired gene is cloned into baculovirus at the site of the wild-type polyhedron gene (Webb and Summers, Technique 2:173 (1990); Bishop and Posse, Adv. Gene Technol. 1:55 (1990)). The polyhedron gene is a component of a protein coat in occlusions which encapsulate virus particles. Deletion or insertion in the polyhedron gene results the failure to form occlusion bodies. Occlusion negative viruses are morphologically different from occlusion positive viruses and enable one skilled in the art to identify and purify recombinant viruses.

[1125] The vectors of present invention preferably contain one or more selectable markers which permit easy selection of transformed cells. A selectable marker is a gene the product of which provides, for example biocide or viral resistance, resistance to heavy metals, prototrophy to auxotrophs and the like. Selection may be accomplished by co-transformation, e.g., as described in WO 91/17243, a nucleic acid sequence of the present invention may be operably linked to a suitable promoter sequence. The promoter sequence is a nucleic acid sequence which is recognized by the insect host cell for expression of the nucleic acid sequence. The promoter sequence contains transcription and translation control sequences which mediate the expression of the protein or fragment thereof. The promoter may be any nucleic acid sequence which shows transcriptional activity in the insect host cell of choice and may be obtained from genes encoding polypeptides either homologous or heterologous to the host cell.

[1126] For example, a nucleic acid molecule encoding a protein or fragment thereof may also be operably linked to a suitable leader sequence. A leader sequence is a nontranslated region of a mRNA which is important for translation by the fungal host. The leader sequence is operably linked to the 5′ terminus of the nucleic acid sequence encoding the protein or fragment thereof. The leader sequence may be native to the nucleic acid sequence encoding the protein or fragment thereof or may be obtained from foreign sources. Any leader sequence which is functional in the insect host cell of choice may be used in the present invention.

[1127] A polyadenylation sequence may also be operably linked to the 3′ terminus of the nucleic acid sequence of the present invention. The polyadenylation sequence is a sequence which when transcribed is recognized by the insect host to add polyadenosine residues to transcribed mRNA. The polyadenylation sequence may be native to the nucleic acid sequence encoding the protein or fragment thereof or may be obtained from foreign sources. Any polyadenylation sequence which is functional in the fungal host of choice may be used in the present invention.

[1128] To avoid the necessity of disrupting the cell to obtain the protein or fragment thereof and to minimize the amount of possible degradation of the expressed polypeptide within the cell, it is preferred that expression of the polypeptide gene gives rise to a product secreted outside the cell. To this end, the protein or fragment thereof of the present invention may be linked to a signal peptide linked to the amino terminus of the protein or fragment thereof. A signal peptide is an amino acid sequence which permits the secretion of the protein or fragment thereof from the insect host into the culture medium. The signal peptide may be native to the protein or fragment thereof of the invention or may be obtained from foreign sources. The 5′ end of the coding sequence of the nucleic acid sequence of the present invention may inherently contain a signal peptide coding region naturally linked in translation reading frame with the segment of the coding region which encodes the secreted protein or fragment thereof.

[1129] At present, a mode of achieving secretion of a foreign gene product in insect cells is by way of the foreign gene's native signal peptide. Because the foreign genes are usually from non-insect organisms, their signal sequences may be poorly recognized by insect cells and hence, levels of expression may be suboptimal. However, the efficiency of expression of foreign gene products seems to depend primarily on the characteristics of the foreign protein. On average, nuclear localized or non-structural proteins are most highly expressed, secreted proteins are intermediate and integral membrane proteins are the least expressed. One factor generally affecting the efficiency of the production of foreign gene products in a heterologous host system is the presence of native signal sequences (also termed presequences, targeting signals, or leader sequences) associated with the foreign gene. The signal sequence is generally coded by a DNA sequence immediately following (5′ to 3′) the translation start site of the desired foreign gene.

[1130] The expression dependence on the type of signal sequence associated with a gene product can be represented by the following example: If a foreign gene is inserted at a site downstream from the translational start site of the baculovirus polyhedrin gene so as to produce a fusion protein (containing the N-terminus of the polyhedrin structural gene), the fused gene is highly expressed. But less expression is achieved when a foreign gene is inserted in a baculovirus expression vector immediately following the transcriptional start site and totally replacing the polyhedrin structural gene.

[1131] Insertions into the region −50 to −1 significantly alter (reduce) steady state transcription which, in turn, reduces translation of the foreign gene product. Use of the pVL941 vector optimizes transcription of foreign genes to the level of the polyhedrin gene transcription. Even though the transcription of a foreign gene may be optimal, optimal translation may vary because of several factors involving processing: signal peptide recognition, mRNA and ribosome binding, glycosylation, disulfide bond formation, sugar processing, oligomerization, for example.

[1132] The properties of the insect signal peptide are expected to be more optimal for the efficiency of the translation process in insect cells than those from vertebrate proteins. This phenomenon can generally be explained by the fact that proteins secreted from cells are synthesized as precursor molecules containing hydrophobic N-terminal signal peptides. The signal peptides direct transport of the select protein to its target membrane and are then cleaved by a peptidase on the membrane, such as the endoplasmic reticulum, when the protein passes through it.

[1133] Another exemplary insect signal sequence is the sequence encoding for Drosophila cuticle proteins such as CP1, CP2, CP3 or CP4 (Summers, U.S. Pat. No. 5,278,050). Most of a 9 kb region of the Drosophila genome containing genes for the cuticle proteins has been sequenced. Four of the five cuticle genes contains a signal peptide coding sequence interrupted by a short intervening sequence (about 60 base pairs) at a conserved site. Conserved sequences occur in the 5′ mRNA untranslated region, in the adjacent 35 base pairs of upstream flanking sequence and at −200 base pairs from the mRNA start position in each of the cuticle genes.

[1134] Standard methods of insect cell culture, cotransfection and preparation of plasmids are set forth in Summers and Smith (Summers and Smith, A Manual of Methods for Baculovirus Vectors and Insect Cell Culture Procedures, Texas Agricultural Experiment Station Bulletin No. 1555, Texas A&M University (1987)). Procedures for the cultivation of viruses and cells are described in Volkman and Summers, J. Virol 19:820-832 (1975) and Volkman et al., J. Virol 19:820-832 (1976).

[1135] (e) Bacterial Constructs and Transformed Bacterial Cells

[1136] The present invention also relates to a bacterial recombinant vector comprising exogenous genetic material. The present invention also relates to a bacteria cell comprising a bacterial recombinant vector. The present invention also relates to methods for obtaining a recombinant bacteria host cell, comprising introducing into a bacterial host cell exogenous genetic material. In a preferred embodiment the exogenous genetic material includes a nucleic acid molecule of the present invention having a sequence selected from the group consisting of SEQ ID NO: 1 through SEQ ID NO: 294,310 or complements thereof or fragments of either.

[1137] The bacterial recombinant vector may be any vector which can be conveniently subjected to recombinant DNA procedures. The choice of a vector will typically depend on the compatibility of the vector with the bacterial host cell into which the vector is to be introduced. The vector may be a linear or a closed circular plasmid. The vector system may be a single vector or plasmid or two or more vectors or plasmids which together contain the total DNA to be introduced into the genome of the bacterial host. In addition, the bacterial vector may be an expression vector. Nucleic acid molecules encoding protein homologues or fragments thereof can, for example, be suitably inserted into a replicable vector for expression in the bacterium under the control of a suitable promoter for bacteria. Many vectors are available for this purpose and selection of the appropriate vector will depend mainly on the size of the nucleic acid to be inserted into the vector and the particular host cell to be transformed with the vector. Each vector contains various components depending on its function (amplification of DNA or expression of DNA) and the particular host cell with which it is compatible. The vector components for bacterial transformation generally include, but are not limited to, one or more of the following: a signal sequence, an origin of replication, one or more marker genes and an inducible promoter.

[1138] In general, plasmid vectors containing replicon and control sequences that are derived from species compatible with the host cell are used in connection with bacterial hosts. The vector ordinarily carries a replication site, as well as marking sequences that are capable of providing phenotypic selection in transformed cells. For example, E. coli is typically transformed using pBR322, a plasmid derived from an E. coli species (see, e.g., Bolivar et al., Gene 2:95 (1977)). pBR322 contains genes for ampicillin and tetracycline resistance and thus provides easy means for identifying transformed cells. The pBR322 plasmid, or other microbial plasmid or phage, also generally contains, or is modified to contain, promoters that can be used by the microbial organism for expression of the selectable marker genes.

[1139] Nucleic acid molecules encoding protein or fragments thereof may be expressed not only directly, but also as a fusion with another polypeptide, preferably a signal sequence or other polypeptide having a specific cleavage site at the N-terminus of the mature polypeptide. In general, the signal sequence may be a component of the vector, or it may be a part of the polypeptide DNA that is inserted into the vector. The heterologous signal sequence selected should be one that is recognized and processed (i.e., cleaved by a signal peptidase) by the host cell. For bacterial host cells that do not recognize and process the native polypeptide signal sequence, the signal sequence is substituted by a bacterial signal sequence selected, for example, from the group consisting of the alkaline phosphatase, penicillinase, lpp, or heat-stable enterotoxin II leaders.

[1140] Both expression and cloning vectors contain a nucleic acid sequence that enables the vector to replicate in one or more selected host cells. Generally, in cloning vectors this sequence is one that enables the vector to replicate independently of the host chromosomal DNA and includes origins of replication or autonomously replicating sequences. Such sequences are well known for a variety of bacteria. The origin of replication from the plasmid pBR322 is suitable for most Gram-negative bacteria.

[1141] Expression and cloning vectors also generally contain a selection gene, also termed a selectable marker. This gene encodes a protein necessary for the survival or growth of transformed host cells grown in a selective culture medium. Host cells not transformed with the vector containing the selection gene will not survive in the culture medium. Typical selection genes encode proteins that (a) confer resistance to antibiotics or other toxins, e.g., ampicillin, neomycin, methotrexate, or tetracycline, (b) complement auxotrophic deficiencies, or (c) supply critical nutrients not available from complex media, e.g., the gene encoding D-alanine racemase for Bacilli. One example of a selection scheme utilizes a drug to arrest growth of a host cell. Those cells that are successfully transformed with a heterologous protein homologue or fragment thereof produce a protein conferring drug resistance and thus survive the selection regimen.

[1142] The expression vector for producing a protein or fragment thereof can also contains an inducible promoter that is recognized by the host bacterial organism and is operably linked to the nucleic acid encoding, for example, the nucleic acid molecule encoding the protein homologue or fragment thereof of interest. Inducible promoters suitable for use with bacterial hosts include the β-lactamase and lactose promoter systems (Chang et al., Nature 275:615 (1978); Goeddel et al., Nature 281:544 (1979)), the arabinose promoter system (Guzman et al., J. Bacteriol. 174:7716-7728 (1992)), alkaline phosphatase, a tryptophan (trp) promoter system (Goeddel, Nucleic Acids Res. 8:4057 (1980); EP 36,776) and hybrid promoters such as the tac promoter (deBoer et al., Proc. Natl. Acad. Sci. (USA) 80:21-25 (1983)). However, other known bacterial inducible promoters are suitable (Siebenlist et al., Cell 20:269 (1980)).

[1143] Promoters for use in bacterial systems also generally contain a Shine-Dalgarno (S.D.) sequence operably linked to the DNA encoding the polypeptide of interest. The promoter can be removed from the bacterial source DNA by restriction enzyme digestion and inserted into the vector containing the desired DNA.

[1144] Construction of suitable vectors containing one or more of the above-listed components employs standard ligation techniques. Isolated plasmids or DNA fragments are cleaved, tailored and re-ligated in the form desired to generate the plasmids required. Examples of available bacterial expression vectors include, but are not limited to, the multifunctional E. coli cloning and expression vectors such as Bluescript™ (Stratagene, La Jolla, Calif.), in which, for example, encoding an A. nidulans protein homologue or fragment thereof homologue, may be ligated into the vector in frame with sequences for the amino-terminal Met and the subsequent 7 residues of β-galactosidase so that a hybrid protein is produced; pIN vectors (Van Heeke and Schuster, J. Biol. Chem. 264:5503-5509 (1989)); and the like. pGEX vectors (Promega, Madison Wis. U.S.A.) may also be used to express foreign polypeptides as fusion proteins with glutathione S-transferase (GST). In general, such fusion proteins are soluble and can easily be purified from lysed cells by adsorption to glutathione-agarose beads followed by elution in the presence of free glutathione. Proteins made in such systems are designed to include heparin, thrombin or factor XA protease cleavage sites so that the cloned polypeptide of interest can be released from the GST moiety at will.

[1145] Suitable host bacteria for a bacterial vector include archaebacteria and eubacteria, especially eubacteria and most preferably Enterobacteriaceae. Examples of useful bacteria include Escherichia, Enterobacter, Azotobacter, Erwinia, Bacillus, Pseudomonas, Klebsiella, Proteus, Salmonella, Serratia, Shigella, Rhizobia, Vitreoscilla and Paracoccus. Suitable E. coli hosts include E. coli W3110 (American Type Culture Collection (ATCC) 27,325, Manassas, Va. U.S.A.), E. coli 294 (ATCC 31,446), E. coli B and E. coli X1776 (ATCC 31,537). These examples are illustrative rather than limiting. Mutant cells of any of the above-mentioned bacteria may also be employed. It is, of course, necessary to select the appropriate bacteria taking into consideration replicability of the replicon in the cells of a bacterium. For example, E. coli, Serratia, or Salmonella species can be suitably used as the host when well known plasmids such as pBR322, pBR325, pACYC177, or pKN410 are used to supply the replicon. E. coli strain W3110 is a preferred host or parent host because it is a common host strain for recombinant DNA product fermentations. Preferably, the host cell should secrete minimal amounts of proteolytic enzymes.

[1146] Host cells are transfected and preferably transformed with the above-described vectors and cultured in conventional nutrient media modified as appropriate for inducing promoters, selecting transformants, or amplifying the genes encoding the desired sequences.

[1147] Numerous methods of transfection are known to the ordinarily skilled artisan, for example, calcium phosphate and electroporation. Depending on the host cell used, transformation is done using standard techniques appropriate to such cells. The calcium treatment employing calcium chloride, as described in section 1.82 of Sambrook et al., Molecular Cloning: A Laboratory Manual, New York: Cold Spring Harbor Laboratory Press, (1989), is generally used for bacterial cells that contain substantial cell-wall barriers. Another method for transformation employs polyethylene glycol/DMSO, as described in Chung and Miller (Chung and Miller, Nucleic Acids Res. 16:3580 (1988)). Yet another method is the use of the technique termed electroporation.

[1148] Bacterial cells used to produce the polypeptide of interest for purposes of this invention are cultured in suitable media in which the promoters for the nucleic acid encoding the heterologous polypeptide can be artificially induced as described generally, e.g., in Sambrook et al., Molecular Cloning: A Laboratory Manual, New York: Cold Spring Harbor Laboratory Press, (1989). Examples of suitable media are given in U.S. Pat. Nos. 5,304,472 and 5,342,763.

[1149] In addition to the above discussed procedures, practitioners are familiar with the standard resource materials which describe specific conditions and procedures for the construction, manipulation and isolation of macromolecules (e.g., DNA molecules, plasmids, etc.), generation of recombinant organisms and the screening and isolating of clones, (see for example, Sambrook et al., Molecular Cloning: A Laboratory Manual, Cold Spring Harbor Press (1989); Mailga et al., Methods in Plant Molecular Biology, Cold Spring Harbor Press (1995); Birren et al., Genome Analysis Analyzing DNA, 1, Cold Spring Harbor, N.Y. (1997).

[1150] (f) Algal Construets and Algal Transformants

[1151] The present invention also relates to an algal recombinant vector comprising exogenous genetic material. The present invention also relates to an algal cell comprising an algal recombinant vector. The present invention also relates to methods for obtaining a recombinant algal host cell comprising introducing into an algal host cell exogenous genetic material.

[1152] Exogenous genetic material is any genetic material, whether naturally occurring or otherwise, from any source that is capable of being inserted into any organism. Exogenous genetic material may be transferred into an algal cell. In a preferred embodiment the exogenous genetic material includes a nucleic acid molecule having a sequence selected from the group consisting of SEQ ID NO: 1 through SEQ ID NO: XXXX or complements thereof.

[1153] The algal recombinant vector may be any vector which can be conveniently subjected to recombinant DNA procedures. The choice of a vector will typically depend on the compatibility of the vector with the algal host cell into which the vector is to be introduced. The vector may be a linear or a closed circular plasmid. The vector system may be a single vector or plasmid or two or more vectors or plasmids which together contain the total DNA to be introduced into the genome of the algal host.

[1154] The algal vector may be an autonomously replicating vector, i.e., a vector which exists as an extrachromosomal entity, the replication of which is independent of chromosomal replication, e.g., a plasmid, an extrachromosomal element, a minichromosome, or an artificial chromosome. The vector may contain any means for assuring self-replication. Alternatively, the vector may be one which, when introduced into the algal cell, is integrated into the genome and replicated together with the chromosome(s) into which it has been integrated. For integration, the vector may rely on the nucleic acid sequence of the vector for stable integration of the vector into the genome by homologous or nonhomologous recombination. Alternatively, the vector may contain additional nucleic acid sequences for directing integration by homologous recombination into the genome of the algal host. The additional nucleic acid sequences enable the vector to be integrated into the host cell genome at a precise location(s) in the chromosome(s). To increase the likelihood of integration at a precise location, there should be preferably two nucleic acid sequences which individually contain a sufficient number of nucleic acids, preferably 400 bp to 1500 bp, more preferably 800 bp to 1000 bp, which are highly homologous with the corresponding target sequence to enhance the probability of homologous recombination. These nucleic acid sequences may be any sequence that is homologous with a target sequence in the genome of the algal host cell, and, furthermore, may be non-encoding or encoding sequences.

[1155] The vectors of the present invention preferably contain one or more selectable markers which permit easy selection of transformed cells. A selectable marker is a gene, the product of which confers upon an algal cell resistance to a compound to which the algal would otherwise be sensitive. The compound can be selected from the group consisting of antibiotics, fungicides, herbicides, and heavy metals. The selectable marker may be selected from any known or subsequently identified selectable markers, including markers derived from algal, fungal, and baterial sources. Preferred selectable markers can be selected from the group including, but not limited to, amdS (acetamidase), argB (ornithine carbamoyltransferase), bar (phosphinothricin acetyltransferase), ble (bleomycin binding protein), cat (chloramphenicol acetyltransferase), hygB (hygromycin B phosphotransferase), nat (nourseothricin acetyltransferase), niaD (nitrate reductase), neo (neomycin phosphotransferase), pac (puromycin acetyltransferase), pyrG (orotidine-5′-phosphate decarboxylase), sat (streptothricin acetyltransferase), sC (sulfate adenyltransferase), trpC (anthranilate synthase), and glyphosate resistant EPSPS genes. Furthermore, selection may be accomplished by co-transformation, e.g., as described in WO 91/17243, herein incorporated by reference in its entirety.

[1156] A nucleic acid sequence of the present invention may be operably linked to a suitable promoter sequence. The promoter sequence is a nucleic acid sequence which is recognized by the algal host cell for expression of the nucleic acid sequence. The promoter sequence contains transcription and translation control sequences which mediate the expression of the protein or fragment thereof.

[1157] A promoter may be any nucleic acid sequence which shows transcriptional activity in the algal host cell of choice and may be obtained from genes encoding polypeptides either homologous or heterologous to the host cell. Examples of suitable promoters for directing the transcription of a nucleic acid construct of the invention in an algal host are light harvesting protein promoters obtained from photosynthetic organisms, Chlorella virus methyltransferase promoters, CaMV 35 S promoter, PL promoter from bacteriophage λ, nopaline synthase promoter from the Ti plasmid of Agrobacterium tumefaciens, and bacterial trp promotor.

[1158] A protein or fragment thereof encoding nucleic acid molecule of the present invention may also be operably linked to a terminator sequence at its 3′ terminus. The terminator sequence may be native to the nucleic acid sequence encoding the protein or fragment thereof or may be obtained from foreign sources. Any terminator which is functional in the algal host cell of choice may be used in the present invention.

[1159] A protein or fragment thereof encoding nucleic acid molecule of the present invention may also be operably linked to a suitable leader sequence. A leader sequence is a nontranslated region of a mRNA which is important for translation by the algal host. The leader sequence is operably linked to the 5′ terminus of the nucleic acid sequence encoding the protein or fragment thereof. The leader sequence may be native to the nucleic acid sequence encoding the protein or fragment thereof or may be obtained from foreign sources. Any leader sequence which is functional in the algal host cell of choice may be used in the present invention.

[1160] A polyadenylation sequence may also be operably linked to the 3′ terminus of the nucleic acid sequence of the present invention. The polyadenylation sequence is a sequence which when transcribed is recognized by the algal host to add polyadenosine residues to transcribed mRNA. The polyadenylation sequence may be native to the nucleic acid sequence encoding the protein or fragment thereof or may be obtained from foreign sources. Any polyadenylation sequence which is functional in the algal host of choice may be used in the present invention.

[1161] The procedures used to ligate the elements described above to construct the recombinant expression vector of the present invention are well known to one skilled in the art (see, for example, Sambrook, 2nd ed., et al., Molecular Cloning, A Laboratory Manual Cold Spring Harbor, N.Y., (1989), herein incorporated by reference in its entirety).

[1162] The present invention also relates to recombinant algal host cells produced by the methods of the present invention which are advantageously used with the recombinant vector of the present invention. The cell is preferably transformed with a vector comprising a nucleic acid sequence of the invention followed by integration of the vector into the host chromosome. The choice of algal host cells will to a large extent depend upon the gene encoding the protein or fragment thereof and its source.

[1163] Algal cells may be transformed by a variety of known techniques, including but not limit to, microprojectile bombardment, protoplast fusion, electroporation, microinjection, and vigorous agitation in the presence of glass beads. Suitable procedures for transformation of green algal host cells are described in EP 108 580, herein incorporated by reference in its entirety. A suitable method of transforming Chlorella species is described by Jarvis and Brown, Curr. Genet. 19: 317-321 (1991), herein incorporated by reference in its entirety. A suitable method of transforming cells of diatom Phaeodactylum tricornutum species is described in WO 97/39106, herein incorporated by reference in its entirety. Chlorophyll C-containing algae may be transformed using the procedures described in U.S. Pat. No. 5,661,017, herein incorporated by reference in its entirety.

[1164] The expressed protein or fragment thereof may be detected using methods known in the art that are specific for the particular protein or fragment. These detection methods may include the use of specific antibodies, formation of an enzyme product, or disappearance of an enzyme substrate. For example, if the protein or fragment thereof has enzymatic activity, an enzyme assay may be used. Alternatively, if polyclonal or monoclonal antibodies specific to the protein or fragment thereof are available, immunoassays may be employed using the antibodies to the protein or fragment thereof. The techniques of enzyme assay and immunoassay are well known to those skilled in the art.

[1165] The resulting protein or fragment thereof may be recovered by methods known in the arts. For example, the protein or fragment thereof may be recovered from the nutrient medium by conventional procedures including, but not limited to, centrifugation, filtration, extraction, spray-drying, evaporation, or precipitation. The recovered protein or fragment thereof may then be further purified by a variety of chromatographic procedures, e.g., ion exchange chromatography, gel filtration chromatography, affinity chromatography, or the like.

[1166] (g) Computer Readable Media

[1167] The nucleotide sequence provided in SEQ ID NO: 1 through SEQ ID NO: 294,310 or fragment thereof, or complement thereof, or a nucleotide sequence at least 90% identical, preferably 95%, identical even more preferably 99% or 100% identical to the sequence provided in SEQ ID NO: 1 through SEQ ID NO: 294,310 or fragment thereof, or complement thereof, can be “provided” in a variety of mediums to facilitate use. Such a medium can also provide a subset thereof in a form that allows a skilled artisan to examine the sequences.

[1168] In a preferred embodiment of the present invention computer readable media may be prepared that comprise nucleic acid sequences where preferably at least 10%, preferably at least 25%, more preferably at least 50% and even more preferably at least 75%, 80%, 85%, 90% or 95% of the nucleic acid sequences are selected from the group of nucleic acid molecules that specifically hybridize to one or more nucleic acid molecule having a nucleic acid sequence selected from the group of SEQ ID NO: 1 through SEQ ID NO: 294,310 or complement thereof or fragments of either.

[1169] In another preferred embodiment of the present invention computer readable media may be prepared that comprise nucleic acid sequences where preferably at least 10%, preferably at least 25%, more preferably at least 50% and even more preferably at least 75%, 80%, 85%, 90% or 95% of the nucleic acid sequences are selected from the group of nucleic acid molecules having a nucleic acid sequence selected from the group of SEQ ID NO: 1 through SEQ ID NO: 294,310 or complements thereof.

[1170] In a more preferred embodiment of the present invention, the computer readable media comprises a nucleic acid sequence and/or collection of nucleic acid sequences of the present invention associated with a biochemical process or activity where the process or activity is preferably selected from photosynthetic activity, carbohydrate metabolism, amino acid synthesis or degradation, plant hormone or other regulatory molecules, phenolic metabolism, and lipid metabolism, and more preferably selected from the group consisting of biosynthesis of tetrapyrroles, phytochrome metabolism, carbon assimilation, glycolysis and gluconeogenesis metabolism, sucrose metabolism, starch metabolism, phosphogluconate metabolism, galactomannan metabolism, raffinose metabolism, complex carbohydrate synthesis/degradation, phytic acid metabolism, methionine biosynthesis, methionine degradation, lysine metabolism, arginine metabolism, proline metabolism, glutamate/glutamine metabolism, aspartate/asparagine metabolism, cytokinin metabolism, gibberellin metabolism, ethylene metabolism, jasmonic acid metabolism, transcription factors, R-genes, plant proteases, protein kinases, antifungal proteins, nitrogen transporters, sugar transporters, shikimate metabolism, isoflavone metabolism, phenylpropanoid metabolism, isoprenoid metabolism, β-oxidation lipid metabolism, and fatty acid metabolism, and even more preferably selected from the group consisting of: glycolysis metabolism, gluconeogenesis metabolism, sucrose metabolism, sucrose catabolism, reductive pentose phosphate cycle, regulation of C3 photosynthesis, C4 pathway carbon assimilation, enzymes involved in the C4 pathway, carotenoid metabolism, tocopherol metabolism, phytosterol metabolism, brassinoid metabolism, and proline metabolism.

[1171] In an even more preferred embodiment of the present invention, the computer readable media comprises a nucleic acid sequence and/or collection of nucleic acid sequences of the present invention where the nucleic acid sequence and/or collection of nucleic acid sequences are associated with a component or attribute of at least two, more preferable at least three, four, five, six, seven, eight, nine, ten, eleven, twelve, thirteen, fourteen, fifteen, sixteen, seventeen, eighteen, nineteen, twenty, twenty one, twenty two, twenty three, twenty four, twenty five, twenty six, twenty seven, twenty eight, twenty nine, thirty, thirty one, thirty two, thirty three, thirty four, thirty five, thirty six, thirty seven, thirty eight, thirty nine, forty, forty one, forty two, forty three, forty four, forty five or forty six biochemical processes or activities where the biochemical processes or activities are selected from the following: photosynthetic activity, carbohydrate metabolism, amino acid synthesis or degradation, plant hormone or other regulatory molecules, phenolic metabolism, lipid metabolism, biosynthesis of tetrapyrroles, phytochrome metabolism, carbon assimilation, glycolysis and gluconeogenesis metabolism, sucrose metabolism, starch metabolism, phosphogluconate metabolism, galactomannan metabolism, raffinose metabolism, complex carbohydrate synthesis/degradation, phytic acid metabolism, methionine biosynthesis, methionine degradation, lysine metabolism, arginine metabolism, proline metabolism, glutamate/glutamine, aspartate/asparagine metabolism, cytokinin metabolism, gibberellin metabolism, ethylene metabolism, jasmonic acid synthesis metabolism, transcription factors, R-genes, plant proteases, protein kinases, antifungal proteins, nitrogen transporters, sugar transporters, shikimate metabolism, isoflavone metabolism, phenylpropanoid metabolism, isoprenoid metabolism, β-oxidation lipid metabolism, fatty acid metabolism, glycolysis metabolism, gluconeogenesis metabolism, sucrose metabolism, sucrose catabolism, reductive pentose phosphate cycle, regulation of C3 photosynthesis, C4 pathway carbon assimilation, enzymes involved in the C4 pathway, carotenoid metabolism, tocopherol metabolism, phytosterol metabolism, brassinoid metabolism, and proline metabolism.

[1172] In one application of this embodiment, a nucleotide sequence of the present invention can be recorded on computer readable media. As used herein, “computer readable media” refers to any medium that can be read and accessed directly by a computer. Such media include, but are not limited to: magnetic storage media, such as floppy discs, hard disc, storage medium and magnetic tape: optical storage media such as CD-ROM; electrical storage media such as RAM and ROM; and hybrids of these categories such as magnetic/optical storage media. A skilled artisan can readily appreciate how any of the presently known computer readable mediums can be used to create a manufacture comprising computer readable medium having recorded thereon a nucleotide sequence of the present invention.

[1173] As used herein, “recorded” refers to a process for storing information on computer readable medium. A skilled artisan can readily adopt any of the presently known methods for recording information on computer readable medium to generate media comprising the nucleotide sequence information of the present invention. A variety of data storage structures are available to a skilled artisan for creating a computer readable medium having recorded thereon a nucleotide sequence of the present invention. The choice of the data storage structure will generally be based on the means chosen to access the stored information. In addition, a variety of data processor programs and formats can be used to store the nucleotide sequence information of the present invention on computer readable medium. The sequence information can be represented in a word processing text file, formatted in commercially-available software such as WordPerfect and Microsoft Word, or represented in the form of an ASCII file, stored in a database application, such as DB2, Sybase, Oracle, or the like. A skilled artisan can readily adapt any number of data processor structuring formats (e.g., text file or database) in order to obtain computer readable medium having recorded thereon the nucleotide sequence information of the present invention.

[1174] By providing one or more of nucleotide sequences of the present invention, a skilled artisan can routinely access the sequence information for a variety of purposes. Computer software is publicly available which allows a skilled artisan to access sequence information provided in a computer readable medium. The examples which follow demonstrate how software which implements the BLAST (Altschul et al., J. Mol. Biol. 215:403-410 (1990)) and BLAZE (Brutlag et al., Comp. Chem. 17:203-207 (1993)) search algorithms on a Sybase system can be used to identify open reading frames (ORFs) within the genome that contain homology to ORFs or proteins from other organisms. Such ORFs are protein-encoding fragments within the sequences of the present invention and are useful in producing commercially important proteins such as enzymes used in amino acid biosynthesis, metabolism, transcription, translation, RNA processing, nucleic acid and a protein degradation, protein modification and DNA replication, restriction, modification, recombination and repair.

[1175] The present invention further provides systems, particularly computer-based systems, which contain the sequence information described herein. Such systems are designed to identify commercially important fragments of the nucleic acid molecule of the present invention. As used herein, “a computer-based system” refers to the hardware means, software means and data storage means used to analyze the nucleotide sequence information of the present invention. The minimum hardware means of the computer-based systems of the present invention comprises a central processing unit (CPU), input means, output means and data storage means. A skilled artisan can readily appreciate that any one of the currently available computer-based system are suitable for use in the present invention.

[1176] As indicated above, the computer-based systems of the present invention comprise a data storage means having stored therein a nucleotide sequence of the present invention and the necessary hardware means and software means for supporting and implementing a search means. As used herein, “data storage means” refers to memory that can store nucleotide sequence information of the present invention, or a memory access means which can access manufactures having recorded thereon the nucleotide sequence information of the present invention. As used herein, “search means” refers to one or more programs which are implemented on the computer-based system to compare a target sequence or target structural motif with the sequence information stored within the data storage means. Search means are used to identify fragments or regions of the sequence of the present invention that match a particular target sequence or target motif. A variety of known algorithms are disclosed publicly and a variety of commercially available software for conducting search means are available can be used in the computer-based systems of the present invention. Examples of such software include, but are not limited to, MacPattern (EMBL), BLASTIN and BLASTIX (NCBIA). One of the available algorithms or implementing software packages for conducting homology searches can be adapted for use in the present computer-based systems.

[1177] The most preferred sequence length of a target sequence is from about 10 to 100 amino acids or from about 30 to 300 nucleotide residues. However, it is well recognized that during searches for commercially important fragments of the nucleic acid molecules of the present invention, such as sequence fragments involved in gene expression and protein processing, may be of shorter length.

[1178] As used herein, “a target structural motif,” or “target motif,” refers to any rationally selected sequence or combination of sequences in which the sequences the sequence(s) are chosen based on a three-dimensional configuration which is formed upon the folding of the target motif. There are a variety of target motifs known in the art. Protein target motifs include, but are not limited to, enzymatic active sites and signal sequences. Nucleic acid target motifs include, but are not limited to, promoter sequences, cis elements, hairpin structures and inducible expression elements (protein binding sequences).

[1179] Thus, the present invention further provides an input means for receiving a target sequence, a data storage means for storing the target sequences of the present invention sequence identified using a search means as described above and an output means for outputting the identified homologous sequences. A variety of structural formats for the input and output means can be used to input and output information in the computer-based systems of the present invention. A preferred format for an output means ranks fragments of the sequence of the present invention by varying degrees of homology to the target sequence or target motif. Such presentation provides a skilled artisan with a ranking of sequences which contain various amounts of the target sequence or target motif and identifies the degree of homology contained in the identified fragment.

[1180] A variety of comparing means can be used to compare a target sequence or target motif with the data storage means to identify sequence fragments sequence of the present invention. For example, implementing software which implement the BLAST and BLAZE algorithms (Altschul et al., J. Mol. Biol. 215:403-410 (1990)) can be used to identify open frames within the nucleic acid molecules of the present invention. A skilled artisan can readily recognize that any one of the publicly available homology search programs can be used as the search means for the computer-based systems of the present invention.

[1181] Having now generally described the invention, the same will be more readily understood through reference to the following examples which are provided by way of illustration and are not intended to be limiting of the present invention, unless specified.

### EXAMPLE 1

[1182] The SATMONN01 (MONN01) cDNA library is a normalized library generated from maize (DK604, Dekalb Genetics, Dekalb, Ill. U.S.A.) total leaf tissue at the V6 plant development stage. Seeds are planted at a depth of approximately 3 cm into 2-3 inch peat pots containing Metro 200 growing medium. After 2-3 weeks growth they are transplanted into 10 inch pots containing the same growing medium. Plants are watered daily before transplantation and three times a week after transplantation. Peters 15-16-17 fertilizer is applied three times per week after transplanting at a strength of 150 ppm N. Two to three times during the lifetime of the plant, from transplanting to flowering, a total of 900 mg Fe is added to each pot. Maize plants are grown in a greenhouse in 15 hr day/9 hr night cycles. The daytime temperature is approximately 80° F. and the nighttime temperature is approximately 70° F. Supplemental lighting is provided by 1000 W sodium vapor lamps. Tissue is collected when maize plants are at the 6-leaf development stage. The older, more juvenile leaves, which are in a basal position, as well as the younger, more adult leaves, which are more apical are cut at the base of the leaves. The leaves are then pooled and immediately transferred to liquid nitrogen containers in which the pooled leaves are crushed. The harvested tissue is then stored at −80° C. until RNA preparation. The RNA is purified from the stored tissue. The library is normalized in one round using conditions adapted from Soares et al., Proc. Natl. Acad. Sci. (U.S.A.) 91:9928 (1994), the entirety of which is herein incorporated by reference and Bonaldo et al., Genome Res. 6: 791 (1996), the entirety of which is herein incorporated by reference except that a longer (48-hours/round) reannealing hybridization was used. SATMON004 is a leaf tissue library from the same donor.

[1183] The SATMON001 cDNA library is generated from maize (B73, Illinois Foundation Seeds, Champaign, Ill. U.S.A.) immature tassels at the V6 plant development stage. Seeds are planted at a depth of approximately 3 cm into 2-3 inch peat pots containing Metro 200 growing medium. After 2-3 weeks growth they are transplanted into 10 inch pots containing the same growing medium. Plants are watered daily before transplantation and three times a week after transplantation. Peters 15-16-17 fertilizer is applied three times per week after transplanting at a strength of 150 ppm N. Two to three times during the lifetime of the plant, from transplanting to flowering, a total of 900 mg Fe is added to each pot. Maize plants are grown in a greenhouse in 15 hr day/9 hr night cycles. The daytime temperature is approximately 80° F. and the nighttime temperature is approximately 70° F. Supplemental lighting is provided by 1000 W sodium vapor lamps. Tassel tissue from maize plants is collected at the V6 stage. At that stage the tassel is an immature tassel of about 2-3 cm in length. Tassels are removed and frozen in liquid nitrogen. The harvested tissue is then stored at −80° C. until RNA preparation. The RNA is purified from the stored tissue and the cDNA library is constructed as described in Example 2.

[1184] The SATMON003 library is generated from maize (B73×Mo17, Illinois Foundation Seeds, Champaign, Ill. U.S.A.) roots at the V6 developmental stage. Seeds are planted at a depth of approximately 3 cm into 2-3 inch peat pots containing Metro 200 growing medium. After 2-3 weeks growth, the seedlings are transplanted into 10 inch pots containing the Metro 200 growing medium. Plants are watered daily before transplantation and approximately 3 times a week after transplantation. Peters 15-16-17 fertilizer is applied approximately three times per week after transplanting at a concentration of 150 ppm N. Two to three times during the life time of the plant from transplanting to flowering a total of approximately 900 mg Fe is added to each pot. Maize plants are grown in a greenhouse in approximately 15 hr day/9 hr night cycles. The daytime temperature is approximately 80° F. and the nighttime temperature is approximately 70° F. Supplemental lighting is provided by 1000 W sodium vapor lamps. Tissue is collected when the maize plant is at the V6 leaf development stage. The root system is cut from maize plant and washed with water to free it from the soil. The tissue is then immediately frozen in liquid nitrogen. The harvested tissue is then stored at −80° C. until RNA preparation. The RNA is purified from the stored tissue and the cDNA library is constructed as described in Example 2.

[1185] The SATMON004 cDNA library is generated from maize (B73×Mo17, Illinois Foundation Seeds, Champaign, Ill. U.S.A.) total leaf tissue at the V6 plant development stage. Seeds are planted at a depth of approximately 3 cm into 2-3 inch peat pots containing Metro 200 growing medium. After 2-3 weeks growth they are transplanted into 10 inch pots containing the same growing medium. Plants are watered daily before transplantation and three times a week after transplantation. Peters 15-16-17 fertilizer is applied three times per week after transplanting at a strength of 150 ppm N. Two to three times during the lifetime of the plant, from transplanting to flowering, a total of 900 mg Fe is added to each pot. Maize plants are grown in a greenhouse in 15 hr day/9 hr night cycles. The daytime temperature is approximately 80° F. and the nighttime temperature is approximately 70° F. Supplemental lighting is provided by 1000 W sodium vapor lamps. Tissue is collected when the maize plant is at the V6-leaf development stage. The older, more juvenile leaves, which are in a basal position, as well as the younger, more adult leaves, which are more apical are cut at the base of the leaves. The leaves are then pooled and immediately transferred to liquid nitrogen containers in which the pooled leaves are crushed. The harvested tissue is then stored at −80° C. until RNA preparation. The RNA is purified from the stored tissue and the cDNA library is constructed as described in Example 2.

[1186] The SATMON005 cDNA library is generated from maize (B73×Mo17, Illinois Foundation Seeds, Champaign Ill., U.S.A.) root tissue at the V6 development stage. Seeds are planted at a depth of approximately 3 cm into 2-3 inch peat pots containing Metro 200 growing medium. After 2-3 weeks growth they are transplanted into 10 inch pots containing the same growing medium. Plants are watered daily before transplantation and three times a week after transplantation. Peters 15-16-17 fertilizer is applied three times per week after transplanting at a strength of 150 ppm N. Two to three times during the lifetime of the plant, from transplanting to flowering, a total of 900 mg Fe is added to each pot. Maize plants are grown in a greenhouse in 15 hr day/9 hr night cycles. The daytime temperature is approximately 80° F. and the nighttime temperature is approximately 70° F. Supplemental lighting is provided by 1000 W sodium vapor lamps. Tissue is collected when the maize plant is at the 6-leaf development stage. The root system is cut from the mature maize plant and washed with water to free it from the soil. The tissue is immediately frozen in liquid nitrogen and the harvested tissue is then stored at −80° C. until RNA preparation. The RNA is purified from the stored tissue and the cDNA library is constructed as described in Example 2.

[1187] The SATMON006 cDNA library is generated from maize (B73×Mo17, Illinois Foundation Seeds, Champaign Ill., U.S.A.) total leaf tissue at the V6 plant development stage. Seeds are planted at a depth of approximately 3 cm into 2-3 inch peat pots containing Metro 200 growing medium. After 2-3 weeks growth they are transplanted into 10 inch pots containing the same growing medium. Plants are watered daily before transplantation and three times a week after transplantation. Peters 15-16-17 fertilizer is applied three times per week after transplanting at a strength of 150 ppm N. Two to three times during the lifetime of the plant, from transplanting to flowering, a total of 900 mg Fe is added to each pot. Maize plants are grown in a greenhouse in 15 hr day/9 hr night cycles. The daytime temperature is approximately 80° F. and the nighttime temperature is approximately 70° F. Supplemental lighting is provided by 1000 W sodium vapor lamps. Tissue is collected when the maize plant is at the 6-leaf development stage. The older more juvenile leaves, which are in a basal position, as well as the younger more adult leaves, which are more apical are cut at the base of the leaves. The leaves are then pooled and immediately transferred to liquid nitrogen containers in which the pooled leaves are crushed. The harvested tissue is then stored at −80° C. until RNA preparation. The RNA is purified from the stored tissue and the cDNA library is constructed as described in Example 2.

[1188] The SATMON007 cDNA library is generated from the primary root tissue of 5 day old maize (DK604, Dekalb Genetics, Dekalb, Ill. U.S.A.) seedlings. Seeds are planted on a moist filter paper on a covered tray that is kept in the dark until germination (one day). After germination, the trays, along with the moist paper, are moved to a greenhouse where the maize plants are grown in the greenhouse in 15 hr day/9 hr night cycles for approximately 5 days. The daytime temperature is approximately 80° F. and the nighttime temperature is approximately 70° F. Supplemental lighting is provided by 1000 W sodium vapor lamps. The primary root tissue is collected when the seedlings are 5 days old. At this stage, the primary root (radicle) is pushed through the coleorhiza which itself is pushed through the seed coat. The primary root, which is about 2-3 cm long, is cut and immediately frozen in liquid nitrogen and then stored at −80° C. until RNA preparation. The RNA is purified from the stored tissue and the cDNA library is constructed as described in Example 2.

[1189] The SATMON008 cDNA library is generated from the primary shoot (coleoptile 2-3 cm) of maize (DK604, Dekalb Genetics, Dekalb, Ill. U.S.A.) seedlings which are approximately 5 days old. Seeds are planted on a moist filter paper on a covered tray that is kept in the dark until germination (one day). Then the trays containing the seeds are moved to a greenhouse at 15 hr daytime/9 hr nighttime cycles and grown until they are 5 days post germination. The daytime temperature is approximately 80° F. and the nighttime temperature is approximately 70° F. Tissue is collected when the seedlings are 5 days old. At this stage, the primary shoot (coleoptile) is pushed through the seed coat and is about 2-3 cm long. The coleoptile is dissected away from the rest of the seedling, immediately frozen in liquid nitrogen and then stored at −80° C. until RNA preparation. The RNA is purified from the stored tissue and the cDNA library is constructed as described in Example 2.

[1190] The SATMON009 cDNA library is generated from maize (DK604, Dekalb Genetics, Dekalb, Ill. U.S.A.) leaves at the 8 leaf stage (V8 plant development stage). Seeds are planted at a depth of approximately 3 cm into 2-3 inch peat pots containing Metro 200 growing medium. After 2-3 weeks growth they are transplanted into 10 inch pots containing the same growing medium. Plants are watered daily before transplantation and three times a week after transplantation. Peters 15-16-17 fertilizer is applied three times per week after transplanting at a strength of 150 ppm N. Two to three times during the lifetime of the plant, from transplanting to flowering, a total of 900 mg Fe is added to each pot. Maize plants are grown in a greenhouse in 15 hr day/9 hr night cycles. The daytime temperature is 80° F. and the nighttime temperature is 70° F. Supplemental lighting is provided by 1000 W sodium vapor lamps. Tissue is collected when the maize plant is at the 8-leaf development stage. The older more juvenile leaves, which are in a basal position, as well as the younger more adult leaves, which are more apical, are cut at the base of the leaves. The leaves are then pooled and then immediately transferred to liquid nitrogen containers in which the pooled leaves are crushed. The harvested tissue is then stored at −80° C. until RNA preparation. The RNA is purified from the stored tissue and the cDNA library is constructed as described in Example 2.

[1191] The SATMON010 cDNA library is generated from maize (DK604, Dekalb Genetics, Dekalb, Ill. U.S.A.) root tissue at the V8 plant development stage. Seeds are planted at a depth of approximately 3 cm into 2-3 inch peat pots containing Metro 200 growing medium. After 2-3 weeks growth they are transplanted into 10 inch pots containing the same growing medium. Plants are watered daily before transplantation and three times a week after transplantation. Peters 15-16-17 fertilizer is applied three times per week after transplanting at a strength of 150 ppm N. Two to three times during the lifetime of the plant, from transplanting to flowering, a total of 900 mg Fe is added to each pot. Maize plants are grown in a greenhouse in 15 hr day/9 hr night cycles. The daytime temperature is 80° F. and the nighttime temperature is 70° F. Supplemental lighting is provided by 1000 W sodium vapor lamps. Tissue is collected when the maize plant is at the V8 development stage. The root system is cut from this mature maize plant and washed with water to free it from the soil. The tissue is immediately frozen in liquid nitrogen. The harvested tissue is then stored at −80° C. until RNA preparation. The RNA is purified from the stored tissue and the cDNA library is constructed as described in Example 2.

[1192] The SATMON011 cDNA library is generated from undeveloped maize (DK604, Dekalb Genetics, Dekalb, Ill. U.S.A.) leaf at the V6 plant development stage. Seeds are planted at a depth of approximately 3 cm into 2-3 inch peat pots containing Metro 200 growing medium. After 2-3 weeks growth they are transplanted into 10 inch pots containing the same growing medium. Plants are watered daily before transplantation and three times a week after transplantation. Peters 15-16-17 fertilizer is applied three times per week after transplanting at a strength of 150 ppm N. Two to three times during the lifetime of the plant, from transplanting to flowering, a total of 900 mg Fe is added to each pot. Maize plants are grown in a greenhouse in 15 hr day/9 hr night cycles. The daytime temperature is approximately 80° F. and the nighttime temperature is approximately 70° F. Supplemental lighting is provided by 1000 W sodium vapor lamps. Tissue is collected when the maize plant is at the 6-leaf development stage. The second youngest leaf which is at the base of the apical leaf of V6 stage maize plant is cut at the base and immediately transferred to liquid nitrogen containers in which the leaf is crushed. The harvested tissue is then stored at −80° C. until RNA preparation. The RNA is purified from the stored tissue and the cDNA library is constructed as described in Example 2.

[1193] The SATMON012 cDNA library is generated from 2 day post germination maize (DK604, Dekalb Genetics, Dekalb, Ill. U.S.A.) seedlings. Seeds are planted on a moist filter paper on a covered tray that is kept in the dark until germination (one day). Then the trays containing the seeds are moved to the greenhouse and grown at 15 hr daytime/9 hr nighttime cycles until 2 days post germination. The daytime temperature is approximately 80° F. and the nighttime temperature is approximately 70° F. Tissue is collected when the seedlings are 2 days old. At the two day stage, the coleorhiza is pushed through the seed coat and the primary root (the radicle) is pierced the coleorhiza but is barely visible. Also, at this two day stage, the coleoptile is just emerging from the seed coat. The 2 days post germination seedlings are then immersed in liquid nitrogen and crushed. The harvested tissue is stored at −80° C. until preparation of total RNA. The RNA is purified from the stored tissue and the cDNA library is constructed as described in Example 2.

[1194] The SATMON013 cDNA library is generated from apical maize (DK604, Dekalb Genetics, Dekalb, Ill. U.S.A.) meristem founder at the V4 plant development stage. Seeds are planted at a depth of approximately 3 cm into 2-3 inch peat pots containing Metro 200 growing medium. After 2-3 weeks growth they are transplanted into 10 inch pots containing the same growing medium. Plants are watered daily before transplantation and three times a week after transplantation. Peters 15-16-17 fertilizer is applied three times per week after transplanting at a strength of 150 ppm N. Two to three times during the lifetime of the plant, from transplanting to flowering, a total of 900 mg Fe is added to each pot. Maize plants are grown in a greenhouse in 15 hr day/9 hr night cycles. The daytime temperature is approximately 80° F. and the nighttime temperature is approximately 70° F. Supplemental lighting is provided by 1000 W sodium vapor lamps. Prior to tissue collection, the plant is at the V4 leaf stage. The lead at the apex of the V4 stage maize plant is referred to as the meristem founder. This apical meristem founder is cut, immediately frozen in liquid nitrogen and crushed. The harvested tissue is then stored at −80° C. until RNA preparation. The RNA is purified from the stored tissue and the cDNA library is constructed as described in Example 2.

[1195] The SATMON014 cDNA library is generated from maize (DK604, Dekalb Genetics, Dekalb, Ill. U.S.A.) endosperm at fourteen days after pollination. Seeds are planted at a depth of approximately 3 cm into 2-3 inch peat pots containing Metro 200 growing medium. After 2-3 weeks growth they are transplanted into 10 inch pots containing the same growing medium. Plants are watered daily before transplantation and three times a week after transplantation. Peters 15-16-17 fertilizer is applied three times per week after transplanting at a strength of 150 ppm N. Two to three times during the lifetime of the plant, from transplanting to flowering, a total of 900 mg Fe is added to each pot. Maize plants are grown in a greenhouse in 15 hr day/9 hr night cycles. The daytime temperature is approximately 80° F. and the nighttime temperature is approximately 70° F. Supplemental lighting is provided by 1000 W sodium vapor lamps. After the V10 stage, ear shoots are ready for fertilization. At this stage, the ear shoots are enclosed in a paper bag before silk emergence to withhold the pollen. The ear shoots are pollinated and 14 days after pollination, the ears are pulled out and then the kernels are plucked out of the ears. Each kernel is then dissected into the embryo and the endosperm and the aleurone layer is removed. After dissection, the endosperms are immediately frozen in liquid nitrogen and then stored at −80° C. until RNA preparation. The RNA is purified from the stored tissue and the cDNA library is constructed as described in Example 2.

[1196] The SATMON016 cDNA library is generated from maize (DK604, Dekalb Genetics, Dekalb, Ill. U.S.A.) sheath tissue collected at the V8 developmental stage. Seeds are planted in a depth of approximately 3 cm in solid into 2-3 inch pots containing Metro growing medium. After 2-3 weeks growth, they are transplanted into 10 inch pots containing the same. Plants are watered daily before transplantation and approximately the times a week after transplantation. Peters 15-16-17 fertilizer is applied approximately three times per week after transplanting, at a strength of 150 ppm N. Two to three times during the life time of the plant from transplanting to flowering, a total of approximately 900 mg Fe is added to each pot. Maize plants are grown in a greenhouse in 15 hr day/9 hr night cycles. The daytime temperature is approximately 80° F. and the nighttime temperature is approximately 70° F. Supplemental lighting is provided by 1000 W sodium vapor lamps. When the maize plants are at the V8 stage, the 5^{th} and 6^{th} leaves from the bottom exhibit fully developed leaf blades. At the base of these leaves, the ligule is differentiated and the leaf blade is joined to the sheath. The sheath is dissected away from the base of the leaf then the sheath is frozen in liquid nitrogen and crushed. The tissue is then stored at −80° C. until RNA preparation. The RNA is purified from the stored tissue and the cDNA library is constructed as described in Example 2.

[1197] The SATMON017 cDNA library is generated from maize (DK604, Dekalb Genetics, Dekalb, Ill. U.S.A.) embryo collected from plants at twenty one days after pollination. Seeds are planted at a depth of approximately 3 cm into 2-3 inch peat pots containing Metro 200 growing medium. After 2-3 weeks growth the seeds are transplanted into 10 inch pots containing the same growing medium. Plants are watered daily before transplantation and three times a week after transplantation. Peters 15-16-17 fertilizer is applied three times per week after transplanting at a strength of 150 ppm N. Two to three times during the lifetime of the plant, from transplanting to flowering, a total of 900 mg Fe is added to each pot. Maize plants are grown in a greenhouse in 15 hr day/9 hr night cycles. The daytime temperature is approximately 80° F. and the nighttime temperature is approximately 70° F. Supplemental lighting is provided by 1000 W sodium vapor lamps. After the V10 stage, the ear shoots of maize plant, which are ready for fertilization, are enclosed in a paper bag before silk emergence to withhold the pollen. The ear shoots are fertilized and 21 days after pollination, the ears are pulled out and the kernels are plucked out of the ears. Each kernel is then dissected into the embryo and the endosperm and the aleurone layer is removed. After dissection, the embryos are immediately frozen in liquid nitrogen and then stored at −80° C. until RNA preparation. The RNA is purified from the stored tissue and the cDNA library is constructed as described in Example 2.

[1198] The SATMON019 cDNA library is generated from maize (DK604, Dekalb Genetics, Dekalb, Ill. U.S.A.) culm (stem) at the V8 developmental stage. Seeds are planted at a depth of approximately 3 cm into 2-3 inch peat pots containing Metro 200 growing medium. After 2-3 weeks growth they are transplanted into 10 inch pots containing the same growing medium. Plants are watered daily before transplantation and three times a week after transplantation. Peters 15-16-17 fertilizer is applied three times per week after transplanting at a strength of 150 ppm N. Two to three times during the lifetime of the plant, from transplanting to flowering, a total of 900 mg Fe is added to each pot. Maize plants are grown in a greenhouse in 15 hr day/9 hr night cycles. The daytime temperature is approximately 80° F. and the nighttime temperature is approximately 70° F. Supplemental lighting is provided by 1000 W sodium vapor lamps. When the maize plant is at the V8 stage, the 5th and 6th leaves from the bottom have fully developed leaf blades. The region between the nodes of the 5th and the sixth leaves from the bottom is the region of the stem that is collected. The leaves are pulled out and the sheath is also torn away from the stem. This stem tissue is completely free of any leaf and sheath tissue. The stem tissue is then frozen in liquid nitrogen and stored at −80° C. until RNA preparation. The RNA is purified from the stored tissue and the cDNA library is constructed as described in Example 2.

[1199] The SATMON020 cDNA library is from a maize (DK604, Dekalb Genetics, Dekalb, Ill. U.S.A.) Hill Type II-Initiated Callus. Petri plates containing approximately 25 ml of Type II initiation media are prepared. This medium contains N6 salts and vitamins, 3% sucrose, 2.3 g/liter proline 0.1 g/liter enzymatic casein hydrolysate, 2 mg/liter 2,4-dichloro phenoxy-acetic acid (2,4, D), 15.3 mg/liter AgNO₃ and 0.8% bacto agar and is adjusted to pH 6.0 before autoclaving. At 9-11 days after pollination, an ear with immature embryos measuring approximately 1-2 mm in length is chosen. The husks and silks are removed and then the ear is broken into halves and placed in an autoclaved solution of Clorox/TWEEN 20 sterilizing solution. Then the ear is rinsed with deionized water. Then each embryo is extracted from the kernel. Intact embryos are placed in contact with the medium, scutellar side up). Multiple embryos are plated on each plate and the plates are incubated in the dark at 25° C. Type II calluses are friable, can be subcultured with a spatula, frequently regenerate via somatic embryogenesis and are relatively undifferentiated. As seen in the microscope, the Tape II calluses show color ranging from translucent to light yellow and heterogeneity on with respect to embryoid structure as well as stage of embryoid development. Once Type II callus are formed, the calluses is transferred to type II callus maintenance medium without AgNO₃. Every 7-10 days, the callus is subcultured. About 4 weeks after embryo isolation the callus is removed from the plates and then frozen in liquid nitrogen. The harvested tissue is stored at −80° C. until RNA preparation. The RNA is purified from the stored tissue and the cDNA library is constructed as described in Example 2.

[1200] The SATMON021 cDNA library is generated from the immature maize (DK604, Dekalb Genetics, Dekalb Ill., U.S.A.) tassel at the V8 plant development stage. Seeds are planted at a depth of approximately 3 cm into 2-3 inch peat pots containing Metro 200 growing medium. After 2-3 weeks growth they are transplanted into 10 inch pots containing the same growing medium. Plants are watered daily before transplantation and three times a week after transplantation. Peters 15-16-17 fertilizer is applied three times per week after transplanting at a strength of 150 ppm N. Two to three times during the lifetime of the plant, from transplanting to flowering, a total of 900 mg Fe is added to each pot. Maize plants are grown in a greenhouse in 15 hr day/9 hr night cycles. The daytime temperature is approximately 80° F. and the nighttime temperature is approximately 70° F. Supplemental lighting is provided by 1000 W sodium vapor lamps. As the maize plant enters the V8 stage, tassels which are 15-20 cm in length are collected and frozen in liquid nitrogen. The harvested tissue is stored at −80° C. until RNA preparation. The RNA is purified from the stored tissue and the cDNA library is constructed as described in Example 2.

[1201] The SATMON022 cDNA library is generated from maize (DK604, Dekalb Genetics, Dekalb, Ill. U.S.A.) immature ear at the V8 plant development stage. Seeds are planted at a depth of approximately 3 cm into 2-3 inch peat pots containing Metro 200 growing medium. After 2-3 weeks growth they are transplanted into 10 inch pots containing the same growing medium. Plants are watered daily before transplantation and three times a week after transplantation. Peters 15-16-17 fertilizer is applied three times per week after transplanting at a strength of 150 ppm N. Two to three times during the lifetime of the plant, from transplanting to flowering, a total of 900 mg Fe is added to each pot. Maize plants are grown in a greenhouse in 15 hr day/9 hr night cycles. The daytime temperature is approximately 80° F. and the nighttime temperature is approximately 70° F. Supplemental lighting is provided by 1000 W sodium vapor lamps. Tissue is collected when the plant is in the V8 stage. At this stage, some immature ear shoots are visible. The immature ear shoots (approximately 34 cm in length) are pulled out, frozen in liquid nitrogen and then stored at −80° C. until RNA preparation. The RNA is purified from the stored tissue and the cDNA library is constructed as described in Example 2.

[1202] The SATMON023 cDNA library is generated from maize (DK604, Dekalb Genetics, Dekalb, Ill. U.S.A.) ear (growing silk) at the V8 development stage. Seeds are planted at a depth of approximately 3 cm into 2-3 inch peat pots containing Metro 200 growing medium. After 2-3 weeks growth they are transplanted into 10 inch pots containing the same growing medium. Plants are watered daily before transplantation and three times a week after transplantation. Peters 15-16-17 fertilizer is applied three times per week after transplanting at a strength of 150 ppm N. Two to three times during the lifetime of the plant, from transplanting to flowering, a total of 900 mg Fe is added to each pot. Maize plants are grown in a greenhouse in 15 hr day/9 hr night cycles. The daytime temperature is approximately 80° F. and the nighttime temperature is approximately 70° F. When the tissue is harvested at the V8 stage, the length of the ear that is harvested is about 10-15 cm and the silks are just exposed (approximately 1 inch). The ear along with the silks is frozen in liquid nitrogen and then the tissue is stored at −80° C. until RNA preparation. The RNA is purified from the stored tissue and the cDNA library is constructed as described in Example 2.

[1203] The SATMON024 cDNA library is generated from the immature maize (DK604, Dekalb Genetics, Dekalb, Ill. U.S.A.) tassel at the V9 development stage. Seeds are planted at a depth of approximately 3 cm into 2-3 inch peat pots containing Metro 200 growing medium. After 2-3 weeks growth they are transplanted into 10 inch pots containing the same growing medium. Plants are watered daily before transplantation and three times a week after transplantation. Peters 15-16-17 fertilizer is applied three times per week after transplanting at a strength of 150 ppm N. Two to three times during the lifetime of the plant, from transplanting to flowering, a total of 900 mg Fe is added to each pot. Maize plants are grown in a greenhouse in 15 hr day/9 hr night cycles. The daytime temperature is approximately 80° F. and the nighttime temperature is approximately 70° F. As a maize plant enters the V9 stage, the tassel is rapidly developing and a 37 cm tassel along with the glume, anthers and pollen is collected and frozen in liquid nitrogen. The harvested tissue is stored at −80° C. until RNA preparation. The RNA is purified from the stored tissue and the cDNA library is constructed as described in Example 2.

[1204] The SATMON025 cDNA library is from maize (DK604, Dekalb Genetics, Dekalb, Ill. U.S.A.) Hill Type II-Regenerated Callus. Type II callus is grown in initiation media as described for SATMON020 and then the embryoids on the surface of the Type II callus are allowed to mature and germinate. The 1-2 gm fresh weight of the soft friable type callus containing numerous embryoids are transferred to 100×15 mm petri plates containing 25 ml of regeneration media. Regeneration media consists of Murashige and Skoog (MS) basal salts, modified White's vitamins (0.2 g/liter glycine and 0.5 g/liter myo-inositoland 0.8% bacto agar (6SMS0D)). The plates are then placed in the dark after covering with parafilm. After 1 week, the plates are moved to a lighted growth chamber with 16 hr light and 8 hr dark photoperiod. Three weeks after plating the Type II callus to 6SMS0D, the callus exhibit shoot formation. The callus and the shoots are transferred to fresh 6SMS0D plates for another 2 weeks. The callus and the shoots are then transferred to petri plates with reduced sucrose (3SMSOD). Upon distinct formation of a root and shoot, the newly developed green plants are then removed out with a spatula and frozen in liquid nitrogen containers. The harvested tissue is then stored at −80° C. until RNA preparation. The RNA is purified from the stored tissue and the cDNA library is constructed as described in Example 2.

[1205] The SATMON026 cDNA library is generated from maize (DK604, Dekalb Genetics, Dekalb, Ill. U.S.A.) juvenile/adult shift leaves at the V8 plant development stage. Seeds are planted at a depth of approximately 3 cm into 2-3 inch peat pots containing Metro 200 growing medium. After 2-3 weeks growth they are transplanted into 10 inch pots containing the same growing medium. Plants are watered daily before transplantation and three times a week after transplantation. Peters 15-16-17 fertilizer is applied three times per week after transplanting at a strength of 150 ppm N. Two to three times during the lifetime of the plant, from transplanting to flowering, a total of 900 mg Fe is added to each pot. Maize plants are grown in a greenhouse in 15 hr day/9 hr night cycles. The daytime temperature is approximately 80° F. and the nighttime temperature is approximately 70° F. Supplemental lighting is provided by 1000 W sodium vapor lamps. Tissue is collected when the maize plants are at the 8-leaf development stage. Leaves are founded sequentially around the meristem over weeks of time and the older, more juvenile leaves arise earlier and in a more basal position than the younger, more adult leaves, which are in a more apical position. In a V8 plant, some leaves which are in the middle portion of the plant exhibit characteristics of both juvenile as well as adult leaves. They exhibit a yellowing color but also exhibit, in part, a green color. These leaves are termed juvenile/adult shift leaves. The juvenile/adult shift leaves (the 4th, 5th leaves from the bottom) are cut at the base, pooled and transferred to liquid nitrogen in which they are then crushed. The harvested tissue is then stored at −80° C. until RNA preparation. The RNA is purified from the stored tissue and the cDNA library is constructed as described in Example 2.

[1206] The SATMON027 cDNA library is generated from maize (DK604, Dekalb Genetics, Dekalb, Ill. U.S.A.) leaves from plants at the V8 developmental stage that are subject to six days water stress. Seeds are planted at a depth of approximately 3 cm into 2-3 inch peat pots containing Metro 200 growing medium. After 2-3 weeks growth they are transplanted into 10 inch pots containing the Metro 200 growing medium. Plants are watered daily before transplantation and three times a week after transplantation. Peters 15-16-17 fertilizer is applied three times per week after transplanting at a strength of 150 ppm N. Two to three times during the lifetime of the plant, from transplanting to flowering, a total of 900 mg Fe is added to each pot. Maize plants are grown in a greenhouse in 15 hr day/9 hr night cycles. The daytime temperature is approximately 80° F. and the nighttime temperature is approximately 70° F. Supplemental lighting is provided by 1000 W sodium vapor lamps. Prior to tissue collection, when the plant is at the 8-leaf stage, water is held back for six days. The older, more juvenile leaves, which are in a basal position, as well as the younger, more adult leaves, which are more apical, are all cut at the base of the leaves. All the leaves exhibit significant wilting. The leaves are then pooled and immediately transferred to liquid nitrogen containers in which the pooled leaves are then crushed. The harvested tissue is then stored at −80° C. until RNA preparation. The RNA is purified from the stored tissue and the cDNA library is constructed as described in Example 2.

[1207] The SATMON028 cDNA library is generated from maize (DK604, Dekalb Genetics, Dekalb, Ill. U.S.A.) roots at the V8 developmental stage that are subject to six days water stress. Seeds are planted at a depth of approximately 3 cm into 2-3 inch peat pots containing Metro 200 growing medium. After 2-3 weeks growth they are transplanted into 10 inch pots containing the Metro 200 growing medium. Plants are watered daily before transplantation and three times a week after transplantation. Peters 15-16-17 fertilizer is applied three times per week after transplanting at a strength of 150 ppm N. Two to three times during the lifetime of the plant, from transplanting to flowering, a total of 900 mg Fe is added to each pot. Maize plants are grown in a greenhouse in 15 hr day/9 hr night cycles. The daytime temperature is approximately 80° F. and the nighttime temperature is approximately 70° F. Supplemental lighting is provided by 1000 W sodium vapor lamps. Prior to tissue collection, when the plant is at the 8-leaf stage, water is held back for six days. The root system is cut, shaken and washed to remove soil. Root tissue is then immediately transferred to liquid nitrogen containers. The harvested tissue is then stored at −80° C. until RNA preparation. The RNA is purified from the stored tissue and the cDNA library is constructed as described in Example 2.

[1208] The SATMON029 cDNA library is generated from maize (DK604, Dekalb Genetics, Dekalb, Ill. U.S.A.) seedlings at the etiolated stage. Seeds are planted on a moist filter paper on a covered tray that is kept in the dark for 4 days at approximately 70° F. Tissue is collected when the seedlings are 4 days old. By 4 days, the primary root has penetrated the coleorhiza and is about 4-5 cm and the secondary lateral roots have also made their appearance. The coleoptile has also pushed through the seed coat and is about 4-5 cm long. The seedlings are frozen in liquid nitrogen and crushed. The harvested tissue is then stored at −80° C. until RNA preparation The RNA is purified from the stored tissue and the cDNA library is constructed as described in Example 2.

[1209] The SATMON030 cDNA library is generated from maize (DK604, Dekalb Genetics, Dekalb, Ill. U.S.A.) root tissue at the V4 plant development stage. Seeds are planted at a depth of approximately 3 cm into 2-3 inch peat pots containing Metro 200 growing medium. After 2-3 weeks growth, they are transplanted into 10 inch pots containing the same. Plants are watered daily before transplantation and approximately 3 times a week after transplantation. Peters 15-16-17 fertilizer is applied approximately three times per week after transplanting, at a strength of 150 ppm N. Two to three times during the life time of the plant, from transplanting to flowering, a total of approximately 900 mg Fe is added to each pot. Maize plants are grown in a greenhouse in 15 hr day/9 hr night cycles. The daytime temperature is approximately 80° F. and the nighttime temperature is approximately 70° F. Supplemental lighting is provided by 1000 sodium vapor lamps. Tissue is collected when the maize plant is at the 4 leaf development stage. The root system is cut from the mature maize plant and washed with water to free it from the soil. The tissue is then immediately frozen in liquid nitrogen. The harvested tissue is then stored at −80° C. until RNA preparation. The RNA is purified from the stored tissue and the cDNA library is constructed as described in Example 2.

[1210] The SATMON031 cDNA library is generated from the maize (DK604, Dekalb Genetics, Dekalb, Ill. U.S.A.) leaf tissue at the V4 plant development stage. Seeds are planted at a depth of approximately 3 cm into 2-3 inch peat pots containing Metro 200 growing medium. After 2-3 weeks growth they are transplanted into 10 inch pots containing the same growing medium. Plants are watered daily before transplantation and three times a week after transplantation. Peters 15-16-17 fertilizer is applied three times per week after transplanting at a strength of 150 ppm N. Two to three times during the lifetime of the plant, from transplanting to flowering, a total of 900 mg Fe is added to each pot. Maize plants are grown in a greenhouse in 15 hr day/9 hr night cycles. The daytime temperature is 80° F. and the nighttime temperature is 70° F. Supplemental lighting is provided by 1000 W sodium vapor lamps. Tissue is collected when the maize plant is at the 4-leaf development stage. The third leaf from the bottom is cut at the base and immediately frozen in liquid nitrogen and crushed. The tissue is immediately frozen in liquid nitrogen. The harvested tissue is then stored at −80° C. until RNA preparation. The RNA is purified from the stored tissue and the cDNA library is constructed as described in Example 2.

[1211] The SATMON033 cDNA library is generated from maize (DK604, Dekalb Genetics, Dekalb, Ill. U.S.A.) embryo tissue from plants at 13 days after pollination. Seeds are planted at a depth of approximately 3 cm into 2-3 inch peat pots containing Metro 200 growing medium. After 2-3 weeks growth they are transplanted into 10 inch pots containing the same growing medium. Plants are watered daily before transplantation and three times a week after transplantation. Peters 15-16-17 fertilizer is applied three times per week after transplanting at a strength of 150 ppm N. Two to three times during the lifetime of the plant, from transplanting to flowering, a total of 900 mg Fe is added to each pot. Maize plants are grown in a greenhouse in 15 hr day/9 hr night cycles. The daytime temperature is approximately 80° F. and the nighttime temperature is approximately 70° F. Supplemental lighting is provided by 1000 W sodium vapor lamps. After the V10 stage, the ear shoots of the maize plant, which are ready for fertilization, are enclosed in a paper bag before silk emergent to withhold the pollen. The ear shoots are pollinated and 13 days after pollination, the ears are pulled out and then the kernels are plucked cut of the ears. Each kernel is then dissected into the embryo and the endosperm and the aleurone layer is removed. After dissection, the embryos are immediately frozen in liquid nitrogen and then stored at −80° C. until RNA preparation. The RNA is purified from the stored tissue and the cDNA library is constructed as described in Example 2.

[1212] The SATMON034 cDNA library is generated from cold stressed maize (DK604, Dekalb Genetics, Dekalb, Ill. U.S.A.) seedlings. Seeds are planted on a moist filter paper on a covered tray that is kept on at 10° C. for 7 days. After 7 days, the temperature is shifted to 15° C. for one day until germination of the seed. Tissue is collected once the seedlings are 1 day old. At this point, the coleorhiza has just pushed out of the seed coat and the primary root is just making its appearance. The coleoptile has not yet pushed completely through the seed coat and is also just making its appearance. These 1 day old cold stressed seedlings are frozen in liquid nitrogen and crushed. The harvested tissue is then stored at −80° C. until RNA preparation. The RNA is purified from the stored tissue and the cDNA library is constructed as described in Example 2.

[1213] The CMz029 (SATMON036) cDNA library is generated from maize (RX601, Asgrow Seed Company, Des Moines, Iowa U.S.A.) endosperm 22 days after pollination. RX601 corn seeds are sterilized for 1 minute in 10% clorox solution, rolled in germination paper and germinated in 0.5 mM Calcium Sufate for two days at 30° C. The seedlings are transplanted into a peat mix media in 3″ peat pots at the rate of three seedlings per pot. They are then placed in a greenhouse. Twenty plants are placed into a high CO₂ environment (˜1000 ppm CO₂) and twenty plants are grown under ambient greenhouse CO₂ (˜450 ppm CO₂). The plants are hand watered and lightly fertilized with Peters 20-20-20 liquid fertilizer. At 10 days after planting, the shoots from both atmospheres are placed in liquid nitrogen and lightly ground by hand. The roots are washed in DI water solution to remove most of the support media and then frozen in liquid nitrogen. All tissues are stored at −80° C. Shoots from the high CO₂ treatment are submitted for library preparation. The RNA is purified from the stored tissue and the cDNA library is constructed as described in Example 2.

[1214] The SATMONN04 normalized cDNA library is generated from maize (DK604, Dekalb Genetics, Dekalb, Ill. U.S.A.) embryo collected from plants at twenty one days after pollination. Seeds are planted at a depth of approximately 3 cm into 2-3 inch peat pots containing Metro 200 growing medium. After 2-3 weeks growth the seeds are transplanted into 10 inch pots containing the same growing medium. Plants are watered daily before transplantation and three times a week after transplantation. Peters 15-16-17 fertilizer is applied three times per week after transplanting at a strength of 150 ppm N. Two to three times during the lifetime of the plant, from transplanting to flowering, a total of 900 mg Fe is added to each pot. Maize plants are grown in a greenhouse in 15 hr day/9 hr night cycles. The daytime temperature is approximately 80° F. and the nighttime temperature is approximately 70° F. Supplemental lighting is provided by 1000 W sodium vapor lamps. After the V10 stage, the ear shoots of maize plant, which are ready for fertilization, are enclosed in a paper bag before silk emergence to withhold the pollen. The ear shoots are fertilized and 21 days after pollination, the ears are pulled out and the kernels are plucked out of the ears. Each kernel is then dissected into the embryo and the endosperm and the aleurone layer is removed. After dissection, the embryos are immediately frozen in liquid nitrogen and then stored at −80° C. until RNA preparation. The RNA is purified from the stored tissue and the cDNA library is constructed as described in Example 2. The library is normalized in one round using conditions adapted from Soares et al., Proc. Natl. Acad. Sci. (U.S.A.) 91:9928 (1994), the entirety of which is herein incorporated by reference and Bonaldo et al., Genome Res. 6: 791 (1996), the entirety of which is herein incorporated by reference except that a longer (48-hours/round) reannealing hybridization was used. SATMONN06 (normalized) and SATMON017 are embryo tissue libraries from the same donor.

[1215] The SATMONN05 cDNA library is a normalized library generated from maize (B73×Mo17, Illinois Foundation Seeds, Champaign Ill., U.S.A.) root tissue at the V6 development stage. Seeds are planted at a depth of approximately 3 cm into 2-3 inch peat pots containing Metro 200 growing medium. After 2-3 weeks growth they are transplanted into 10 inch pots containing the same growing medium. Plants are watered daily before transplantation and three times a week after transplantation. Peters 15-16-17 fertilizer is applied three times per week after transplanting at a strength of 150 ppm N. Two to three times during the lifetime of the plant, from transplanting to flowering, a total of 900 mg Fe is added to each pot. Maize plants are grown in a greenhouse in 15 hr day/9 hr night cycles. The daytime temperature is approximately 80° F. and the nighttime temperature is approximately 70° F. Supplemental lighting is provided by 1000 W sodium vapor lamps. Tissue is collected when the maize plant is at the 6-leaf development stage. The root system is cut from the mature maize plant and washed with water to free it from the soil. The tissue is immediately frozen in liquid nitrogen and the harvested tissue is then stored at −80° C. until RNA preparation. The RNA is purified from the stored tissue. The library is normalized in two rounds using conditions adapted from Soares et al., Proc. Natl. Acad. Sci. (U.S.A.) 91:9928 (1994), the entirety of which is herein incorporated by reference and Bonaldo et al., Genome Res. 6: 791 (1996), the entirety of which is herein incorporated by reference except that a longer (48-hours/round) reannealing hybridization was used. SATMON003 is a root tissue library from the same donor.

[1216] The SATMONN06 normalized cDNA library is generated from maize (DK604, Dekalb Genetics, Dekalb, Ill. U.S.A.) embryo collected from plants at twenty one days after pollination. Seeds are planted at a depth of approximately 3 cm into 2-3 inch peat pots containing Metro 200 growing medium. After 2-3 weeks growth the seeds are transplanted into 10 inch pots containing the same growing medium. Plants are watered daily before transplantation and three times a week after transplantation. Peters 15-16-17 fertilizer is applied three times per week after transplanting at a strength of 150 ppm N. Two to three times during the lifetime of the plant, from transplanting to flowering, a total of 900 mg Fe is added to each pot. Maize plants are grown in a greenhouse in 15 hr day/9 hr night cycles. The daytime temperature is approximately 80° F. and the nighttime temperature is approximately 70° F. Supplemental lighting is provided by 1000 W sodium vapor lamps. After the V10 stage, the ear shoots of maize plant, which are ready for fertilization, are enclosed in a paper bag before silk emergence to withhold the pollen. The ear shoots are fertilized and 21 days after pollination, the ears are pulled out and the kernels are plucked out of the ears. Each kernel is then dissected into the embryo and the endosperm and the aleurone layer is removed. After dissection, the embryos are immediately frozen in liquid nitrogen and then stored at −80° C. until RNA preparation. The RNA is purified from the stored tissue and the cDNA library is constructed as described in Example 2. The library is normalized in two rounds using conditions adapted from Soares et al., Proc. Natl. Acad. Sci. (U.S.A.) 91:9928 (1994), the entirety of which is herein incorporated by reference and Bonaldo et al., Genome Res. 6: 791 (1996), the entirety of which is herein incorporated by reference except that a longer (48-hours/round) reannealing hybridization was used. SATMONN04 (normalized) and SATMON017 are embryo tissue libraries from the same donor.

[1217] LIB36 is a normalized cDNA library prepared from maize (DK604, Dekalb Genetics, Dekalb, Ill. U.S.A) leaves harvested from V8 stage plants. Seeds are planted at a depth of approximately 3 cm in soil into 2″-3″ peat pots containing Metro 200 growing medium. After 2-3 weeks growth, they are transplanted into 10″ pots containing the same. Plants are watered daily before transplantation and three times a week after transplantation. Peters 15-16-17 fertilizer is applied three times per week after transplanting at a strength of 150 ppm N. Two to three times during the lifetime of the plant, from transplanting to flowering, a total of 900 mg Fe is added to each pot. Maize plants are grown in a greenhouse in 15 hr day/9 hr night cycles. The daytime temperature is 80° F. and the nighttime temperature is 70° F. Lighting is provided by 1000 W sodium vapor lamps. Tissue is collected from V8 stage plants. The older more juvenile leaves which are in a basal position as well as the younger more adult leaves which are more apical were all cut at the base of the leaves. The leaves are then pooled and then immediately transferred to liquid nitrogen containers in which the pooled leaves are then crushed. The harvested tissue is then stored at −80° C. until RNA preparation.

[1218] For the construction of a cDNA library, the Superscript™ Plasmid System for cDNA synthesis and Plasmid Cloning (Gibco BRL, Life Technologies, Gaithersburg, Md.) or similar system, following the conditions suggested by the manufacturer, is used. Poly A+ mRNA is purified from the total RNA preparation using Dynabeads® Oligo (dT)₂₅ (Dynal Inc., Lake Success, N.Y.), or equivalent methods. Clones are selected and the plasmid DNA is isolated using a commercially available kit for normalizing the cDNA library. This library is normalized at a cot value of 10.

[1219] Approximately 1 million clones from the cDNA library are used for the generation of double and single stranded plasmid DNA. Double stranded plasmid DNA is used as a template for preparation of biotinylated RNA transcripts. Single stranded plasmid DNA from the cDNA library is hybridized with biotinylated RNA transcripts from the same library. Hybridized molecules are removed with Streptavidin beads (Dynal Inc. Lake Success, N.Y.). Remaining single stranded molecules are partially repaired with “Klenow” before transforming E. coli for the generation of a normalized cDNA library. SATMON009 is a leaf tissue library from the same donor.

[1220] The normalized cDNA library (LIB83) is prepared from maize leaves harvested from V8 stage plants. Maize DK604 (Dekalb Genetics, Dekalb, Ill. U.S.A) is used. Seeds are planted at a depth of approximately 3 cm in soil into 2″-3″ peat pots containing Metro 200 growing medium. After 2-3 weeks growth, they are transplanted into 10″ pots containing the same. Plants are watered daily before transplantation and ˜3 times a week after transplantation. Peters 15-16-17 fertilizer is applied ˜3× per week after transplanting, at a strength of 150 ppm N. 2-3 times during the life time of the plant, from transplanting to flowering, a total of ˜900 mg Fe is added to each pot. Plants are grown in a green house in 15 hr day/9 hr night cycles. The daytime temperature is 80° F. and the night time temperature was 70° F. Lighting was provided by 1000 W sodium vapor lamps. Tissue is collected from V8 stage plants. The older more juvenile leaves which are in a basal position as well as the younger more adult leaves which are more apical were all cut at the base of the leaves. The leaves are then pooled and then immediately transferred to liquid nitrogen containers in which the pooled leaves are then crushed. The harvested tissue is then stored at −80° C. until RNA preparation.

[1221] For the construction of a cDNA library, the Superscript™ Plasmid System for cDNA synthesis and Plasmid Cloning (Gibco BRL, Life Technologies, Gaithersburg, Md.) or similar system, following the conditions suggested by the manufacturer, is used. Poly A+ mRNA is purified from the total RNA preparation using Dynabeads® Oligo (dT)₂₅ (Dynal Inc., Lake Success, N.Y.), or equivalent methods. Clones are selected and the plasmid DNA is isolated using a commercially available kit for normalizing the cDNA library. This library is normalized at a ratio of 1:50.

[1222] Approximately 1 million clones from the cDNA library are used for the generation of double and single stranded plasmid DNA. Double stranded plasmid DNA is used as a template for preparation of biotinylated RNA transcripts. Single stranded plasmid DNA from the cDNA library is hybridized with biotinylated RNA transcripts from the same library. Hybridized molecules are removed with Streptavidin beads (Dynal Inc. Lake Success, N.Y.). Remaining single stranded molecules are partially repaired with “Klenow” before transforming E. coli for the generation of a normalized cDNA library. SATMON009 is a leaf tissue library from the same donor.

[1223] LIB84 a normalized cDNA library is prepared from maize (DK604, Dekalb Genetics, Dekalb, Ill. U.S.A) leaves harvested from V8 stage plants. Seeds are planted at a depth of approximately 3 cm in soil into 2″-3″ peat pots containing Metro 200 growing medium. After 2-3 weeks growth, they are transplanted into 10″ pots containing the same. Plants are watered daily before transplantation and three times a week after transplantation. Peters 15-16-17 fertilizer is applied three times per week after transplanting at a strength of 150 ppm N. Two to three times during the lifetime of the plant, from transplanting to flowering, a total of 900 mg Fe is added to each pot. Plants were grown in a greenhouse in 15 hr day/9 hr night cycles. The daytime temperature was 80° F. and the nighttime temperature was 70° F. Lighting was provided by 1000 W sodium vapor lamps. Tissue was collected from V8 stage plants. The older more juvenile leaves which are in a basal position as well as the younger more adult leaves which are more apical were all cut at the base of the leaves. The leaves are then pooled and then immediately transferred to liquid nitrogen containers in which the pooled leaves are then crushed. The harvested tissue is then stored at −80° C. until RNA preparation.

[1224] For the construction of a cDNA library, the Superscript™ Plasmid System for cDNA synthesis and Plasmid Cloning (Gibco BRL, Life Technologies, Gaithersburg, Md.) or similar system, following the conditions suggested by the manufacturer, is used. Poly A+ mRNA is purified from the total RNA preparation using Dynabeads® Oligo (dT)₂₅ (Dynal Inc., Lake Success, N.Y.), or equivalent methods. Clones are selected and the plasmid DNA is isolated using a commercially available kit for normalizing the cDNA library. This library is normalized at a ratio of 1:10.

[1225] Approximately 1 million clones from the cDNA library are used for the generation of single stranded plasmid DNA. Appropriate Oligonucleotide from 3′ end of single stranded circle are used for primer extension in the presence of biotinylated dideoxynucleotides. The reaction is controlled to give 200-300 bp extension products. Single stranded circle cDNA library with primer extension products is denatured and hybridized under appropriate conditions. Hybridized molecules are removed with Streptavidin beads (Dynal Inc. Lake Success, N.Y.). Remaining single stranded molecules are partially repaired with “Klenow” before transforming E. coli for the generation of a normalized cDNA library. SATMON009 is a leaf tissue library from the same donor.

[1226] The CMz030 (Lib143) cDNA library is generated from maize (DK604, Dekalb Genetics, Dekalb, Ill. U.S.A.) heat shocked seedling tissue two days post germination. Seeds are planted on a moist filter paper on a covered try that is keep in the dark until germination. The trays are then moved to the bench top at 15 hr daytime/9 hr nighttime cycles for 2 days post-germination. The day time temperature is 80° F. and the nighttime temperature is 70° F. Tissue is collected when the seedlings are 2 days old. At this stage, the colehrhiza has pushed through the seed coat and the primary root (the radicle) is just piercing the colehrhiza and is barely visible. The seedlings are placed at 42° C. for 1 hour. Following the heat shock treatment, the seedlings are immersed in liquid nitrogen and crushed. The harvested tissue is stored at −80° until RNA preparation. The RNA is purified from the stored tissue and the cDNA library is constructed as described in Example 2.

[1227] The CMz031 (Lib148) cDNA library is generated from maize (DK604, Dekalb Genetics, Dekalb, Ill. U.S.A.) pollen tissue at the V10+ plant development stage. Seeds are planted at a depth of approximately 3 cm into 2-3 inch peat pots containing Metro 200 growing medium. After 2-3 weeks growth they are transplanted into 10 inch pots containing the same growing medium. Plants are watered daily before transplantation and three times a week after transplantation. Peters 15-16-17 fertilizer is applied three times per week after transplanting at a strength of 150 ppm N. Two to three times during the lifetime of the plant, from transplanting to flowering, a total of 900 mg Fe is added to each pot. Maize plants are grown in a greenhouse in 15 hr day/9 hr night cycles. The daytime temperature is approximately 80° F. and the nighttime temperature is approximately 70° F. Supplemental lighting is provided by 1000 W sodium vapor lamps. Tissue is collected from V10+ stage plants. The ear shoots, which are ready for fertilization, are enclosed in a paper bag to withhold pollen. Twenty-one days after pollination, prior to removing the ears, the paper bag is shaken to collect the mature pollen. The mature pollen is immediately frozen in liquid nitrogen containers and the pollen is crushed. The harvested tissue is then stored at −80° C. until RNA preparation. The RNA is purified from the stored tissue and the cDNA library is constructed as described in Example 2.

[1228] The CMz033 (Lib189) cDNA library is generated from maize (RX601, Asgrow Seed Company, Des Moines, Iowa U.S.A.) pooled leaf tissue harvested from field grown plants at Asgrow research stations. Leaves are harvested at anthesis from open pollinated plants in a field (multiple row) setting. The ear leaves from 10-12 plants are harvested, pooled, frozen in liquid nitrogen and then frozen at −80° C. where they are stored until RNA preparation. The RNA is purified from the stored tissue and the cDNA library is constructed as described in Example 2.

[1229] The CMz034 (Lib3060) cDNA library is generated from maize (DK604, Dekalb Genetics, Dekalb, Ill. U.S.A.) senescing leaves from plants at 40 days after pollination. Seeds are planted at a depth of approximately 3 cm into 2-3 inch peat pots containing Metro 200 growing medium. After 2-3 weeks growth they are transplanted into 10 inch pots containing the same growing medium. Plants are watered daily before transplantation and three times a week after transplantation. Peters 15-16-17 fertilizer is applied three times per week after transplanting at a strength of 150 ppm N. Two to three times during the lifetime of the plant, from transplanting to flowering, a total of 900 mg Fe is added to each pot. Maize plants are grown in a greenhouse in 15 hr day/9 hr night cycles. The daytime temperature is approximately 80° F. and the nighttime temperature is approximately 70° F. Supplemental lighting is provided by 1000 W sodium vapor lamps. Tissue is collected from leaves located two leaves below the ear leaf. This sample represents those genes expressed during onset and early stages of leaf senescence. The leaves are pooled and immediately transferred to liquid nitrogen. The harvested tissue is then stored at −80° C. until RNA preparation. The RNA is purified from the stored tissue and the cDNA library is constructed as described in Example 2.

[1230] The CMz035 (Lib3061) cDNA library is generated from maize (DK604, Dekalb Genetics, Dekalb, Ill. U.S.A.) endosperm tissue from plants at 32 days after pollination. Seeds are planted at a depth of approximately 3 cm into 2-3 inch peat pots containing Metro 200 growing medium. After 2-3 weeks growth they are transplanted into 10 inch pots containing the same growing medium. Plants are watered daily before transplantation and three times a week after transplantation. Peters 15-16-17 fertilizer is applied three times per week after transplanting at a strength of 150 ppm N. Two to three times during the lifetime of the plant, from transplanting to flowering, a total of 900 mg Fe is added to each pot. Maize plants are grown in a greenhouse in 15 hr day/9 hr night cycles. The daytime temperature is approximately 80° F. and the nighttime temperature is approximately 70° F. Supplemental lighting is provided by 1000 W sodium vapor lamps. Tissue is collected from V10+ stage plants. The corn plant is beyond the V10 stage and the ear shoots, which are ready for fertilization, are enclosed in a paper bag prior to silk emergence to withhold pollen. Thirty-two days after pollination, the ears are pulled out and the kernels are removed from the cob. Each kernel is dissected into the embryo and the endosperm and the aleurone layer is removed. After dissection, the endosperms are immediately transferred to liquid nitrogen. The harvested tissue is then stored at 80° C. until RNA preparation. The RNA is purified from the stored tissue and the cDNA library is constructed as described in Example 2.

[1231] The CMz036 (Lib3062) cDNA library is generated from maize (H99, USDA Regional Plant Introduction Station, Ames, Iowa U.S.A.) husk tissue from 8 week old plants. Seeds are planted at a depth of approximately 3 cm into 2-3 inch peat pots containing Metro 200 growing medium. After 2-3 weeks growth they are transplanted into 10 inch pots containing the same growing medium. Plants are watered daily before transplantation and three times a week after transplantation. Peters 15-16-17 fertilizer is applied three times per week after transplanting at a strength of 150 ppm N. Two to three times during the lifetime of the plant, from transplanting to flowering, a total of 900 mg Fe is added to each pot. Maize plants are grown in a greenhouse in 15 hr day/9 hr night cycles. The daytime temperature is approximately 80° F. and the nighttime temperature is approximately 70° F. Supplemental lighting is provided by 1000 W sodium vapor lamps. Tissue is collected from 8 week old plants. The husk is separated from the ear and immediately transferred to liquid nitrogen containers. The harvested tissue is then stored at −80° C. until RNA preparation. The RNA is purified from the stored tissue and the cDNA library is constructed as described in Example 2.

[1232] The CMz037 (Lib3059) cDNA library is generated from maize (RX601, Asgrow Seed Company, Des Moines, Iowa U.S.A) pooled kernels from plants at 12-15 days after pollination. Sample are collected from field grown material. Whole kernels from hand pollinated (control pollination) are harvested as whole ears and immediately frozen on dry ice. Kernels from 10-12 ears are pooled and ground together in liquid nitrogen. The harvested tissue is then stored at −80° C. until RNA preparation. The RNA is purified from the stored tissue and the cDNA library is constructed as described in Example 2.

[1233] The CMz039 (Lib3066) cDNA library is generated from maize (H99, USDA Regional Plant Introduction Station, Ames, Iowa U.S.A.) immature anther tissue at the 7 week old immature tassel stage. Seeds are planted at a depth of approximately 3 cm into 2-3 inch peat pots containing Metro 200 growing medium. After 2-3 weeks growth they are transplanted into 10 inch pots containing the same growing medium. Plants are watered daily before transplantation and three times a week after transplantation. Peters 15-16-17 fertilizer is applied three times per week after transplanting at a strength of 150 ppm N. Two to three times during the lifetime of the plant, from transplanting to flowering, a total of 900 mg Fe is added to each pot. Maize plants are grown in a greenhouse in 15 hr day/9 hr night cycles. The daytime temperature is approximately 80° F. and the nighttime temperature is approximately 70° F. Supplemental lighting is provided by 1000 W sodium vapor lamps. Tissue is collected when the maize plant is at the 7 week old immature tassel stage. At this stage, prior to anthesis, the immature anthers are green and enclosed in the staminate spikelet. The developing anthers are dissected away from the 7 week old immature tassel and immediately frozen in liquid nitrogen. The harvested tissue is then stored at −80° C. until RNA preparation. The RNA is purified from the stored tissue and the cDNA library is constructed as described in Example 2.

[1234] The CMz040 (Lib3067) cDNA library is generated from maize (MO17, USDA Regional Plant Introduction Station, Ames, Iowa U.S.A.) kernel tissue from plants at the V10+ plant development stage, 5-8 days after pollination. Seeds are planted at a depth of approximately 3 cm into 2-3 inch peat pots containing Metro 200 growing medium. After 2-3 weeks growth they are transplanted into 10 inch pots containing the same growing medium. Plants are watered daily before transplantation and three times a week after transplantation. Peters 15-16-17 fertilizer is applied three times per week after transplanting at a strength of 150 ppm N. Two to three times during the lifetime of the plant, from transplanting to flowering, a total of 900 mg Fe is added to each pot. Maize plants are grown in a greenhouse in 15 hr day/9 hr night cycles. The daytime temperature is approximately 80° F. and the nighttime temperature is approximately 70° F. Supplemental lighting is provided by 1000 W sodium vapor lamps. Tissue is collected from V10+ stage plants. The ear shoots, which are ready for fertilization, are enclosed in a paper bag before silk emergence to withhold pollen. Five to eight days after controlled pollination, the ears are pulled and the kernels removed. The kernels are immediately frozen in liquid nitrogen. This sample represents genes expressed in early kernel development, during periods of cell division, amyloplast biogenesis and early carbon flow across the material to filial tissue. The harvested kernels tissue is then stored at −80° C. until RNA preparation. The RNA is purified from the stored tissue and the cDNA library is constructed as described in Example 2.

[1235] The CMz041 (Lib3068) cDNA library is generated from maize pollen germinating silk tissue from plants at the V10+ plant development stage. Maize M017 and H99 (USDA Regional Plant Introduction Station, Ames, Iowa U.S.A.) seeds are planted at a depth of approximately 3 cm into 2-3 inch peat pots containing Metro 200 growing medium. After 2-3 weeks growth they are transplanted into 10 inch pots containing the same growing medium. Plants are watered daily before transplantation and three times a week after transplantation. Peters 15-16-17 fertilizer is applied three times per week after transplanting at a strength of 150 ppm N. Two to three times during the lifetime of the plant, from transplanting to flowering, a total of 900 mg Fe is added to each pot. Maize plants are grown in a greenhouse in 15 hr day/9 hr night cycles. The daytime temperature is approximately 80° F. and the nighttime temperature is approximately 70° F. Supplemental lighting is provided by 1000 W sodium vapor lamps. Tissue is collected from V10+ stage plants when the ear shoots are ready for fertilization at the silk emergence stage. The H99 emerging silks are pollinated with an excess of MO17 pollen under controlled pollination conditions in the greenhouse. Eighteen hours after pollination the silks are removed from the ears and immediately frozen in liquid nitrogen. This sample represents genes expressed in both pollen and silk tissue early in pollination. The harvested tissue is then stored at −80° C. until RNA preparation. The RNA is purified from the stored tissue and the cDNA library is constructed as described in Example 2.

[1236] The CMz042 (Lib3069) cDNA library is generated from maize ear tissue excessively pollinated at the V10+ plant development stage. Maize M017 and H99 (USDA Regional Plant Introduction Station, Ames, Iowa U.S.A.) seeds are planted at a depth of approximately 3 cm into 2-3 inch peat pots containing Metro 200 growing medium. After 2-3 weeks growth they are transplanted into 10 inch pots containing the same growing medium. Plants are watered daily before transplantation and three times a week after transplantation. Peters 15-16-17 fertilizer is applied three times per week after transplanting at a strength of 150 ppm N. Two to three times during the lifetime of the plant, from transplanting to flowering, a total of 900 mg Fe is added to each pot. Maize plants are grown in a greenhouse in 15 hr day/9 hr night cycles. The daytime temperature is approximately 80° F. and the nighttime temperature is approximately 70° F. Supplemental lighting is provided by 1000 W sodium vapor lamps. Tissue is collected from V10+ stage plants and the ear shoots which are ready for fertilization are at the silk emergence stage. The H99 immature ears are pollinated with an excess of MO17 pollen under controlled pollination conditions. Eighteen hours post-pollination, the ears are removed and immediately transferred to liquid nitrogen containers. The harvested tissue is then stored at −80° C. until RNA preparation. The RNA is purified from the stored tissue and the cDNA library is constructed as described in Example 2.

[1237] The CMz044 (Lib3075) cDNA library is generated from maize (H99, USDA Regional Plant Introduction Station, Ames, Iowa U.S.A.) microspore tissue. Seeds are planted at a depth of approximately 3 cm into 2-3 inch peat pots containing Metro 200 growing medium. After 2-3 weeks growth they are transplanted into 10 inch pots containing the same growing medium. Plants are watered daily before transplantation and three times a week after transplantation. Peters 15-16-17 fertilizer is applied three times per week after transplanting at a strength of 150 ppm N. Two to three times during the lifetime of the plant, from transplanting to flowering, a total of 900 mg Fe is added to each pot. Maize plants are grown in a greenhouse in 15 hr day/9 hr night cycles. The daytime temperature is approximately 80° F. and the nighttime temperature is approximately 70° F. Supplemental lighting is provided by 1000 W sodium vapor lamps. Tissue is collected from immature anthers from 7 week old tassels. The immature anthers are first dissected from the 7 week old tassel with a scalpel on a glass slide covered with water. The microspores (immature pollen) are released into the water and are recovered by centrifugation. The microspore suspension is immediately frozen in liquid nitrogen. The harvested tissue is then stored at −80° C. until RNA preparation. The RNA is purified from the stored tissue and the cDNA library is constructed as described in Example 2.

[1238] The CMz045 (Lib3076) cDNA library is generated from maize (H99, USDA Regional Plant Introduction Station, Ames, Iowa U.S.A.) immature ear megaspore tissue. Seeds are planted at a depth of approximately 3 cm into 2-3 inch peat pots containing Metro 200 growing medium. After 2-3 weeks growth they are transplanted into 10 inch pots containing the same growing medium. Plants are watered daily before transplantation and three times a week after transplantation. Peters 15-16-17 fertilizer is applied three times per week after transplanting at a strength of 150 ppm N. Two to three times during the lifetime of the plant, from transplanting to flowering, a total of 900 mg Fe is added to each pot. Maize plants are grown in a greenhouse in 15 hr day/9 hr night cycles. The daytime temperature is approximately 80° F. and the nighttime temperature is approximately 70° F. Supplemental lighting is provided by 1000 W sodium vapor lamps. The immature ears are harvested from the 7 week old plants and are approximately 2.5 to 3 cm in length. The kernels are removed from the cob and immediately frozen in liquid nitrogen. The harvested tissue is then stored at −80° C. until RNA preparation. The RNA is purified from the stored tissue and the cDNA library is constructed as described in Example 2.

[1239] The CMz047 (Lib3078) cDNA library is generated from maize (RX601, Asgrow Seed Company, Des Moines, Iowa, U.S.A.) CO₂ treated high-exposure shoot tissue. RX601 maize seeds are sterilized for 1 minute with a 10% Clorox solution. The seeds are rolled in germination paper, and germinated in 0.5 mM calcium sulfate solution for two days at 30° C. The seedlings are transplanted into a peat mix media in 3″ peat pots at the rate of three seedlings per pot. They are then placed in a greenhouse. Twenty pots are placed into a high CO₂ environment (approximately 1000 ppm CO₂). Twenty plants are grown under ambient greenhouse CO₂ (approximately 450 ppm CO₂). Plants are hand watered. Peters 20-20-20 fertilizer is also lightly applied. Maize plants are grown in a greenhouse in 15 hr day/9 hr night cycles. At ten days post planting, the shoots from both atmospheres are frozen in liquid nitrogen and lightly ground by hand. The roots are washed in deionized water to remove the support media and the tissue is immediately transferred to liquid nitrogen containers. The harvested tissue is then stored at −80° C. until RNA preparation. The RNA is purified from the stored tissue and the cDNA library is constructed as described in Example 2.

[1240] The CMz048 (Lib3079) cDNA library is generated from maize (MO17, USDA Maize Regional Plant Introduction Station, Ames, Iowa U.S.A) basal endosperm transfer layer tissue. Seeds are planted at a depth of approximately 3 cm into 2-3 inch peat pots containing Metro 200 growing medium. After 2-3 weeks growth they are transplanted into 10 inch pots containing the same growing medium. Plants are watered daily before transplantation and three times a week after transplantation. Peters 15-16-17 fertilizer is applied three times per week after transplanting at a strength of 150 ppm N. Two to three times during the lifetime of the plant, from transplanting to flowering, a total of 900 mg Fe is added to each pot. Maize plants are grown in a greenhouse in 15 hr day/9 hr night cycles. The daytime temperature is approximately 80° F. and the nighttime temperature is approximately 70° F. Supplemental lighting is provided by 1000 W sodium vapor lamps. Tissue is collected from V10+ maize plants. The ear shoots, which are ready for fertilization, are enclosed in a paper bag prior to silk emergence, to withhold the pollen. Kernels are harvested at 12 days post-pollination and placed on wet ice for dissection. The kernels are cross sectioned laterally, dissecting just above the pedicel region, including 1-2 mm of the lower endosperm and the basal endosperm transfer region. The pedicel and lower endosperm region containing the basal endosperm transfer layer is pooled and immediately frozen in liquid nitrogen. The harvested tissue is then stored at −80° C. until RNA preparation. The RNA is purified from the stored tissue and the cDNA library is constructed as described in Example 2.

[1241] The CMz049 (Lib3088) cDNA library is generated from maize (H99, USDA Maize Regional Plant Introduction Station, Ames, Iowa U.S.A) immature ear tissue from 8 weeks old plants. Seeds are planted at a depth of approximately 3 cm into 2-3 inch peat pots containing Metro 200 growing medium. After 2-3 weeks growth they are transplanted into 10 inch pots containing the same growing medium. Plants are watered daily before transplantation and three times a week after transplantation. Peters 15-16-17 fertilizer is applied three times per week after transplanting at a strength of 150 ppm N. Two to three times during the lifetime of the plant, from transplanting to flowering, a total of 900 mg Fe is added to each pot. Maize plants are grown in a greenhouse in 15 hr day/9 hr night cycles. The daytime temperature is approximately 80° F. and the nighttime temperature is approximately 70° F. Supplemental lighting is provided by 1000 W sodium vapor lamps. Ears are harvested from 8 week old plants and are approximately 3.54.5 cm long. Kernels are dissected away from the cob, frozen in liquid nitrogen and stored at −80 C until preparation of RNA. The RNA is purified from the stored tissue and the cDNA library is constructed as described in Example 2.

[1242] The CMz050 (Lib3114) cDNA library is generated from silks from maize (B73, Illinois Foundation Seeds, Champaign, Ill. U.S.A.) plants at the V10+ plant development stage. Seeds are planted at a depth of approximately 3 cm into 2-3 inch peat pots containing Metro 200 growing medium. After 2-3 weeks growth they are transplanted into 10 inch pots containing the same growing medium. Plants are watered daily before transplantation and three times a week after transplantation. Peters 15-16-17 fertilizer is applied three times per week after transplanting at a strength of 150 ppm N. Two to three times during the lifetime of the plant, from transplanting to flowering, a total of 900 mg Fe is added to each pot. Maize plants are grown in a greenhouse in 15 hr day/9 hr night cycles. The daytime temperature is approximately 80° F. and the nighttime temperature is approximately 70° F. Supplemental lighting is provided by 1000 W sodium vapor lamps. Tissue is collected when the maize plant is beyond the V10 development stage and the ear shoots are approximately 15-20 cm in length. The ears are pulled and the silks are separated from the ears and immediately transferred to liquid nitrogen containers. The harvested tissue is then stored at −80° C. until RNA preparation. The RNA is purified from the stored tissue and the cDNA library is constructed as described in Example 2.

[1243] The SOYMON001 cDNA library is generated from soybean cultivar Asgrow 3244 (Asgrow Seed Company, Des Moines, Iowa U.S.A.) total leaf tissue at the V4 plant development stage. Leaf tissue from 38, field grown V4 stage plants is harvested from the 4^{th} node. Leaf tissue is removed from the plants and immediately frozen in dry-ice. The harvested tissue is then stored at −80° C. until RNA preparation. The RNA is purified from the stored tissue and the cDNA library is constructed as described in Example 2.

[1244] The SOYMON002 cDNA library is generated from soybean cultivar Asgrow 3244 (Asgrow Seed Company, Des Moines, Iowa U.S.A.) root tissue at the V4 plant development stage. Root tissue from 76, field grown V4 stage plants is harvested. The root systems is cut from the soybean plant and washed with water to free it from the soil and immediately frozen in dry-ice. The harvested tissue is then stored at −80° C. until RNA preparation. The RNA is purified from the stored tissue and the cDNA library is constructed as described in Example 2.

[1245] The SOYMON003 cDNA library is generated from soybean cultivar Asgrow 3244 (Asgrow Seed Company, Des Moines, Iowa U.S.A.) hypocotyl axis tissue from seedlings 2 day after-imbibition. Seeds are planted at a depth of approximately 2 cm into 2-3 inch peat pots containing Metromix 350 medium. Trays are placed in an environmental chamber and grown at 12 hr daytime/12 hr nighttime cycles. The daytime temperature is approximately 29° C. and the nighttime temperature approximately 24° C. Soil is checked and watered daily to maintain even moisture conditions. Tissue is collected 2 days after the start of imbibition. The 2 days after imbibition samples are separated into 3 collections after removal of any adhering seed coat. At 2 days after imbibition under the above conditions, the seedlings have significant expansion of the axis and are close to emerging from the soil. A few seedlings have cracked the soil surface and exhibited slight greening of the exposed cotyledons. The seedlings are washed in water to remove soil, hypocotyl axis harvested and immediately frozen in liquid nitrogen. The harvested tissue is then stored at −80° C. until RNA preparation. The RNA is purified from the stored tissue and the cDNA library is constructed as described in Example 2.

[1246] The SOYMON004 cDNA library is generated from soybean cultivar Asgrow 3244 (Asgrow Seed Company, Des Moines, Iowa U.S.A.) seedling cotyledon tissue harvested 2 day post-imbibition. Seeds are planted at a depth of approximately 2 cm into 2-3 inch peat pots containing Metromix 350 medium. Trays are placed in an environmental chamber and grown at 12 hr daytime/12 hr nighttime cycles. The daytime temperature is approximately 29° C. and the nighttime temperature approximately 24° C. Soil is checked and watered daily to maintain even moisture conditions. Tissue is collected 2 days after the start of imbibition. The 2 days after imbibition samples are separated into 3 collections after removal of any adhering seed coat. At 2 days after imbibition under the above conditions, the seedlings have significant expansion of the axis and are close to emerging from the soil. A few seedlings have cracked the soil surface and exhibited slight greening of the exposed cotyledons. The seedlings are washed in water to remove soil, cotyledons harvested and immediately frozen in liquid nitrogen. The harvested tissue is then stored at −80° C. until RNA preparation. The RNA is purified from the stored tissue and the cDNA library is constructed as described in Example 2.

[1247] The SOYMON005 cDNA library is generated from soybean cultivar Asgrow 3244 (Asgrow Seed Company, Des Moines, Iowa U.S.A.) hypocotyl axis tissue from seeds 6 hour post-imbibition. Seeds are planted at a depth of approximately 2 cm into 2-3 inch peat pots containing Metromix 350 medium. Trays are placed in an environmental chamber and grown at 12 hr daytime/12 hr nighttime cycles. The daytime temperature is approximately 29° C. and the nighttime temperature approximately 24° C. Soil is checked and watered daily to maintain even moisture conditions. Tissue is collected 6 hours after the start of imbibition. The 6 hours after imbibition sample is collected over the course of approximately 2 hours starting at 6 hours post imbibition. At the 6 hours after imbibition stage, not all cotyledons have become fully hydrated and germination. Radicle protrusion has not occurred. The seedlings are washed in water to remove soil, then the hypocotyl axis is harvested and immediately frozen in liquid nitrogen. The harvested tissue is then stored at −80° C. until RNA preparation. The RNA is purified from the stored tissue and the cDNA library is constructed as described in Example 2.

[1248] The SOYMON006 cDNA library is generated from soybean cultivar Asgrow 3244 (Asgrow Seed Company, Des Moines, Iowa U.S.A.) cotyledons from seeds 6 hour post-imbibition. Seeds are planted at a depth of approximately 2 cm into 2-3 inch peat pots containing Metromix 350 medium. Trays are placed in an environmental chamber and grown at 12 hr daytime/12 hr nighttime cycles. The daytime temperature is approximately 29° C. and the nighttime temperature approximately 24° C. Soil is checked and watered daily to maintain even moisture conditions. Tissue is collected 6 hours after imbibition. The 6 hours after imbibition sample is collected over the course of approximately 2 hours starting at 6 hours post-imbibition. At the 6 hours after imbibition, not all cotyledons have become fully hydrated and germination. Radicle protrusion has not occurred. The seedlings are washed in water to remove soil, then the cotyledon is harvested and immediately frozen in liquid nitrogen. The harvested tissue is then stored at −80° C. until RNA preparation. The RNA is purified from the stored tissue and the cDNA library is constructed as described in Example 2.

[1249] The SOYMON007 cDNA library is generated from soybean cultivar Asgrow 3244 (Asgrow Seed Company, Des Moines, Iowa U.S.A.) seed tissue. Seeds are harvested from plants grown in a field in Jerseyville 25 and 35 days after flowering. Seed pods are picked from all over the plant and the seeds are extracted from the pods. Approximately 4.4 g and 19.3 g of seeds are collected from the 25 and 35 days after flowering plants, respectively, placed into 14 ml polystyrene tubes and immediately immersed in dry ice. The harvested tissue is then stored at −80° C. until RNA preparation. Total RNA is prepared from the combination of 1.0 g and 3.4 g of seeds from 25 and 35 days after flowering plants and the cDNA library is constructed as described in Example 2.

[1250] The SOYMON008 cDNA library is generated from soybean cultivar Asgrow 3244 (Asgrow Seed Company, Des Moines, Iowa U.S.A.) leaf tissue harvested from 25 and 35 days post-flowering plants. Total leaf tissue is harvested from field grown plants. Approximately 19 g and 29 g of leaves are harvested from the fourth node of the plant 25 and 35 days post-flowering and immediately frozen in dry ice. The harvested tissue is then stored at −80° C. until RNA preparation. Total RNA is prepared from the combination of equal amounts of leaf tissue from both time points and the cDNA library is constructed as described in Example 2.

[1251] The SOYMON009 cDNA library is generated from soybean cutlivar C1944 (USDA Soybean Germplasm Collection, Urbana, Ill. U.S.A.) pod and seed tissue harvested 15 days post-flowering. Pods from field grown plants are harvested 15 days post-flowering. The pods are picked from all over the plant, placed into 14 ml polystyrene tubes and immediately immersed in dry-ice. Approximately 3 g of pod tissue is harvested. The harvested tissue is then stored at −80° C. until RNA preparation. The RNA is purified from the stored tissue and the cDNA library is constructed as described in Example 2.

[1252] The SOYMON010 cDNA library is generated from soybean cultivar C1944 (USDA Soybean Germplasm Collection, Urbana, Ill. U.S.A.) seed tissue harvested 40 days post-flowering. Pods from field grown plants are harvested 40 days post-flowering. The pods are picked from all over the plant. Pods and seeds are separated, approximately 19 g of seed tissue is harvested and immediately frozen in dry-ice. The harvested tissue is then stored at −80° C. until RNA preparation. The RNA is purified from the stored tissue and the cDNA library is constructed as described in Example 2.

[1253] The SOYMON011 cDNA library is generated from soybean cultivars Cristalina (USDA Soybean Germplasm Collection, Urbana, Ill. U.S.A.) and FT108 (Monsoy, Brazil) (tropical germ plasma) leaf tissue. Leaves are harvested from plants grown in an environmental chamber under 12 hr daytime/12 hr nighttime cycles. The daytime temperature is approximately 29° C. and the nighttime temperature approximately 24° C. Soil is checked and watered daily to maintain even moisture conditions. Approximately 30 g of leaves are harvested from the 4^{th} node of each of the Cristalina and FT108 cultivars and immediately frozen in dry ice. The harvested tissue is then stored at −80° C. until RNA preparation. Total RNA is prepared from the combination of equal amounts of leaf tissue from each cultivar and the cDNA library is constructed as described in Example 2.

[1254] The SOYMON012 cDNA library is generated from soybean cultivar Asgrow 3244 (Asgrow Seed Company, Des Moines, Iowa U.S.A.) leaf tissue. Leaves from field grown plants are harvested from the fourth node 15 days post-flowering. Approximately 12 g of leaves are harvested and immediately frozen in dry ice. The harvested tissue is then stored at −80° C. until RNA preparation. The RNA is purified from the stored tissue and the cDNA library is constructed as described in Example 2.

[1255] The SOYMON013 cDNA library is generated from soybean cultivar Asgrow 3244 (Asgrow Seed Company, Des Moines, Iowa U.S.A.) root and nodule tissue. Approximately 28 g of root tissue from field grown plants is harvested 15 days post-flowering. The root system is cut from the soybean plant, washed with water to free it from the soil and immediately frozen in dry-ice. The harvested tissue is then stored at −80° C. until RNA preparation. The RNA is purified from the stored tissue and the cDNA library is constructed as described in Example 2.

[1256] The SOYMON014 cDNA library is generated from soybean cultivar Asgrow 3244 (Asgrow Seed Company, Des Moines, Iowa U.S.A.) seeds and pods, which are harvested from plants grown in a field in Jerseyville 15 days after flowering. The pods are picked from all over the plant, placed into 14 ml polystyrene tubes and immediately immersed in dry-ice. Approximately 5 g of seeds are harvested. The harvested tissue is then stored at −80° C. until RNA preparation. The RNA is purified from the stored tissue and the cDNA library is constructed as described in Example 2.

[1257] The SOYMON015 cDNA is generated from soybean cultivar Asgrow 3244 (Asgrow Seed Company, Des Moines, Iowa U.S.A.) seed tissue harvested 45 and 55 days post-flowering. Seed pods from field grown plants are harvested 45 and 55 days after flowering. The seed pods are picked from all over the plant and the seeds extracted from the pods. Approximately 19 g and 31 g of seeds are harvested from the respective seed pods and immediately frozen in dry ice. The harvested tissue is then stored at −80° C. until RNA preparation. Total RNA is prepared from the combination of 0.75 g and 1.25 g of seeds from 45 and 55 days after flowering and the cDNA library is constructed as described in Example 2.

[1258] The SOYMON016 cDNA library is generated from soybean cultivar Asgrow 3244 (Asgrow Seed Company, Des Moines, Iowa U.S.A.) root tissue from plants grown in a field in Jerseyville. Field grown plants are uprooted and the roots quickly rinsed with water. The root tissue is then cut from the plants, placed immediately in 14 ml polystyrene tubes and immersed in dry-ice. Approximately, 61 g and 38 g of root tissue is harvested from the field grown plants 25 and 35 days post-flowering. The harvested tissue is then stored at −80° C. until RNA preparation. Total RNA is prepared from the combination of equal amounts of root tissue from both time points and the cDNA library is constructed as described in Example 2.

[1259] The SOYMON017 cDNA library is generated from soybean cultivar Asgrow 3244 (Asgrow Seed Company, Des Moines, Iowa U.S.A.) root tissue from plants grown in a field in Jersyville. The plants are uprooted and the roots quickly rinsed with water. The root tissue is then cut from the plants, placed immediately in 14 ml polystyrene tubes and immersed in dry-ice. The tissue is then transferred to a −80° C. freezer for storage. Approximately 28 g and 22 g of root tissue are harvested from field grown plants 45 and 55 days post-flowering. The harvested tissue is then stored at −80° C. until RNA preparation. Total RNA is prepared from the combination of equal amounts of root tissue from both time points and the cDNA library is constructed as described in Example 2.

[1260] The SOYMON018 cDNA is generated from soybean cultivar Asgrow 3244 (Asgrow Seed Company, Des Moines, Iowa U.S.A.) leaf tissue harvested from plants grown in a field in Jerseyville 45 and 55 days after flowering. Leaves from field grown plants are harvested 45 and 55 days after flowering from the fourth node. Approximately 27 g and 33 g of leaves are collected from the 45 and 55 days after flowering plants, placed into 14 ml polystyrene tubes and immediately immersed in dry ice. The harvested tissue is then stored at −80° C. until RNA preparation. Total RNA is prepared from the combination of equal amounts of leaf tissue from both time points and the cDNA library is constructed as described in Example 2.

[1261] The SOYMON019 cDNA library is generated from soybean cultivars Cristalina (USDA Soybean Germplasm Collection, Urbana, Ill. U.S.A.) and FT108 (Monsoy, Brazil) (tropical germ plasma) root tissue. Roots are harvested from plants grown in an environmental chamber under 12 hr daytime/12 hr nighttime cycles. The daytime temperature is approximately 29° C. and the nighttime temperature approximately 24° C. Soil is checked and watered daily to maintain even moisture conditions. Approximately 50 g and 56 g of roots are harvested from each of the Cristalina and F1108 cultivars and immediately frozen in dry ice. The plants are uprooted and the roots quickly rinsed in a pail of water. The root tissue is then cut from the plants, placed immediately in 14 ml polystyrene tubes and immersed in dry-ice. The harvested tissue is then stored at −80° C. until RNA preparation. Total RNA is prepared from the combination of equal amounts of root tissue from each cultivar and the cDNA library is constructed as described in Example 2.

[1262] The SOYMON020 cDNA is generated from soybean cultivar Asgrow 3244 (Asgrow Seed Company, Des Moines, Iowa U.S.A.) seeds harvested from plants grown in a field in Jerseyville 65 and 75 days post-flowering. The seed pods are picked from all over the plant and the seeds extracted from the pods. Approximately 14 g and 31 g of seeds are harvested from the respective seed pods and immediately frozen in dry ice. The harvested tissue is then stored at −80° C. until RNA preparation. Total RNA is prepared from the combination of equal numbers of seeds from 65 and 75 days after flowering and the cDNA library is constructed as described in Example 2.

[1263] The SOYMON021 cDNA library is generated from Soybean Cyst Nematode-resistant soybean cultivar Hartwig (USDA Soybean Germplasm Collection, Urbana, Ill. U.S.A.) root tissue. Plants are grown in tissue culture at room temperature. At approximately 6 weeks post-germination, the plants are exposed to sterilized Soybean Cyst Nematode eggs. Infection is then allowed to progress for 10 days. After the 10 day infection process, the tissue is harvested. Agar from the culture medium and nematodes are removed by blotting the root tissue on paper towels and then rinsing with water. The harvested root tissue is immediately frozen in dry ice and then stored at −80° C. until RNA preparation. The RNA is purified from the stored tissue and the cDNA library is constructed as described in Example 2.

[1264] The SOYMON022 cDNA library is generated from soybean cultivar Asgrow 3244 (Asgrow Seed Company, Des Moines, Iowa U.S.A.) partially to fully opened flower tissue, which is harvested from plants grown in an environmental chamber. Seeds are planted in moist Metromix 350 medium at a depth of approximately 2 cm. Trays are placed in an environmental chamber set to a 12 h day/12 h night cycle, 29° C. daytime temperature, 24° C. night temperature and 70% relative humidity. Daytime light levels are measured at 450 μEinsteins/m². Soil is checked and watered daily to maintain even moisture conditions. Flowers are removed from the plant at the pedicel. Flower buds showing petal color to fully open flowers are selected for collection. A total of 3 g of flower tissue is harvested and immediately frozen in dry ice. The harvested tissue is then stored at −80° C. until RNA preparation. Total RNA is prepared from a mixture of opened and partially opened flowers and the cDNA library is constructed as described in Example 2.

[1265] The SOYMON023 cDNA library is generated from soybean genotype BW211S Null (Tohoku University, Morioka, Japan) seed tissue harvested from plants grown in a field in Jerseyville. After 15 and 40 days, pods are harvested from all over the plant and seeds are dissected out from the pods. Approximately, 0.7 g and 14.2 g of seeds are harvested from the plants at the 15 and 40 days after flowering timepoints. The seeds are placed into 14 ml polystyrene tubes and immersed in dry-ice. The tissue is then transferred to a −80° C. freezer for storage. The harvested tissue is then stored at −80° C. until RNA preparation. Total RNA is prepared from the combination of 0.5 g and 1.0 g of seeds from the 15 and 40 days after flowering timepoints and the cDNA library is constructed as described in Example 2.

[1266] The SOYMON024 cDNA library is generated from soybean cultivar Asgrow 3244 (Asgrow Seed Company, Des Moines, Iowa U.S.A.) internode-2 tissue harvested 18 days post-imbibition. Seeds are planted at a depth of approximately 2 cm into 2-3 inch peat pots containing Metromix 350 medium. The plants are grown in a greenhouse for 18 days after the start of imbibition at ambient temperature. Stem tissue is harvested 18 days after the start of imbibition. The samples are divided into hypocotyl and internodes 1 through 5. The fifth internode contains some leaf bud material. Approximately 3 g of each sample is harvested and immediately frozen in dry ice. The harvested tissue is then stored at −80° C. until RNA preparation. Total RNA and poly A⁺ RNA is isolated from each sample as described in Example 2. One microgram of poly A⁺ RNA is electrophoresed on a denaturing 1% agarose gel and blotted by capillary transfer to a Nytran membrane using 20×SSC. The membrane is then UV crosslinked with 7.0×10⁴ μjoules/cm² and baked for 1 hour at 80° C. A probe consisting of the conserved core of the enzyme CPS (ent-kaurene synthetase) is radiolabeled with [α³²P]-dCTP and hybridized to the membrane overnight in Church buffer at 65° C. overnight. The blot is then washed 3 times in 1×SSC/0.1% SDS at 65° C. for 30 minutes per wash. This is used to determine which internode has the highest level of CPS expression and would thus be active in giberellic acid synthesis. After hybridization and washing the blot is exposed to a phosphorimager screen and exposed overnight. Processing of the image indicates that the highest level of CPS message could be found in internode 2. A library is constructed from internode 2 poly A⁺ RNA as described in Example 2.

[1267] The SOYMON025 cDNA library is generated from soybean cultivar Asgrow 3244 (Asgrow Seed Company, Des Moines, Iowa U.S.A.) leaf tissue harvested 65 days post-flowering. Leaves are harvested from the fourth node of field grown plants 65 days post-flowering. Approximately 18.4 g of leaf tissue is harvested and immediately frozen in dry ice. The harvested tissue is then stored at −80° C. until RNA preparation. The RNA is purified from the stored tissue and the cDNA library is constructed as described in Example 2.

[1268] SOYMON026 cDNA library is generated from soybean cultivar Asgrow 3244 (Asgrow Seed Company, Des Moines, Iowa U.S.A.) root tissue harvested from plants grown in a field in Jersyville 65 and 75 days afterflowering. The plants are uprooted and the roots quickly rinsed with water. The root tissue is then cut from the plants, placed immediately in 14 ml polystyrene tubes and immersed in dry-ice. The tissue is then transferred to a −80° C. freezer for storage. Approximately 27 g and 40 g of root tissue from field grown plants is harvested 65 and 75 days after flowering. The harvested tissue is then stored at −80° C. until RNA preparation. Total RNA is prepared from the combination of equal amounts of root tissue from both time points and the cDNA library is constructed as described in Example 2.

[1269] The SOYMON027 cDNA library is generated from soybean cultivar Asgrow 3244 (Asgrow Seed Company, Des Moines, Iowa U.S.A.) pod tissue (without seeds) harvested from field grown plants 25 days post-flowering. Pods are picked from all over plants. Seeds are dissected from the pods and the seeds and pods are placed separately into 14 ml polystyrene tubes and immediately immersed in dry-ice. Approximately 17 g of seed pod tissue is harvested and immediately frozen in dry ice. The harvested tissue is then stored at −80° C. until RNA preparation. The RNA is purified from the stored tissue and the cDNA library is constructed as described in Example 2.

[1270] The SOYMON028 cDNA library is generated from soybean cultivar Asgrow 3244 (Asgrow Seed Company, Des Moines, Iowa U.S.A.) drought-stressed root tissue. Seeds are planted in moist Metromix 350 medium at a depth of approximately 2 cm in trays. The trays are placed in an environmental chamber set to a 12 h day/12 h night cycle, 26° C. daytime temperature, 21° C. night temperature and 70% relative humidity. Daytime light levels are measured at 300 μEinsteins/m². Soil is checked and watered daily to maintain even moisture conditions. At the R3 stage of development, water is withheld from half of the plant collection (drought stressed population). After 3 days, half of the plants from the drought stressed condition and half of the plants from the control population are harvested. After another 3 days (6 days post drought induction) the remaining plants are harvested. A total of 27 g and 40 g of root tissue is harvested from plants at two time points and immediately frozen in dry ice. The harvested tissue is then stored at −80° C. until RNA preparation. Total RNA is prepared from the combination of equal amounts of drought stressed root tissue from both time points and the cDNA library is constructed as described in Example 2.

[1271] The SOYMON029 cDNA library is generated from Soybean Cyst Nematode-resistant soybean cultivar PI07354 (USDA Soybean Germplasm Collection, Urbana, Ill. U.S.A.) root tissue. Late fall to early winter greenhouse grown plants are exposed to Soybean Cyst Nematode eggs. At 10 days post-infection, the plants are uprooted, rinsed briefly and the roots frozen in liquid nitrogen. Approximately 20 grams of root tissue is harvested from the infected plants. The harvested tissue is then stored at −80° C. until RNA preparation. The RNA is purified from the stored tissue and the cDNA library is constructed as described in Example 2.

[1272] The SOYMON030 cDNA library is generated from soybean cultivar Asgrow 3244 (Asgrow Seed Company, Des Moines, Iowa U.S.A.) flower bud tissue. Seeds are planted at a depth of approximately 2 cm into 2-3 inch peat pots containing Metromix 350 medium and the plants are grown in an environmental chamber under 12 hr daytime/12 hr nighttime cycles. The daytime temperature is approximately 29° C. and the nighttime temperature approximately 24° C. Soil is checked and watered daily to maintain even moisture conditions. Flower buds are removed from the plant at the pedicel. A total of 100 mg of flower buds are harvested and immediately frozen in liquid nitrogen. The harvested tissue is then stored at −80° C. until RNA preparation.Total RNA is prepared from 50 mg of tissue and used directly to generate a library using the Clontech SMART™ PCR cDNA (Clontech Laboratories, Palo Alto, Calif. (U.S.A.) library construction kit. The EcoRI/XhoI adaptors are used in this library construction. The cDNA is ligated into the pINCY vector.

[1273] The SOYMON031 cDNA library is generated from soybean cultivar Asgrow 3244 (Asgrow Seed Company, Des Moines, Iowa U.S.A.) carpel and stamen tissue. Seeds are planted at a depth of approximately 2 cm into 2-3 inch peat pots containing Metromix 350 medium and the plants are grown in an environmental chamber under 12 hr daytime/12 hr nighttime cycles. The daytime temperature is approximately 29° C. and the nighttime temperature approximately 24° C. Soil is checked and watered daily to maintain even moisture conditions. Flower buds are removed from the plant at the pedicel. Flowers are dissected to separate petals, sepals and reproductive structures (carpels and stamens). A total of 300 mg of carpel and stamen tissue are harvested and immediately frozen in liquid nitrogen. The harvested tissue is then stored at −80° C. until RNA preparation. Total RNA is prepared from 150 mg of tissue and used directly to generate a library using the Clontech SMART™ PCR cDNA (Clontech Laboratories, Palo Alto, Calif. (U.S.A.) library construction kit. The EcoRI/XhoI adaptors are used in this library construction. The cDNA is ligated into the pINCY vector.

[1274] The SOYMON032 cDNA library is prepared from the Asgrow cultivar A4922 (Asgrow Seed Company, Des Moines, Iowa U.S.A.) rehydrated dry soybean seed meristem tissue. Surface sterilized seeds are germinated in liquid media for 24 hours. The seed axis is then excised from the barely germinating seed, placed on tissue culture media and incubated overnight at 20° C. in the dark. The supportive tissue is removed from the explant prior to harvest. Approximately 570 mg of tissue is harvested and frozen in liquid nitrogen. The harvested tissue is then stored at −80° C. until RNA preparation. The RNA is purified from the stored tissue and the cDNA library is constructed as described in Example 2.

[1275] The SOYMON033 cDNA library is generated from soybean cultivar Asgrow 3244 (Asgrow Seed Company, Des Moines, Iowa U.S.A.) heat-shocked seedling tissue without cotyledons. Seeds are imbibed and germinated in vermiculite for 2 days under constant illumination (ca. 510 Lux). After 48 hours, the seedlings are transferred to an incubator set at 40° C. under constant illumination (ca. 560 Lux). After 30, 60 and 180 minutes seedlings are harvested and dissected. A portion of the seedling consisting of the root, hypocotyl and apical hook is frozen in liquid nitrogen and stored at −80° C. The seedlings after 2 days of imbibition are beginning to emerge from the vermiculite surface. The apical hooks are dark green in appearance. Total RNA and poly A⁺ RNA is prepared from equal amounts of pooled tissue. The RNA is purified from the stored tissue and the cDNA library is constructed as described in Example 2.

[1276] The SOYMON034 cDNA library is generated from soybean cultivar Asgrow 3244 (Asgrow Seed Company, Des Moines, Iowa U.S.A.) cold-shocked seedling tissue without cotyledons. Seeds are imbibed and germinated in vermiculite for 2 days under constant illumination (ca. 510 Lux). After 48 hours, the seedlings are transferred to a cold room set at 5° C. under constant illumination (ca. 560 Lux). After 30, 60 and 180 minutes seedlings are harvested and dissected. The seedlings after 2 days of imbibition are beginning to emerge from the vermiculite surface. The apical hooks are dark green in appearance. A portion of the seedling consisting of the root, hypocotyl and apical hook is frozen in liquid nitrogen and stored at −80° C. Total RNA is prepared from equal amounts of pooled tissue and the cDNA library is constructed as described in Example 2.

[1277] The SOYMON035 cDNA library is generated from soybean cultivar Asgrow 3244 (Asgrow Seed Company, Des Moines, Iowa U.S.A.) seed coat tissue. Seeds are planted at a depth of approximately 2 cm into 2-3 inch peat pots containing Metromix 350 medium and the plants are grown in an environmental chamber under 12 hr daytime/12 hr nighttime cycles. The daytime temperature is approximately 29° C. and the nighttime temperature 24° C. Soil is checked and watered daily to maintain even moisture conditions. Seeds are harvested from mid to nearly full maturation (seed coats are not yellowing). The entire embryo proper is removed from the seed coat sample and the seed coat tissue are harvested and immediately frozen in liquid nitrogen. The harvested tissue is then stored at −80° C. until RNA preparation. The RNA is purified from the stored tissue and the cDNA library is constructed as described in Example 2.

[1278] The SOYMON036 cDNA library is generated from soybean cultivars PI171451, P1227687 and P1229358 (USDA Soybean Germplasm Collection, Urbana, Ill. U.S.A.) insect challenged leaves. Plants from each of the three cultivars are grown in a screenhouse. The screenhouse is divided in half by a screen and one half of the screenhouse is infested with soybean looper and the other half infested with velvetbean caterpillar. A single leaf is taken from each of the representative plants at 3 different time points, 11 days after infestation, 2 weeks after infestation and 5 weeks after infestation and immediately frozen in liquid nitrogen. The harvested tissue is then stored at −80° C. until RNA preparation. Total RNA and poly A+ RNA is isolated from pooled tissue consisting of equal quantities of all 18 samples (3 genotypes×3 sample times×2 insect genotypes). The RNA is purified from the stored tissue and the cDNA library is constructed as described in Example 2.

[1279] The SOYMON037 cDNA library is generated from soybean cultivar A3244 (Asgrow Seed Company, Des Moines, Iowa U.S.A.) etiolated axis and radical tissue. Seeds are planted in moist vermiculite, wrapped and kept at room temperature in complete darkness until harvest. Etiolated axis and hypocotyl tissue is harvested at 2, 3 and 4 days post-planting. Samples are frozen in liquid nitrogen upon harvesting and stored at −80° C. until RNA preparation. 1 gram of each sample (axis+hypocotyl at day 2, 3 and 4) is pooled for RNA isolation. The RNA is purified from the pooled tissue and the cDNA library is constructed as described in Example 2.

[1280] The SOYMON038 cDNA library is generated from soybean variety Asgrow A3237 (Asgrow Seed Company, Des Moines, Iowa U.S.A.) rehydrated dry seeds. Explants are prepared for transformation after germination of surface-sterilized seeds on solid tissue media. After 6 days, at 28° C. and 18 hours of light per day, the germinated seeds are cold shocked at 4° C. for 24 hours. Meristemic tissue and part of the hypocotyl is remove and cotyledon excised. The prepared explant is then wounded for Agrobacterium infection. The 2 grams of harvested tissue is frozen in liquid nitrogen and stored at −80° C. until RNA preparation. The RNA is purified from the stored tissue and the cDNA library is constructed as described in Example 2.

[1281] The Soy51 (LIB3027) normalized cDNA library is prepared from SOYMON007, SOYMON015 and SOYMON020. Equal amounts of SOYMON007, SOYMON015, and SOYMON020 in the form of single stranded DNA, are mixed and used as the starting material for normalization.

[1282] Normalized libraries are made using essentially the Soares procedure (Soares et al., Proc. Natl. Acad. Sci. (U.S.A.) 91:9228-9232 (1994)). This approach is designed to reduce the initial 10,000-fold variation in individual cDNA frequencies to achieve abundances within one order of magnitude while maintaining the overall sequence complexity of the library. In the normalization process, the prevalence of high-abundance cDNA clones decreases dramatically, clones with mid-level abundance are relatively unaffected and clones for rare transcripts are effectively increased in abundance.

[1283] Normalized libraries are prepared from single-stranded DNA. Single-stranded DNA representing approximately 1×10⁶ colony forming units are isolated using standard protocols. RNA, complementary to the single-stranded DNA, is synthesized using the double stranded DNA as a template. Biotinylated dATP is incorporated into the RNA during the synthesis reaction. The single-stranded DNA is mixed with the biotinylated RNA in a 1:10 molar ratio) and allowed to hybridize. DNA-RNA hybrids are captured on Dynabeads M280 streptavidin (Dynabeads, Dynal Corporation, Lake Success, N.Y. U.S.A.). The dynabeads with captured hybrids are collected with a magnet. The non-hybridized single-stranded molecules remaining after hybrid capture are converted to double stranded form and represent the primary normalized library.

[1284] The Soy52 (LIB3028) normalized cDNA library is generated from Soy35 (SOYMON022). Single stranded DNA representing approximately 1×10⁶ colony forming units of Soy35 (SOYMON022) is used as the starting material for normalization. The Soares procedure (Soares et al., Proc. Natl. Acad. Sci. (U.S.A.) 91:9228-9232 (1994)) is used for normalization.

[1285] Normalized libraries are prepared from single-stranded DNA. Single-stranded DNA representing approximately 1×10⁶ colony forming units are isolated using standard protocols. RNA, complementary to the single-stranded DNA, is synthesized using the double stranded DNA as a template. Biotinylated dATP is incorporated into the RNA during the synthesis reaction. The single-stranded DNA is mixed with the biotinylated RNA in a 1:10 molar ratio) and allowed to hybridize. DNA-RNA hybrids are captured on Dynabeads M280 streptavidin (Dynabeads, Dynal Corporation, Lake Success, N.Y. U.S.A.). The dynabeads with captured hybrids are collected with a magnet. The non-hybridized single-stranded molecules remaining after hybrid capture are converted to double stranded form and represent the primary normalized library.

[1286] The Soy53 (LIB3039) cDNA library is generated from soybean cultivar Asgrow 3244 (Asgrow Seed Company, Des Moines, Iowa U.S.A.) seedling shoot apical meristem tissue. Seeds are planted at a depth of approximately 2 cm into 2-3 inch peat pots containing Metromix 350 medium and the plants are grown in an environmental chamber set to a 12 h day/12 h night cycle, 29° C. daytime temperature, 24° C. night temperature and 70% relative humidity. Daytime light levels are measured at 450 μEinsteins/m². Soil is checked and watered daily to maintain even moisture conditions. Apical tissue is harvested from seedling shoot meristem tissue, 7-8 days after the start of imbibition. The apex of each seedling is dissected to include the fifth node to the apical meristem. The fifth node corresponds to the third trifoliate leaf in the very early stages of development. Stipules completely envelop the leaf primordia at this time. A total of 200 mg of apical tissue is harvested and immediately frozen in liquid nitrogen. The harvested tissue is then stored at −80° C. until RNA preparation. Total RNA is prepared from 100 mg of tissue and used directly to generate a library using the Clonetech SMART PCR cDNA library construction kit. The cDNA generated by this method is ligated to SalI adaptors from the pSPORT cDNA system from Life Technologies for ligational insertion into the pSPORT vector.

[1287] The Soy54 (LIB3040) cDNA library is generated from soybean cultivar Asgrow 3244 (Asgrow Seed Company, Des Moines, Iowa U.S.A.) heart to torpedo stage embryo tissue. Seeds are planted at a depth of approximately 2 cm into 2-3 inch peat pots containing Metromix 350 medium and the plants are grown in an environmental chamber under 12 hr daytime/12 hr nighttime cycles. The daytime temperature is approximately 29° C. and the nighttime temperature 24° C. Soil is checked and watered daily to maintain even moisture conditions. Seeds are collected and embryos removed from surrounding endosperm and maternal tissues. Embryos from globular to young torpedo stages (by corresponding analogy to Arabidopsis) are collected with a bias towards the middle of this spectrum. Embryos which are beginning to show asymmetric development of cotyledons are considered the upper developmental boundary for the collection and are excluded. A total of 12 mg embryo tissue is frozen in liquid nitrogen. The harvested tissue is stored at −80° C. until RNA preparation. Total RNA is prepared from 12 mg of tissue and used directly to generate a library using the Clontech SMART™ PCR cDNA (Clontech Laboratories, Palo Alto, Calif. U.S.A.) library construction kit. The SalI adaptors are used in this library construction. The cDNA is ligated into the pSPORT vector.

[1288] Soy55 (LIB3049) cDNA library is generated from soybean cultivar Asgrow 3244 (Asgrow Seed Company, Des Moines, Iowa U.S.A.) young seed tissue. Seeds are planted at a depth of approximately 2 cm into 2-3 inch peat pots containing Metromix 350 medium and the plants are grown in an environmental chamber under 12 hr daytime/12 hr nighttime cycles. The daytime temperature is approximately 29° C. and the nighttime temperature 24° C. Soil is checked and watered daily to maintain even moisture conditions. Seeds are collected from very young pods (5 to 15 days after flowering). A total of 100 mg of seeds are harvested and frozen in liquid nitrogen. The harvested tissue is stored at −80° C. until RNA preparation. Total RNA is prepared from 100 mg of tissue and used directly to generate a library using the Clontech SMART™ PCR cDNA (Clontech Laboratories, Palo Alto, Calif. U.S.A.) library construction kit. The SalI adaptors are used in this library construction. The cDNA is ligated into the pSPORT vector.

[1289] Soy56 (LIB3029) cDNA library is prepared from Soy19 (SOYMON007), Soy27 (SOYMON015) and Soy33 (SOYMON020). Equal amounts of Soy19, Soy27 and Soy33, in the form of single stranded DNA, are mixed in equimolar quantities. This mixture is used as the starting material for construction of the cDNA library and as a non-normalized control for comparison to Soy51. The cDNA library is constructed as described in Example 2.

[1290] The Soy57 (LIB3030) cDNA library is generated from soybean cultivar Asgrow 3244 (Asgrow Seed Company, Des Moines, Iowa U.S.A.) partially to fully opened flower tissue, which is harvested from plants grown in an environmental chamber. Seeds are planted in moist Metromix 350 medium at a depth of approximately 2 cm. Trays are placed in an environmental chamber set to a 12 h day/12 h night cycle, 29° C. daytime temperature, 24° C. night temperature and 70% relative humidity. Daytime light levels are measured at 450 μEinsteins/m². Soil is checked and watered daily to maintain even moisture conditions. Flowers are removed from the plant at the pedicel. Flower buds showing petal color to fully open flowers are selected for collection. A total of 3 g of flower tissue is harvested and immediately frozen in dry ice. The harvested tissue is then stored at −80° C. until RNA preparation. Total RNA is prepared from a mixture of opened and partially opened flowers and the cDNA library is constructed as described in Example 2.

[1291] The Soy58 (LIB3050) cDNA library is generated by subtracting the target cDNA, which is prepared from soybean cultivar Asgrow 3244 (Asgrow Seed Company, Des Moines, Iowa U.S.A.) roots from drought stressed plants, from the driver cDNA, which is prepared from soybean cultivar Asgrow 3244 roots from non drought-stressed (control) plants. Seeds are planted at a depth of approximately 2 cm into 2-3 inch peat pots containing Metromix 350 medium and the plants are grown in an environmental chamber set to a 12 h day/12 h night cycle, 26° C. daytime temperature, 21° C. night temperature and 70% relative humidity. Daytime light levels are measured at 300 μEinsteins/m². Soil is checked and watered daily to maintain even moisture conditions. At the R3 stage of the plant drought is induced by withholding water. After 3 and 6 days root tissue from both drought stressed and control (watered regularly) plants are collected and frozen in dry-ice. The harvested tissue is stored at −80° C. until RNA preparation. The RNA is prepared from the stored tissue and cDNA libraries are constructed as described in Example 2. For subtraction, target cDNA is made from the drought stressed tissue total RNA using the SMART cDNA synthesis system from Clonetech. Driver first strand cDNA is covalently linked to Dynabeads following a protocol similar to that described in the Dynal literature. The target cDNA is then heat denatured and the second strand trapped using Dynabeads oligo-dt. The target second strand cDNA is then hybridized to the driver cDNA in 400 μl 2×SSPE for two rounds of hybridization at 65° C. and 20 hours. After each hybridization, the hybridization solution is removed from the system and the hybridized target cDNA removed from the driver by heat denaturation in water. The refreshed driver is then reintroduced to the hybridization for the next round of hybridization. After hybridization, the remaining cDNA is trapped with Dynabeads oligo-dT. The trapped cDNA is then amplified as in previous PCR based libraries and the resulting cDNA ligated into the pSPORT vector.

[1292] The Soy59 (LIB3051) cDNA library is generated from soybean cultivar Asgrow 3244 (Asgrow Seed Company, Des Moines, Iowa U.S.A.) endosperm tissue. Seeds are germinated on paper towels under laboratory ambient light conditions. At 8, 10 and 14 hours after imbibition, the seed coats are harvested. The endosperm consists of a very thin layer of tissue affixed to the inside of the seed coat. The seed coat and endosperm are frozen immediately after harvest in liquid nitrogen. The harvested tissue is stored at −80° C. until RNA preparation. The stored tissue is then used immediately for preparation of poly A+ RNA using Dynabeads oligo-dT in a direct isolation procedure described by the manufacturer. The cDNA library is constructed using the pSPORT cDNA synthesis kit from Life Technologies (Life Technologies, Gaithersburg, Md. U.S.A.). The resulting cDNA is ligated into the pSPORT.

[1293] The Soy60 (LIB3072) cDNA library is generated by subtracting the target cDNA, which is prepared from soybean cultivar Asgrow 3244 (Asgrow Seed Company, Des Moines, Iowa U.S.A.) seeds plus pods from drought stressed plants, from the driver cDNA, which is prepared from soybean cultivar Asgrow 3244 seeds plus pods from non drought-stressed (control) plants. Seeds are planted at a depth of approximately 2 cm into 2-3 inch peat pots containing Metromix 350 medium and the plants are grown in an environmental chamber set to a 12 h day/12 h night cycle, 26° C. daytime temperature, 21° C. nighttime temperature and 70% relative humidity. Daytime light levels are 300 μEinsteins/m². Soil is checked and watered daily to maintain even moisture conditions. At the R3 stage of the plant drought is induced by withholding water. After 3 and 6 days seeds and pods from both drought stressed and control (watered regularly) plants are collected from the fifth and sixth node and frozen in dry-ice. The harvested tissue is stored at −80° C. until RNA preparation. The RNA is prepared from the stored tissue as described in Example 2.

[1294] For subtraction, target cDNA is made from the drought stressed tissue total RNA using the SMART cDNA synthesis system from Clonetech. Driver first strand cDNA is covalently linked to Dynabeads following a protocol similar to that described in the Dynal literature. The target cDNA is then heat denatured and the second strand trapped using Dynabeads oligo-dT. The target second strand cDNA is then hybridized to the driver cDNA in 400 μl 4×SSPE for three rounds of hybridization at 65° C. and 20 hours. After each hybridization, the hybridization solution is removed from the system and the hybridized target cDNA removed from the driver by heat denaturation in water. The refreshed driver is then reintroduced to the hybridization for the next round of hybridization. After hybridization, the remaining cDNA is trapped with Dynabeads oligo-dT. The trapped cDNA is then amplified as in previous PCR based libraries and the resulting cDNA ligated into the pSPORT vector.

[1295] The Soy61 (LIB3073) cDNA library is generated by subtracting the target cDNA, which is prepared from soybean cultivar Asgrow 3244 (Asgrow Seed Company, Des Moines, Iowa U.S.A.) jasmonic acid treated seedling, from the driver cDNA, which is prepared from control buffer treated seedlings without cotyledon. Seeds are planted at a depth of approximately 2 cm into 2-3 inch peat pots containing Metromix 350 medium and the plants are grown in a greenhouse. The daytime temperature is approximately 29.4° C. and the nighttime temperature 20° C. Soil is checked and watered daily to maintain even moisture conditions. At 9 days post planting, the plantlets are sprayed with either control buffer of 0.1% Tween-20 or jasmonic acid (Sigma J-2500, Sigma, St. Louis, Mo. U.S.A.) at 1 mg/ml in 0.1% Tween-20. Plants are sprayed until runoff and the soil and the stem is soaked with the spraying solution. At 18 hours post application of jasmonic acid, the soybean plantlets appear growth retarded. After 18 hours, 24 hours and 48 hours post treatment, the cotyledons are removed and the remaining leaf and stem tissue above the soil is harvested and frozen in liquid nitrogen. The harvested tissue is stored at −80° C. until RNA preparation. To make RNA, the three sample timepoints are combined and ground. The RNA is prepared from the stored tissue as described in Example 2. For subtraction, target cDNA is made from the jasmonic acid treated tissue total RNA using the SMART cDNA synthesis system from Clonetech. Driver first strand cDNA from the control tissue is covalently linked to Dynabeads following a protocol similar to that described in the Dynal literature. The target cDNA is then heat denatured and the second strand trapped using Dynabeads oligo-dT. The target second strand cDNA is then hybridized to the driver cDNA in 400 μl 4×SSPE for three rounds of hybridization at 65° C. and 20 hours. After each hybridization, the hybridization solution is removed from the system and the hybridized target cDNA removed from the driver by heat denaturation in water. The refreshed driver is then reintroduced to the hybridization for the next round of hybridization. After hybridization, the remaining cDNA is trapped with Dynabeads oligo-dT. The trapped cDNA is then amplified as in previous PCR based libraries and the resulting cDNA ligated into the pSPORT vector. For this library's construction, the eighth fraction of the cDNA size fractionation step is used for ligation.

[1296] The Soy62 (LIB3074) cDNA library is generated by subtracting the target cDNA, which is prepared from soybean cultivar Asgrow 3244 (Asgrow Seed Company, Des Moines, Iowa U.S.A.) jasmonic acid treated seedlings without cotyledon, from the driver cDNA, which is prepared from soybean cultivar Asgrow 3244 control buffer treated seedlings without cotyledon. Seeds are planted at a depth of approximately 2 cm into 2-3 inch peat pots containing Metromix 350 medium and the plants are grown in a greenhouse. The daytime temperature is approximately 29.4° C. and the nighttime temperature 20° C. Soil is checked and watered daily to maintain even moisture conditions. At 9 days post planting, the plantlets are sprayed with either control buffer of 0.1% Tween-20 or jasmonic acid (Sigma J-2500, Sigma, St. Louis, Mo. U.S.A.) at 1 mg/ml in 0.1% Tween-20. Plants are sprayed until runoff and the soil and the stem is soaked with the spraying solution. At 18 hours post application of jasmonic acid, the soybean plantlets appear growth retarded. After 18 hours, 24 hours and 48 hours post treatment, the cotyledons are removed and the remaining leaf and stem tissue above the soil is harvested and frozen in liquid nitrogen. The harvested tissue is stored at −80° C. until RNA preparation. To make RNA, the three sample timepoints are combined and ground. The RNA is prepared from the stored tissue as described in Example 2. For subtraction, target cDNA is made from the jasmonic acid treated tissue total RNA using the SMART cDNA synthesis system from Clonetech. Driver first strand cDNA from the control tissue is covalently linked to Dynabeads following a protocol similar to that described in the Dynal literature. The target cDNA is then heat denatured and the second strand trapped using Dynabeads oligo-dT. The target second strand cDNA is then hybridized to the driver cDNA in 400 μl 4×SSPE for three rounds of hybridization at 65° C. and 20 hours. After each hybridization, the hybridization solution is removed from the system and the hybridized target cDNA removed from the driver by heat denaturation in water. The refreshed driver is then reintroduced to the hybridization for the next round of hybridization. After hybridization, the remaining cDNA is trapped with Dynabeads oligo-dT. The trapped cDNA is then amplified as in previous PCR based libraries and the resulting cDNA ligated into the pSPORT vector. For this library's construction, the ninth fraction of the cDNA size fractionation step is used for ligation.

[1297] The Soy65 (LIB3107) cDNA library is generated from soybean cultivar Asgrow 3244 (Asgrow Seed Company, Des Moines, Iowa U.S.A.) abscission zone tissue from drought-stressed plants. Seeds are planted at a depth of approximately 2 cm into 2-3 inch peat pots containing Metromix 350 medium and the plants are grown in an environmental chamber set to 12 h day/12 h night cycle; 26 degree C. daytime temperature, 21 degree C. night temperature; 70% relative humidity. Daytime light levels are measured at 300 microeinsteins per square meter. Plants are irrigated with 15-16-17 Peter's Mix. At the R3 stage of development, drought is imposed by withholding water. At 3, 4, 5 and 6 days, tissue is harvested and wilting is not obvious until the fourth day. Abscission layers from reproductive organs are harvested by cutting less than one millimeter proximal and distal to the layer. Immediately upon excision, samples are frozen in liquid nitrogen and are stored at −80° C. until RNA preparation. The following tissues are combined for the single library: four day stress, all nodes; 5 day stress, all nodes. The RNA is prepared from the stored tissue and the cDNA library is constructed as described in Example 2.

[1298] The Soy66 (LIB3109) cDNA library is generated from soybean cultivar Asgrow 3244 (Asgrow Seed Company, Des Moines, Iowa U.S.A.) abscission zone tissue from control (watered regularly) plants. Seeds are planted at a depth of approximately 2 cm into 2-3 inch peat pots containing Metromix 350 medium and the plants are grown in an environmental chamber set to 12 h day/12 h night cycle; 26 degree C. daytime temperature, 21 degree C. night temperature; 70% relative humidity. Daytime light levels are measured at 300 microeinsteins per square meter. Plants are irrigated with 15-16-17 Peter's Mix. At 3, 4, 5 and 6 days (relative to drought stress induction in plants for Soy65), abscission layer tissue is harvested. Abscission layers from reproductive organs are harvested by cutting less than one millimeter proximal and distal to the layer. Immediately upon excision samples are frozen in liquid nitrogen and stored at −80° C. until RNA preparation. The following samples are combined for this cDNA library: 4 day control, all nodes; 5 day control; all nodes. The RNA is prepared from the stored tissue and the cDNA library is constructed as described in Example 2.

[1299] Soy67 (LIB 3065) normalized cDNA library is prepared from SOYMON07, SOYMON015 and SOYMON020 prepared tissue. Equal amounts of Soy19 (SOYMON007), Soy27 (SOYMON015) and Soy33 (SOYMON020), in the form of double stranded DNA, are mixed and used as the starting material for normalization. For normalization, biotinylated genomic soybean DNA is used as the driver for the normalization reaction. Double stranded plasmid DNA representing approximately 1×10⁶ colony forming units is used as the target. The double stranded plasmid DNA is isolated using standard protocols. Approximately 4 micrograms of biotinylated genomic DNA is mixed with approximately 6 micrograms of double stranded plasmid DNA and allowed to hybridize. Genomic DNA-plasmid DNA hybrids are captured on Dynabeads M280 streptavidin. The dynabeads with captured hybrids are collected with a magnet. Captured hybrids are eluted in water. The resulting clones are subjected to a second round of hybridization identical to the first.

[1300] Soy68 (LIB3052) normalized cDNA library is prepared from SOYMON007, SOYMON015 and SOYMON020. Equal amounts of Soy19 (SOYMON007), Soy27 (SOYMON015) and Soy33 (SOYMON020), in the form of double stranded DNA, are mixed and used as the starting material for normalization. For normalization, biotinylated genomic soybean DNA is used as the driver for the normalization reaction. Double stranded plasmid DNA representing approximately 1×10⁶ colony forming units is used as the target. The double stranded plasmid DNA is isolated using standard protocols. Approximately 4 micrograms of biotinylated genomic DNA is mixed with approximately 6 micrograms of double stranded plasmid DNA and allowed to hybridize. Genomic DNA-plasmid DNA hybrids are captured on Dynabeads M280 streptavidin. The dynabeads with captured hybrids are collected with a magnet. Captured hybrids are eluted in water.

[1301] Soy69 (LIB3053) normalized cDNA library is generated from soybean cultivars Cristalina (USDA Soybean Germplasm Collection, Urbana, Ill. U.S.A.) and FT108 (Monsoy, Brazil, tropical germ plasma) normalized leaf tissue. Leaves are harvested from plants grown in an environmental chamber under 12 hr daytime/12 hr nighttime cycles. The daytime temperature is approximately 29° C. and the nighttime temperature approximately 24° C. Soil is checked and watered daily to maintain even moisture conditions. Approximately 30 g of leaves are harvested from the 4^{th} node of each of the Cristalina and FT108 cultivars and immediately frozen in dry ice. The harvested tissue is then stored at −80° C. until RNA preparation. Total RNA is prepared from the combination of equal amounts of leaf tissue from each cultivar and a cDNA library is constructed as described in Example 2. For normalization, approximately 1 million clones from the cDNA library are used for generation of double and single stranded plasmid DNA. Double stranded plasmid DNA is used as a template for preparation of biotinylated RNA transcripts. Single stranded plasmid DNA from the cDNA library is hybridized with biotinylated RNA transcripts from the same library. Hybridized molecules are removed with Streptavidin beads (Dynal Inc. Lake Success, N.Y.). Remaining single stranded molecules are partially repaired with “Klenow” before transforming E. coli for the generation of the normalized cDNA library.

[1302] LIB3054 is a normalized cDNA library generated from roots from two exotic soybean cultivars Cristilliana (USDA Soybean Germplasm Collection, Urbana, Ill. U.S.A.) and FT108 (Monsoy, Brazil, tropical germ plasma). The roots are harvested from plants grown an environmental chamber set to a 12 h day/12 h night cycle, 29° C. daytime temperature, 24° C. night temperature and 70% relative humidity. Daytime light levels are measured at 450Einsteins/m². Soil is checked and watered daily to maintain even moisture conditions. Approximately 50 g and 56 g of roots are collected from cultivar Cristilliana and cultivarFT108. The plants are uprooted and the roots quickly rinsed in a pail of water. The root tissue is then cut from the plants, placed immediately in 14 ml polystyrene tubes and immersed in dry-ice. The tissue is stored at −80° C. until RNA preparation. Total RNA is prepared from the combination of equal amounts of root tissue from each cultivar and a cDNA library is constructed as described in Example 2. For normalization, approximately 1 million clones from the cDNA library are used for generation of double and single stranded plasmid DNA. Double stranded plasmid DNA is used as a template for preparation of biotinylated RNA transcripts. Single stranded plasmid DNA from the cDNA library is hybridized with biotinylated RNA transcripts from the same library. Hybridized molecules are removed with Streptavidin beads (Dynal Inc. Lake Success, N.Y.). Remaining single stranded molecules are partially repaired with “Klenow” before transforming E. coli for the generation of the normalized cDNA library.

[1303] Soy70 (LIB3055) cDNA library is generated from soybean cultivars Cristalina (USDA Soybean Germplasm Collection, Urbana, Ill. U.S.A.) and FT108 (Monsoy, Brazil, tropical germ plasma) leaf tissue. Leaves are harvested from plants grown in an environmental chamber under 12 hr daytime/12 hr nighttime cycles. The daytime temperature is approximately 29° C. and the nighttime temperature approximately 24° C. Soil is checked and watered daily to maintain even moisture conditions. Approximately 30 g of leaves are harvested from the 4^{th} node of each of the Cristalina and FT108 cultivars and immediately frozen in dry ice. The harvested tissue is then stored at −80° C. until RNA preparation. Total RNA is prepared from the combination of equal amounts of leaf tissue from each cultivar and the cDNA library is constructed as described in Example 2.

[1304] Soy71 (LIB3056) cDNA library is generated from soybean cultivars Cristalina (USDA Soybean Germplasm Collection, Urbana, Ill. U.S.A.) and FT108 (Monsoy, Brazil, tropical germ plasma) root tissue. Roots are harvested from plants grown in an environmental chamber set to a 12 h day/12 h night cycle, 29° C. daytime temperature, 24° C. night temperature and 70% relative humidity. Daytime light levels are measured at 45 μEinsteins/m². Soil is checked and watered daily to maintain even moisture conditions. Approximately 50 g and 56 g of roots are harvested from cultivar Cristalina and cultivar FT108 and immediately frozen in dry ice. The harvested tissue is then stored at −80° C. until RNA preparation. Total RNA is prepared from the combination of equal amounts of root tissue from each cultivar and the cDNA library is constructed as described in Example 2.

[1305] LIB3087 cDNA library is generated from hypocotyl axis from soybean cultivar Asgrow 3244 (Asgrow Seed Company, Des Moines, Iowa U.S.A) seeds 4, 8 and 12 hours after imbibition. Seeds are imbibed in water for 4 hours at 30° C. and then the seed coat is removed. At the 4 hr timepoint axis tissue is immediately harvested and flash-frozen in liquid nitrogen. For 8 and 12 hr timepoints decoated seeds are transferred to cotton saturated with water and incubated at 30° C. for the remainder of the incubation period. Axis tissue is then excised and frozen in liquid nitrogen. Equal numbers of axes from each timepoint is pooled for RNA isolation. The collected tissue is stored at −80° C. Axis tissue consists of unexpanded root, hypocotyl, epicotyl and apex. The RNA is purified from the stored tissue and the cDNA library is constructed as described in Example 2.

[1306] LIB3092 (Soy75) cDNA library is generated by subtracting a target cDNA, which is prepared from soybean cultivar Asgrow 3244 (Asgrow Seed Company, Des Moines, Iowa U.S.A.) leaves from drought stressed plants, from a driver cDNA, which is prepared from leaves from control (watered regularly) plants. Seeds are planted in moist Metromix 350 medium at a depth of approximately 2 cm. Trays are placed in an environmental chamber set to a 12 h day/12 h night cycle, 26° C. daytime temperature, 21° C. night temperature and 70% relative humidity. Daytime light levels are measured at 300 mEinsteins/m². Soil is checked and watered daily to maintain even moisture conditions. At the R3 stage of the plant, drought is induced by withholding water. After 3 and 6 days tissue is harvested. Leaves from both drought stressed and control (watered regularly) plants are collected from the fifth and sixth node and frozen in dry-ice. The tissue is then transferred to a −80° C. freezer for storage. For subtraction, a standard cDNA library is constructed in the pSPORT vector. Driver first strand cDNA is covalently linked to Dynabeads following a protocol similar to that described in the Dynal literature. The target library is then heat denatured and hybridized to the driver cDNA in 400 ml 4×SSPE for five rounds of hybridization at 68° C. and 20 hours. After each hybridization, the hybridization solution is removed from the system and the hybridized target cDNA removed from the driver by heat denaturation in water. The refreshed driver is then reintroduced to the hybridization for the next round of hybridization. The remaining cDNA in the hybridization solution is then used to transform E. coli for sequencing.

[1307] Soy74 (LIB3093) cDNA library is generated from soybean cultivar Asgrow 3244 (Asgrow Seed Company, Des Moines, Iowa U.S.A.) leaves collected from control (watered regularly) plants. Seeds are planted at a depth of approximately 2 cm into 2-3 inch peat pots containing Metromix 350 medium and the plants are grown in an environmental chamber set to a 12 hr daytime/12 hr nighttime cycle, 26° C. daytime temperature, 21° C. night temperature and 70% relative humidity. Daytime light levels are measured at 300 μEinsteins/m². Soil is checked and watered daily to maintain even moisture conditions. At the R3 stage of the plant drought is induced by withholding water. After 3 and 6 days seeds and pods from both drought stressed and control (watered regularly) plants are collected from the fifth and sixth node and frozen in dry-ice. The harvested tissue from control plants is stored at −80° C. until RNA preparation. The RNA is purified from the stored control tissue and the cDNA library is constructed as described in Example 2.

[1308] The LIB3094 normalized cDNA library is generated from LIB3087. LIB3087 in the form of double-stranded plasmid DNA is used as the starting material for normalization. For normalization biotinylated genomic soybean DNA is used as the driver for the normalization reaction. Double stranded plasmid DNA representing approximately 1×10⁶ colony forming units is used as the target. The double stranded plasmid DNA is isolated using standard protocols. Approximately 4 micrograms of biotinylated genomic DNA is mixed with approximately 6 micrograms of double stranded plasmid DNA and allowed to hybridize. Genomic DNA-plasmid DNA hybrids are captured on Dynabeads M280 streptavidin. The dynabeads with captured hybrids are collected with a magnet. Captured hybrids are eluted in water. The resulting clones are subjected to a second round of hybridization identical to the first.

[1309] The Soy76 (Lib3106) cDNA library is generated from soybean cultivar Asgrow 3244 (Asgrow Seed Company, Des Moines, Iowa U.S.A.) jasmonic acid and arachidonic treated seedlings. Seeds are planted at a depth of approximately 2 cm into 2-3 inch peat pots containing Metromix 350 medium and the plants are grown in a greenhouse. The daytime temperature is approximately 29.4° C. and the nighttime temperature 20° C. Soil is checked and watered daily to maintain even moisture conditions. At 9 days post planting, the plantlets are sprayed with either control buffer of 0.1% Tween-20 or jasmonic acid (Sigma J-2500, Sigma, St. Louis, Mo. U.S.A.) at 1 mg/ml in 0.1% Tween-20. Plants are sprayed until runoff and the soil and the stem is soaked with the spraying solution. At 18 hours post application of jasmonic acid, the soybean plantlets appear growth retarded. Arachidonic acid treated seedlings are sprayed with 1 m/ml arachidonic acid in 0.1% Tween-20. After 18 hours, 24 hours and 48 hours post treatment, the cotyledons are removed and the remaining leaf and stem tissue above the soil is harvested and frozen in liquid nitrogen. The harvested tissue is stored at −80° C. until RNA preparation. To make RNA, the three sample timepoints from the jasmonic acid treated seedlings are combined and ground. RNA from the arachidonic acid treated seedlings is isolated separately. Poly A⁺RNA is extracted from each total RNA sample separately and combined to make a cDNA library using approximately equal amounts of mRNA from each treatment. For the construction of this cDNA library, fraction 10 of the size fractionated cDNA is ligated into the pSPORT vector (Invitrogen, Carlsbad Calif. U.S.A.) in order to capture some of the smaller transcripts characteristic of antifungal proteins.

[1310] Soy77 (LIB3108) cDNA library is generated from soybean cultivar Asgrow 3244 (Asgrow Seed Company, Des Moines, Iowa U.S.A.) control buffer (0.1% Tween-20) treated seedlings. Seeds are planted at a depth of approximately 2 cm into 2-3 inch peat pots containing Metromix 350 medium and the plants are grown in a greenhouse. The daytime temperature is approximately 29.4° C. and the nighttime temperature 20° C. Soil is checked and watered daily to maintain even moisture conditions. At 9 days post planting, the plantlets are sprayed with either control buffer of 0.1% Tween-20 or jasmonic acid (Sigma J-2500, Sigma, St. Louis, Mo. U.S.A.) at 1 mg/ml in 0.1% Tween-20. Plants are sprayed until runoff and the soil and the stem is soaked with the spraying solution. At 18 hours post application of jasmonic acid, the soybean plantlets appear growth retarded. After 18 hours, 24 hours and 48 hours post treatment, the cotyledons are removed and the remaining leaf and stem tissue above the soil is harvested and frozen in liquid nitrogen. The harvested tissue is stored at −80° C. until RNA preparation. To make RNA, the three sample timepoints from control buffer treated seedlings are combined and ground. The RNA is prepared from the stored tissue. For the construction of this cDNA library, fraction 10 of the size fractionated cDNA is ligated into the pSPORT vector in order to capture some of the smaller transcripts characteristic of antifungal proteins.

[1311] Soy72 (LIB3138) normalized cDNA library is generated from Soy5 (SOYMON001), Soy20 (SOYMON008) and Soy24 (SOYMON012), Soy28 (SOYMON018) and Soy38 (SOYMON025). Equal amounts of Soy5 (SOYMON001), Soy20 (SOYMON008), Soy24 (SOYMON012), Soy28 (SOYMON018) and Soy38 (SOYMON025) in the form of double stranded DNA are mixed and used as the starting material for normalization. Biotinylated genomic soybean DNA is used as the driver for the normalization reaction. Double stranded plasmid DNA representing approximately 1×10⁶ colony forming units is used as the target. The double stranded plasmid DNA is isolated using standard protocols. Approximately 4 micrograms of biotinylated genomic DNA is mixed with approximately 6 micrograms of double stranded plasmid DNA and allowed to hybridize. Genomic DNA-plasmid DNA hybrids are captured on Dynabeads M280 streptavidin. The dynabeads with captured hybrids are collected with a magnet. Captured hybrids are eluted in water. The resulting clones are subjected to a second round of hybridization identical to the first.

[1312] Soy73 (LIB3139) normalized cDNA library is generated from Soy6 (SOYMON002), Soy25 (SOYMON013) and Soy29 (SOYMON016), Soy31 (SOYMON017) and Soy39 (SOYMON026). Equal amounts of Soy6 (SOYMON002), Soy25 (SOYMON013) and Soy29 (SOYMON016), Soy31 (SOYMON017) and Soy39 (SOYMON026) in the form of double stranded DNA are mixed and used as the starting material for normalization. Biotinylated genomic soybean DNA is used as the driver for the normalization reaction. Double stranded plasmid DNA representing approximately 1×10⁶ colony forming units is used as the target. The double stranded plasmid DNA is isolated using standard protocols. Approximately 4 micrograms of biotinylated genomic DNA is mixed with approximately 6 micrograms of double stranded plasmid DNA and allowed to hybridize. Genomic DNA-plasmid DNA hybrids are captured on Dynabeads M280 streptavidin. The dynabeads with captured hybrids are collected with a magnet. Captured hybrids are eluted in water. The resulting clones are subjected to a second round of hybridization identical to the first.

### EXAMPLE 2

[1313] The stored RNA is purified using Trizol reagent from Life Technologies (Gibco BRL, Life Technologies, Gaithersburg, Md. U.S.A.), essentially as recommended by the manufacturer. Poly A+ RNA (mRNA) is purified using magnetic oligo dT beads essentially as recommended by the manufacturer (Dynabeads, Dynal Corporation, Lake Success, N.Y. U.S.A.).

[1314] Construction of plant cDNA libraries is well-known in the art and a number of cloning strategies exist. A number of cDNA library construction kits are commercially available. The Superscript™ Plasmid System for cDNA synthesis and Plasmid Cloning (Gibco BRL, Life Technologies, Gaithersburg, Md. U.S.A.) is used, following the conditions suggested by the manufacturer.

### EXAMPLE 3

[1315] The cDNA libraries are plated on LB agar containing the appropriate antibiotics for selection and incubated at 37° for a sufficient time to allow the growth of individual colonies. Single selective media colonies are individually placed in each well of a 96-well microtiter plates containing LB liquid including the selective antibiotics. The plates are incubated overnight at approximately 37° C. with gentle shaking to promote growth of the cultures. The plasmid DNA is isolated from each clone using Qiaprep plasmid isolation kits, using the conditions recommended by the manufacturer (Qiagen Inc., Santa Clara, Calif. U.S.A.).

[1316] Template plasmid DNA clones are used for subsequent sequencing. For sequencing, the ABI PRISM dRhodamine Terminator Cycle Sequencing Ready Reaction Kit with AmpliTaq® DNA Polymerase, FS, is used (PE Applied Biosystems, Foster City, Calif. U.S.A.).

### EXAMPLE 4

[1317] Nucleic acid sequences that encode for a protein are identified from the Monsanto EST PhytoSeq database using TBLASTN (default values)(TBLASTN compares a protein query against the six reading frames of a nucleic acid sequence). Matches found with BLAST P values equal or less than 0.001 (probability) or BLAST Score of equal or greater than 90 are classified as hits. If the program used to determine the hit is HMMSW then the score refers to HMMSW score.

[1318] In addition, the GenBank database is searched with BLASTN and BLASTX (default values) using ESTs as queries. EST that pass the hit probability threshold of 10e⁻⁸ for the following enzymes are combined with the hits generated by using TBLASTN (described above) and classified. Results from these searches are set forth in Table 1.

[1319] A cluster refers to a set of overlapping clones in the PhytoSeq database. Such an overlapping relationship among clones is designated as a “cluster” when BLAST scores from pairwise sequence comparisons of the member clones meets a predetermined minimum value or product score of 50 or more (Product Score=(BLAST SCORE×Percentage Identity)/(5× minimum [length (Seq1), length (Seq2)]))

[1320] Since clusters are formed on the basis of single-linkage relationships, it is possible for two non-overlapping clones to be members of the same cluster if, for instance, they both overlap a third clone with at least the predetermined minimum BLAST score (stringency). A cluster ID is arbitrarily assigned to all of those clones which belong to the same cluster at a given stringency and a particular clone will belong to only one cluster at a given stringency. If a cluster contains only a single clone (a “singleton”), then the cluster ID number will be negative, with an absolute value equal to the clone ID number of its single member. Clones grouped in a cluster in most cases represent a contiguous sequence.

### REFERENCES

[1321] The above references are incorporated in their entirety. In addition, these references, as well as each of those cited can be relied upon to make and use aspects of the invention.

Clone ID

[1322] The clone ID number refers to the particular clone in the PhytoSeq database. Each clone ID entry in the table refers to the clone whose sequence is used for (1) the sequence comparison whose scores are presented and/or (2) assignment to the particular cluster which is presented. Note that a clone may be included in this table even if its sequence comparison scores fail to meet the minimum standards for similarity. In such a case, the clone is included due solely to its association with a particular cluster for which sequences of one or more other member clones possess the required level of similarity.

Library

[1323] The library ID refers to the particular cDNA library from which a given clone is obtained. Each cDNA library is associated with the particular tissue(s), line(s) and developmental stage(s) from which it is isolated.

NCBI gi

[1324] Each sequence in the GenBank public database is arbitrarily assigned a unique NCBI gi (National Center for Biotechnology Information GenBank Identifier) number. In this table, the NCBI gi number which is associated (in the same row) with a given clone refers to the particular GenBank sequence which is used in the sequence comparison. This entry is omitted when a clone is included solely due to its association with a particular cluster.

Method

[1325] The entry in the “Method” column of the table refers to the type of BLAST search that is used for the sequence comparison. “CLUSTER” is entered when the sequence comparison scores for a given clone fail to meet the minimum values required for significant similarity. In such cases, the clone is listed in the table solely as a result of its association with a given cluster for which sequences of one or more other member clones possess the required level of similarity.

Score

[1326] Each entry in the “Score” column of the table refers to the BLAST score that is generated by sequence comparison of the designated clone with the designated GenBank sequence using the designated BLAST method. This entry is omitted when a clone is included solely due to its association with a particular cluster. If the program used to determine the hit is HMMSW then the score refers to HMMSW score.

P-Value

[1327] The entries in the P-Value column refer to the probability that such matches occur by chance.

% Ident

[1328] The entries in the “% Ident” column of the table refer to the percentage of identically matched nucleotides (or residues) that exist along the length of that portion of the sequences which is aligned by the BLAST comparison to generate the statistical scores presented. This entry is omitted when a clone is included solely due to its association with a particular cluster.

### DESCRIPTION

[1329] The entries in the “Description” column of the table refer to the description associated with the NCBI gI number in the GenBank public database.

LENGTHY TABLE REFERENCED HERE
US20080034453A1-20080207-T00001
Please refer to the end of the specification for access instructions.

LENGTHY TABLE
The patent application contains a lengthy table section. A copy of the table is available in electronic form from the USPTO web site (http://seqdata.uspto.gov/?pageRequest=docDetail&DocID=US20080034453A1). An electronic copy of the table will also be available from the USPTO upon request and payment of the fee set forth in 37 CFR 1.19(b)(3).

The application's sequence listing, which the Patent Office published only in electronic form, follows.

SEQUENCE LISTING (294310 sequences)

SEQ ID NO: 1 - DNA, 261 bp, Zea mays
caagaatgacaagtcagtcaaggatctcgtgatgctgctgttcgagactgctctcctgacctccggcttcagcctggatgaccccaacaccttcggcaaccggatccaccgcatgctcaaactcggtctgagcatcgatgaggacgagcctgttgaggcagaggctgagatgcctcagcttgaggacgacgctggtgaaagcaagatggaggaggtcgactaagtgtcgcatcgcatgcttgccgtttatcttatccctag

SEQ ID NO: 2 - DNA, 247 bp, Zea mays
gcacgagatccagacacagtcgaccccgaacccgcagtcactcatgttctatcctggaaagccagttatggagattgggagctctgatttccctaatgctcggactgcgatgacatcccctttggctaagtcgctttttgctatcgatggagtaaccagggtattctttggatctgattttgtaactgttacaaaatcagaagaaacttcctgggattgcctcaaacctgaggtttttgctgcaata

SEQ ID NO: 3 - DNA, 247 bp, Zea mays
gcacgacctctggcgaggctcaagacgtacgacggcgtcccgccgccgtacgacaagaccaagcgcctggtcatccctgacgctcttaaggtcctgaggctgcaacctggacacaagtactgcctccttggtgagctttctaaggaggtcggatggaactaccatgacaccatcagggagcttgaggagaagaggaaggagaaggccaaggtggcctatgagaggaggaagcagctggccaagctgc

SEQ ID NO: 4 - DNA, 246 bp, Zea mays
gcacgaggctcaatgatgcactcaagtccatgtacaatgctgaaaagatagggaaacgtcaggtcatgatcaggccgtcatccaaggtgatcatcaagttcctgacggtcatgcagcgccatggttacattggcgagttcgagtacgtggatgaccacagagctgggaagatcgtggtggagctgaatggaagactgaataaatgtggtgttattagcccacgttttgatgtaggtgttaaggaga

SEQ ID NO: 5 - DNA, 240 bp, Zea mays
gcacgagatctgcccttgcagccgccgccgacggatccaggtctgtagactgctcactcctctacgctccgctccgaatggcccgcacgaagcagacggcgcgcaagtcgaccggcggcaatgcgccgcggaagcagcgggccacgaattcggaacgcaagtcggccccggccacgggcggcgtgaagactatttcaactgtatagagcggcgccgtcgtgcgccgcgaaatgcacaagt

SEQ ID NO: 6 - DNA, 249 bp, Zea mays
ggcgagcaaattctgccgtctccaccgccgccgcagccagcgtcaccggcaggatctgccgtctcccttgctccacgcgatgaacaccgacatcaccgcctcgactaagccggagtacccggtggtggatcggaacccggcgttcaccaaggtggtcggcaacttctctgcgctcgactacatgcgcctctccaccatctccgccgtctccgtcaccgttggctacctctccgggatcaagccggggat

SEQ ID NO: 7 - DNA, 243 bp, Zea mays
gcacgaggttgctgtcaaggacctcaagcgtgggtttgtggcctccaactccaaggatgaccctgccaaggaggctgccagcttcacctcccaggtcatcatcatgaaccaccctgggcagattggcaacggctatgcccctgtgctggactgccacacctcccacatcgctgtcaagtttgctgagctcattaccaagatcgacaggcgctctggcaaggagcttgagaaggagccaaagtt

SEQ ID NO: 8 - DNA, 244 bp, Zea mays
gcacgagtacaagtacaggatccggaggtacatggactcggagatccgcgccatcatggcccagtacatgcctctggacagccaaggagatgtccagagccacgcgcaccatattgagatgtgaggatgcatgcagacttgatgagaggagacggaggcttggtctagcttatataatacaccagaattagatgtgcatattcgtaacaatcttgtgtctagcacgcaaagtccttgaacattt

SEQ ID NO: 9 - DNA, 250 bp, Zea mays
tcaggccgccccttgccaaagtttggcgattgggatgttaatgatccagcttccgcagacggattcactgtcatattcaacaaagccagagacgagacgaagggtgggaacggacaagacactgagtcaccttccaaggacaccaggactgagagggtggaatcttatgctgcaaagccaagcacgaagaaatggttttgttgtgtgacagccagccctacgcaatcctgaggaagacaactgcatgcgt

SEQ ID NO: 10 - DNA, 246 bp, Zea mays
gcacgagctgagactgaagagactactgtccggaaacttgaggatgaaataaaagaatgcaagggtattctcaagtgtggtgtatgctttgaccggcctaaagaggttgtgatcaccaaatgtttccacctattctgctcgctatgcatccagagaaacctcgagattcgccaccgaaaatgtcctggctgtggaaccccattcggacaaaacgacgttagggaggtgaagatatgaacctcacca

SEQ ID NO: 11 - DNA, 243 bp, Zea mays
gcacgagggccaccatggtgaagggacgcacgggacagcgcgtcaggctctacgtccggggcaccatcctcggatacaagaggtccaagtcgaaccagtacgagaccacgtcgctcattcagatcgagggggtgaacaccaaggaggacgtcgcgtggtacgctggcaagcgcatggcgtacatctacaaggctaagaccaagagcagcgagacccgctacaggtgcatctggggcaaggtca

SEQ ID NO: 12 - DNA, 238 bp, Zea mays
gcacgagggcagctctgcaggcggcggcggcaagcggtccgcgagccccggctggtggtccagacgatgagcgacatcgacatcctggacgacgggttccggtggcgcaagtacgggcagaaggtggtgaaggggaacccgaacccgcggaggtactacgagggcaccactgcggggtgcccggtgcggaacacgtgggagcgcgcggccgaggacaatcgcgccgggatgaccaggt

SEQ ID NO: 13 - DNA, 239 bp, Zea mays
cggcacgagcggcaacaagggcgcctgcccctgctacaacaactggaaaaccaaggaaggagggcccaagtgcccctagaagatccaccgcagctcccgtccgccattgtccccccttctccgaatctggaacgtgttgttcatcttcgaccaccccctaggcttggcattttattactagtataatgctagtgtccgcccgttgcttaatctggaatgctaccagccagatctccatg

SEQ ID NO: 14 - DNA, 241 bp, Zea mays
gaactagtctcgagtttttttttttttttttttaaggtaacagaggttctttaatttagcatcgcaatgcagcatggaatcctgagtacagcatagtagcatcaatcctcttagcgtcatcaaaatcttaacaaaagctttctggaactgtttgctagcttacagaaacacaagagacatcgataaaaccaaaggaaaggtagagaccctagaattccgacgcaggagccggccgatccgc

SEQ ID NO: 15 - DNA, 239 bp, Zea mays
gcacgagaagaagtcgattcccttccccaagaacccaagcccccaccatgacaagctcctcctctccttcccgaaaggcgctgagcaagatcgcttgcaatcggctgcagaaggaactcgccgagtggcaactcagcccccctgctggattcaagcacaaggtctccgataacctacaaaggtgggtaattgaggtcactggagcggcgggcaccctttacgccggcgagacctaccag

SEQ ID NO: 16 - DNA, 232 bp, Zea mays
gcacgagatttgtccgatctgagggtgttcttgggctctacaagggaattgttcctctctggggtcgtcagattccttataccatgatgaagtttgcttcctttgagaccatcgttgagcttatctacaagcatgctgtgcctgttccgaagtctgagtgcagcaagactacccagttgggtattagctttgctggtggttacgttgccggtgtcttctgtgctattgtttc

SEQ ID NO: 17 - DNA, 232 bp, Zea mays
gcacgagccttagcctcctaaacacgtggactggcagtggatgtgagaagtggaacccggccaattcaactatgctgcaggtcctggtctctattcaagctttggttttgaatgcaaagccttatttcaatgagcctggctacgctatgcatgctaacacagcccacggggagaagaaatccctgacatataatgaagacacgttcctgcactcctgcaggacgatgctgta

SEQ ID NO: 18 - DNA, 236 bp, Zea mays
gcacgagctggcgcgtcggcacgccgcagtacgacttcatcgagcactgcctgtccacggtggaccgcaagcaccagccgtggctcatcttcgccacgcaccgcgtgctagggctactcctccaacgcctggtacgccggcgaagggtccttcgaggagcccgagggccgcgagaacctgcagcgcctgtggcagaagtaccgcgtcgacatcgccttcttcggccacgtccacaa

SEQ ID NO: 19 - DNA, 231 bp, Zea mays
gcacgagatctgtttgttgtgttagggtttcgtctcgtgtataaggcgttcggagctcgcaaatcctttcctctctcgcgttcgaggctaggtagccgtcaccatgagccgctcggggcagcctccggatctcaagaagtacatggacaagaagcttcagattaagatgaatgcaaaccgtgttgttatcggcacacttcgtgggttcgaccagttcatgaatctggtggt

SEQ ID NO: 20 - DNA, 228 bp, Zea mays
gcacgaggtttgaaggttgccctgggtgctgccagaggtctagctttcttgcatgatgaaggaccctttcaggccatgtacagcgagttctcaactttgaacatccaaatagataaaggtttcactgctaagctttcaggatatggttgtgttggcttcaataccgaggagatatctaatgcacctgtgtctgcagcaaacctttcggtggagaccttggagaagggt

SEQ ID NO: 21 - DNA, 228 bp, Zea mays
gcacgaggtttgtggtgcacaatgtctctgagctggagttgctcatgatgcacaacagaacctactgtgccgagatcgcccacaacgtttcaaccaagaagcgcaaggagattgttgaacgtgccgcgcactcgacattgtggtcaccaacaagctcgccaggctccgcagccaggaggatgagtagtctggtttcttgtcacaacggccaaatagatcctgccattc

SEQ ID NO: 22 - DNA, 237 bp, Zea mays
tcgaattccgattcccaatccagcaaaccctaccagccttttgcaaactcagagagggacccgatggcacccaaggcggagaagaagccggcggcgaagaagcccgcagaggaggagcccgcggccccggcggagaaggctcccgctgggaagaagccgaacgttagaagcggctctcggcgggaaaatccgccggcaaggaaggcggtgttgacaagaaggggcggaagaaggcca

SEQ ID NO: 23 - DNA, 230 bp, Zea mays
gcacgaggacgccgtcacctacaccgagcacgcgcgccgcaagaccgtcacagccatggacgtcgtctacgcgctcaagcgccaggaccgcaccctctacggcttcggcggctaggctatgccggtcgcgctcgcgcctcgctgtcgtcgctgcggttcttgtttctgcaattcgcaaggtgtggcttgacggggaaaatgctggttaatgtagcactagatcaagcatg

SEQ ID NO: 24 - DNA, 228 bp, Zea mays
gcacgagggaaagaacaagaggatctccaagggaaagaagggtggcaagaaaaagaccgtcgaccctttctctaagaaggattggtatgacatcaaggcaccgtcggtgttcagtgtgcgcaacatcgggaagactctcgtatccaggacacagggtaccaggattgcttctgagggtctgaagcacagagtctttgaggtttgcctagctgatcttcagggcgacga

SEQ ID NO: 25 - DNA, 226 bp, Zea mays
gcacgaggaagatggtatcaatcagcatggagaagaagctggaacaccagcgagtcttcaccccttcggtcgtcgagccgtcattcggcataggacggatcatctactgcttgtttgagcactcgttttacacaaggcctagcaaatcagaagaggaacagctgaatgtcttccggttccctcctcttgtggcccctatcaagtgcaccgtgttcccccttgttaa

SEQ ID NO: 26 - DNA, 230 bp, Zea mays
ttcggcacgaggccaaaatgaacctgagcgatgaggttgatttggaagattatgtttccagaccggataagatcagtgctgctgatattgctgctatctgccaagaggctggcatgcatgctgtccgcaaaaaccgatatgtcatcctccccaaggactttgaaaagggctaccgaaccaacgtgaagaagcccgagacagactttgatttctacaaatgagtcaaccca

SEQ ID NO: 27 - DNA, 224 bp, Zea mays
gcacgagagattcattccatcatgaatatagctctatggtctgcacaattgagttcgttgatgatgtacagtcagcaattaaccatatacatcgttatggaagtgcacatacagattgcattatcaccacagatgataaagtagcagaaacttttctgcgtcaagttgatagtgctgctgtatttcataatgcgagtacacgattctctgatggggctcgtttt

SEQ ID NO: 28 - DNA, 226 bp, Zea mays
gcacgaggccatctcgagtaccatcctttcatctcctgtgaggcatacaaagagtacaaggcagacccggatgcaactatgcttgaatggcgcaaagggaaggagaacgtgaagaactgcccttcatgtggatttacaattgagaagagtgaaggctgcaaccatgttgagtgcaggtgtggcagccacatttgttggaattgcctggagaacttcaagagcagtg

SEQ ID NO: 29 - DNA, 231 bp, Zea mays
taaggtcacccgcccgcacggcaactccggcgttgtccgcgccaagttcaagtcgaacctcccgcctgagtctatggggcgcaaggtcagagtgttcatgtaccctagcagcatttaaggttttgttggagtaaagatggactaaaaatgtcatgcgtatttcttacttttttctgagcttaaaatgctatttgttggcaacttagattgttcatgcagtcatgcacttga

SEQ ID NO: 30 - DNA, 225 bp, Zea mays
gcacgagttcctccacttctgtggtaccggagaactattccacagatggctatggccgggtttttgcctttcagtgccatatacatcgggctgtactacatctttgctagtgtttggggcgacagggtttacacaatctacagcattctggttattgtctttagcatccgccttatcgtcactgcattcatcacagttgcactgacatacttccagcttgctgct

SEQ ID NO: 31 - DNA, 229 bp, Zea mays
gcacgagggtgagggcatgacacgtcgagaccattcggatgtatctaatcagctttatgccaactatgctattggaaaggatgttcaggccatgaaggctgtcgttggagaggaggcactctcgtctgaggatctgctttacttagagttccttgacaagtttgagaggaagtttgtgacacaaggagcatatgacacacggaacatcttccagtcactcgatcttgca

SEQ ID NO: 32 - DNA, 221 bp, Zea mays
gcacgaggggacaagaaggtcgaagcctgcaagccgccaaggcgcgcctcgaggagaggttcaagaccggcaagaacaggtggttctttaccaagctccgcttctaggcgccgggcaccccgcatagtgactactttagttgtcaatttgttgtatcggaaaccatttaagctatttctgttttggtattgcgcttgttatggatctcggagaagattttg

SEQ ID NO: 33 - DNA, 226 bp, Zea mays
tcgagttttttttttttttttttttttagcactagcataccaacaacagattgcataatagcataagtggtaagacccacagaacagacccgatgttctctctctttcctccataagaataaacccagcttagtcgacctcctccatcttgctctcgccagcgtcatcctccagagggggcatgtcggtgtcagcctccggagcctcctcgtcctcgtcgatgctc

SEQ ID NO: 34 - DNA, 219 bp, Zea mays
gcacgagttctagtggcaatgcgatgtgtagacccagatgctgagaaaaggcccactatgggtcaggttgttcggatgctcgaggcagaagacgtgccttcacgggaggaccgccggagccggagaggccacagcagccacgcagacaacgagtccaaggcaagttcaagcgagtttgagataagcagtgaccgaagagagtcggggccgtcatcgagg

SEQ ID NO: 35 - DNA, 219 bp, Zea mays
gcacgagaagaagaggatgcggaggctcaagaggaagcgccggaaaatgaggcagagatctaagtaggcgcatcttgtgaccgaggatggcgagcttctcctgcaccatggctgtgacgcgttgggatgattgtctccctttgtagacgtgctttgctgtagacgtaggcgatgtaaaccgtcctttttgattaattctagtatgttctgagactgggt

SEQ ID NO: 36 - DNA, 221 bp, Zea mays
gcacgagagaaggagacacactcatcgttcagtttatccccacggctatcaatatttccccaatttatatttaatttgaggcgttctcagtttgttcaggtttttaataacagtcctgatgaaactgcgtattttaggatgatgttggacagagagaatgtaaccaatacagttgtgatgattcaaccttcacttatatcctattcatttcaatcagggcc

SEQ ID NO: 37 - DNA, 222 bp, Zea mays
gcacgagagcacgcgcgccgcaagaccgtcaccgccatggacgtcgtctacgcgctcaagcgccagggccgcaccctctacggattcggaggctaggcgcctcttcgtagctggggaatgcttagggggatacacgtctctgtcgctgtgggccatagtgttgctgcgttcctggatgtaatccatttatttttctgcaatgaagagatgctggcaagcatg

SEQ ID NO: 38 - DNA, 227 bp, Zea mays
ccggcacgagatcgcgcaggatttcaagaccgacctccgcttccagtcctccgctgtcgccgcgctgcaggaggccgccgaggcctacctcgtggggctcttcgaggacaccaacctctgcgccatccacgccaagcgcgtcaccatcatgcccaaggacatccagctcgcgcgccgcatcaggggcgagagggcttgatctcccgttgtcgtcgtccacgttgttg

SEQ ID NO: 39 - DNA, 248 bp, Zea mays
gcacgaggcggctggagcgaagacgtcatcgtcgaggcctgcactcagtgcagacagtttaagatccgagctcagaaggtgaaggaggacctggaaagttatgtttcgggggtgtctgtgataatcaaccctcagaagccacgccgtggttgccttgagatacgtgaagaaggcggtgaagtgttcatatcactgctgaacatgccacgccccttcacaccaatgaagaagctcgacatggacaaggt

SEQ ID NO: 40 - DNA, 248 bp, Zea mays
gcacgaggccttttgttgtggttgctggtagtcacaagctgtgtccgttgtatccacacaatccagaagtgttgttgaatgaactcaaatcgccgtctgatttgctcgattttggcgagttctcagattgcatgaatttcagtactcaggatggcagccccttgttaaatgttgtcaacccaacatttgactatgtgccaccgaagcttgtgagcctattcatcactgacactgggggacacagtcca

SEQ ID NO: 41 - DNA, 248 bp, Zea mays
gcacgagacgaagccggcgatccggaggctggcgcggcggggcggcgtgaacgcatctcggggctcatctacgaggagacccgcggcgtgctcaagatcttcctggagaacgtcatccgcgacgccgtcacctacactgagcacgctcgccgtaagaccgtcaccgccatggacgtcgtctacgcgcttaagcgccagggccgtaccctctacggcttcggcggttaggcctgccgccccgcgcctcg

SEQ ID NO: 42 - DNA, 248 bp, Zea mays
gcacgagcatcgatgagcaaagtaaagatcattcagtttgccacggaggctgccattactatcctgaggattgacgacatgatcaagcttaccaaggaagaagagggtaacgaagagtaagccgcccaccagtagtgggctagtggactcccatgggatggttgccatagcatgtagcacttgttttttcacttatcgtttacttttgcttgctgtgagcattcgtttgtaggaaaagtgagaacgga

SEQ ID NO: 43 - DNA, 176 bp, Zea mays
gcacgaggcctggtcatgaagtattattactttcgttgaaaccgtgatgctattaagacttaatttttttatggaacatcgaatgtaaggcatacatggttatgagttttgtactaccctttgcagtgtgttcctgtttaccttttgtgctgatgattcgcttgtctttgtgtctt

SEQ ID NO: 44 - DNA, 245 bp, Zea mays
gcacgagcctgcaactacggcaccagctgcggctgctcctgctgcagctgcaactgagccggtcaggcgatggcgcacgagagtcgagaggacgacgacgagtcgtataaatataatagcggcgtctaaataagatcctgtcaactgcacccgccattatcgatccatggtcgctcctggggttcatgtacatctgtaacgtgctcgcggtcatgtccgtctcgtgccggatttaatatttatat

SEQ ID NO: 45 - DNA, 246 bp, Zea mays
gcacgaggcggaagcgtaagcgcacaacgaagcaagcggccgccatggtgaagggacgcacgggacagcgcgtcaggctctacgtccggggcaccatccttggatacaagaggtccaagtcgaaccagtacgagaccacgtctctcgtgcagatcgagggggtgaacaccaaggaggatgtcgcgtggtacgctggcaagcgcatggcgtacatctacaaggccaagaccaagagcaatgagaccc

SEQ ID NO: 46 - DNA, 244 bp, Zea mays
gcacgagggctcccccacggtactccagccgctagcctgcgattccgccagtacgccaccaccaccgagcctggactaccgccgccgcccttcgccgatatcttcagcggcgaacagcgcccaccagatcccgcccctgcgatggagtccgtggtgaacccgaaggcatacccgctggctgatgcgcactcgacgatgggtatcctcgatatcatccagcaggccgccaactacaaacagctta

SEQ ID NO: 47 - DNA, 247 bp, Zea mays
cggctacggcggtggcaaccgtggcggcggctacggcaactccgacgggaactggaggaactgagcggtggggcccgcgcggccaagttatcctgttcgctaccgtgatgtttaccctagtccagagggtttatcttcgttcgagtcgtgtttgttgttgcccatctgtgtttttgattgcaaggtcgctctgtgtcagttgttagtgctgtgttcatcctcggtttcagcagacccatgcatcaaa

SEQ ID NO: 48 - DNA, 242 bp, Zea mays
gcacgaggacaaaagaaccaagtgcttgctgcttttcattcgaggtgctatcagcactaaagagcgcctgactgcagcaacttctgctgaagttccttttcaccatataattctatctgaaggaaagatcagcaatgtagttttagggtatgcacactgtgggatgcttgctggagctcgttggatcgcaaaacttgttattccccattttcataacaaaatgcaggaattttctgggtacc

SEQ ID NO: 49 - DNA, 239 bp, Zea mays
gcacgagtgcaggtcgtgcgcggcacctacaagggccgtgagggcaaagtggtgcaggtgtaccgccgtcgctgggtcatccacgttgagcggatcacccgcgagaaggtgaacggctccaccgtgaacgtgggcatccacccttccaaggtcatggttacaaagctgaagcttgacaaggaccgcaatgcgctcctcgaccgcaaggcccggggccgcgccgccgacaaggctaaggg

SEQ ID NO: 50 - DNA, 238 bp, Zea mays
gcacgagggcctacaaccgttttcgtgctcacacacccaaaccttagtcgcgatcaggccccaaggactcgagatgaagtcgagggcacggtccaccgccggcgactccaggctctcggtgaggaagaccaaggcagagaaggacccaaacaagcccaagaggcctccgagcgcgttcttcgtcttcatggaggagttcaggaaggactacaaggagaagcaccccaatgtgaagcaa

SEQ ID NO: 51 - DNA, 237 bp, Zea mays
gcacgagagaagtcgcagttgatgcattcttgcccgcgacaacagctcaagaagccattcagtactccatggacctgtatgcccagtatattttgcaaagcttgaggcagtagattgcaagcaacaatttatctatcatgcgtcttggatgggggcgtgattttaataagccaaatcgcttgctatattgggaaccttggaattgagaacagcgtcactagctgtgattcgctcctt

SEQ ID NO: 52 - DNA, 238 bp, Zea mays
gcacgaggcggcctccatgatctcctcgtcagctctggcggtggcgcctcagggcctgccgcccctcggccgccgcgcctcctccttcgccgtcgtctgctccaagaagaagatcaagaccgacaagccctacgggattgggggtggcctgaccgtcgacgtcgacgccaacgggagaaagggcaagggcaagggcgtgtaccagttcgtcgacaagtacggcgcgaacgtcgacgga

SEQ ID NO: 53 - DNA, 236 bp, Zea mays
gcacgaggtctactccgccgccatcctggagtacttaactgccgaggttctggagctggctgggaacgctagcaaggatctgaaggtgaagcgtatcacccctcgccacctacagttggccattcgcggagacgaggagctggataccctcatcaagggcaccatcgcaggtggaggcgtcatcccgcacatccacaagtccctgatcaacaagtcctccaaggagtgaagactag

SEQ ID NO: 54 - DNA, 239 bp, Zea mays
ggcgatggccgcagcggcgtcaatggggcaccttacgcgccaccgagctggaccttccgggtttcgtgccgctgaagctgtcccaggtcgagatcctcgtgtcctacctcggcgcctccgtcttcgttttcctcgccgtctggctcgtctccggaagatgtgtcagattatccaagaccgaccgtctgctcatgtgctggtgggcattcacagggttgacccacataatgatcgagggg

SEQ ID NO: 55 - DNA, 235 bp, Zea mays
gcacgaggagatatatcgtgtgttgaagcctggccagtgctttgccgtgtacgagtggtgcattacggatcactatgatcctaacaatgcaacccacaaaaggatcaaggatgaaattgagcttggcaatggcctgccagatatcagaagcactcggcaatgtctccaggcagtaaaagacgccgggtttgaggttgtttgggataaggatcttgctgaagattctcccttgcct

SEQ ID NO: 56 - DNA, 235 bp, Zea mays
gcacgaggttcagaatcatgggaggatgaattagtcaaacgtgcaagtggccttgttgttagttcaggaatggttaatgatgcagaccttggtccagtgatcagccgacaggcaaaggatcgtatctgtaaattagttcaaagtggtgttgacagtggtgctcgtatattgcttgatggaagaaagatagtggttcctcgctatgaagatggaaattttgttggcccaaccattc

SEQ ID NO: 57 - DNA, 235 bp, Zea mays
gcacgagggaatatctagtctcaaagttgtcgatgtttcaagcaatgatttatgtgggacgattcccacatctggaccatttgagcacattcctctgagcaactttgagaagaacccacgcttggaaggtccagagctacaaggcctggccatatatgacaccaactgctagagggggcaccacgaacaaaagaatcgctaggaagaaatgggcgaacaaggttaccaaaaagtg

SEQ ID NO: 58 - DNA, 226 bp, Zea mays
gcacgagcgccgccgcagccatccgcttcttctcttcggttcagctctcgaggatgaaggtaatagctgcctacctgcttgctgttctgggtggaaacacttccccgactgctgatgatgttaagagcattctggaatcagttggtgctgaagctgatgaagaaaaactagagttcctgctcacagaactcaaagacaaggacataacagaagtgattgcagctgg

SEQ ID NO: 59 - DNA, 226 bp, Zea mays
gcacgagtggagcttcgatggcacattcacacagccaaatgttgggaactccctttgtccctccctctgttacaactcggcttaactgcatgaaggagatttttgacagatcagggaactgcagcctttgtgagattaggcccaaagatatcctgatcagtgaaacacctaatttttctgccattgttccttttgcagcatcatatccatttgagatatggattat

SEQ ID NO: 60 - DNA, 226 bp, Zea mays
gcacgagcacaaattgccctctcagctcttctcctaatctcactctagccctagccaaatcccagacccatcccagccctagcgacaccaaccagctcgccagcgaccatggggaacccggagaagctgatgaatcagatcttcgacctcaagttcacctccaagtcgctgcagcggcaggcgcgcaagtgcgagaaggaggagaaggagcagaagctcaaggtca

SEQ ID NO: 61 - DNA, 224 bp, Zea mays
gcacgagaaagcatggcaaacaggtcgttcaagtgccggccatcggggagagcaacgcggtggacacaactggagcgggcgacctgttcgcgagcgggttcctgtacgggctggtgaaggggttgccgctggaggagtgctgcatggttggggcgtgcagcggcgggtcggtgacgcgggcgctcggcggagaggtgcggccggagaactggcagtggatgtac

SEQ ID NO: 62 - DNA, 223 bp, Zea mays
gcacgaggcgcgacctcggctacacgtacgacgccgagtccgacaaggacctgccatggctgcgctgcaagatctcgtcgctggtgccccacggcaaggacagcccgccgaggtcgtcgtcggcaaggaaggcggcgccggtgttcccgctcgccctgactaagggccaggtggtggaagtgccggccgtgcctgtgccggccaaggacccggggaaggagca

SEQ ID NO: 63 - DNA, 225 bp, Zea mays
gcacgagccaaaggcagagatatcacatatattccgcgcaccagagaagaggccacccaaggagctctcgctagcgttcacgggtctcacgcttctgccgtttattggattcttgatagggctcgttcgtcttggagtgaacttgaagaacttcccgtccttgccaggaccggccgcatttgcctcacttttccatgctgggataggagcagtcctgatgctcta

SEQ ID NO: 64 - DNA, 225 bp, Zea mays
gcacgaggtgacggaaagcgacctccctcgcctcccctacatcgaggctgtgctcaaggagaccatgcgcgtgcaccctgccgcgccgatgctggcaccccacgtggcccgcgaggacacatccgtggacggatacgacgtgctcgctggcacggtcttgttcatcaacgtgtgggcaatcggccgcgaccctggactgtgggacgcgccggaggagttccggcc

SEQ ID NO: 65 - DNA, 225 bp, Zea mays
gcacgagctctaatactggaaaatacatttacatccatactggatatggctggtattatgcttcccttcttaagatggttcataggcgggagctcttctaaaggtccaaaacttttaaactgtgttgttcgctctccatggaatacacttgatattgttggagaggtcaaacaacccattctcttcctttctggattgcaagatgaactagtcccccctccacac

SEQ ID NO: 66 - DNA, 223 bp, Zea mays
gcacgagctgcaatgttggagaagttcaagaactacgactttggtagatgccccagggtgtactgctgtggccagccctgccttccagcagggcaatcagatgttcctagatcgagcactgtgaagatatattgtccgaaatgcgaagaacttaactatccaagatccaagtaccaaggcaacatcgatggatcatactttgggacgacattccctcatcttt

SEQ ID NO: 67 - DNA, 220 bp, Zea mays
gcacgaggccgccgccgccgccgccgctaccaccgcctcgcgccgcctgcggctccgcgtttccgcacggaagttggtgaaggtttcttgaggctgagaacatggtgctgaagacggaactttgccgcttcacgccagaagatttatcctgggaaaggcattagatttatccgtgctgattctcaggtcttcctttttgccaactcgaaatgcaagcgct

SEQ ID NO: 68 - DNA, 221 bp, Zea mays
gcacgaggccaagcgcgtcaccatcatgcccaaggacatccagctcgcgcgccgcatccgcgggagcgcgcctaggcggttcggttgcggcgcctgctcgctactgatggaggtgcttagtttagcacgtcatggttctgttataggtgtgcgttgttgttttcaagaggtagcttcttgctatgtgctgaagttaacggaggattatgattagcagttct

SEQ ID NO: 69 - DNA, 226 bp, Zea mays
tgacaatgcgcacaaagggttatggttttgtgaagtttggtgatcctaatgagcaagctcgtgcaatgactgagatgaatggcatgctatgttcttctaggcctatgcgtattgggcctgctgcaaacaagaaagctactgttgttcaggagaaagtaccaagtgctcagggagttcagtctgacaatgatcctaacaatacaaccatttttgttggtggtcttga

SEQ ID NO: 70 - DNA, 226 bp, Zea mays
ttcggcacgagcccatgtttgtcgttggtgtcaacgagaaggagtacaagtctgacattaacattgtctccaatgctagctgcacaaccaactgccttgctcctcttgctaaggtcatcaatgacaagttcggtatcgttgagggtctgatgaccactgtccatgccatcactgctacccagaagactgttgatgggccctcatctaaggactggaggggtggaag

SEQ ID NO: 71 - DNA, 223 bp, Zea mays
gcacgagcaatgacgaggatgatgaagagggtagtgaggaggatgaagatgatgacgagtgatggagctcctcgagacaatggaccgtgcttcatccaacaatggagcggctacacaaggccccgtggcgatcacaaaaaaggagcctatatccatgtactagaattattcagtttcactccacatcgtgatgttttatttttacttttgtcgtgctataacg

SEQ ID NO: 72 - DNA, 222 bp, Zea mays
gcacgagtggagaggttacaaggtcgtataccggagtatgctagcctgtatttctgcatgtgcattgatgccgaggacaatgagcttgaagtccttgagatcatccatcatttcgtcgagatactggaccgctattttggcagtgtatgtgagttggatttgatattcaattttcataaggcctactacatactggatgagattctcatcgctggtgaactt

SEQ ID NO: 73 - DNA, 217 bp, Zea mays
gcacgagccctggaggtgacctggcaaaggtccagcgtgccgtgtgcatgatcagcaacaacaccgccgttgccgaggtgttctcacgcatcgaccacaagtttgaccttatgtacgccaagcgtgcattcgttcactggtatgtcggtgagggtatggaagagggtgagttctcagaagcccgtgaggacttggctgctcttgagaaggactatga

SEQ ID NO: 74 - DNA, 217 bp, Zea mays
gcacgaggagccttacaacagcgtgctctccactcactcactcctggagcacactgatgtctccatcctgctcgacaacgaggccatctatgacatctgcaggcgctccctcgacattgagaggcccaactactccaacttgaatcgccttgtgtctcaggtgatctcatcgctgactgcttctctgaggttcgatggtgccctcaatgtggatgtg

SEQ ID NO: 75 - DNA, 217 bp, Zea mays
gcacgaggttggatcccaggatgttgaggactgccttgcagcgctagacttcgccgtcgaggaagagctggtagatgcgtctagagtagctgttgtcgggatctcgcatggtgggttcctgacaacacatctcatcggtcaggctccggacaggttcgccgtggcagctgctcggaaccctgtctgcaacctgtcgctgatggccggcaccaccgac

SEQ ID NO: 76 - DNA, 216 bp, Zea mays
gcacgagaataactaccacagggctgatggtcagaacactggcaacttccttacggaccgtccttcaaccaaggtccacgctgctcctggcggtggctcttccctgggctacctgttcggtggcaactgatgcccgtgctggtgcgctcaccaaagttatcctcccctgcctgctgcgtgctatgtctgaatcgtgaacaaccgttgtcatttcat

SEQ ID NO: 77 - DNA, 223 bp, Zea mays
ttcggcacgagaaaagcagctcaaggaggtctccaaccaatacaaaaccgaccaaaaccttgtttgtgatcaactttgacccgatcaacacaagaatccgagatctggagaggcacttcgataaatatggcagggtcgcaaatgtaagaatcaaaaagaactttgcctttatccagtttgagatacaggaggatgctacaagagcattggagggtactaatgg

SEQ ID NO: 78 - DNA, 217 bp, Zea mays
gcacgagctcacctctgcaggcaagaagttccgtggcctgcgtggcaagggccacactcaccacaagaacaggccgtcgaggagggccacctggaagcgcaaccagaccctgtccctccgccgctaccgttgagcacacacatcttgaattcttgatgctctgctaccgtggaacccgccccatgcaggctctgatagtatttggtatttttgttgc

SEQ ID NO: 79 - DNA, 214 bp, Zea mays
gcacgagggtcaccagtgtctacgaggatgggtccgtgtttagccctgaggtgcttgacctttccgaggaggacctgattgagaagtttgccactggtgtctccatggttgcctccctgtcactggcgatctcgtacccgacccttgctgctgtgccccacatgttcatcaatgggtacaagaatgtgcttgctgttgctgtcgagacagacta

SEQ ID NO: 80 - DNA, 215 bp, Zea mays
gcacgaggctacacaaggccccgtggcgatcacaaaaaaggagcctatatccatgtactagaattattcagtttcactccacatcgtgatgttttatttttacttttgtcgtgctataacggatagcgctcctcgttggcgccactggcgggtggttctgcctctggtctggtgtgtttgtgtgtggtcacacttgccagccagcagaggcgcct

SEQ ID NO: 81 - DNA, 218 bp, Zea mays
gcacgagggcagtcctaccgccaagacgttcctgaggatgttcatcagatctgcccaagaagacaacaagaagtatcctagcctccagttggagttcctggggagctacctttctgagctgagcttgctggattatggcttgattcgctccttgccgtcacttgttgcagcctcagccgtctttgttgcaaggctgaccctggatccacacacccatc

SEQ ID NO: 82 - DNA, 217 bp, Zea mays
gcacgaggggaaatggcaaccgttccaggggatctgatctggcaggttgtgaggaagaacaactccttccttgtgaagcagttcggcaacggcaatgccaaggtgcagttcaccaaggagccgaacaacctctacaacatccactccttcaaacactcgggtttggcgaacaagaagactgtgacgatccagccagctgcaaaggactcggctgtgg

SEQ ID NO: 83 - DNA, 217 bp, Zea mays
gcacgagggaccgcctgttccgcgccatcgacaccgtgcccgcggtccggcgcaaggctgactgggccatgcgctggatcgacggcggggagcgcttcgctgagcgcatcgttgccttcgcctgcgtcgagggcatattcttctcggggtccttctgcgccatcttctggctcaagaagcgcgggctcatgccgggcctcaccttctccaacgagct

SEQ ID NO: 84 - DNA, 283 bp, Zea mays
gcacgaggcacaacggcacgattctcctcctccgtccgcgtactctcggtttcggcgatgtcggggcgcggcaagggcggcaaggggctgggcaagggcggcgccaagcgccaccgcaaggtgctgcgcgacaacatccagggcatcacgaagccggcgatccgtaggctggccaggaggggcggcgtcaagcgcatttctgggctcatctacgaggagacccgcggcgtgctcaagatcttcctcgagaacgtcatccgcgacgccgtcacctacaccgagc

SEQ ID NO: 85 - DNA, 283 bp, Zea mays
gtgcgttccatcccgatccgcaaggacgacgaggtgcaggtcgtgcgcggcacctacaagggccgtgagggcaaagtggtgcaggtgtaccgccgtcgctgggtcatccacgttgagcggatcacccgcgagaaggtgaacggctccaccgtgaacgtgggcatccacccttccaaggtcatggttacaaagctgaagcttgacaaggaccgcaaggcgctcctcgaccgcaaggcccggggccgcgccgccgacaaggctaagggcaagtttactgccgacg

SEQ ID NO: 86 - DNA, 281 bp, Zea mays
gcacgaggcgacgctgtgacctacacggagcacgcccgtcgcaaaaccgtcaccgctatggacgtcgtgtacgccctcaaacgccaggcccgcactctctatggcttcggcggctaggttaggtgtgggtaattgcctgtccaggtgtctcggatctgtggtactagtttggctgccttcctgtgttcgtattgtagtagttgtggtagctggttgctttgtcgtcctgtagtcgtgcttctttgggtctgtaagaaccgctggttcgatgggattggatt

SEQ ID NO: 87 - DNA, 278 bp, Zea mays
ttcggcacgagggacctttggcatattcttgtacgagctgttgttcgggaagaccccattcaaaggttcaggcaaccgggctacactcttcaacgttgttggccagcccttgaggttcccagagtccccaatagtgagcttctctgcgagggacatgataaggggattgctagtcaaggacccgcagcaccgacttgggtataagcgtggcgctaccgagataaagcagcatcctttcttcgagggcgtgaactgggctctgataaggtgtgcgagcc

SEQ ID NO: 88 - DNA, 274 bp, Zea mays
gcacgagagccgtcgatgattggtatggaggctgctggaatccatgagacaacatacaattcaatcatgaagtgtgacgtggatatcaggaaggacctctatggtaacattgtgctcagtggtggttcgactatgttcccgggtatcgctgatcgtatgagcaaggagatcacttcccttgcaccaagcagcatgaagatcaaggtcgttgcaccgcctgagaggaagtacagtgtctggataggagggtcgatcctagcctcgctcagcactt

SEQ ID NO: 89 - DNA, 273 bp, Zea mays
gcacgaggggtggggatcccacgaagatcacattctcaagaagagctgtgacgagcgtgtgctcctttgtgtcagagcacttcccttccatagacttggaatcctgggatgaaagtgccatgaccgaagcacacccccagccaaagcacagctgttttgccccgagggtaaaagtatatcttccgtgaagtttgcgagcttgggaaaccccagtggaacctgtagatcataccaaatggggcgctgccaccacccgaactccttatctgttgt

SEQ ID NO: 90 - DNA, 274 bp, Zea mays
gcacgaggcaacatcagtctcgacgacgtcatcgagattgccaggaccatgaggcccaggtccatggccaaggaaatgtctggctgcgtcaaggagattctcggcacctgcgtcacgtcggctgcaccgtcgacggcaaggaccccaaggacctccagcaggagaatgacgacggcgaggtggagatcccgtccgcttaagaagagggattggagtctaggagggttgtctgtctactgaagtaattctctctagctagatttgtctgttgaag

SEQ ID NO: 91 - DNA, 280 bp, Zea mays
cagttttacaaggtggacgacgccaccggcaaggtgacccgcctccgcaaggagtgccccaacaccgagtgcggtgcgggtgtcttcatggccaaccacttcgaccgccactactgcggcaagtgcggcctcacctacgtctacaatcagaaggcgtaatcccatgcgccgctttgcttcacccgcctacctatcaagcattcacctgttggttactcgatttgaatatcatttagatctgtttgaggttggaacataaatgcagcagtagtttctgtct

SEQ ID NO: 92 - DNA, 272 bp, Zea mays
gcacgagagaaggttcttcaagacaagcgttacaagaaccgcgaactgcagaccatgcgcctccttgaccaccctaatgttgttgctttgaagtattgcttcttttcaacaactgagaaggatgagctttatctaaatttggtccttgagtatgttccggagacagttcatcgagttgtgaaacatcacaacaagatgcaccaacgcatgccacttatttatgtgaagctttatatgtaccagatatgtagagcattggcttacattcatgg

SEQ ID NO: 93 - DNA, 269 bp, Zea mays
gcacgagcaagagttggaaactgccaagaacagctcctcagttgaaaagagctatgagctacctgatggccaagtaatcaccattggtgcagagagattcagatgccctgaggtcctcttccagccatccatgattggtatggaggctgccggaatccatgagacaacatacaattcaatcatgaagtgcgacgtggatatcaggaaggacctctacggcaacattgtgctcagtggaggttcgactatgttcccgggaatcgctgatc

SEQ ID NO: 94 - DNA, 267 bp, Zea mays
gcacgagtcgatttcgaatttcacccagctccgcacgcgcctcaacccttcctctcgggcggcggcgcggcaaggggcagcaaccggagcgggagctgcgatgaagaagatcttcggcgccaagaaggacaaggggccgcccccctccatccaggacgccaccgagcgaataaacaagcggggtgagacggtggacgagaagatcaagaagctggacgaggagctagccaggtacaaggagcagatccgcaagacccgccccggccc

SEQ ID NO: 95 - DNA, 269 bp, Zea mays
gcacgagggaagactgccactagcccaagttcaggatggcgatgaaggttcaaatttatcagctgaggaaaagcatctgaatgagacattcataaaggacagtatccctccctggttggcaggatctggttacattggccttgcagcaatatcgattgcaaccgtcccaatgatctttccgcagatcaagtggtaccttgtcctctcggcatacgttgttgctcccctcctcgctttctgcaactcatatggcactggactaacggact

SEQ ID NO: 96 - DNA, 265 bp, Zea mays
gcacgaggcagaggtttaaggagtttcagactgaggtggaggcgattggcaaggtccggcattccaacattgttaccttgagggcttattattggtcttttgacgagaagctgctaatatatgattacattcctaatggcagcctctctgcagcaattcatggtaaacctgggttgatgacattcatcccgttgccatgggaagcccgaataaagatcatgaaaggagttgccaaggggatgtctgtcctgcatgaattcagccc

SEQ ID NO: 97 - DNA, 272 bp, Zea mays
gcacgagagatccgcaagtaccagaagagcacggagctgctcatccgcaagctccccttccagcgcctcgtccgcgagatcgcgcaggacttcaagacggacctgcggttccagtcctcggccgtggcggcgctgcaggaggccgcggaggcgtacctggtggggctcttcgaggacaccaacctctgcgccatccacgccaagagggtcaccatcatgcccaaggacatccagctcgcccgccgcatcaggggcgagagggcttgagctgt

SEQ ID NO: 98 - DNA, 271 bp, Zea mays
gcacgaggaacagcgtgccgctggagcgggccgtcgcgggggacacctccggcgactacgagagcatgctcctcgcgctcctggggcaggagtgatgagccgtactggtgcgctcgtgcctttctgaccggcgccgtggtgtttgttcgtgatcgtaataaacctgattgcctagctgtacgtgaggctgtttcttcggtcctggtactgtcgctgcagcatgcatagcagtggaccagtggtgataaataagttactgtgctttcgacga

SEQ ID NO: 99 - DNA, 240 bp, Zea mays
gcacgagggcatgctcagcgacgacgtcgtcgcgcgtgcggtacgcgctgctctgcgccgcgtacccgcgctccgactgcaccatccgcgtcatccccgaggacgagctgctcaaggtccagctcgccaccgccgacgactgactgacgctccgccgatgaccagcggaccggccagcaggcatcaacctccggcggtgtaatgatgtccctgagacttgtacaccattgttgactagta

SEQ ID NO: 100 - DNA, 239 bp, Zea mays
gcacgaggtctatttggtatctaccgtggctactactctgtggagactgtgtcgttgttagtggctctaaaagtacgttatagagacagaatcacaatattgagaggaaatcatgagagcagacaaataactcaagtgtatggcttctatgatgaatgcttgcggaaatatggaaatgcaaatgtgtggaagtactttacagacttgtttgattatttgcctctcacagctcttataga

SEQ ID NO: 101 - DNA, 240 bp, Zea mays
gcacgagcaagccaaaggacgccccgaagaagaccaagaccggcgtgaagaagcccaaggccgctgccaaaccgaaggccaagtcccccgcgaacccaagcccgccacaaagcccaaggcggccgcgaacccgcttccaagccgaaagcagcagcaaaacccaaggcaccagccaagcccaaggccaagcctgctgccaaggcgaactcaaggctgccggcgctaagccgaagccagctg

SEQ ID NO: 102 - DNA, 238 bp, Zea mays
gcacgaggcgagacaacccatacaacaagggagtcatggaaaacatcaaagagatcttctttacaacgatccctccttccaagaacaacttctgtggtagggtcgaacaggagcatggtctgaggccccgtccaacgaatggtttcatgagtccaaacatggggagagctgttggcgacattgagatgggtagaaaaccagtggcttgggatgagcctaggatggcggctgaaattgg

SEQ ID NO: 103 - DNA, 235 bp, Zea mays
gcacgaggttgctgataagaactgtgagaaaatccactttatggcaccgaatatatactgctgtggagcagaactctgcggacacggaggccgttacagatatggtgagctcccagctacagcttcaccgttatgcaacgggccgcgaatcaagagttgtaactgctcttacactactgaagtcacacctcttcaagtatcaaggccatgtcagtgctgcccttgttcttggtgg

SEQ ID NO: 104 - DNA, 233 bp, Zea mays
gcacgaggcgcaggccaaagggtattgactcccgtgtcaggaggaagttcaagggatgcaccttgatgcccaacattggttacggctctgacaaatcaaccaggcactacctccccaacaagttcaagaagtttgtggtgcacaatgtctctgagctggagttgctcatgatgcacaacagaacctactgtgccgagatcgcccacaacgtttcaaccaagaagcgcaaggag

SEQ ID NO: 105 - DNA, 233 bp, Zea mays
gcacgagcggcgatctccaaagccgggaaggtagggccgaaccggtgcagcgcctgcaggaagagggttggacttacgggattcaactgccggtgtgggaacttgtactgcgcactccaccgctactccgacaagcacgactgcaagttcgactaccggactgctgccagggacgccattgccaaggctaatccggtggtgaaggcagacaagctcgacaagatctagggggg

SEQ ID NO: 106 - DNA, 243 bp, Zea mays
tcggctctcgcatcgatgaagaacgtagcaaaatgcgatacctggtgtgaattgcagaatcccgcgaaccatcgagtttttgaacgcaagttgcgcccgaagccttctggcggagggcacgtctgcctgggcgtcacgccaaaagaaaaaaaaaaaaaaaaaaactcgagcgtgaacccgccgccgacgcagcagcaggagacgcgccaaggagagcccgcaaggaggcgactatgagggcca

SEQ ID NO: 107 - DNA, 233 bp, Zea mays
gcacgaggtttgggcagtcgtcaggcaaacctgacccaatcccaacgagcgacctggcttccaagtccttgttcctcactcgtcctagcctcatgcattacactgctacccgtgatgagctgctggagtcagccggcgaggtgtttgccaatgtcgctaacggggtgctgcacgtccgggtgaaccacacgtatccattgtcggaagctgcccaggcccatgcagatctggag

SEQ ID NO: 108 - DNA, 232 bp, Zea mays
gcacgaggccatcaaaggtttctgggacatgtacgacccagagggctactctttgtggttctgtgactacaagtacaatgatgagaacaccgtctcctttgtgaccctgaacaaggttggtggattcctgcagcggatggacctgtgccgcaagtacgcctttgggaagatgctcgtgataggctctgagccacccttcaagctgaagggcctttggctcttccgtggccag

SEQ ID NO: 109 - DNA, 229 bp, Zea mays
gcacgagcctccgtccgccgcgttctcatgtccgccgggctgtcgacggagctccgccacaagtacaacgtgcgctccatcccgatccgcaaggacgacgaggtgcaggtcgtgcgcggcacctacaagggccgtgaggggaaggtggtgcaggtgtaccgccgccgctgggtcatccacgtcgagcggatcacccgcgagaaggtgaacggctccaccgtgaacgtgg

SEQ ID NO: 110 - DNA, 229 bp, Zea mays
gcacgagggaaccgccgccgacgccgcaggaggagacgcatcgaggttagcacgcgaagaagcgaccatgagggccaagtggaagaagaagcgcatgaggaggctcaagaggaagcgcagaaagatgaggcagagatccaagtaggcagatcgagatggattgtggacctgatgacatgcgtgggtacatacatttcttcggatgcgttggtgtgcctgtggagagatg

SEQ ID NO: 111 - DNA, 228 bp, Zea mays
gcacgaggaactatgacaaggatgggagatccaaggggactgcggaagttgtttttgcaaggaaagtggatgctttggatgctatcaagagatacaatggtgttctacttgatgggaagccaatgaatttagagctcattggaaacaatgtcgaaccacctcccttgccaccattaatacacaatcgtcctttgcagaactataacgatatccacagcagtgtgcttc

SEQ ID NO: 112 - DNA, 228 bp, Zea mays
gcacgaggtggcggcggctacggtggcggcggcggctacggtggtggtggcggcggctacggcggtggcaaccgtggcggcggctacggcaactccgacgggaactggaggaactgagcggtggggcccgcgcggccaagttatcctgttcgctaccgtgatgtttaccctagtccagagggtttatcttcgttcgtgtcgtgtttgttgttgcccatctgtgttttt

SEQ ID NO: 113 - DNA, 227 bp, Zea mays
gcacgaggagactcgtcccccgtaccgtggcggaggcagacgtggtggttacaggaatgttgagtttgctgatgactctgagaggccaccacggagaaactatgagcgccacagcgggactggccatggctatgagatgaagcgtgatggcgcagggcgtgggaactggggcactgccactgatgaacttattgcccaggatgcagaggactctccgaagatggagg

SEQ ID NO: 114 - DNA, 227 bp, Zea mays
gcacgagaggagacgcgccaaggagagcccgcaaggaggcgactatgagggccaagtggaagaagaagcgcatgaggaggctgaagaggaagcgccgaaagatgaggcagagatccaagtaggctgatggggattgtggatggtggtgtcggcatagttgtgttacgtttcttcgatgcgtgagttcatggagagatgtcacatcctagttcgtcgtcaccgtttgc

SEQ ID NO: 115 - DNA, 235 bp, Zea mays
gcacgaggcgcggcaagcgcgggaagggcctgggcaagggcggacgaacgccaccggaaggtgctccgcgacaacatccaggggatcacgaagccggcgatccggtggctggcgcgcaggggcggcgtgaagcgcatctccgggctcatctacgaggagacccgcggcgtcctcaagatcttcctggagaacgtgatccgcgacgccgtcacctacaccgagcacgcgcgccgca

SEQ ID NO: 116 - DNA, 238 bp, Zea mays
gcacgagcacaaacagccgcgacactcaggagatacgcctcgaacaaggccttcagatgctcaagatattcaaggatcatgtcagcaagacttccatcctcgacgactttgccttctacgagagccgccagaagttgatgcaggataagaggtcgaaacagcagcagctccaaaagcaggtctgggacactaggacccccgtttctgtcaccggtgagcgaccgcaggaacctgctaa

SEQ ID NO: 117 - DNA, 235 bp, Zea mays
gcacgagctagtctcgaatatttttttttttttttttggccaggatgcatctctcatgggatacaaatcgatgaaacaaatggtccaataaatccatttggtgcaagtcaagtatttcactccatttgttctctattaaaaaaatagacatcgcattgcaaatcctataacaatttacagcgagaaaatccttttgatgcaattgtaccagtcagaatagtctgtaaatcctttc

SEQ ID NO: 118 - DNA, 230 bp, Zea mays
gcacgagccacggcgtctggtgattccgacaagtccaagtccgaggtgaacgacgaggacgaggagggtgacgagtgatgtatgacggatgaaactctgtccaagtgtttgcagtcagggaaaaaaatcttcgtcgttgtcggcctaaccgggctttctcgaaggactttctagatgcagtagattagtgccgtcttctctgagtagtttccttgcaagtgtcgtcccgt

SEQ ID NO: 119 - DNA, 232 bp, Zea mays
gcacgcagggaagaaccttggcccgacaccatgctcccaatggccgtccaccccaccaccacgccggccttgtccccgcgcgcccgcgtctcgccgcacaggcctcccatctcctccctggcggacccctcgtcctccccctgccatcgcatcgtcagtttcaaaagcaggaggctgccacttcgctctctccacatcgccgctgccgctgccgccggggcagaggaagaag

SEQ ID NO: 120 - DNA, 230 bp, Zea mays
gccacgaggcggcttcggcggcatgcccgggtcgcccaccgccggctccgtccccgagcacgccaacaagccctgaacgccaacaagcgtggtagtagagtggtgctactgttactgtagtacgtcgtcgtcttcatgcatgcgtggttcgtggtttcccctagctccatacgagcagtagttgggccttgcacgtaccgtacgtctagctagctatatatatatagctt

SEQ ID NO: 121 - DNA, 231 bp, Zea mays
gcacgaggttgagcgtcttccttcaaaagtgtataggaaaccattgaaataccagagcgaggaagcagcacaatgctatatttgccttgttgaatatgaagagggagattgcctccgtatacttccatgccatcatgaattccatctaacatgtgtagacaaatggctaaaggagattcacagggtttgcccactttgtcgtggcgatgtttgcagatctgatgcacccat

SEQ ID NO: 122 - DNA, 230 bp, Zea mays
gcacgagtcacagtcgtgaccagagcgcgagagctagctagagggccgtgaaaatgccgatcaataggatcgccctggggagccaccaggaggtgtaccacccgggcgccctcaaggcggcgttcgctgagttcatctccaccctcatcttcgtcttcgccggccagggctccggcatggccttcggccccgccctcgtcagctgggagtggggctaccagtgggtgtac

SEQ ID NO: 123 - DNA, 232 bp, Zea mays
ctcgtgccgaattcggcagagcaagttctagcagcgcacgctcggtttcggcaatgtcggggcgcggcaagggcggcaagggtctgggcaagggcggcgccaagcgccaccgcaaggtcctgcgcgacaacatccagggcatcaccaagccggcgatccggaggctggctaggaggggcggcgtcaagcgcatctccgggctcatctacgaggagacccgcggtgtgctcaa

SEQ ID NO: 124 - DNA, 226 bp, Zea mays
gcacgagcaagaagtcaaccctgatcaaggctatggaggaagctgatgtgaagacgaatgggaaaacagctcatggggcaagaagctgattgtccagaagaggagggctgcgctcagtgactttgacaggttcaaggtcatgctggcaaggatcaagaggggtggtgctatcaggcaagagctcgccaagctgaagaaggcgtccacggcttaagtcccttttggt

SEQ ID NO: 125 - DNA, 224 bp, Zea mays
gcacgagtcctaggctgcgtggcctccgcttgcaggcttccctcgtatgttcgcgtgtcttgctgtagttaggtgctgctgtgtctggtctcctccggtagcaactgttatctgatggaacagtaacaatgcttattgaatccagctagttgcttatttgtggatcctctctctttgttgttggccacctttatctcgtgatgtttgtgtgcatgtgaatactc

SEQ ID NO: 126 - DNA, 225 bp, Zea mays
gcacgaggacaggttcctcggcgaggacggcgcgcactgctccgccacgtcgtctggtccaacggccccgagacggcgtcgcccacgctgcaagacaagcagtgcgctggcaaggacttcgtcgtgctcatcgctcgcctcctcgtcgccgagttcttcctccgctacgactcctttgacgtccaggtcggcgcctccgcgctggggtcgtcggtgaccatcacc

SEQ ID NO: 127 - DNA, 223 bp, Zea mays
gcacgagggcgggaaaaggctctgcaacgttgtccatggcatatgctggtgctgtttttgcagatgcatgtttgaagggtctgaatggagttccagacattgtagagtgctcttttgtgcaatcaactgtgacagagttgccattctttgcctccaaggttcggctcggcaagaatggagtggaggaagtgcttggtctgggtgagctcaacgagttcgagaa

SEQ ID NO: 128 - DNA, 226 bp, Zea mays
gcacgagggtctgtgaaaacatccccattgtcctctgcggtaataaggttgatgtgaagaacaggcaggtcaaagccaagcaggttactttccacaggaagaagaatctgcagtactatgaaatttctgccaagagcaactacaactttgagaaacctttcctgtaccttgcaaggaagctggctggtgatccgaaccttcactttgttgaagctgttgctcttaa

SEQ ID NO: 129 - DNA, 231 bp, Zea mays
ttgatgtggacattggtgccaatccatccgccgagggtggtgaggacgaaagcgttgatgacacagctgtgaaggtggttgatattgttgacacattccgtctacaggagcaacctccttttgacaagaaatcatttgtgtcttacatcaaaaaatacatcaagaatctcactgctgtgttggagccagagaaagcggatgagttcaaaaagggtgtcgagggtgcaacaa

SEQ ID NO: 130 - DNA, 215 bp, Zea mays
gcacgagctcaagttctcgcgcccagagccaaatttttctccactcaatcactgcagccatggacgccagcggaccggtagcaaggcgaagaacggggcggctgggcgcaaggctggcggccccaggaagaagtcggtgtcgcggtccgtcaaggccgggctgcagttccccgtcggccggatcgggcgctacctcaagaagggccggtacgcgc

SEQ ID NO: 131 - DNA, 224 bp, Zea mays
gcacgagccggacgcggtggcgaaagcttcgtggagcactactaccggacgttcgacaccaaccgcgcggcgctggtggggctgtatcaggagacctccatgctcaccttcgagggccagaagttccagggcccatccgccattgccggcaagctcggatctcttcccttccaggcctgcgagcaccagatcgtcaccgtcgactgccagccgtcggggcccca

SEQ ID NO: 132 - DNA, 183 bp, Zea mays
gcacgaggtatgccgagaataaatgtggatggcgcgtgcctctgggtcgccaggttcatgctgagtctggacatgttttgcacttttgcttcccttcctgctaccatctgtgacagaaccgctcgctaatatgggacctgagattagctttttgctgcttgtggtgaggttgcagttttgttc

SEQ ID NO: 133 - DNA, 241 bp, Zea mays
gcacgagtgctgtggccacaatcaagaccaagcgcaccatccagttcgtggactggtgcccgactggcttcaagtgcggaatcaactaccagcctcccagcgtcgtcccaggcggtgatctggccaaggtgcagcgtgccgtgtgtatgatctccaactccaccagtgttgtggaggtcttctcccgcattgaccacaagttcgacctcatgtacgccaagcgcgccttcgtgcactggta

SEQ ID NO: 134 - DNA, 242 bp, Zea mays
gcacgaagagtttttttttttttttttttttcttaaacagatacgataatattgtaggataagataatggtccacaacacatcctaaccgattacaaagttcaccttgagaaaattgcaaaccaaacaataattccaactcaaacgataacaactaattgtccctcactgctcctcttcgatcacacccttgtcgctcacatagataccatccaaaaacttcctgatatccttcttcttgac

SEQ ID NO: 135 - DNA, 247 bp, Zea mays
ccggcagcggcacagcctacccgggttcagcttgcccggcagcggcagcatgcccctcttcggcggcagctccccgggcttcagcggcttcggcggcatgcccgggtcgcccaccgccggctccgtccccgagcacgccaacaagccctgaacgccaacaagcgtggtagtagagtggtgctactgttactgtagtacgtcgtcgtcttcatgcatgcggggttcgtggtttcccctagctccatac

SEQ ID NO: 136 - DNA, 244 bp, Zea mays
tcgtggtttcccctagctccatacgagcagtagttgggccttgcacgtaccgtacgtctagctagctatatatatatagcttgtgttctactgccttttagtttaattacctgcctgcattggagagttggatctgtttcatttggtggtgtttgctttactattaggtcagtatctgtttgtggagacttggtgtttaatttatttagccgtttgtgactggttgtagctagcggtggtgcgg

SEQ ID NO: 137 - DNA, 240 bp, Zea mays
gcacgaggtcagccacaccgtgccaatctacgaaggttatgcccttcctcatgccatcctgcgtcttgaccttgctgggcgtgacctgactgacagcctgatgaagatcctcaccgagagaggttactccttcaccaccacggccgaacgggaaatcgtacgggacatcaaggaaaagcttgcatacgtggctcttgactatgatcaggagctggagaacgccaagagcagctcatctgt

SEQ ID NO: 138 - DNA, 238 bp, Zea mays
gcacgagccgaggtggcgccaagaagcgcaagaagaagacgtacaccaagcccaagaagatcaagcacaagcacaagaaggtgaagctcgcagtgctgcagttctacaaggtggacgacgccaccggcaaggtgacccgcctccgcaaggagtgccccaacaccgagtgcggtgcgggtgtcttcatggccaaccacttcgaccgccactactgcggcaagtgcggcctcacctacgt

SEQ ID NO: 139 - DNA, 193 bp, Zea mays
gcacgagtgttcttcttcactttgagaatggtattgcagagattgcgagagcacaagttgtatgcaaagttgagcaagtgtgagttctggatcagtgaagtcctgttcttgggtcacataatcaacaaagaaggattggctgtggatccgaagaaagtggcagatattctgaactggaaagcgccaacggatg

SEQ ID NO: 140 - DNA, 241 bp, Zea mays
tggtgaccagcctcaacgccaaccgcccggacgccaagttcatctacgtcgacaactacgccatgatctcccagatcctaagcaacccgtggtcctacgggttcagcgtggccgaccgcggctgctgcggcatcgggaggaaccggggcatgatcacctgcctgcccttcctgcgcccgtgcctcaaccgcaactcctacatcttctgggacgccttccacccgacggagagggtcaacgt

SEQ ID NO: 141 - DNA, 242 bp, Zea mays
caagggcaacatcccggcgttcggcgtggcgtcggggttcgccctcatcggcggcgtcgtgggcgtgttcctgctgcccaagatctccaagcgccagttccgcgccgtcagcacgggcggccactgatcgcagccgccgcgccggagcacggcacggcggcacagcccagccgtgctagagctgtatgttttgaaagttgaaacagaataagaagcgggcgaaacgagaaaaccatgcatgt

SEQ ID NO: 142 - DNA, 222 bp, Zea mays
gcacgagccgaggcgaggaacatcaagaccacgacgacggagaagaaggacgacgcggtggtgcagccgcagaccttcccgcccttcgaccgcctcggcggcggcgcgtccccggcgttcggcggcctccccggcggcagcgttcctggcagcagcattcccgggttcagcatgcccggcagcggcagcagcctacccgggttcagcttgcccggcagcggc

SEQ ID NO: 143 - DNA, 234 bp, Zea mays
gcacgagggtcagactaggttagggtttacctgtgaggcctgctcccctgccgccgccgccatgggacactccaacgtgtggaactcgcaccccaagaactacggccctggatctagggtttgccgtgtgtgcgctaacccccacggcttgatccgaaagtacgggctcatgtgctgcagacagtgcttccgcagcaacgccaaggacattggcttcatcaagtaccgttgaaa

SEQ ID NO: 144 - DNA, 232 bp, Zea mays
gcacgagatgccaggggttgctggaggtatgattcaggcatatgatatgggaggcttccctgtgagagatgctgccttatcaccggccgctcaaattgggactctgacttctgcccttgcaaatgctaatcctgagcagcaaagaacgatacttggtgaaaacctatacccactggttgagcaactggaaccaaaccaagctgcaaaggtcactggaatgcttttggagatg

SEQ ID NO: 145 - DNA, 232 bp, Zea mays
gcacgagctagcatgcgcccttcaattcacacaaactgctgaaggacctatcgtgctccaggtcatgtctaagaaggaaaacattggatctggcatgcagattgctcatttggagttcaggattgtccatccagctccaggcgttccagaggccctgatacaggagatgttccagcacaacccaggggtgtccagggagggcctcggcctgtacataagccagaagctggtg

SEQ ID NO: 146 - DNA, 230 bp, Zea mays
gcacgaggggtaagacacgtggtatgggagctgggcgcaactcaagacccacaggaggaaccagaggtgggctgacaaagcctacaagaagagccatcttggcaacgagtggaagaaaccctttgctggatcatctcacgcaaaggggatcgtcctcgaaaagatcggcatcgaggccaagcagcctaactctgctattcgtaagtgtgctcgtgttcagctggtgaaga

SEQ ID NO: 147 - DNA, 230 bp, Zea mays
gcacgaggataaactggaagctgaagtcaaaaaggaggagaaggaagaaaaacttgatggtgatgctgcattgaacaaattcttccgtgacatctacaaggatgctgatgaagatatgcggagggccatgatgaagtcattcgtggaatcaaatggcactgttctctcaaccaattggaaagatgttggagcaaagaaggtagaagggagcccccctgatggtatggagc

SEQ ID NO: 148 - DNA, 188 bp, Zea mays
tgatgacgacatgggcttcagcctgttcgactgaagagaccccctcacccagccattagcaaatttcacttgtgctgtcaaagactatcttgtcttatgttatgtttctaggcttttgttacaactacccaagttttgagtttttgagatgtggctatggcatgaactcaaaccatcttatgagggtg

SEQ ID NO: 149 - DNA, 228 bp, Zea mays
gcacgagtgctcaaggaccagggtggcctctgccgctggaactacgcgctgcggtccgtccaccgcaccgccaaggccaacgtccgcagcagcctcgccgcgcacggtacaaggagctggccccggcggcggagtcgaagaggcggccgggcaaggccgctctgaggaggggatgatgaccgtcatgtacctcagctgctggggacccaactaggaggactagctagg

SEQ ID NO: 150 - DNA, 228 bp, Zea mays
gcacgagggacgtgaacgctgctgtggccacaatcaagaccaagcgcaccatccagttcgtggactggtgcccgactggcttcaagtgcggaatcaactaccagcctcccagcgtcgtcccaggcggtgatctggccaaggtgcagcgtgccgtgtgtatgatctccaactccaccagtgttgtggaggtcttctcccgcattgaccacaagttcgacctcatgtacg

SEQ ID NO: 151 - DNA, 228 bp, Zea mays
gcacgagtgctagtctacgatgtcactaaagtaatgacatttgagaatgtgaagaggtggttgaaggagctccgggaccatgctgactcgaacatagtcgtaatgctcattggcaacaagactgaccttaggcacctgcgctctgtcgccgttgaggatgctgcaagctttgcagagagcgaaggtttgttcttcatcgagacctctgcgctcgatgcgacaaacgtc

SEQ ID NO: 152 - DNA, 229 bp, Zea mays
gcacgaggggtggcaaggggctcggcaagggcggcgcgaagtccaccggaaggtgctgcgcgacaacatccagggcatcaccaagccggcgatccggcggctggcgaggaggggcggcgtcaagcgcatctcggggctcatctacgaggagacccgcggcgtgctcaagatcttcctcgagaacgtcatccgcgacgccgtcacctacactgagcacgcccgccgcaag

SEQ ID NO: 153 - DNA, 226 bp, Zea mays
gcacgagctcagatctcagtcacctgcgccgccgcttcgttcgtgtcgaggggagaagagaggaaatggcggcgaccgagggcgtgctcctggggatgggcaaccccctcctcgacatctcagccgtcgtcgatgacgccttcctgacaaagtatgacatcaagctgaacaatgctattctcgctgaggagaagcacttgcctatgtatgacgagttggctagcaa

SEQ ID NO: 154 - DNA, 226 bp, Zea mays
gcacgagaccaagaggcagccgttgggccccaagcctgtcttcatggttgaggggactaccatcgagaccgtcactcccatcccgtacgatgtggtcaatgatcttaagggaggatactaggttgtttgtttggtctttctacctgttctacatctgtgttactctagtgcgtacaattttgctcacactgagcagtagtatgaacctattgtgtgttcatgttga

SEQ ID NO: 155 - DNA, 227 bp, Zea mays
gcacgaggatcgctcgacatcaccagattcggcagctactacgagttgcgtgtcgagctcgagcggttatttggtctcgaaggccaactggaggaccctgcaagatcaggctggcagcttgtattcgtcgaccgggaaaacgatgttcttctcctcggcgacgacccgtggcaggagtttgtgaatagcgtagggtgcataaagatcctctcgccgcaagacctgca

SEQ ID NO: 156 - DNA, 225 bp, Zea mays
gcacgagtccccgtcggccggatcgggcgctacctcaagaagggccggtacgcgcagcgttgggcaccggcgcccccgtctatctcgccgccgtgcttgagtacctcgccgccgaggtgctggagctggccggcaacgcggcgaaggacaacaagaagacgcgcatcgtcccgcgccacgtgctcctggcgatccgcaacgacgttgagctcggcaagctgctgg

SEQ ID NO: 157 - DNA, 226 bp, Zea mays
cggatacggtggcgggcgccgtgatggaggcggctaccgcggtggcggtggaggctacggcggtggtcgtggaggctacggcggcggtgggggatacggtggtgcaaaccgcggcggcggctacggcaacaacgacgggaaatctaggaactgagcggtggggtccgctgaggcctagttatcttgttcgcttctgctaccgtgttcaccctagtctagagggggt

SEQ ID NO: 158 - DNA, 221 bp, Zea mays
gcacgaggtcctctccggtcggcgagagcaagaagagatcccgcgccgtcctcttctccacctccacctccacccatggcggcctccaccttcagcggcgacgagacggcgcccttcttcggcttcctcggcgccgcgccgcgctcgtcttctcctgcatgggcgccgcctacgggacggccaagagcggcgtcggcgtcgcctccatgggcgtcatgcgc

SEQ ID NO: 159 - DNA, 222 bp, Zea mays
gcacgagccgaccataatatttggtgctgatgttacccatccacatcctggagaagattccagtccttccattgcagctgtggttgcttcgcaagactggcctgaggtcaccaaatatgctggactagtgagtgcccaagcccatcgccaggagctgatacaggatcttttcaaagtatggcaagatccacagagaaggacagtaactggtggcatgataaa

SEQ ID NO: 160 - DNA, 223 bp, Zea mays
gcacgagctccggcaaggacccgaccaaggtggaccgcagcggggcctacgtcgcgaggcaggctgccaagagcatcgtcgccgccggcctcgcccgccgcgccattgtccaggtctcctacgccatcgggtgcccgagcccctttcggtgttcgtggacacgtacggcaccggcgcgatccccgacaaggagatcctgaagatcgtgaaggagaacttcgac

SEQ ID NO: 161 - DNA, 221 bp, Zea mays
gcacgagcgtcgctgcctgccgcgacggcgtgcagtggtcgctctaccccgacggctccgtacgcccgcccgcgtggctcctccttcaatggcagtgcctggctgctgatgccagcgggggtgtgacggtgaaactctgcgacggggctggatcgtcttgcgagcgctgggtgttccgcaacgacggcaccatcttcaacaccggcaccgggatggtcttg

SEQ ID NO: 162 - DNA, 235 bp, Zea mays
gcacgagctcatgctgccgacttttcgtcgtcttccatccatggtttgcttattagctattgtttgcactcaaagggaaaaaaggatgttatgttttatctcttaggccagactgctttagctacttatttgtgactgctgtgtgtccatggatttatagtgaatctagattagtgggcttgtgctttgtgcatgccgctgctgtctgcccataagctacttatttctattcaga

SEQ ID NO: 163 - DNA, 231 bp, Zea mays
gcacgagggcgcgtgattgggtactcaccagaccagatgtttgctgttgtcgcgtcagtggacctctacgaggactttgtgccatggtgccagcggtccaggattattaggtgccatgaagatggctcatttgatgcagagctcgagattggattcaagttccttgttgaaagttatgtctcccgtgtggagatggagaagcccaggtatatcaagactacagcatctgaa

SEQ ID NO: 164 - DNA, 235 bp, Zea mays
cggcacgagcaattttctgctgaagctgttcgtatgagatgaccgaagttcctcttcgtgaagcttcggaatttataaaccgacataaaagtagaatgaccttttagtccatatatgtttgagtcaccgttgtaattccttatgaggggcataattataattcctcacaggccacgccctgtgcctataaataggtgaacagtacctctgtactgttcacgcaatcttgtaatca

SEQ ID NO: 165 - DNA, 239 bp, Zea mays
ttggactcacaggttgtgacagttggaaagtttcaaggaggtggagccttcaatgtgatccctgattcggtaactataggtggcaccttccgagcctttctgaaagagagttttaatcaattgaagcagcggattgaagaggtgattgtgtctcaagctagcgtgcagcgctgcagcgtgccgtggacttcctcagcaaggaccgtcctttcttcccgccgaccatcaacagccccgag

SEQ ID NO: 166 - DNA, 235 bp, Zea mays
gcacgagcccaagcccaaggccgccccgaagaagcccaagaccggcgctaagaagcccaaggccgctgccaagaccaaagctaagacccccgccaaggcgaagccgccacaaagcccaagcccgccgcgaaccgaaagccgtagtgaagccgaagacacccgccaagcccaaggccaagccagctgccaaggcgaagccaagaccgccggcgctaagccgaagccacttgctaag

SEQ ID NO: 167 - DNA, 234 bp, Zea mays
gcacgaggtcatccctgacgctcttaaggttctgaggctacagcctggacacaagtactgcctcctcggcgagctctctaaggaggtcgggtggaactaccatgacaccatcagggaacttgaggagaagaggaaggagaaggccaaggttgcctacgagaggaagaagcaattggccaagctgcgtgtcaaggccgagaaggcagccgaggagaagttggggtctcagttgga

SEQ ID NO: 168 - DNA, 239 bp, Zea mays
ctgagcctgagatggaagagagaaagctgatgggagtgaaatggatctttctactatcactagcgcttctccaagctgcctactaccgccgcatgaggtggtcagtcttgaagtcccgaaagctggtcctggatgtcgtcaactgaggactatcattacccttttttttattgaaatatgttgagccgttaaggagcattcaaaataatgagttggtggtgtacaattttccactgggg

SEQ ID NO: 169 - DNA, 232 bp, Zea mays
gcacgagatttgatcgaattcccgatggcgcccaaggccgagaagaagcccgcggagaagaagccgacggaggagaaggccgagaagaagcccagggcggagaagcgcgtgccgggcaaggagggcggcgagaagaaggggaagaagaaggccaagaagagcgtcgagacgtacaagatctacatcttcaaggtgctcaagcaggtgcacccggacattggtatctcgtcca

SEQ ID NO: 170 - DNA, 236 bp, Zea mays
ctcaaagagccaagtccatgaagttcaaggatggctacatgatctcatctggtcagccagtgaatgagtacatcgactcagctgtgagacacgtcctcctcagacagggtgttctgggtatcaaggtgaagatcatgcttgactgggacccgaaggcaaggttggcccgatcacccctcttccggacctggtgaccatccataccccgaaggaggaggacgagctgcgccctcctg

SEQ ID NO: 171 - DNA, 230 bp, Zea mays
gcacgaggatcgacaggcggtctggcaaggagcttgagaaggagccaaagttcctgaagaacggtgatgctggtatggtgaagatgataccgaccaagcccatggtggtggagacgttctcagcgtatcctccccttggtaggtttgctgtccgtgacatgaggcagacggttgctgttggagttatcaagagtgtggagaagaaggacccgaccggcgccaaggtgacc

SEQ ID NO: 172 - DNA, 237 bp, Zea mays
ctgcaggtggaggacttctcgccgcagtggtgggacctcatcaccaccactgcctggttccgcgaccactggtcccgcgagcgcgcccacctggacgagatggccgagcagatcgacgcggccggcctcctccccgacgacgaggacctcttctacgacgaccagctcgagcagggccccgtcgccgccgcccttaagacagattcggtgctcaaggcgctgaacatgacctccccg

SEQ ID NO: 173 - DNA, 185 bp, Zea mays
gcacgagctcctccccaagaaggctggctcgtccaaggcttccaccgtcgatgacgatgacaactgaagctgcccactggagaaggcattcgctaccgtcttgtttcctaggtttagcacgcagttagtcgccatgtctttgagagagttcgatgtgtttgggaatgacaatagttcctttcttg

SEQ ID NO: 174 - DNA, 230 bp, Zea mays
gcacgagctaagatgctgtactccacgtcgaaggaccgcatcaagtacgagcttgacgggttccactacgaaatccaggcgaccgacccatcggaggtggacatcgaggttctccgggagcgggctcactgaagctggttctccttttgaagggacctgtggagggccgtgaaccttcagccagatgcaaattcaattatcaacgatgaagctcccgccgtggtgtttgt

SEQ ID NO: 175 - DNA, 227 bp, Zea mays
gcacgagctcgccttccgaggaaactcaccagcccaccacagacccgagcggaagaagccatgtccgggcgcggtaagggtggcaaggggctcggcaagggcggcgcgaacgtcaccggaaggtgctgcgcgacaacatccagggcatcaccaagccggcgatccggcggctggcgaggaggggcggcgtcaagcgcatctcggggctcatctacgaggagacccgc

SEQ ID NO: 176 - DNA, 223 bp, Zea mays
gcacgagcctccgtccgcgtactctcggtttcggcgatgtcggggcgcggcaagggcggcaaggggctgggcaagggcggcgccaagcgccaccgcaaggtgctgcgcgacaacatctagggcatcacgaagccggcgatccgtacgctggccaggaggggcggcgtcaagcgcatttctgggctcatctacgaggagacccgcggcgtgctcaagatcttcc

SEQ ID NO: 177 - DNA, 223 bp, Zea mays
gcacgaggtcgcagggagccacgccgacaacctggggtaccagtgcggcgggtggacgatcgagtggcagggcgacacggggcgcaccaccgtcggcaccacggtcctggacgccgtgaaggcggccgtggacccgtcgacggaggtggtgttcgcggagagccccgacgccgagttcgtcaggagcggcggcttctcgtacgcgatcgtggccgtgcgcgag

SEQ ID NO: 178 - DNA, 226 bp, Zea mays
gcacgaggcgcgcgacaacaagaacaaccgcatcgtgccgcgtcacatccagctcgccgtgcgcaacgacgaggaactcagcaagctgctcggagctgtcaccatcgccgccggaggtgtgttgcccaacattcatcagacgctgctgcccaagaaggccggtgggaagggcaaggccgacatcggttccgcatcccaggagttctaagcggccgcggcggcggtt

SEQ ID NO: 179 - DNA, 197 bp, Zea mays
gcacgaggcgtcgtctggtgccctctggtgtacctctatatggatgtcgtcgtctaataaacatctgtggtttgtgtgtcatgaatcgtggttgtggcttcgttggtttaatggacctgttgtgtcctctgtgttgtacccaaaactcttctgcagcagtatggcttgaatccttatgaagtttgatatttgaactt

SEQ ID NO: 180 - DNA, 224 bp, Zea mays
gcacgagggcagagaaatttgtggtgaaggtagtttcccttgctatggcccgtgatggtgctagcggaggggttgtccgtacagttacaataaatgcggatggcgtgaagaggaacttctaccctggcgacaagctacccctgtggcacgacgagctggagccccagaactcgttgcttgatattcttgctgccgggaaccctgatcccatggtgcagtgaatt

SEQ ID NO: 181 - DNA, 225 bp, Zea mays
gcacgagaagcgcacagccgccgcagcacatcgctctctcgatctcagtcatggcggaggtggagcagcaacaggacacgccgaagctcttcaaccgctggaccttcgatgatgtccaggtgaacgacatctcgctgaacgactacctcgctgtgaacgcgacgaagcacgcgatgtacctgccgcacaccgcgggacgttactccaagaagcggttccgcaagg

SEQ ID NO: 182 - DNA, 231 bp, Zea mays
gcacgagcactgatctgctctgttgctggtgactaggagcagtagcgagagggattctggatggccaagtcgaagaaccacacggcgcataaccagtcgttcaaggcgcacaagaacggcatcaagaagcccaagcgccaccgccagacctccaccaaggggatggacccgaagtttctgaggaacttgaggtactcaaggaagggcaacaagaagagtggcgaggctgag

SEQ ID NO: 183 - DNA, 230 bp, Zea mays
gcacgaggacccacggcacggcaagtacatggcttgctgcctgatgtaccgcggcgacgtggtgcccaaggacgtgaacgccgcggtggccaccatcaagacgaagcgcaccatccagttcgtggactggtgcccgacggggttcaagtgcggcatcaactaccaggcgccgacagtggtgccgggtgccgacctcgccaaggtgcagcgcgcggtgtgcatgatctcca

SEQ ID NO: 184 - DNA, 198 bp, Zea mays
gcacgagggtggaagtaggcctaaccttattttgtttagagacgggctatgcgttcgatgtagcaaaacaaggctgtggtttgtgtacttcaatatttgggttgtgtgtttcgaatttttttttgaacgtgtctcggattgttgtggtgcgaattggttgtttctgtcgctatggtgagatagtgtcacgtttctttc

SEQ ID NO: 185 - DNA, 238 bp, Zea mays
cgctgggggagcagcagcgtctcgcgttcgcccggctgttacttgctacacccactttggtcctgctggacgagtcgacaagcgcactcgatgaagcaaacgaggctcatctatacagtcagattgaagctgccggcattacctacgtaagcatcggccaccggaaaacacttcacaagttccacaacaaggcgctgtacatttccatgtctgattcgacggacaccaatccacgcaa

SEQ ID NO: 186 - DNA, 231 bp, Zea mays
gcacgaggaagaacccactcaagaacatggctgctgtgctcaaactcaacccctacctcggcactgcccggaagatggccacccttgctgaggctgctcgtgtgaaggccaggaaggcgaactcgactccaagaggaccaagcttaccccggagactgccaaggttaaggctgctggcaaggcatggtacaagaccatggtctcggacagcgactacaccgagtttgagaa

SEQ ID NO: 187 - DNA, 186 bp, Zea mays
gcacgatctcggcttgacctcgccttgcgttgcgccgttgcctgggtcgcggatgcgtcggagccccgagtcgaataatagaggcagcatcctgtcttgcatttgctgctgcgccatgtgttaacagcctgtgtaataaacactgttgctttcgtgtgtgttcattgccttttggttggtctttgc

SEQ ID NO: 188 - DNA, 225 bp, Zea mays
gcacgaggagagcctccacgtcaaggactacaagtactgagttgcttctctttgcgtgcccgttttggaactcctgcctacgagctaggttgcggagtgtggtttgctcgttagacttattttcggacatccaaaaaacatgcttcctatgtgggatgatggttatctttatatttgtatgttaattagtctctttgctgttaaatttcgtgtaagttggtcctg

SEQ ID NO: 189 - DNA, 226 bp, Zea mays
gcacgaggtacctcgccgccgaggttctggagttggcagggaacgcggcgaaagacaacaagaagacgcgcatcatcccgcgccacgtgctcctggcgatccgcaacgacgaggagctcgggaagctgctggccggcgtcaccatcgcgcacggcggcgtcctccccaacatccactccgtgctcctgcccaagaaggcggcggagaaggcggccagcggcggcag

SEQ ID NO: 190 - DNA, 229 bp, Zea mays
gcacgaggaagcctaccatcacctcccgtgagatccagacctccgtgcgcctcgtccttcccggggagctcgccaagcacgccgtctccgagggcacccaggccgccaccaagttcacctcggcctaggctgcgcggccgccgcttgcaggattctctcctgtgttcacgtctcttgctgtagttaggtgctgctgcctgctggcttctatgtatgttatctatttgtc

SEQ ID NO: 191 - DNA, 228 bp, Zea mays
gcacgaggatgatcaagggatgctgtgtgggtccaaagaagagggtggtgaccctccgccagtccctcctgaagcagacttcccggctggcgctggaggagatcaagctcaagttcattgacacatcgtccaaatttgggcacggtcgcttccagactaccgatgagaagcagaggttctttggtaagctcaaggcgtaaggagctgcggtgcagcgaaagtcccatt

SEQ ID NO: 192 - DNA, 230 bp, Zea mays
gcacgaggaggagcaaggatgttgtcaagttcaaggtgcgctgctccaagtacttgtacacgctctgcgtcttcgatgctgagaaggcaaacaagttgaagcaatctcttcccccaggtttgaccgtcgaggaggtctgattggatacatggcaacgccgggttgaactacccaagcttctttatcagtagcagagcatgctactcatgtacttttggaacctaagctat

SEQ ID NO: 193 - DNA, 223 bp, Zea mays
gcacgagggaacattgagcaacatgcctctgataatgtcaacaaaattttggtgggcaacaaggccgatatggacgaaagcaagagggctgtacctactgcgaaaggacaagcacttgctgatgagtatgggatcaagttttttgaaacgagtgccaagacaaacctgaacgtggagcaagtgttcttctccatcgcacgtgacatcaagcagaggcttgcag

SEQ ID NO: 194 - DNA, 223 bp, Zea mays
gcacgagaacaagcgtggtagtagagtggtgctactgttactgtagtacgtcgtcgtcttcatgcatgcgtggttcgtggtttcccctagctccatacgagcagtagttgggccttgcacgtaccgtacgtctagctagctatatatatatagcttgtgttctactgccttttagtttaattacctgcctgcattggagagttggatctgtttcatttggtgg

SEQ ID NO: 195 - DNA, 226 bp, Zea mays
gcacgaggaaagtatccgctattctttcatgggaaaacacaaagaaagcaaacatagaagctgaactgaagaagattgaggaacaactggaaaagaagaaggctgaatatgcagagaagatgaagaacaaggttgcaatgatacacaaggaagccgaagagaagcgagcgatggtggaggcaaaacgcggtgaggaagtcctgaaggccgaggagatggctgccaa

SEQ ID NO: 196 - DNA, 223 bp, Zea mays
gcacgaggcaccatccaaggggcacgccgagggcgggttcgaggcggccgccggagctgagaacggcgggtgcaagtgcggcggcaactgccagtgcgacccctgcaactgcggcaagtgagctaggtgctccaccctgcaggccggccggaggaagctagctaattataaagcttaataaagtatagcggcgtcgctgtgtgtgtttcgagtcagtcagtca

SEQ ID NO: 197 - DNA, 228 bp, Zea mays
cgaggtcgagagagagaggatgtcgtgctgcggaggcaactgtgggtgcggctccggctgcaagtgcggcaacggctgcggagggtgcagcaagatgtacccggacatggctgagcaggtgaccaccaccacccaggctctcatcatgggtgtcgcaccatccaaggggcacgccgagggcgggttcgaggcggccgccggagctgagaacggcgggtgcaagtgcgg

SEQ ID NO: 198 - DNA, 224 bp, Zea mays
gcacgagccggcgcgccggaccccagcgcggactgctgcagcgcgctgagcgccgtgtcgcacgagtgcgcctgcagcaccatgggcatcatcaacagcctgcccggccggtgccacctcgcccaagccaactgctccgcttgaagcagggacctggcacgcgtgctgcaatggatggccggcggggagaggcataagaagtgtttccatttcacagtgagagc

SEQ ID NO: 199 - DNA, 224 bp, Zea mays
gcacgaggcggcactaggtgtgcactcttcagtacaggaagctggacttcgaagagttcgccgcttccgccatcagcgtttaccagatggaagccttggagacgtgggagccgcacgcgcggcgtgcgtacgagctgttcgacaaggaaggaaaccggcccatcgtgatcgaagagcttgcatcggaactcgggcttggcccgtcggtgcctctccacgttgtc

SEQ ID NO: 200 - DNA, 231 bp, Zea mays
tgagcatcgatgaggacgagcctgtcgaggcagacgctgagatgcctcagcttgaggacgacgctggtgaaagcaagatggaggaggtcgactaagtgtcgcatcgcatgcttgccgtttatcttatccctagctaagctacctgtgatagcttaattttcactattgttcgaggactttggcacgttatcggttgtcctgctggccaggctataagtctggtttatctgt

SEQ ID NO: 201 - DNA, 226 bp, Zea mays
gcacgagcaagagccggcgctgttcgcgacgacgatctacgacaacatcctgtatggcaaggacggggccacggaggccgaggtcgtcgaggcggccaagctggcgaacgcgcactcgttcatcagctcgctgccggaggggtacaagaccaaggtcggggagcgtggcgtgcagctgtcgggcgggcagaagcagcgcatcgcgatcgcgcgcgccatcgtgaag

SEQ ID NO: 202 - DNA, 230 bp, Zea mays
tcatgatccacatgtcattgcaactgtggccaaacttttctggcttgacaggaaggttgataaggctaggagttggttaaacagggctgttactcttgctcctgatattggtgatttttgggcattgtactacaaatttgaacttcagcatggaaatgtggacacacaaaaggatgttctgaaaagatgtgttgcagcagaaccaaagcatggcgaaaaatggcaagcaa

SEQ ID NO: 203 - DNA, 221 bp, Zea mays
gcacgaggctgacctgggcaggattatcaactctgacgaggtgcagtctgtggttaagccactcaacaaggaggtgaagcgcagggagaagaggaagaacccgctcaagaacatggctgctgtgctcaagctgaacccctacctcggcactgcccggaagatggccacccttgctgaggctgcccgagtcaaggcccggaaggagaagcttgattccaaga

SEQ ID NO: 204 - DNA, 221 bp, Zea mays
gcacgagggcatctcctccaaggccatgtccatcatgaactccttcatcaacgacatcttcgagacgctcgccgcggaggccgccaagctcgcccggtacaacaagaagcccaccatcacctcccgcgagatccagacctccgtccgcctcgtcctccccggcgagctcgccaagcacgccgtctcggagggtaccaaggccgtcaccaagttcacctcgt

SEQ ID NO: 205 - DNA, 220 bp, Zea mays
gcacgagtagaagacgccctcgggaaattcaacgagggtccattctcccttggtcagttcagtctggtggacattgcgtatgtaccattcatcgagaggtttcagatattctattccaacataaagaactatgatattacaaagggcagacccaaccttcagaagttcattgaggaagtggacaagattgatgcatacacacagactaaacaggacccac

SEQ ID NO: 206 - DNA, 220 bp, Zea mays
gcacgaggggctctgcaacattgtccatggcatatgctggtgctgtttttgcagatgcatgcttgaagggtctgaatggagttccggacattgtagagtgctcttttgtgcaatcaactgtgacagagttgccgttctttgcctccaaggttcggctcggcaagaatggagtggaggaagtgcttggtctgggtgagctcaacgacttcgagaagaaggg

SEQ ID NO: 207 - DNA, 224 bp, Zea mays
tcggcacgagggtggatgctgttgacaaggcacgttttgccgagtcgaagaaggagcttgatgcgcttcttgcagatgactcccttgcaaacgttcctttcctcatactgggcaacaagattgacatcccatacgcggcttcagaggaggagctgaggtactacctcggcctgagcaacttcacaaccgggaagggcaacgtgaacttggccgactccaatgtc

SEQ ID NO: 208 - DNA, 223 bp, Zea mays
gcacgagcttcctcgagttctcctcaaccaaattcaaagtcacagcggcgaaactctcggcgatgtctggccgcggcacgcgcgggaagggtctgggcaagggcggcgccaagcgccaccgcaaggtgctgcgtgacaacatccagggcatcaccaagccggcgatccgccagttggcgaggaggggcggcgtcaagcgcatctccgggctcatctacgagga

SEQ ID NO: 209 - DNA, 223 bp, Zea mays
gcacgagatcgctttgagatgaggattcacaagagggtgatcgatctcgtcagtacaccagacgttgtcaagcagatcacctcaatcaccattgaaccaggtgtcgaggttgaggtgactatcagtgacgcttaatatggtagccttatcatttcaaaaggcttctagtgaacaggatattttcaattcctagtgagaacttgtgtaacagaggaatccaagt

SEQ ID NO: 210 - DNA, 222 bp, Zea mays
gcacgagctgccttcctgcctgcttccctccctccgtcagatccccgctcgggttgccatggcggaccagctcaccgacgaacagatcgccgagttcaaggaggccttcagcctcttcgacaaggacggcgacggctgcatcaccaccaaggaacttggcactgtgatgcgctcattggggcagaaccctactgaggctgagcttcaggacatgatcaatga

SEQ ID NO: 211 - DNA, 221 bp, Zea mays
gcacgagctgagggttcttaactcctactgggtgaatgaggatagtacctacaagtacttcgagatcatccttgtggacgttgcccacaaagccatcaaaaccgacccgaggatcaactggctatgcaaccctgtgcacaagcaccgcgagctccgtggcctcacctcagcaggcaagaagtaccgtggcctgcggggcaagggccacactcaccacaaga

SEQ ID NO: 212 - DNA, 217 bp, Zea mays
gcacgagctcgagttttttttttttttttttaaacgggaatttcagttctcatagcattatcatgaatctcagaacataacaggtgaaacacgaatcaagcagaggcgccatggggttcacagatccacacctaaaccgctaaattaaactgcgagcgatacatgataaactaagaccaccactcagatcaccaccatcttattcagatccaaagga

SEQ ID NO: 213 - DNA, 217 bp, Zea mays
gcacgaggaacgatcgaccttggcgacgcagaggatgtcagggaagtctcgggaacatacggcgcatttgaaggtgccattacgctgacctcgctcaggctcgtcaccagcagcagaacctggggcccctggggggtcgagaacgggacgcgtttctccatcacggcgcccaacggcagcagcatcgcgggattctatgcgcgggcgggaaccaggc

SEQ ID NO: 214 - DNA, 218 bp, Zea mays
gcacgagcttggagatatggagtcaaccttgttactcaggcttgttcatgtggacagtgggatgtaactggaaaaccatgcactcatgccatagcattcataacttctcaacgaaatttgagaatcgaggactatgttggagaatgttattcggttcaaaggtttaaagatgcataccaatttgaggtgtatccaatgggagacaggttacagtggcc

SEQ ID NO: 215 - DNA, 218 bp, Zea mays
gcacgaggtgagtctgtcggacagctggtttcatacttcaagataccactcaatcaattagttgtgatctacgatgatcttgatctaccctttgcgaaattgcgtctgctaccaaaggggggacatggtggccacaatgggatgaggagtattgttgaccatttgaatcagagccgtgattttggacgcctaaggattggtattggtactacaattat

SEQ ID NO: 216 - DNA, 216 bp, Zea mays
gcacgaggccgaaccctctacggcttcggaggctaggctggatgcctcttctccttgctgtcgtggatgcctgtttgttgttagggttacttcgtttagttccttgtctgtgacgtgttggactattgttagtagtattcttgaagttgtgtttcgaatgtaatccaatcttatcgttcgagaaaaaaaaaaaaaaaaaaactcgagggggggccc

SEQ ID NO: 217 - DNA, 223 bp, Zea mays
gcacgaggaccggcggcgtgaagaagccgcaccgcttccgcccgggcaccgtggcgctgcgcgagatccgcaagtaccagaagagcacggagctgctcatccgcaagctgcccttccagcgcctggtccgcgagatcgcgcaggacttcaagaccgacctccgcttccagtcctccgccgtcgccgcgctgcaggatgtcgccgaggcttacctcgtcggcct

SEQ ID NO: 218 - DNA, 229 bp, Zea mays
ttggtgacgattatcatcttttgatttgggacctgcggtctcccgcccctactaaacctgttcagtcagtggtggcgcaccagggtgaggtgaactgcctggcttttaacccgttcaatgaatgggttgttgcaactggttctactgacaagactgtcaaattatttgatcttaggaagattgatacttctctgcacacctttgactgtcacaaagaggaagtttttca

SEQ ID NO: 219 - DNA, 223 bp, Zea mays
gcacgaggtgggtggtccggcccaacctcatccgcggcttcgagtcgggcgcgctgcccgacggcgtggaggaccgggtgcgcggccgcggcgtcgtcgtcagctgggcgccgcagaggaggtgctcgcgcacccggccgtgggcggcttcttcacccactgcggctggaactccaccgtggaggccgtgtcggagggcgtgcccatgatctgccacccgcgc

SEQ ID NO: 220 - DNA, 225 bp, Zea mays
gcacgaggggagttatgaccatgcaagtgggtgaagttgctcgtatccagtgcacgcctgattatgcttatggagccggcgggttcccagcctggggaattcaaccaaactcagtgcttgtgttcgagattgaagtcctcagtgcccagtaattcgcatctgtcagctatggaaacgttggccatgcttctcaagtaatgaaataattccgttgtcacctcatgc

SEQ ID NO: 221 - DNA, 226 bp, Zea mays
gcacgagaggtggtcgaggtggagagccttattcaggtggcactcctctgcacgcagggctcccccctggaccgtccaaagatgtcggaggtggtgaggatgctcgaaggtgacgggctggcagagcgttgggacgaatggcagaaagtagaggtggtgaggcaggaggctgagtcggcaccgctccgcaatgactggatcgtcgattccacgtacaaccttcgtg

SEQ ID NO: 222 - DNA, 228 bp, Zea mays
gcacgaggcttcaagtgcggcgaggagggccacatggcaagggactgctcccagggcggcggctacggatggggaggcggcggcggccgcggcagcagtgctacaactgcggccaggagggccacatctcccgcgactgccccaacaaaaggcgttaggcgcggcgccaccgtcgcgtcggatccggcggagtcccatgtcgcctctcgccgcttccctacccctcca

SEQ ID NO: 223 - DNA, 234 bp, Zea mays
ctggtgtgtgagatcgcccaggacttcaagaccgaccttcgcttccagagctccgccgtcgccgcgctgcaggaggcgtccgaggcctacctcgtcggtctcttcgaggacaccaacctctgcgccattcacgccaagcgcgtcaccatcatgcccaaggacatccagctcgcccgccgtatccgtgtggagagggcctaggcgtcgtggcggtggaggtcgaagtagtagtcg

SEQ ID NO: 224 - DNA, 229 bp, Zea mays
gaactatgggaagtagcgaagttgcacaactgcgaatcttcgtacccatcagatctctttgacgtcaaatttcctttgtgctcggtggatctaagggaatggtgtgcagccaacacacgcaggccagatttactcgagatgatacctgactcctttttcaatcttgtggagaagtgtttggccgtcaaccccaggtgcaggctctcatcagaggacgcgctcatgcacg

SEQ ID NO: 225 - DNA, 220 bp, Zea mays
gcacgaggtttcagatacataaggcctacggcagcacgaaccatctgccttcagctcatacttgctttaaccaactagacttgcctgagtacacatccaaagagcagctccaggagcggttactattggcaatccacgaagcaaatgaaggtttcggatttggctaatcagttatactcgtttgtccgtgccctgagaactgcaataggcgagcagcacg

SEQ ID NO: 226 - DNA, 219 bp, Zea mays
gcacgatgtcgttcctcgacgaggcgcaggtcggtgccgggtacgcgctcacctgcgtcgcgtacccgacgtccgactgcgtcatccagacgcacagggaggaagacttgtactagaccgggctggtccccgtgcatggatcaaccttgcacttccattcagattcgatctttgagctattgacactgtccttggcacactcgttgcggttgcagcttg

SEQ ID NO: 227 - DNA, 221 bp, Zea mays
gcacgaggctatctctgagttagacagccttggtgaggagtcatacaaggatagcactctgatcatgcaactcctgagggataacttgaccctttggacatccgacctcacggaggatggtgctgatgagggcaaagatgccccgaaaggtgatgcaggcgagggacagtaatcttcggagggggtgcaaagttgttcgagccccaatgttttagatgctc

SEQ ID NO: 228 - DNA, 228 bp, Zea mays
ctcaaccaaattcaaagtcacagcggcgaaactctcggcgatgtctggccgcggcaagggcgggaagggtctgggcaagggcggcgccaagcgccaccgcaaggtgctgcgtgacaacatccagggcatcaccaagccggcgatccgcaggttggcgaggaggggcggcgtcaagcgcatctccggtctcatctacgaggagacccgcggcgtgctcaagatcttcct

SEQ ID NO: 229 - DNA, 223 bp, Zea mays
gcacgaggagacgtacaagatctacatcttcaaggtgctgaagcaggtgcacccggacatcggcatctcgtccaaggccatgtccatcatgaactccttcatcaacgacatcttcgagaagctggccggcgaggccgccaagctcgcgcgctacaacaagaagcccaccatcacgtcccgcgagatccagacctccgtgcgcctcgtgctccccggcgagctc

SEQ ID NO: 230 - DNA, 225 bp, Zea mays
gcacgatgagaggagaggttgggtctgggacaccatggctccgatgaagctgtacggggcggtgatgtcgtggaacgtgacgaggtgcgcaacggcgctggaggaggctggctccgactacgagatcgtgcccatcaacttcgccaccgccgagcacaagagccccgagcacctcgtccgcaacccgtttggtcaggttccagctctgcaggatggtgacttgta

SEQ ID NO: 231 - DNA, 214 bp, Zea mays
gcacgaggtctgatagggtgctcgggactgagaagtggttcaacggaaccaagggcttcggtttcatcacccccgacgacggtagcgaggacctattcgtccaccagtcctccatcaagtccgacggctaccgcagtcttaacgacggcgatgccgtcgaatacaccgtcggcagcggcaacgacggccgcgccaaggccctcgatgtcaccgc

SEQ ID NO: 232 - DNA, 230 bp, Zea mays
gcacgagcacgggcccatccacttccgcgcccccgccaagatcctgtggcgcaccatccgcgggatgattccgcacaagaccaagaggggggaggcggctctggcgaggctcaagacgtacgagggcgtcccgccgccgtacgacaagaccaagcgtatggtcatccctgacgctcttaaggttctgaggctacagcctggacacaagtactgcctcctcggcgagctct

SEQ ID NO: 233 - DNA, 229 bp, Zea mays
gcacgagcccccgtctacctcgccgccgtcctggagtacctcgccgccgaggttctggagttggcagggaacgcggcgaaagacaacaagaagacgcgcatcatcccgcgccacgtgctcctggcgatccgcaacgacgaggagctcgggaagctgctggccggcgtcaccatcgcgcacggcggcgtcctccccaacatccactccgtgctcctgcccaagaaggcgg

SEQ ID NO: 234 - DNA, 230 bp, Zea mays
gcacgagcaaccttgactggtacaagggcccaaccctacttgaggctctggacttgatcaatgagccaaagaggccttcagacaagcccctgcgtctcccccttcaggatgtgtacaagattggtggtattggaactgtccctgttggacgtgttgagactggtgtcattaagcctggtatggttgttacttttgggcctactggtcttactactgaggttaagtccgtt

SEQ ID NO: 235 - DNA, 230 bp, Zea mays
gcacgaggagcagttcactgccatgttcaggaggaaggccttcttgcattggtacacgggtgagggcatggatgagatggagttcactgaggcagagagtaacatgaatgacctggtggccgagtaccagcagtaccaagacgccacagctgaggatgaggagtacgaggaggaagaagaggaagatcctgctgcctaagccatcatcccaagtgcttggtaaagatatg

SEQ ID NO: 236 - DNA, 230 bp, Zea mays
gcacgaggccggtacgcgcagcagtcggcacgggcgcccccgtctacctggccgccgtcctcgagtacctggtcgccgaggtgctggagctggccggcaacgctgccaaggacaacaagaagacccgcatcatcccgcgccacgtgctccttgccatccgcaacgacgaggagctcggcaagctgctgtccggcgtcaccatcgcccacggcggcgtcctccccaacatc

SEQ ID NO: 237 - DNA, 231 bp, Zea mays
gcacgagccaaggccgggattgccctgaacgaccacttcatcaagctcgtctcttggtacgacaacgagtggggctacagcaaccgcgtcgtcgacctgatccgccacatgttcaagacccagtagagagagatatttctgcctccctatcgtgggtcgtccccaatggcctttggtcgcagacatgctttgctgcttgtctatgctgagaataaatgtgaacggtgcccc

SEQ ID NO: 238 - DNA, 225 bp, Zea mays
gcacgaggagaagagaaagtctcgagttttttttttttttttttttgatcaagaaaacaataacgccaaacttaataacccagtagcaaagcgggggaataaagtcttacaacgtaagttgtaaaccacacaacgacagatagataagaaccgacagaaacataacacgataggagccactcagggcagatcacaggatagcagtggcacacaagcccgacgaag

SEQ ID NO: 239 - DNA, 205 bp, Zea mays
gcacgaggtggttccccgagggccctgctgattggcagagcagccagcacccctggatctacgagaagtaaacatggaaagtttcacatcaaaccttgagagccagaggaagcatgtcaccatttgtgctttagcaatgttttcgaaaagattatgatctgtatcttggaaccttatttcaatggaccaaatttctttctttgcc

SEQ ID NO: 240 - DNA, 225 bp, Zea mays
gcacgaggggaaatctgggaaggatggctggtatcctcctggtcatggtgatgtgtttccttctttgaataacagcggaaaacttgacatcttattggctcagggcaaggagtatgtctttgttgcaaactcagacaacttgggtgctatagtcgacatcaagatcctaaaccatctgatcaataaccagaacgagtactgcatggaggttactccaaagacgct

SEQ ID NO: 241 - DNA, 225 bp, Zea mays
gcacgaggtgaagaggatcaggaacgagaccagcaacccgcttgagacgaaggatgagcttgggctgcttcatccagcattcaaggctgtgaagacttccacatgataattagagtacagttccacttgtttattttgttggctcgttctagatcctgttgggtctataatccaaagtgttcttttttgtagaatcgggtgacgacagaagtttgggttggggtc

SEQ ID NO: 242 - DNA, 220 bp, Zea mays
gcacgagaaagaccaagcgtgaacgcaaaacaacaaaatacatgacgaatacgaacgtgcgcgcatcctgggtacacgagccttgcagataagcatgaatgctccagtcatggttgagcttgagggtgaaactgaccctcttgagattgcaatgaaggagctgagagcgcgcaagatacccttcacgatcagacggtacttacctgatggaagctatgaa

SEQ ID NO: 243 - DNA, 219 bp, Zea mays
gcacgaggtaccacccagacgtgtcccctccgggcgccgcggccgagaacacgcgccgcttcatcgaggtgcaggaggcctacgagacgctctccgacccaagccgccgcgccagctacgaccgtgcactcgcccgcggcgtctgctcgctcgccttctccgggcgccgttcccaatcccaccacgcctactaccattaccaggaacaggaagagggat

SEQ ID NO: 244 - DNA, 219 bp, Zea mays
gcacgaggcccaaatggttgtccaagttgaggctgtccgggtgcaaaaggagcttgcagcgactgagattgatggttattgtgaaggcgaactaatcaaggttacactttctggaaaccagcaacctattagagttgaaatcacagaagctgcgatggagttgggtgctgaaaaactttccgggttggtcaacgatgcttacaaggatgcacaccaacg

SEQ ID NO: 245 - DNA, 224 bp, Zea mays
gcacgagagaagacgcgcatcatcccgcgccacgtgctcctggcgatccgcaacgacgaggagctcgggaagctgctggccggcgtcaccatcgcgcacggcggcgtcctccccaacatccactccgtgctcctgcccaagaaggcggcggagaaggcggccagcggcggcagcaaggagcccaagtcccccaagaagggcgccaagtcccccaagaaggctta

SEQ ID NO: 246 - DNA, 223 bp, Zea mays
gcacgaggttcggcacccgccgcaccatggccgccatccgcaccgccatctcccacgtccagaacctcatcaagggggtcaccaagggctaccgctacaagatgaggtttgtctacgcccatttccccatcaacgcgtccatcaccaactccaacaccgccatcgagataaggaacttcctcggcgagaagaaggtcagaaaggtggacatgcttgacggcgt

SEQ ID NO: 247 - DNA, 234 bp, Zea mays
gcacgagccgccccatcccctactggatccgcatgcgcactgacaataccatcaggtacaacgccaagcgcaggcactggcgccgcaccaagctcggcttctgagcgtcgggattggccggctgctgcgtcggaaggctagggtctaagagctatcttccttctgttttatcaatgtgtcagtttttctgtaagctagcaagtgttgctatgacgcttttattaagattctggt

SEQ ID NO: 248 - DNA, 231 bp, Zea mays
gcacgaggaaaatctcccaggttgcatgcggatggaggcatactctggccctctccgagaagaaaaatgtcttctcctgggggaggggcactagcggacagctcggcaacggtgaaatagtcgacaggaacacgcctgtgctgatcgatgccctgagctcagacggttctgcctgcaagaagctggagtcatccacggcagccccattcgcagccaaagtttgggtgtcgc

SEQ ID NO: 249 - DNA, 242 bp, Zea mays
ttcgtccccagcctaaatccccgcaacgatggctcgcacgaagcagacggcgcgcaagtccacgggcggcaaggccccgaggaagcagctggcgaccaaggcggcgcgcaagtcggcccctgcgaccggcggcgtgaagaagccgcaccgcttccgcccgggcaccgtggcgctgcgcgagatccgcaagtaccagaagagcacggagctgctcatccgcaagctgcccttccagcgcctgg

SEQ ID NO: 250 - DNA, 241 bp, Zea mays
cttcatacctgtagatcatggagagggactccaagtactgcattatgaagtcgggcagaagtatgagcctcactttgattattttcttgatgagtttaacaccaagaatggtggtcagaggatggctactcttctgatgtatctatcagatgttgaagaagggggcgagactattttccctgatgcaaatgtgaacgtcagttctttaccatggtacaatgagctttcagagtgtgccaag

SEQ ID NO: 251 - DNA, 233 bp, Zea mays
gcacgaggttatgcttgtcatatcgtggcatatgaaagcttccactatgtgtgaattcactcgccaggagttcattggtggactgcagtcaataggagtggattcaatagagaagcttcaggcgaagttaccttcattgcgagctgagcttaaagatgatcagaagttccatgaaatatacaactttgcatttgcctgggcaagggagaagggccagaaatctctcgcattgg

SEQ ID NO: 252 - DNA, 232 bp, Zea mays
gcacgagctgaagaaggccagggacccgaagtacccaagaatcagcactactggaagaaacaagcttgatcagtaccaaattctcaagtaccccctcaccacagaatctgcaatgaagaagattgaagataacaacactctggtctttattgttgacctcaaggcagacaagaaaaagatcaaggctgcggtcaagaagatgtatgacattcaagcaaagaaggtcaacacc

SEQ ID NO: 253 - DNA, 230 bp, Zea mays
gcacgagctggaatcttgggagtcaatcttggcaagaacaagactagtgaagatgctgctgctgattatgtgcaaggggttcatacattgtcacaatatgctgattacttggtcataaatatttcttccccaaatactcctggtcttcgcaaattacaaggtagaaaacaactgaaagatcttgtgaagaaggtgcaagctgcacgggatgagatgcagtgggctgaaga

SEQ ID NO: 254 - DNA, 230 bp, Zea mays
gcacgatggggaaggagcagctgctggtgatcgagggcatcgagtacgacccccaggcgaacaataagttcgacgtcgccatcaacctgcccgcggacaaagcgttgcaggtaggcccacagtacaaggagtacgccggaagcttcgccgtcgtgccgggctccggcgccgggaagacgcggaaagtgaagctctccctgtgcattaccgaagtgctgttcgatatcgac

SEQ ID NO: 255 - DNA, 232 bp, Zea mays
gcacgagcaaaggtccagcgtgccgtgtgcatgatcagcaacaacaccgccgttgccgaggtgttctcacgcatcgaccacaagtttgaccttatgtacgccaagcgtgcattcgttcactggtatgtcggtgagggtatggaagagggtgagttctcagaagcccgtgaggacttggctgctcttgagaaggactatgaggaagtcggtgcagagggtgccgatgatgagg

SEQ ID NO: 256 - DNA, 230 bp, Zea mays
gcacgagagaaggcggtgtacctgcacccggcggtgctggaggcgtcggtcgtggcccgcgccgacgagcggtggggggagtcgccgtgcgcgttcgtgacgctcaaggacgccgtggaccgctccgacgaggcggcgctggcgcgggacatcatgcggttctgccgcgagaagctgcccggttactgggtgcccaagtccgtggtgttcgggccgctgcccaagacagc

SEQ ID NO: 257 - DNA, 229 bp, Zea mays
gcacgaggaaaggggaagcccgccgccgccccggcccccagcaaccagcagatcgggacctctgttctgcgcaatccatccatggcggaggaatcaggccgtcccttgccaaagtttggtgaatgggatgtcaacgatccggcttccgcagacggatttactgtcatattcaacaaagccagagatgagaagaagggtgggaatggtcaagacacagactcaccttcca

SEQ ID NO: 258 - DNA, 225 bp, Zea mays
gcacgagcctgaacaaggttggtggattcctgcagcggatggacctgtgccgcaagtacgcctttgggaagatgctcgtgataggctctgagccacccttcaagctgaagggcctttggctcttccgtggccaggatgttcccaagtttgtaatggacgaggtctatgacatggagctctacgagtggaccaaggtggacatctctgatgaggcccagaaggagc

SEQ ID NO: 259 - DNA, 226 bp, Zea mays
gcacgagagagcctgacacaatggcaaaatgcactgttgatggcaatctcatcacagcagcgacttataattctcatcccgaattcatcagcctatttgtcaaagcactcggaggttcagtggcaggctcagataagagaatactgttcctatgtggggactacatggaggattatgaggtcatggtcccattccaggctctccaagctcttggctgccatgtcga

SEQ ID NO: 260 - DNA, 229 bp, Zea mays
ctccaaggtcacgaggtagcaaatcgagtgttaggtccccaattagcttactgttttgctgcctttaaatgttaagttgtttcaaacaggtgtttatgaaggggatctattagtttcgcgatgtcgttagtttagtgcattagcaaagaaaaagccgaatgctgctagctgttctgttgcttttcttttgctaaccacttgtgtcacaactttctgtacctgcttcatt

SEQ ID NO: 261 - DNA, 226 bp, Zea mays
gcacgagggagtctctcagataggcctgacagccgtagctgtcggctgccgggaactggagtacatagcggcatacgtatccgacatcacaaacggggcgctggagtccatcggcaccttctgcaagaacatgtacgacttccggctcgtcctactcgacaagcagaacaaaataacggatctgccgctggacaacggtgtccgagctctactgaggagctgtacc

SEQ ID NO: 262 - DNA, 233 bp, Zea mays
gcacgaggcgagatccagacctccgtgcgcctagtcctccccggagagctcgccaagcgcgccgtctccgagggaaccaaggccgtcaccaagttcaccagcaactgagcgcgctgcgggatccgcggatctgttagaagggttctttgctgtgtcctttccccagtcccccaccctacccgcctagtagctagcttgcctgctctataaatccggcgcgccggattgtaatg

SEQ ID NO: 263 - DNA, 230 bp, Zea mays
gcacgaggcaagatgtacccggacatggctgagcaggtgaccaccaccacccaggctctcatcatgggtgtcgcaccatccaaggggcacgccgagggcgggttcgaggcggccgccggagctgagaacggcgggtgcaagtgcggcgcaactgccagtgcgacccctgcaactgcggcaagtgagctaggtgctccactctgcaggccggccggaggaagctagctaat

SEQ ID NO: 264 - DNA, 230 bp, Zea mays
gcacgaggctggatgctgatatccatcgcaagtacatctatggtggccatgttgctgactacatgaggaacctcgctgaagaggagccagagaagtaccagtctcacttcagtgagtacattaagaagggaattgaggctgatgacatggaagctctgtacaagaaggtccatgctgccatccgtgctgatccttctgtggtcaagtcaaccaagcagccaccaaaggag

SEQ ID NO: 265 - DNA, 232 bp, Zea mays
gcacgaggttccaggggctatggatttgtcaggtttggagacgacaacgacaaatctcatgccatgtctgaaatgaatggtgtatattgctctacgaggccaattcgtataggacctgcgactcccagaagatcttcaggtgattctggctcctcgactcctggtcattcagatggtgattcttctaacagaacggtatatgttggtgggcttgaccccaatgtcagtgaag

SEQ ID NO: 266 - DNA, 232 bp, Zea mays
gcacgagggaccgagaaggacatcactcccatgggtggcttcccccactatggtatcgtgaagggtgactacctgatgatcaagggatgctgtgtgggtccaaagaagagggtggtgaccctccgccagtccctcctgaagcagacttcccggctggcgctggaggagatcaagctcaagttcatcgacacatcgtccaaatttgggcatggtcgcttccagactaccgatg

SEQ ID NO: 267 - DNA, 231 bp, Zea mays
gcacgagcgactgctgcgagttccggcccgagcggtggctccgggacgggcgcttcgtgcccgaaagcccgtacaggtaccccgtgttccaggccggcgcgcgcgtgtgcgtgggcaaggagctggccctgatggagatgaaggccgtgatcgtggccgtggtccggggcttcgacatcgaggcggtctgccggagctcccgccggcccaggttcgcgccggggctgaccg

SEQ ID NO: 268 - DNA, 229 bp, Zea mays
gcacgagtcgacattggcaggaatgtcattcatggaagtgacagcattgagagtgctaataaggagattgccctgtggttccccgagggccctgctgattggcagagcagccagcacccctggatctacgagaagtaaacatggaaagtttcacatcaaaccttgagagccagaggaagcatgtcaccatttgtgctttagcaatgttttcgaaaagattatgatctgt

SEQ ID NO: 269 - DNA, 231 bp, Zea mays
gcgagatcgaggcttccgccgctaccccatacgagctgcagcgccgcctcgtcgctgccgcctccgcggccgactctgcctacggcgtccagtcgtccttctccatggtcacccccagctccgccgtgttccaggtgatcgtcgatgctgtcggtggtggtgcaatgatggtgagcggaggtggcggcggcggtgctgctgcatctggtggtgctgctgccgaggctccca

SEQ ID NO: 270 - DNA, 227 bp, Zea mays
gcacgaggaaacagaaggttcatacacgatgaagcagaattttactaatctcgacatccacgtgggccagtcttactcatttctggtcactatggatcagaacgcaagcagtgattattacatcgtggccagtgctaggtttgtgaacgaatcgctttggaccagagtcaccggtgttgcaattttgcaatattcaaattcaaagggaaaagcatctggtcctcttc

SEQ ID NO: 271 - DNA, 227 bp, Zea mays
gcacgagcagaatttgcaggcctctttgcgaagttcacccaggatttggcgctgatcggagctctgctcttctttctgggcatgaagaactccatcccgaagcggcagggcggcaagaagaaggcccccaaggcgaagacgaactagggctgcttagatagctgcacgcctcaggcggggtgtatcaggccacaggtctatttcgaagcaggcccagcgcgatgcag

SEQ ID NO: 272 - DNA, 227 bp, Zea mays
gcacgagggcgtgctcaagatcttcctcgagaatgtcatccgcgacgcggtcacctacaccgagcacgctcgccgcaagaccgtcaccgccatggatgttgtgtacgccctcaagcgccagggccgcactctgtacgggttcggtggttgagcgcatctcttccctcgtctgcagcggctgccggtggcgtttcctcagttccctctgccttgcttggcttgatgta

SEQ ID NO: 273 - DNA, 232 bp, Zea mays
ttcggcacgaggagcactctccacctggtgctccgcctccgcggtggtcagtaagccatggttcatttaagctgctgctgtacctgggtatctgcgtcgtctggtgccctctggtgtacctctatatggatgtcgtcgtctaataaacatctgtggttattgtgtcatgaatcgtggttgtggcttcgttggtttaatggacctgttgtgtcctctgtgttgtacccaaaac

SEQ ID NO: 274 - DNA, 251 bp, Zea mays
  unsure (1)..(251): unsure at all n locations
ttcgttcgttcagttcatccgtgttcttgtttgcgaggtcgagagagagaggatgtcgtgctgcggaggcaactgtgggtgcggctccggctgcaagtgcggcaacggctgcggagggtgcagcaagatgtacccgtgacatgctgctgagcacggtgaccaccatccacctncaggctgctcatccnatgggtgttgcatccatccataggggcacgcactgaggtgcgggtttcgagtgcaggccgccg

SEQ ID NO: 275 - DNA, 227 bp, Zea mays
cgcgacccgtaccccgcctcccggttcaaccaaatccctctcgcctcatccccaccagcgcaaagccgccctatcgtcctgtcgtgagaagcaatggcgggccgtggcaaggcgattggcgctggtgccgcgaagaaggcaacgtcaaggagctccaaggctgggctgcagtttcccgtcggcaggatcgctcggttcctcaaggccggcaagtacgccgagcgcgt

SEQ ID NO: 276 - DNA, 218 bp, Zea mays
gcacgagcactgagcaggatccgtaatgctgcaaggcacttgctcacccttgacgagaagaacccccgtcgtatctttgagggtgaggcacttcttcgccgcatgaaccgctatgggctgcttgctgagggtcagaacaagcttgattatgttcttgccctcaccgctgagaacttcctcgcaaggcggcttcaaacacttgtcttcaaggctggcat

SEQ ID NO: 277 - DNA, 227 bp, Zea mays
tcgagtttttttttttttttttttttttaaatcaaatcactgaatcacattcataacagccaaattgatttgccaagaacatcggtacacgattgcaggacaagaagcgatagagtccatcgcctagttcagacattacagaaacaggaagacagagcagcaatcaggccctctcgcccctgatgcggcgcgcgagctggatgtccttgggcatgatggtgaccctc

SEQ ID NO: 278 - DNA, 229 bp, Zea mays
cgcgccgccgccgccgccgccgtgacggaaggaagaggaggagcaaggagcacgacgcgatgggccactccaacgtgtggaactcgcaccctaagaactacggccctggctcccgcgtctgccgggtctgcgcgaaccctcacggtctgatcaggaagtacgggctcatgtgctgcaggcagtgcttccgcagcaacgccaaggacattggtttcatcaagtaccgttg

SEQ ID NO: 279 - DNA, 235 bp, Zea mays
gcacgatgcccgccgctgcgccaagaaggcccctgccaagaaggccgccccagccaagaaggctgcgaccccgtccggaaggtgccgtcccgtaaggcgaagaagtagagcggtggtcttggcaggaatctagggtttcgtgctccttcgattttagatgtttactcgtttttgctctagttgtgggtggtgcgcggggtgggttactaggttgtaaatttgatgtcggaggctg

SEQ ID NO: 280 - DNA, 234 bp, Zea mays
gcacgagaccagaagagattcgcaagaccttcaacatcaagaatgacttcacccctgaggaggaagaggagatccgcagggagaaccagtgggccttcgagtaaggaggtgctggatctattgatgcctaagtttggtggtgtctactactatgtctactttatgttgtcctaatggttgtaagtattttgggagtcactttgcttgcgaatgtctcgcgtaagacttatgttg

SEQ ID NO: 281 - DNA, 232 bp, Zea mays
gcacgaggccgcttgcaggattctctcctgtgttcacgtctcttgctgtagttaggtgctgctgcctgctggcttctatgtatgttatctatctgtctgtagcaactgtgttatctgataggaccgtaatggtgcttattcaacccagctatatgtttctatgtgaatcatctctctatcggttgttgagtaactttatattgtgatgaagatgtgaatgtgatttataaaa

SEQ ID NO: 282 - DNA, 235 bp, Zea mays
gcacgaggtcattgttgatcatgggtcaagacgccaagaatccaatctcatgctaaatgactttgttgagatgttccgggcgaagactagctatagtattgttgaggctgctcatatggagctagcggagcctactataaaggatgcttttggaaaatgtgtgcaacaaggagcatcacgagttattgtcagtccatatttcctttcccctggacgacactggaagcaagacatt

SEQ ID NO: 283 - DNA, 235 bp, Zea mays
gcacgagggcaagtgagtcgcaggtccaatagagtcaacaacaaatgcgaaacatgggagaggagggtaagcgagagtctcgaaagagtgtcggtggaagtaggcctaaccttattttgtttagagacgggctatgcgttcgatgtagcaaaacaaggctgtggtttgtgtacttcaatatttgggttgtgtgtttcgaattttaaaaaaaaaaaaaaaaaaaaactcgagacta

SEQ ID NO: 284 - DNA, 237 bp, Zea mays
gcacgaggccaagcgcgtcaccatcatgcccaaggacatccagctcgcccgccgtatccgtgtggagagggcctaggcgtcgtggcggtggaggtcgaagtagtagtcgcagtttctgtcatcaccgtctggctagaaggtgtagagatgtgccgggttctggagtttgggttatcggtcgaatcatgatgtagttggttcttcacagctgtaatttaactatgacgatgccatggc

SEQ ID NO: 285 - DNA, 229 bp, Zea mays
gcacgaggcggcctcggaggtgtcgtaggtggtggactcggagggtttggaccgcttggtggtgctggaggcggatcaggccttggtggcgggtcaggtctcggcggccttggtggtctcggcggcggcggcggccttggcggtggcggcggccttggtggcggctcaggatcgggtctgggcggcagcggtggccttggcggtggcagtgggctcggtggcggcggtg

SEQ ID NO: 286 - DNA, 237 bp, Zea mays
gcggcgtgactatcgctcacggcggtgtgctccccaatatcaaccctgttctgctgcccaagaagacggcggagaaggcgtccagtgtggggagcaaggaggcaaagtcgcccaagaaggccgccaagtcccccaagaaggcatagactgactgtctggagtgatctgatgtttagcaggaccttgataccagtatgcggtgatgcgtaggctgtagatgggtcgaatgtgcttgtg

SEQ ID NO: 287 - DNA, 230 bp, Zea mays
gcacgaggcggcggtctcaaccccaggcgagctcggctccggtcacccgtcgatccacgcaaccatgtcgaggaggaagaccagggagcccaaggaggagaacgttacccttggacccactgtccgtgaaggagagtttgtctttggtgttgctcacatctttgcatccttcaatgacaccttcattcatgtcactgatttgtctgggagggaaactttggttcggatca

SEQ ID NO: 288 - DNA, 231 bp, Zea mays
gcacgagccacagacaaaggaaacgtggcacgactgatcaatcattcttgcacaccaaactgctatgcaaggattatgagtgttggacatgatgaaagtcgtattgttctaatagcgaagaaaaaagtttgcgctggtgatgagctaacgtatgactacctgttcgatccagacgaggccgatgaacgcaaagtgccatgcctttgtcagactgctaactggcggaaattc

SEQ ID NO: 289 - DNA, 232 bp, Zea mays
gcacgagcatcgatctgcaagtctcgctacgtagcagtgcaataaaaaaagcagccgcaatggcgagcagcaccatggccctctcctccacggccttcgccggcaaggccgtgaacgtgccgtcgtcgtccgccttcggcgaggcccgcgtgacgatgcgcaagacgccggcgaacgccaagccagcggcgccgtccgggagcccgtggtacggccccgaccgcgtgctgta

SEQ ID NO: 290 - DNA, 232 bp, Zea mays
gcacgaggtatgcccccccaggaacaggaaagtcttatttggcaaaagctgttgcaaccgaggctgattcaacgtttttcagtatatcttcttcagatctggtttcaaagtggatgggtgaaagtgagaaattagttgcaaatctgttccaaatggctcgggaaaatgccccttccattatcttcattgatgaaattgattctttatgcggtcaacgtggagaaggcaatga

SEQ ID NO: 291 - DNA, 232 bp, Zea mays
tgactatgcagcctactacaggggtgcaatgggaattttgcttgtctatgatgttactgatgagtcatctttcaataatataagaaactggattaggaacatagagcaacatgcttccgacaatgtgaataaaattttggtaggcaacaaagctgacatggatgaaagcaaacgggctgtgccaacttcaagagggcaggctcttgctgatgagtatggcatcaaatttttt

SEQ ID NO: 292 - DNA, 225 bp, Zea mays
gcacgagatagagtgaggccttgttcggttattcccaatacatatggattggaaaaaattcttaagaagtttgacttgtttgggattcaaacccatccaatcccactcaatccacatggattgagagctaaccgaacaagccctgagttggtccgtgctgtcagtgtgctgcgcagatcgtgtaacattacttcgtgagttcgaaaggcgtgtgacaattttgtt

SEQ ID NO: 293 - DNA, 226 bp, Zea mays
gcacgaggccaaggctgtgaagtctggggcagccaagaagaagaccaagaagatccgcacgtctgtgacatttcaccgccccacgaccctgaagaaggctagggaccccaagtacccacgaatcagcactaccggaaggaacaagcttgatcagtaccaaattctcaagtacccccttaccacagaatcagcgatgaagaagattgaagataacaacactctggtc

SEQ ID NO: 294 - DNA, 231 bp, Zea mays
gcacgagaggaaatacagttcgattcaagagacaagctcggcggttcagaaacactgtttggtggagaaatgtcaaactcacggccgcattgatacttctcctcctggtaataatatatgtcgttctagtcttcgtgtgccatggtttcaccctaccaacttgcataaggtaaggcatgatgtgcacatagtgctttttgctgtgcatgtttgtgcctatcaccggggtcc

SEQ ID NO: 295 - DNA, 165 bp, Zea mays
gcacgaggcggccaggacttcaggtacctgccgttcgggtctgggcgccggatctgccccggggccaacttcgcgctcgcgaccatggagatcatgctcgccaacctcatgtaccatttcgactgggaggtccccaatgagaaggaagacggtggcgggaaggtg

SEQ ID NO: 296 - DNA, 246 bp, Zea mays
gcacgagcggaagtcatcttcacccgcgccaagcagtacgccgaggagtacgatgcccaggagaaggaactggtacagcttaagcgtgaggcccgtttgaagggtggtttctatgtcagtcctgaggcaaagctgctatttgtgatccgcatccgtggtatcaatgccatgcatcctaagaccaggaagatattgcagcttctgcgtttgaggcagatattcaatggcgtgttcctgaaagtcaac

SEQ ID NO: 297 - DNA, 243 bp, Zea mays
gcacgaggcctttcgtgtgtttgacaaggaccagaacggcttcatctctgccgccgagctccgccatgtcatgacaaatcttggggagaagctaactgatgaggaggtagacgagatgatccgtgaggctgatgtcgatggtgatggccagattaactacgaggagtttgttaaggtcatgatggccaagtgagccacagaagcataagctcaaggcagaaaggattgtgcattgcatattag

SEQ ID NO: 298 - DNA, 247 bp, Zea mays
gcacgagagagcacggagctgctcatccggaagctgcccttccagcggctggtgcgtgagatcgcgcaagacttcaagaccgaccttcggttccagtcctccgctgtcgccgcgctgcaggaggccgccgaggcgtatctggtgggtctctttgaggacaccaacctctgcgccatccacgccaagagggtcaccatcatgcccaaggacatccagctcgcgcgccgcatcaggggcgagagggcct

SEQ ID NO: 299 - DNA, 240 bp, Zea mays
gcacgagctcctccccctccggttcgggttcgggttcgtgaggttctccggtgttcgggttcgtggggtagcggatcgagatggcggcgtcggatgttgagtaccgctgcttcgtcggcggcctcgcctgggccacggacgaccactccctccagaacgccttcagcacctacggcgaggtcctctgagtccaagatcatcctcgatcgggagacgcagaggtcccgctgcttcggcttc

SEQ ID NO: 300 - DNA, 242 bp, Zea mays
gcacgaggccggttgttgctggcagcaacacggtagtagctgttgcccaagttgagttgcaaacaatgaacgtgcagcagcccgctgatgttgccggacccagcgagggggtggcggcgatctccaaaggggggaaggtagggccgaaccggtgcagcgcctgcaggaagagggttggacttacgggattcaactgccggtgtgggaacttgtactgcgcactccaccgctactccgacaag

SEQ ID NO: 301 - DNA, 247 bp, Zea mays
ctgaagctgacatcttcgtgaccaccactggcaacaaggatatcatcatggttgaccacatgaggaagatgaagaacaatgccattgtctgcaacattggccactttgacaatgaaattgatatgctcggccttgagacctaccctggcgtcaagcgcatcaccatcaagccccagactgaccgctgggtgttccccgagaccaacactggcatcattgtccttgctgagggtcgcctgatgaacct

SEQ ID NO: 302 - DNA, 242 bp, Zea mays
gcacgagcttggactcgaggttcctgagcgggctgaaggacgagcgggtggaggcctccaagatcttccagggtgactactactccaccggctcgccggtggacaaggcgcactggtggaggacgtgaggcaggccctgtacgcgtccaagatctgcagctacgcgcagggcatgaacatcatcaaggccaagagcgcggagaaaggctgggggctcaacctcggcgagctggccaggatct

SEQ ID NO: 303 - DNA, 248 bp, Zea mays
tcaacattggccacttggatgcgaatggcctgtacgatggtcacttaccacgtttgctctctctgggtttgtccgtgctcagggtgatgctgacagttcgttggacaggctgtggcagaagaagaaggctgagatcaagcagtaggtctttgcacgtagttccaccggtaatggactcttgagggatactgctctagctaatgctttagctggcttggggggagtgattctgatgtttggctgttcgt

SEQ ID NO: 304 - DNA, 243 bp, Zea mays
cttcaaggagggcgtgctgtatgccaagaaggactacaacctggcgaagacccacagattgatgtgcccaacctccaggtgatcaagctcatgcagagcttcaagtccaaggagtatgtcagagagaccttctcctggcagtactactactggtaccttaccaacgatggcattgaggactaaggaactacctgaaacctcccgtctgagatcgtgcctgccacgctcaagaagtctgccagg

SEQ ID NO: 305 - DNA, 238 bp, Zea mays
gcacgagggtgtttctgagcatcatttcacagctggaagaagaggtctgagccttcttgatgggatagaccaatactccctccgtttcgttttagttgttgctggatagtgcaaaattgaactatccagcgacaactaaaaagaaacggagggagtacctccaatttacattactcgttgctcagtgatctgtttaatacctccaatttacatcactggttgctcagttgtctgttta

SEQ ID NO: 306 - DNA, 240 bp, Zea mays
gcacgagcaagaagacgcgcatcgtcccgcgccacgtgctgctggcgatccgcaacgacgaggagctcgggaagctgctgaccggcgtgaccatcgcccacggcggcgtgttgcccaacatcaacccggtcctgctgcccaagaagacggcggagaaggcgtccagcggcgggagcaaggaggccaagtcgcccaagaaggccgccaagtcccccaagaaggcatagggtttggaggcgg

SEQ ID NO: 307 - DNA, 238 bp, Zea mays
gcacgagggaaggtcatttacacagatgacgaggatgatacgatgctggtcggggacgatccatggaatgaattcctcaggatggtaaaaaggatatacatttactcttacgaggaggccaagtctttgactcgcaaggcgaagcgcctcggttgttggtgacaccatcaagccagacccaaacaaattgccaccggaatctgacgtgccacatgactcaaacaacaatgctcccgtt

SEQ ID NO: 308 - DNA, 241 bp, Zea mays
tggacaccctcatcaagggcaccatcgcaggcggaggtgtcatcccgcacattcacaagtccctgatcaacaagtcctccaaggagtgaagactaggggatgtgcatctttagtttaaactagacttctgtgcgctcctcggcgagtccttgtcatcctgtaggttttagttgagctgtcaggttggagctcctctgtgtaacgcttgcctggtactgcttcatcagttatttggttattg

SEQ ID NO: 309 - DNA, 222 bp, Zea mays
gcacgagtacatggctgagcgcattgtaggtcaaggttcttttgggattgtcttccaggccaagtgtttggaaacgggtgagactgttgccataaagaaggttcttcaagacaagcgttacaagaaccgcgaactgcagaccatgcgcctccttgaccaccctaatgttgttgctttgaagcattgcttcttttcaacaactgagaaggatgagctttatct

SEQ ID NO: 310 - DNA, 221 bp, Zea mays
gcacgagctcagacattgctggaattcttttgttggcaaatgaacctatgtagagatccgttgtcaggaggatctgcttagggcttgttcggttagccttcaatccatgtggattgagtgggattggatgggtttgaatcccacgcaagtcaaacttcttcataattttttccaaacccattcaatccatgtgtattgggaataagcgaacaaggccttat

SEQ ID NO: 311 - DNA, 223 bp, Zea mays
gcacgagctgaagctgcggcacaaggagcacatcgcggcctacggcgagggcaacgagcgccggctcaccggcaggcacgagaccgccgacatcaacaccttcagctggggagtcgccaaccgtggcgcgtcggtgcgcgtgggccgcgagacggagcagaacggcaagggctacttcgaggaccgccggccggcgtccaacatggacccctacgtggtcacc

SEQ ID NO: 312 - DNA, 224 bp, Zea mays
gcacgaggcttgagtacctcgccgccgaggtgctggagctggccggcaacgcggcgaaggacaacaagaagacgcgcatcgtcccgcgccacgtgctcctggcgatccgcaacgacgttgagctcggcaagctgctggctggcgtcaccatcgcgcacggcggtgtcctccccaacatcaacccggttctcctgcccaagaaggtggcggagaaggcgtctagc

SEQ ID NO: 313 - DNA, 221 bp, Zea mays
gcacgaggttccagaagaaatctagcaatgcctcaaaaactcaggttgaggaaactgatgaagcaaggaagaaattctctaatgccaaggcgatctcgtcatctcagttttttggtactcaaaacagagaagagaaagaagctcaactatcccttcagaaatttgcgggctcttcatccatttcaagcgcggatctttttggccgcaatgatgcggacaac

SEQ ID NO: 314 - DNA, 219 bp, Zea mays
gcacgagccgtagtgaagccgaagacacccgccaagcccaaggccaagccagctgccaaggcgaagccaagaccgccggcgctaagccgaagccacttgctaagaaagccggccgccccgccaaggcggcgaagacgtcggccaaggacacgccagggaagaaggcgccggtggccaagaagtccgctgctgccgcgaagaaggcccctgccaagaagg

SEQ ID NO: 315 - DNA, 219 bp, Zea mays
gcacgagacggaaaggatgcacgccatcacagctcgcgttggcctgggttcaccaccaaggaaacgacgtttgccccatacctggcacaacaaaaatcgacaacttcaaccagaacgtgggggcactgtctgtgaagcttacaccggatgagatggctgaactcgagtcgtatgccgcggctggtgaagtcttgggtgaccggtatggcgatcaattgg

SEQ ID NO: 316 - DNA, 219 bp, Zea mays
gcacgagaaccaagcagaccccagcagaagaagcgaagtcgtcgccggagcaggaggaagagcgagcagcaagatgtcgtggcaggcgtacgtcgatgaccacctgctgtgcgacatcgaaggccagcacctcagcgccgccgccatcgtcggccacgacggcagcgtctgggcacagtccgagaacttccccgagttaaagcctgaggaggttgctgg

SEQ ID NO: 317 - DNA, 218 bp, Zea mays
gcacgagcatcaacccggccatgagcctgggcgccgccgtcatctacaacaaggacaagccctgggacgaccactggatcttctgggtgggccctctcgtgggcgctgccatcgcggccttctaccaccagtacatcctccgggctggcgccatcaaggccctcggctccttcaggagcaacgcgtgatgagcggggcttggctgtggagcaatggcg

SEQ ID NO: 318 - DNA, 218 bp, Zea mays
gcacgaggctgatgtaaccccagtgttcaaccagatattgatggatgaacaagaagaatacgatggcccccctcaaaaagaaattcctgctttaattgtctggacccttggaggaaagaatgtatatgttgaaggatcatgggataactggaaatcaagaaaagccatgcaaaaatctgggaaagatcattctcttttgctggtactcccagcaggag

SEQ ID NO: 319 - DNA, 218 bp, Zea mays
gcacgaggtgaggggaggcgcgcgcgggactacctgtgcgcgctgccgcacaagataaagaggatggaagagaaggcccacgatagagcggtcaaagcacaaaagatacccacacccatccccatcaactggatcttcgataggaccattcctgtcattctaccttagtgtttatctttttcgatctttgtttgggtatctatgctgttattgtaagc

SEQ ID NO: 320 - DNA, 218 bp, Zea mays
gcacgaggtcatcgctcacgacgtggatccgatcgaacttgttgtgtggcttccagccctgtgcaggaagatggaggtcccttactgcattgttaaaggaaaggctcgccttggatcgattgttcacaagaagaatgcatcagtcttgtgtcttaccactgtcaagaacgaggataagcttgagttcagcaagattttggaggctattaaggcaaact

SEQ ID NO: 321 - DNA, 219 bp, Zea mays
gcacgaggggctgtacctactgcaaaaggacaagcacttgctgatgagtacgggatcaagttttttgaaacgagtgcgaagacaaacctgaatgtggagcaagtgtttttctccatcgcacgtgacatcaagcagaggcttgcggagactgattcaaagccagaggacaaggcaatcaaaattaacaagccagaccagggttccgaggcaccagctgcc

SEQ ID NO: 322 - DNA, 213 bp, Zea mays
gcacgagccggccggctaccccccgccggcgcagggctacccaccgcaggctacccgcagcagggctacccgccgcagtacgcgcagcgcctccacagcagcagcagagcagcgggccttccttcatggaaggatgcttggctgccctctgctgctgctgcctcctggacgcctgcttctgacggaaccatccgtgccgggtccaacacggct

SEQ ID NO: 323 - DNA, 214 bp, Zea mays
gcacgaggccggcgatccggaggctggcgaggaggggtggcgtgaagcgcatctccgggctgatctacgaggagacccgcggcgtgctcaagatctttctcgagaatgtcatccgcgacgctgtgacctacacggagcacgcccgtcgcaaaaccgtcaccgctatggacgtcgtgtacgccctcaaacgccagggccgcactctctatggctt

SEQ ID NO: 324 - DNA, 214 bp, Zea mays
gcacgagctcaatcaattcactcaaacctcttccccaaatcttcgattagattctcgttgacaagaagactagaaccgaacctgaccatgtcgctgatccgccgcagcaacgtgttcgatcccttctccctcgacctctgggacccctttgagggcttccccttcggctccggcagtagcagcagtctcttcccctcgttcccgcggaccagct

SEQ ID NO: 325 - DNA, 213 bp, Zea mays
gcacgaggcggatgagaaggctttctttgatgactacaaagaggcccacctcaagctctccgaactggggtttgctgatgcttaaatagaccctatcctggagtgatacattctgctgcatgtggtcttttgcatctggagtcaatgtgaacaagcagattgtcgtattgtctttctcgtaataaatttgtcaatgttgagcccttaggcttg

SEQ ID NO: 326 - DNA, 233 bp, Zea mays
gcacgaggacaaagtagcaattctagcagtcctgtcatcttgtagacatggtaggcttgtgcaggaggggatgaagatattcaaaaatttgaaagctgattattcaattgaagctgatatggagcattacatttgtgtggtggacatgctatgcaagtgtggttatttgaaggaagctgaggtcgtgattagaggcatgcctttccaaccaagcactgccatatgtcgcacat

SEQ ID NO: 327 - DNA, 180 bp, Zea mays
gcacgaggcctgctgataatggcatcctttcgaagcattatagccgtagctcttttatgtaccttttcaggctggtaccgataccgtggatctggatttgctatgttttgtactgtgctcgagtgtaaggtcagttcgtaatacaatcaatctgcgtggaacaatttgatatccttgaat

SEQ ID NO: 328 - DNA, 228 bp, Zea mays
gcacgagactcctaccccacacagaagcggcggcggcggagcaaacgcaggcgaaggcgagggtgtgagggaaggagcaccagccatggtgcacgtcaacttctaccgcaactatggtaagacgttcaagaaaccaaggcgtccttatgagaaggagcgtcttgatgctgaactgaagctggttggtgagtatgggctgaggtgcaagcgtgagctttggagggtcca

SEQ ID NO: 329 - DNA, 229 bp, Zea mays
gcacgaggggaggagtcatacaaagatagcactctgatcatgcagctccttagggacaacttgaccctttggacctctgacctcacggaggatggtgctgatgagggcaaagaagccccgaaaggtgaggctggtgacggacagtaatcttgggagagcgcatattgttcgagcccattgttttagatgctctatgctgtcgaagctgaagctgtgccgtgctattatt

SEQ ID NO: 330 - DNA, 232 bp, Zea mays
gcacgagttctcctcgtcaccgacaagccaatcgaagccgagatacggccatggactccaccggcaccggagcagggggtaatgggaagaagggagcggccgggcgcaaggtcggcgggccaaggaagaagtcggtgtcgaggtccgtgaaggccgggctccagttccccgtcggccgcatcgggcgctacttgaagaagggccgctacgcgcagctgtacggcaccggcgc

SEQ ID NO: 331 - DNA, 226 bp, Zea mays
gcacgaggcattccattgtgcaagccctgtggttgtgaatggtgacattctcgcaaggccaatgatgttccttgcgctgacatatgaccacaggctgatcgatggtagagaggctgtattcttcctccgtcgcatcaaggatgtcgttgaggaccccaggaggttgctgcttgacatataaagttacttaccagtgctttcccgccgactgttttgtgctttctgg

SEQ ID NO: 332 - DNA, 225 bp, Zea mays
gcacgaggttttttttttttttttttttaaaacaaacgtctattgtgatctgagatttaaaacaggcatcatagatgcttggggtaagtacagactgcaggctaaacatcccaatccaacaacggtcgagtgccgatgaagcgaagaaactacaaactaaactgcctcactccagggacgggacgacacttgcaaggaaactactcagagaagacggcactaatc

SEQ ID NO: 333 - DNA, 225 bp, Zea mays
gcacgaggctacgtgatgctgtgctgcttgtttttgccaacaagcaagatcttcccaatgccatgaatgctgctgagattactgacaagcttggattacactccctgcgccagcgacactggtacatccagagcacttgtgccacaactggcgagggtctgtatgaaggcctggactggctgtccagcaacattgcgagcaaggcttgaggcctaccttgaatgt

SEQ ID NO: 334 - DNA, 226 bp, Zea mays
gcacgaggtcctagctgatggactggacatggatgacgacatggatgatcttgattccgactcagatcttgatgttgacagcagcggtgagattgtgtacgcaatgtgagtaacatctcagcagccatctcagcagtcaaccaaggaaccaatcaggcatgggatgccctgttgtatactctggcaaagggcatgcttccttttgtgaaaaacatccatgtagttt

SEQ ID NO: 335 - DNA, 222 bp, Zea mays
gcacgaggaagcccaccatcacgtcccgcgagatccagacctccgtgcgcctcgtgctccccggcgagctcgccaagcacgccgtctctgagggcaccaaggccgtcaccaagttcacctcctcctaggcttgcacgctcgccctttgtaggcatctcttgtgttgatgttccccttgttgtagttatatgttgctggtttctctgtcggcgctgctcgtaa

SEQ ID NO: 336 - DNA, 221 bp, Zea mays
gcacgagaagcgcacagccgccgcagcacatcgctctctcgatctcagtcatggcggaggtggagcagcaacaggacacgccgaagctcttcaaccgctggaccttcgatgatgtccaggtgaacgacatctcgctgaacgactacctcgctgtgaacgcgacgaagcacgcgatgtacctgccgcacaccgcgggacgttactccaagaagcggttccgc

SEQ ID NO: 337 - DNA, 224 bp, Zea mays
gcacgaggtacaggaagcagcacaagaaggatatccatgctgaagcggtaaagaagaggcgccgcgccaccaagaagccatactccaggtcaattgtgggtgcttccttggaagtaatccagaagaagagagctgagaagccagaggtccgcgatgctgctagagaagctgctcttcgtgagatcaaggagcgcatcaagaagaccaaggatgagaagaaagcg

SEQ ID NO: 338 - DNA, 228 bp, Zea mays
taaggatggcaagataagctacgatgagtttgcagcgatgatgaaggccggaacagactggaggaaagcgtcgagacagtattcgagagagcggttcaccagcctgagccttaagctgcaaaaggatggatcgttgcagatggagagtacgcagtagtcgataacacccataggcaagttgtgaattacagaaggaaaccctgtgtagattttctggttgtttgttga

SEQ ID NO: 339 - DNA, 223 bp, Zea mays
gcacgagggtggactggtccgccgcgcccttcgccgtctcctaccgcggctactccgccgacgcctgcgtgcccgacggcgacggccgctcgctctcctgccccgccggcaccgaccgctggatgagccgccagctcgacgccgccgagtggggcaccgtcgcctgggccaggcagaactacatgcactacaactactgcgacgacggctggcgcttcctgca

SEQ ID NO: 340 - DNA, 233 bp, Zea mays
gcacgagctcgtcaagcgctgccacaagccggaccgcaaggagttcaccaaggtcgccgcgcggactgcgatcggcttcgtcgtcatgggattcgtcggcttctttgtcaagctcatcttcatccctatcaacaacatcatcgtcggctccggctgattcgtaaacctcagttggcacagtggaaattttatatttgatatggtacagtgctagttttgcataatgttccctg

SEQ ID NO: 341 - DNA, 232 bp, Zea mays
gcacgagggcgagctaagcttccttacctgtttcatgaactttgctggttccatcgtaagagtttttaccagcatccaggagaagactcccttaagtgtgatcatgggctccgcaatcggcatcgtcatgaatggtacgctcttgggtcagatagtactgtaccagaagcccgctccaaagaaacagaagaaagaagattaagcaacatggagaagctgcagaaagttcttc

SEQ ID NO: 342 - DNA, 237 bp, Zea mays
ttcggcacgaggacctgtactacgactggcccaggggccgcaacctcaacctcatccgggaccagctctccagcgacccgctctacgacgtcgagtggaccaacggcacctcctacttcttcgactccgggtcctgccgcaccatgcgtttccccgtggggatcctgccgcctgactggctcgccgccggcgccgtctatctcggccgcgagcacgtcgacggcttcgactgccacc

SEQ ID NO: 343 - DNA, 231 bp, Zea mays
gcacgagctacgagcagtcgcacgcaagtgtcaagagacgaaacggtcgacatggctcgcacgcaatctgccgtagcggtcgccgtggtggccgcggtgctgctgctggcagcggcggcgacgacctcggaggccgccatcacctgcgggcaggtgagctccgccatcgcgctctgcctctcctacgcccgcggcacggggtccggcccctccgcgtcctgctgtagcggc

SEQ ID NO: 344 - DNA, 229 bp, Zea mays
gcacgaggtttttttttttttttttttttgatagatactactgctccatttaagtttcaacctcagacagatctaaatgagatacaatttgagtaaccaacatctgaatgcttgataggttggcggataaagcaaatcggggcaagcaattacgccttctggttgtagacataggtgaggccgcacttgccgcagtagtggcggtcgaagtggttggccatgaagacgc

SEQ ID NO: 345 - DNA, 231 bp, Zea mays
gcacgagccaatgtcaccgagtccaaggtattctacctcaagatgaagggcgactaccacaggtcaggcagagagccttggaaccgaactcttggagatggtgcctagcagggaagaggagattaagttgaaagaataaagggaggatgctttgtcgacttttgtagttaatgattatgtgagacttcagtttaagggctcaacttttactggttcttggaagtcatttag

SEQ ID NO: 346 - DNA, 232 bp, Zea mays
gaagcccaccatcacgtcccgcgagatccagacctccgtgcgcctcgtgctccccggcgagctcgccaagcacgccgtctctgagggcaccaaggccgtcaccaagttcacctcctcctaggcttgcacgctcgccctttgtaggcatctcttgtgttgatgttccccttgttgtagttatatgttgctggtttctctgtcggcgctgctcgtaactgcgtcatgtaaccct

SEQ ID NO: 347 - DNA, 233 bp, Zea mays
tccagacttcgtaatagggtggatgtggtcaccgttggcagactctccttgaatttcactggcttcaacagggaaagtgcttccatatttgggaatcagctgtattctttgatccagaaattggtgccgtattcacaagccatacctctgtcaattgagtatctcaacacagctacacttcaacctagaaaggacaacaagtcaggaaggttggtcacaggagttctgcagct

SEQ ID NO: 348 - DNA, 231 bp, Zea mays
tgtcccaactgagcggtaaggacatcaccgagctcattgccgcgggcagagagaagtttgcttcagtcccatgtggcggcggcggtgtggctgttgcggcaggtgcacctgctgctggcggactgctcctgcagctgaggcaaagaaagaagagaaggtggaagagaaggaagaaagcgatgatgatatgggcttcagcctcttcgactaggttgcacagtcatcacagta

SEQ ID NO: 349 - DNA, 227 bp, Zea mays
gcacgaggaagcatttgcccaaggatccacttttccaattggtgtccaagttgtatgaagttgtacctcctatcctcactgagctgggcaaggtcaagaacccatggccaaatgttgatgctcacagtggagttttgctgaaccactttggactatctgaagcacggtattacactgtcttgttcggtgtttcaagaagcatggggataggatctcagctcatctgg

SEQ ID NO: 350 - DNA, 225 bp, Zea mays
gcacgagaggaggtgcgcgaggaggtcgccaagtacaaggtgggggctcctgctcgtgttggtctggttgctccagttgatgttgttgtgccccctggcaacactgggctggatccgtcccagacctctttcttccaggtgcttaacatccccaccaagattaacaagggtaccgtggaaattatcacccctgtggagctgatcaagaagggtgaaaaggtgggc

SEQ ID NO: 351 - DNA, 224 bp, Zea mays
gcacgagaggacacctccggcccgtccctcaacatcctcatcaagctcatggccgtggagtccctcgtgtttgcccccttctttgccacccagggtggcctgctcttcaagtacctgtaaaagggacaataccaagcacacagcagaagtatacgatctcccgaccgaccgtggacaatatcgaataactcctgccaaatcgccagttccttttgtgtactgtg

SEQ ID NO: 352 - DNA, 224 bp, Zea mays
gcacgaggggagctggagaagaaattcagcggcaaggatgtggtaattgttgccacaaggaggatcgtgaggccgcccaagaagggttcagctgttcagcgccctcgcaccaggactctgactgctgtccatgatggcatcctggaggatgttgtcttcccagctgagattgtggggaagcgtgtcaggtaccgtctggatggtgccaagatcatcaagatctt

SEQ ID NO: 353 - DNA, 224 bp, Zea mays
gcacgagctttccaagaccttgaaggacgtcgtctggaaatccgacgatcttcaaacgcaacatgcttcttagcagaacctcagagaggaggaatggcaaactattttgtgcaccatcctttcaagcaaactattctgcatgtaacggtgggtgcccaggaaattgcgctggtgctccaccatcgttgtatatgctgcgtcttgagttgcttgctgtagctgaa

SEQ ID NO: 354 - DNA, 224 bp, Zea mays
gcacgaggtgacacacttgttcccgatcaccaagtacgtcggattgcttgccactggcctcacagctgatgcaaggtcattggtttcccaagcaaggaacgaagcagctgagtttcgtttcaaatggggctatgagatgccagttgatgtgttagcaaaatggattgctgacaaagctcaagtttacacgcaacatgcatacatgagaccccttggagtagttg

SEQ ID NO: 355 - DNA, 222 bp, Zea mays
gcacgagccagaagccattgcaaagtacacgctaacaatgctcagaaggagagtacctcccgctgttcctggaatcatgttcctttctggtggacagtccgaggtggaggcaactctgaacctgaatgcaatgaaccagtctctgaacccatggcatgtgtcgttctcctatgcccgggctctgcagaactcggtgctgaagacatggcaagggcgccctga

SEQ ID NO: 356 - DNA, 218 bp, Zea mays
gcacgagaggtccaccaaccttgactggtacaagggcccaaccctacttgaggctctggacttgatcaatgagccaaagaggccttcagacaagcccctgcgtctcccccttcaggatgtgtacaagattggtggtattggaactgtccctgttggacgtgttgagactggtgtcattaagcctggtatggttgttacttttgggcctactggtctta

SEQ ID NO: 357 - DNA, 220 bp, Zea mays
gcacgaggagaaggcggcggccaaggaggccaagtcgcccaagaaggccgccaagtcccccaagaaggcatagaggggcgggcgcctttaccgctgtgatgttgaatgctcgtgttcagtagatctttacgtctgtagtgtcgtcgttgttattggaactggttagtagatctgtgcattgtggttgaaacgtgattccctgatttcagaaatctaattt

SEQ ID NO: 358 - DNA, 241 bp, Zea mays
caagaactggtgcaagagcaagaagaaggctttcacaaagtatgctctcaaatatgaaaatgatgctggcaagaaggaaattcagctgcagcttgagaagatgaagaaatatgcttctgttatccgtgtcattgctcatacccagattaggaagatgaagggtttgaagcagaagaaggctcacctgatggagattcaggtcaatggtggtaccattgctgacaaggtggactatggctac

SEQ ID NO: 359 - DNA, 234 bp, Zea mays
gcacgaggcaacctcgtccccaaacaagcaaccaccgcctccccgatctcgtcgagaggaagcccaatcccgaaaccgccgccctattccaatggcgcccaaggccgagaagaagcccgccgccaagaagcctgcggaggaggagccggcggcggagaaggccacggcggggaagaagcccaaggctgagaagcggctccccgcgggcaagtccgcaggcaaggagggtggcga

SEQ ID NO: 360 - DNA, 136 bp, Zea mays
gcacgagccgacctcccgcagccgccgcacagatggcacccaaggcggagaagaagccggcggccaagaagcccgcggaggaggagcccgcgacagagaaggtggagaaggctccggcggggaagaagcccaaggc

SEQ ID NO: 361 - DNA, 228 bp, Zea mays
gcacgagggacatcatcaccatcaaggccgacgacggctccgacaccgtcactttcatgttcgagtcgcccaagcaagataagatcgcggatttcgagatgaaactgatggacattgatagcgagcacctcggaatcccggattccgagtaccaggccatcgtccgcatgccttctgctgagtttatgaggatctgcaaagatcttagcagcatcggagacacagtcg

SEQ ID NO: 362 - DNA, 235 bp, Zea mays
tgcagcatgagtaagttgcagtctgagtctgtcaaggatgccatctcccagattgttggggatgccaaggagaagaataggaagttcactgagactgtggaacttcagattggtctgaagaattatgatccacagaaggacaagcgtttcagtggctctgttaagttgccccatatccctcgtcccaagatgaaggtgtgcatgcttggtgatgcccagcatgttgaggaggccg

SEQ ID NO: 363 - DNA, 229 bp, Zea mays
gcacgagctggactccaaatgcgggcgacaaaactgtgctacaatatgatgatgtgatgaagcttgattttggaacacatatagatggttacattgttgattgtgcatttactgttgcattcaatcctatgtttgatccattgcttcaagcaacgagagatgccacaaatactggaatcaaggaagctgggatagatgcacggcttggtgatgtcggtgctgcaatcca

SEQ ID NO: 364 - DNA, 229 bp, Zea mays
gcacgaggccgagcggcgtcgacgccaccaagatctcgcaggaggagtacctcaacgcgccaggcgagacctactccgtcaccctcaccgtgccgggaacctacggcttctactgcgagccgcatcaaggagccggaatggtcggcaagatcaccgtcaactaattaagctagctatcgatcgatatccattcatgtattagctgttgcttcctgctttgtactccgcc

SEQ ID NO: 365 - DNA, 223 bp, Zea mays
gcacgaggatgtacccggacatggctgagcaggtgaccaccaccacccaggctctcatcatgggtgtcgcaccatccaaggggcacgccgagggcgggttcgaggcggccgccggagctgagaacggtgggtgcaagtgcggcggcaactgccagtgcgactcctgcaactgcggcaagtgagctaggtgctccaccctgcaggccggccggaggaagctagc

SEQ ID NO: 366 - DNA, 181 bp, Zea mays
gcacgagctgtggcgagcggtgctacgacaagccgtggccctccaccaggggcgcgcaacaccagggctggtgctgcgaatgttgctgtgaggccattacctgctctcaaggaaaacgtgaagcgcgtcatgttctactgctaagattgacgctgcgctgatgctgtgagcaagcaattat

SEQ ID NO: 367 - DNA, 223 bp, Zea mays
gcacgagcctacgcgcgcatcggccaggtcggggctggcgctgaagcactccatcgacgtgggcgccggcgtgatcgacgcggactaccgaggccccgtcggcgtcatcctcttcaaccactccgacgccgacttcgccgtgaagcccggcgacaggatcgcgcagatgatcatcgaggtgatcgcgacgcccgaggtcgcggaggtggaggacctcgacgcc

SEQ ID NO: 368 - DNA, 225 bp, Zea mays
gcacgagggcaggtgaaagcatgggctgagcttttgaatgctttttgcacgagtggcagactcgaactggaacttatatacaaagtacagacacagtgctatgaggatgctaagctgatgaagctgtttcctgaaatcataagaacactgtatgaccaagatgtcctagctgaagatactgtcctgctttggttccgtaaaggttcaaaccagaagggcaggcaa

SEQ ID NO: 369 - DNA, 162 bp, Zea mays
gcacgagctatcgcgagcggaggtgttatgcctaacatccatcagcatctgctccccaagaaggctgcctcctccaaggccagtgtcgacgacgacgacaactgagactgcttcctgcagaaatgatccgaccaccgccttgttttgtaggaataggatgat

SEQ ID NO: 370 - DNA, 247 bp, Zea mays
gcacgagaaatggagagaaatccgactcgcctactgttggttggggtggtcctggaggctacgtttatcagaaggcctacctcgaattcttctgcgcaaaggagaagttggaccaactaattgagaagatcaaagcattcccttctctcacttacattgctgtgaacaaggatggagaaacattctccaatatttcaccgaacgccgtgaatgctgtcacgtggggtgttttccctggcaaggagat

SEQ ID NO: 371 - DNA, 244 bp, Zea mays
gcacgaggttttcttgtggagctatactagctcgctgctgccttttgttacaatgtttgtacggtcgcaataaatgtatggttgtgtttgctcgagagctactcaggtgattttgtcgtgggagcaccaaaagcagaaaagaactgtttttttcttctctctctctagattctgacgagtggtggtctgcactcgtcgtaatgtcgtttgcctaaactgattttgatggaacaggaaatcttgc

SEQ ID NO: 372 - DNA, 243 bp, Zea mays
gcacgagatgaagagcctctcggttcatcttattgagggaataattgatgaagtggacagtacagttcatgtttcgtgggtccagcccagagtgcttggaatcccacaggttaaggctttgcgcgaccgcctggatgcctgggttggaaaggtgcatactacattgctttcagttgaggcagaaacacctgatcttgttgctgcctaatttagcacctgttacacttccgcgagaggcttggt

SEQ ID NO: 373 - DNA, 224 bp, Zea mays
gcacgagatcaggcggaactgtaacatatgagggtcggttcgagatactgtcactgtcggggtcattcctcttggtggaggatggtggtcaacgcagtcgaactggagggctcagtgtgtcgttggctggtcccgacggtcgtgtgctgggcggtggagttgcagggctcctcgtagcagcttcgccagttcagatagtactgggaagtttcaattctggaggc

SEQ ID NO: 374 - DNA, 241 bp, Zea mays
gcacgaggaaacaggtttcaccctcataagatggtttgagttcatgccatagccacatctcaaaaactcaaaacttgggtagttgtaacaaaagcctagagacataacataagacaagatagtctttgacagcacaagtgaaatttgctaatggctgggtgagggggtctcctcagtcgaacaggctgaagcccatgtcgtcatcagactcctccttggcctcttccttcttctcctcgac

SEQ ID NO: 375 - DNA, 244 bp, Zea mays
gcacgaggccaagaccaagagcaatgagacccgctacaggtgcatctggggcaaggtcacccgtccgcacggaaactcgggcgtcgtccgtgccaagttcatgtccaacctcccgcctgagtccatggggcgcaaggtcagagtgttcatgtacccgagcagcatctaaggttttgttggagtaaagatggactagaaatggccatgtgtttatttctcacttttctctgaacttaaaatgcct

SEQ ID NO: 376 - DNA, 238 bp, Zea mays
gcacgagctgcaaccgtggtggctactgtaatttcatgcatgtgaagcaaattggcagggatctcaggaggaagctgtatgggcgttctgcttccaggaggtaccatgggagaagccgaagccgaagcccgccaccacaaaggaggggccaccgtgaccgtgatgactaccgtggtggcggcggttgtggaaggggaagaggtagcaggtatgacaggtacgatgatggagccggcag

SEQ ID NO: 377 - DNA, 239 bp, Zea mays
gcacgagcttgcctacacacccagagagtgtccctattaatgcattggttgctgtaaaaggaacacctctcgaggaccagaagcctgtagagatatgggaaatgatccgcatgatcgccactgctcggatcgtgatgccaagggcaatggtgaggctttcagcgggccgagtacggttctccatgccagagcaagctctctgcttccttgctggggccaactccatctttgccggcgag

SEQ ID NO: 378 - DNA, 238 bp, Zea mays
gcacgaggaacaagaggtctgtcgctgaggagagagctggacgtaagcttggtggactgagggttcttaactcctactgggtgaatgaggatagtacctacaagtacttcgagatcatccttgtggacgttgcccacaaagccatcaaaaccgacccgaggatcaactggctatgcaaccctgtgcacaagcaccgcgagctccgtggcctcacctcagcaggcaagaagtaccgtgg

SEQ ID NO: 379 - DNA, 237 bp, Zea mays
gcacgagggcccctgctgcatcagttgcaagaacaccaacacaggctcctgttgccacagctgaaacggcacctccaagtgtccaacctcaggctgctccagctgctacggttgctgctactgatgatgctgatgtgtacagtcaggcagcttcaaaccttgtatctggcaacaatctagaacagactatccaacaaattcttgacatgggtggtggtacatgggaacgtgatactg

SEQ ID NO: 380 - DNA, 240 bp, Zea mays
gcacgaggctttccgcggcgaagaagccggcggcgcaccctccctacgctgagatgattgtagaggcgatcgctgccctcaaggagaggaaggggtcgagctcggtggccatcagcaagtacgtcgaggggaagcatggcggcaagctccccaccaacttccgcaagcagctcactgtgcagctgaagaagctcgctgccgccggcaagctgacgagggtgaagaactccttcaagctgc

SEQ ID NO: 381 - DNA, 240 bp, Zea mays
gcacgagccgcttctcgctccggattccctctgctctttccctaacgaaggtagccatggcggggagaggtaaggcgatcggctcaggcgccgccaagaaggccacgtccaggagctccaaggctggcctccagttccccgtgggaaggatcgccaggttcctcaaggccggcaagtatgccgagagagtcggcgccggcgcccctgtctacctcgctgccgtgctcgagtatcttgctg

SEQ ID NO: 382 - DNA, 238 bp, Zea mays
gcacgaggtcggttcacttctccaggtaaggaaagggttcgtactcatggcgccgccgcagccaaagtcgggccttttcgttggcatcaacaagggtcatgtcgtcaccaagcgcgagctgcctccccgcccgtgccaccgcaaggggaaatcaacgaagagggtgtctatggtcaggggcctgatcagagaggttgctgggtttgctccttatgagaagcgtatcactgagcttctg

SEQ ID NO: 383 - DNA, 236 bp, Zea mays
gcacgagctttccatttaagtggataaacaagaaatggaaagaaggttttcatgtgactgcaatggcaacatcaggcaatcgatgggctatagtcatgtcccgcagtgctggattttctgagcaggttgtggagttggacttcttgtacccgagcgagggcatccatagacgctgggacaatggcttccgtattactgcaatggctgccacgatggatcagtctgcgctgatccta

SEQ ID NO: 384 - DNA, 235 bp, Zea mays
gcacgagggaatttgttgccatgatgacaaagggcaatatgggagttgggaggagaacgatgagaaacagcttgaacataagcatgagggatacgcctgctggtgccctctgaagtctgagcatccaagaaatttgttgcagtatgagagaacgcctggtacgggctgcggaaagcttcttctaatcctttcctacacgaattctgcctacattttttggttgctatatctgttg

SEQ ID NO: 385 - DNA, 235 bp, Zea mays
gcacgagacggagctgctgatccgcaagctgccgttccagcgcctggtgcgggagatcgcgcaggacttcaagaccgacctacgcttccagagctctgctgtctccgcgctgcaggaggcggctgaggcctaccttgtcgggctcttcgaggacaccaacctctgcgccatccacgccaagcgcgtcaccatcatgcccaaggacatccagcttgcccgccggatccgcggggag

SEQ ID NO: 386 - DNA, 235 bp, Zea mays
gcacgaggccgtcccagttcgcttcgcgtcaccgagagctcgtcggcctccgtccccgcgagaagcgagagcatggacacccaagtgaagcttgctgttgtggtaaaggtgatgggcaggaccggctccaggggtcaggtgacccaggtcagagtgaagttcttggatgaccagaaccgtctcatcatgaggaacgtcaagggccctgttcgtgagggtgacatcctgaccctgc

SEQ ID NO: 387 - DNA, 235 bp, Zea mays
gcacgagacggaatcggggacgttgacacaaaggacaatcctctatccatgcaagatgcgttggaggactacaagaggctagattacctccagcgccacatctcagttattaaagaatcaatagacttgggggcggacgtgcgcggccacttcacatggtctctgttggacaacttcgagtggtctagtggctacaccgagcgttacggcatcatctacgtcgaccgtgacgacg

SEQ ID NO: 388 - DNA, 259 bp, Zea mays
cggcacgagccaagcgcgtcaccatcatgcccaaggacatccagcttgcccgccgcatccgcggggagagggcctaagcgtcatattttctgtcatcagtgcccgatcagaagatgtagagatatgctgggttctgtagtttgggttactgtcgaatcatcgagtgttggctgttcactgctgtaacttaattatcatgatgcatatgaaatggcaatgaactctgttatcaaaaaaaaccaaaaaaaactcgaggggg

SEQ ID NO: 389 - DNA, 256 bp, Zea mays
tgaaccagaagagaggtcatgtctttgaggagatgcagaggccgggtaccccgctctacaacatcaaggctttcctccctgtcatcgagtcctttggtttctccagccaactgagggccgcaacctctggtcaggcgttcccccagtgtgtctttgaccattgggacatgatgggctcagatcctttggaggccggctcccaggctgctcagctggtgctggatatccgcaagaggaagggtctcaaggaacagat

SEQ ID NO: 390 - DNA, 249 bp, Zea mays
gcacgagggaacacagctgcattcctggtttcttcattggcttctgccatcaccggctcgactgtttatgttgacaatgggctcaatacaatggggcttgcaattgacagccctaccataacgtcatagatgtggttgtggtagatagacgacctttcctgctgcattgcggtatcatccttgaataaagatcatagttagttataaatatgagaggtaagggcaggaaagggggaaaattatgaactg

SEQ ID NO: 391 - DNA, 252 bp, Zea mays
  unsure (1)..(252): unsure at all n locations
gcacgagccaaggcggagaagaagccggcggcgaagaagcccgcagaggaggagcccgcggccccggcggagaaggctcccgctgggaagaagccgaaggtntagaagcggctcccggcgggaaaatccgccggcaaggaaggcggtgttgacaagaaggggcggaagaaggccaagaagagcgtggagacgtacaagatctacatcttcaaggtgctgaagcaggtgcacccggacatcggcatctcctcc

SEQ ID NO: 392 - DNA, 249 bp, Zea mays
gcacgaggtcgaccgtgacgacggctacaggcgctacctgaagcgctcagctaagtggctgagagagttcaacggagctgccaaaaaggctgaaaagaaggttcttacgccagcttagaatgtagtggtgtgtagtttcagttcagctgtgtgtctgatgtgtatggccgtgggatgaaacaagctagctagaatgtagtggtgtgtagtttcaattcagtagtgtgtgtccgacccgttttatgcaaa

SEQ ID NO: 393 - DNA, 255 bp, Zea mays
caatgtgcagctttttaacagccttctgctgcggcgtgagtgctgctcgttcagtaacggagagtacgtgaaggctgggctggatgagctagagcattggtgcttttggctgactgaagagtacgcaggatctgcatgggacgagctgaagcatatcaggcaggcagttaccctcttgatacttgacgacaagcatagccggagtctcgcggagatcacagacgacttctgcccagtgctgagcatgcagcaact

SEQ ID NO: 394 - DNA, 244 bp, Zea mays
gcacgagcagacagggtgttctgggtatcaaggtgaagatcatgcttgactgggacccgaaggcaaggttggcccgatcacccctcttccggacctggtgaccatccataccccgaaggaggaggacgagctgcgccctcctgtcctggcagctgaggtctaaggtcccaacagcgtcctcgaaatggcagtttgatctggtcctagctaggtttgtatcctatgataagggcagtgctaagac

SEQ ID NO: 395 - DNA, 245 bp, Zea mays
gcacgagcaaccatcatgggtcctcctgatagtccatatgctggaggtgttttcttggtgaacattcatttcccgccagactaccccttcaagcctccaaaggtatcttttaagacgaaggtcttccatccaaacatcaatagtaatggaagcatatgtcttgacattcttaaggagcagtggagccctgctttgacaatctctaagaatatcaattgcaagccattcttttcgttcaaaattta

SEQ ID NO: 396 - DNA, 246 bp, Zea mays
ggcacgagaagaagtttgagacagctcttggcgtccttaaaaaggaaaagattactattgatccagatgacccagcggcagtttctcgatatgctcaagtcatgaagactgtaagggaaaaggcggatcttctttctgattctcaaaggattaaatataccattgagaccttcaccaagggcatccctgatgcacggacttacttgaatactcttcaacagctcagaataaagagtggtcttatag

SEQ ID NO: 397 - DNA, 244 bp, Zea mays
gcacgagagaaaagcgatgttgcaggcacagttttctcagatgcgccctgctgtaccaatgacacccactctagccccacgccttccaatgtactctccgatggctcctcagcaactcttctatggacaagcgccaccagctatgatgccccctcagccaggatttgctttccagcaacagcttgttccaggcatgaggcctgggggtcctcatatgccaaactattatgttccggttgtccaa

SEQ ID NO: 398 - DNA, 242 bp, Zea mays
gcacgaggaaggacccaaccggcgccaaggtgaccaaggcggccgccaagaagaaatgatgcgatcccgtgtctgcttttgcagtgcctggataacttgccactaaagttgtgtatgcggttgttgctgttattgcgtggactgtttgctgcggtgtctcctgtttgtttgggtagcgcacgtcggcctcttcaggtgtctgttgtctgttgtctttactatcagtaatgctcctgagactt

SEQ ID NO: 399 - DNA, 245 bp, Zea mays
gcacgagattcattcctcgcacgctttgtgaagacagtgatcctttggatgtactggttataatgcaggagcctgttatcccaggctgtttcctacgtgcgaaggccatcggccttatgccgatgattgatcagggagaggcagatgacaagatcattgcagtgtgcgctgatgatcccgagtacaggcattacaatgatatcaaggagctcccacctcaccgcttggctgaaatcaggcgcttc

SEQ ID NO: 400 - DNA, 246 bp, Zea mays
gcacgagggaaagaagggcactgggggcattactatcaagaaaaccggcatgtccttgattattggtgtctacgacgagccaatgactccagggcaatgcaacatggtggtggagaggctcggcgattacctgatcgagcagggcttctaaaagttcgtcatgttctgttttggtcatttgggcaccaaagtttgcgcctcatttggttctgtaatccgtgagctcgtgcatgtacttggcgtatt

SEQ ID NO: 401 - DNA, 247 bp, Zea mays
gcacgaggtcgggtgcaccgtcgacggcaaggagcccaaggacctgcagcaggagattgacgacggcgaggtggagatcccgtccgcttaagaaggattggtgtccaggactgtgttatccttgctgctgaagccattctctgcctagattttctcatatttacttgaggtgggggtggacgaggacgtggaactatggaagttatcacagcggagttttgcttagaaactttgtcatgctttaagg

SEQ ID NO: 402 - DNA, 241 bp, Zea mays
gcacgagattcagtacatcgcattccctgctatatcttgtggtgtttatcgttatcctcccaaggaagcatcaaaaatagctgtttctaccgcagaaaaattttcagaggatatcccagaggtgcatgttgttctgttctcggatgacctttacaatatatggcgcgagactgcccagcagttgctatcacagtttgagaaatgaatggtccataggcagtttgctagcactagcagttgc

SEQ ID NO: 403 - DNA, 239 bp, Zea mays
gcacgaggtgttccaggtgaggaaaggcgagatgctgttcggctaccagccgtgcgccaccaaggacccccgcgtgttcggcgacacggccggggacttcgtgcccgaccgcttcctcggcgaggagggcagcaagctgctgcagtacgtgtactggtccaacggccgcgagaccgacaaccccagcgtcgacaacaagcagtgccccgggaagaacttcgtggtgctcgtcggcaggc

SEQ ID NO: 404 - DNA, 241 bp, Zea mays
gcacgagcctacttccgcgtcaactacgccgccgtggtcgccttcgcgctgggggcctcgctgctggcgcaccctttctcgctcctcatcctcctgggcctcctcgccgcctggtgcttcctctacctcttccgcgcgtccgaccagcctgtcgccctcttcggccgagccttctccgaccgcgagacgctgctggggctcgtcggcgcgtccttcgtcctgctgttcttcacctccgtcg

SEQ ID NO: 405 - DNA, 205 bp, Zea mays
gcacgagggatgctgatgaagatatgcggagggccatggacaagtcattcagggaatctaatggtaccgttctctcaaccaattggaaagatgttggatcaaagacggtggaagcgagccctcctgatggtatggagctcaagaagtgggaaatttgaagtttggactgcccctcttgtaaatccaggtcttggaagttatgacc

SEQ ID NO: 406 - DNA, 206 bp, Zea mays
gcacgaggggagcggccggtcgcaaggccggcgggccgaggaagaagtcggtgacgaggtccgtgaaggccgggctccagttccccgtcggccgcatcgggcgctacctcaagaagggccgctacgcgcagccgtcggcagcggtgcccccgtctacctcgcggccgtcctggagtacctcgccgctgaggtcctggagctcgccg

SEQ ID NO: 407 - DNA, 204 bp, Zea mays
gcacgagccagcaccagtccccaattatttggcctccgtcagagaggggagaaagacccgttcgaggcggcggcgatgtcggggcgcggcaagggcggcaagggtctgggcaagggtggagccaagcgccaccggaaggtgctccgcgacaacatccagggcatcaccaagccggcgatccggaggctggctcggaggggcggc

SEQ ID NO: 408 - DNA, 203 bp, Zea mays
gcacgaggcgcggtgtgcatgatctccaactccaccagcgtcgtcgaggtgttctcccgcatcaacagcaagttcgacctcatgtacgccaagcgcgcgttcgtgcactggtacgtcggcgagggcatggaggagggggagttctccgaggcacgcgaggacctggccgccctggagaaggactacgaggaggtcgccgcaga

SEQ ID NO: 409 - DNA, 202 bp, Zea mays
gcacgaggcaagttgatgctgccccattcaagcagtggtacctcactcactatggagttgacattggtaggaagaagaaaacccctgctgcaaagaaggataatgctgagggacaagaggttgaggcagcagctgaggaaacgaaaaagagcaaccatgtcacgaggaagcttgagaagcgcaaggagggacgtacccttga

SEQ ID NO: 410 - DNA, 97 bp, Zea mays
gcacgagcctgttgccgtagttaattttgctgtcctgtctgtgaacctgaagaactcttggtaattgttacaagcgacctgttccagtttatgtgag

SEQ ID NO: 411 - DNA, 205 bp, Zea mays
gcacgagctgggacggcggcaggcagcgctgccctgagggcaccatggaggccgccgccgtcgcgggtgccggctccggccgcggctggtggaaccagcagctcagcgacatgagctaccgccgcatgcgctgggtgcagcgcaagttcatgatctacaactactgcgccgacgccaagcgcttcccgcaagtcgtgcccgccga

SEQ ID NO: 412 - DNA, 198 bp, Zea mays
gcacgagatcaccaagcccgccatccggaggctggctcggaggggcggcgtgaagcgcatttcggggcttatctacgaggagacccgcggcgtcctcaagatcttcctcgagaacgtcatccgcgacgccgtcacctacaccgagcacgcacgccgcaagactgttaccgccatggacgtcgtctacgcgctcaagcg

SEQ ID NO: 413 - DNA, 197 bp, Zea mays
gcacgagccaaagcctccgacccccttcctctctccctccgccgccgctgcgcacgcagggaacaagcgacatgggcgtctacacctttgtgtgccgcaacaacggcggcgagtggaccgccaagcagcactccggcgagatcgaggcttccgccgctaccccatacgagctgcagcgccgcctcgtcgctgccgcc

SEQ ID NO: 414 - DNA, 197 bp, Zea mays
gcacgaggagacctacaagatctacatcttcaaggtgctgaagcaggtccaccccgacatcggcatctcttccaaggccatgtccatcatgaactccttcatcaacgacatcttcgagaagctcgccggcgaggctgccaagcttgcgcgctacaacaagaagcccaccatcacctctcgggagattcaaacctctg

SEQ ID NO: 415 - DNA, 195 bp, Zea mays
gcacgaggccgagctcattgctctcgagatgtccaaacatactgggtctccgatcgaagagtgccgcccgaagatctggctgatggactccaagggcctgatcgtggcgtcacggaaggactcgctgcaggcgttcaagaagccatgggcgcacgagcacgagcccgtggcgaccctgctggaggccgtgcagtc

SEQ ID NO: 416 - DNA, 225 bp, Zea mays
tgtcccaactgagcggtaaggacatcaccgagctcattgccgcgggcagagagaagtttgcttcagtcccatgtggcggcggcggtgtggctgttgcggcaggtgcacctgctgctggcggactgctcctgcagctgaggcaaagaaagaagagaaggtggaagagaaggaagaaagcgatgatgatatgggcttcagcctcttcgactaggttgcacagtcatc

SEQ ID NO: 417 - DNA, 215 bp, Zea mays
gcagagcggacagctgcctcacttatgactacgtcggggatgatccggaagacagtctcgtggagaccgatctgaacgccgtttctgcccttgccaccctcgcggcgtcgcgccctcctgctgcagctggagtctctcaccgtgatgccctccaggcttgtgcccatcacgcccgcctctggctcagccgtgcggatgaacccatccaccctgac

SEQ ID NO: 418 - DNA, 222 bp, Zea mays
gcacgaggaagagttcctcatcacctgtagtagacatgtgccttgctgtagtcactttattagctccggagtctgttaagaatcgagaatgccattgctccatccacggttatgatgttaaaaattattattcttcaattcataatgtaacacgactacgagtaatgatgaatgcaattcacttgaagactgaaatgtatgcaaaaactcgaactagggggg

SEQ ID NO: 419 - DNA, 222 bp, Zea mays
gcacgagggcttcctcacacggcactccagccgctagccctcactcaaccagacaaccagtacaccaccgccaccaagcccgggccgaataactctgccgggcaaccgccgcccttcgccggcaaagaacgcccaccagatccaccccggcctgctatggagtccgcggtgaacccgaaggcgtacccgctggctgatgcgcactgaacgatgggtatcctc

SEQ ID NO: 420 - DNA, 224 bp, Zea mays
gcacgagggcaagtttgccgtgaagaggaaagcagttggtatctggggatgcaaggactgtgggaaggttaaggccggtggcgcctacacaatgaacactgctagtgcggtcactgtgagaagcacaatccggcgcctgcgggagcagaccgaagcatgattgcgggcagcttgaaaaggagtacctggatttttgtagttcagccaagagccgtgaaccattt

SEQ ID NO: 421 - DNA, 212 bp, Zea mays
gcacgaggcaatatttgtgatattgtgtcatctgtggactatggttaaatttcagttatttgttttctttcaccttccagaactgttagcaagagcattctggaccaggatgctcgaacacaactggctgtatgtacatttgtgaatggtgaataaagaaggggcaataaactgctgcgaaatacagcacagagtgaaaaactcgagttttt

SEQ ID NO: 422 - DNA, 226 bp, Zea mays
gcacgaggcctcgctgagcactttccaacagatgtggatatctaaggaggagtacgatgagtctggcccggcaattgttcacaggaagtgcttctaggcttcgcaagttcctcatcgttgcctagtctcaagttatgtccccttcatttctcaagatacgtgtggcagatttgcatggtacggttcatttatcaaattatgcccaccccctctttgtatgttgtgg

SEQ ID NO: 423 - DNA, 226 bp, Zea mays
gcacgagcagaggaccgtccctgctgctgtgcctgctgttgtcttcctctccggtggacagagcgaggaggaggccaccctgaatctcaatgccatgaacaagctcagcaccaagaagccatgggccctgtccttctccttcggccgtgccctccaggcgagcaccctcaaggcctgggctggcaaggtggagaacgtggagaaggctagagcggccttcctcgcc

SEQ ID NO: 424 - DNA, 226 bp, Zea mays
gcacgagatactgtggagccttaggtcatggtgatgagaacgataaaactagcccagaattgatcggcagcttgaagggccaagttgctgtgcaggtatgtgcaaggaagaggaagacgtttgtcctcacggacgagggctcagttgttgcgtttggatggatgggttttgggagtctagggtttcttgaccgaggaacatcagacaaagtaatgaggccccgcgt

SEQ ID NO: 425 - DNA, 188 bp, Zea mays
gcacgaggagacattcacctggcttgagctggcttttgctatagcgtgcaaggggttgctgggtgtcgtacctacctgacttatcattatctgtggttacattctggaccctgtattttctatgctttcatgtctctctactttctagtattaattatcaataagttggtttggaatggttgaattgc

SEQ ID NO: 426 - DNA, 228 bp, Zea mays
gcacgaggagaactagtcttgagtttttttttttttttttttacgttttactaatttatccaaaataggattttgaagtattacaatactctagtattcgacctaatccatatatattgagatggattggagtgtaattaatttaatttacaccctaattcatcttaatacacgtaaattcaggtgaatactaaaatatccaaccaaagcattatccaccccggagct

SEQ ID NO: 427 - DNA, 224 bp, Zea mays
gcacgaggcattgccgcagccgtggctgcaaaagcttatgaactcggtttggcgacccgtctgcctcccccaagggacctggtgaaatatgcacagagctgcatgtacactcctgtctaccgtaactaccggtagtgctgctgggatcaattctgcagtaataaaatatgtcgacgcagatgatcctgcaatgttgtagtttattttttcatttgttggccctg

SEQ ID NO: 428 - DNA, 223 bp, Zea mays
gcacgaggttgtttccaatgattttgttggtgattcaaggtcaagcatctttgatgccaaggctggtattggactgagctcttccttcatgaagctcgtgtcttggtatgacaacgagtggggctacagcaaccgggttctggatctgatcgctcacatggctcttgtgagcgccaagcactgatgttcgtactcgttcctccagtaccagtagtagcctaga

SEQ ID NO: 429 - DNA, 220 bp, Zea mays
gcacgaggcggcggcgcgggcggacaaggagcaggcggaggaggagttgtgccaagccacaatgggtatctcgcgtgactcgatgcacaagcgccgagccaccggtggaaagcagaaggcctggaggaagaagcgaaagtatgagcttggtcgccagccagccaacaccaagttgtcaagcaataagacagtgaggagggtccgtgttcgtggaggtaat

SEQ ID NO: 430 - DNA, 231 bp, Zea mays
tcattgccgcactggcggcttctacggcatctgcgccgtacatgcgaacaaacgcattcagatattgcagcggctggcgatcttcttcctgtgccagtaataacaacgtttgcaggcagcgataatagttggcgcgttccggactaaatactgatgagttaaactccatcgtccattcggtccagaccagagcctgttccagatcgccaccagccagcgccagcatggctt

SEQ ID NO: 431 - DNA, 227 bp, Zea mays
gttgttgaactagatacccgagtggatgggcgtgacattcaaagtgttctcctggacctagttgggcgtcgtactgtgccacaggtgtttgtcaatggacagcatattggtggctcagacgatacagtaaatgcgctttcaaatggacagctccagaaacttctcgggaagagtcagtcacaatgatgggtcgctggacaagcttgcactgtcaagaacacgtgagt

SEQ ID NO: 432 - DNA, 242 bp, Zea mays
ggcacgagtcgacctcgtccaaaaccccaccaacgccggattcttcgagtcccggcgggcgtgctgcggcacggcacgatcgagacgtcggtgctgtgccaccagggggcgccggggacgtgcaccaacgccacgggctacgtcttctgggacggcttccaccccacggacgccgccaacaaggtgctcgccgacgtgctcctcctgcagggcctacagctcatcgcgtgaccacagccacg

SEQ ID NO: 433 - DNA, 239 bp, Zea mays
gcacgaggtccgttcaaccaggccacaaggtgatcttggcccactgcatcccttcactgctggagtgtatgttgcactaatgatggctcagattgaggtccttaggaagaagggccactcttactcagagataattaatgagagcctgatcgagtccgtggactcgttgaacccgttcatgcatgctcgcggtgtggccttcatggtcgataactgctccacaactgctcgtttgggat

SEQ ID NO: 434 - DNA, 247 bp, Zea mays
tcggagttgcacatccatgtgagttggcagaggtgtttgatgtgatgtgggcatttgtgttttatgtaatagatagtatcatcctcgctcgttgtgccgccttcgtccacacaagcgacggagctaaggttacgagaaccggcccagtggcaccatgttggtctaccaggatctgctatctgacgacgacctccagtaggactccctcccctacaggcaactcaggaacggcgtcacagacgtcgag

SEQ ID NO: 435 - DNA, 247 bp, Zea mays
tgacatctctggtgttgatgtcgccaagtttgatgacaagtactttgccagggagaagaagcagaaggtgaagaagaccgagggcgaactttttgagacagaaaaggaggcatccaagtcactgcctgacttcaagaaggatgaccagaaggctgtggattctgctctgatcaaggctattgaggctgttccggagctgaaaacctatcttggcgcccggttctctctcagggatggtgacaagccc

SEQ ID NO: 436 - DNA, 244 bp, Zea mays
gcacgagcaaggccgggctgcagttccccgtcggccggatcgggcgctacctcaagaagggccggtacgcgcagcgctgggcactggcgcccccgtctacctcgccgccgtcctggagtacctcgccgccgaggttctggagttggcagggaacgcggcgaaagacaacaagaagacgcgcatcatcccgcgccacgtgctcctggcgatccgcaacgacgaggagctcgggaagctgctggcc

SEQ ID NO: 437 - DNA, 245 bp, Zea mays
gcacgagaagaggccgaagcagttcggcatcggtggcgcgttgccgcccaagaaggacctgcaccggttcgtcaagtggcccaaggtcgtgcgtatccagcggcagcgccgcatcctcaagcagcgcctcaaggtaccaccggcgctcaaccagttcacccgcaccctcgacaagaacctcgctacgaacctgtttaagatgcttctcaagtaccggcctgaagacaaggctgccaagaaggaga

SEQ ID NO: 438 - DNA, 235 bp, Zea mays
gcacgaggatcgatggatgctgttacccccgtcaggctttattctaagttaatcttaaggaaaaaatggtgcttcttggtgctgcttccaaggaagaggtggcgagcaacaacatgatttttgccacgccaagtatacctggaggagccgtggtgttccaagtatgtctgagtgctgtcatggtaacgcgatgctggttccctggttgttgattggaacgaatcctaagcgtctg

SEQ ID NO: 439 - DNA, 238 bp, Zea mays
gcacgagcaaatccccaattcctccgagttcgagcgaccatgtcggggcgtggcaagggcgggaagggtctgggcaaaggcggcgccaagcgtcaccgcaaggttctccgcgacaacatccagggcatcacgaagccggcgatccggaggctggcgaggaggggcggcgtgaagcgagtctcggggctcatctacgaggagacccgcggcgtgctcaagatcttcctcgagaacgtca

SEQ ID NO: 440 - DNA, 237 bp, Zea mays
gcacgagcctccctccgcggctccgccttccgccgcgaacacgccgctgtctcgaccccttgtcctcctccttcagcaagatggcggagattgagataaaaacagcacctgctgacttccgcttccctacaacaaaccaaacaaggcattgttttactcgctatgtcgagtaccacaggtgtttgaatgccaaaggggatgatgctggtgtttgcgaaaaatttgccaagtactaca

SEQ ID NO: 441 - DNA, 238 bp, Zea mays
gcacgagggagcggcgggtctccggtggacatcacggcagagccccagcgtctgaagagcatcaccgttgctactggcatcgccgtgacctcgattgccttctcctacgtcgactccgccggccaaacccaatctgctggtcgctggggcggttccggtggagaaactgagccggtgatccagctcggcgactccgaggtgctcacggagctgtccgggacgatcggcaacgtcgacg

SEQ ID NO: 442 - DNA, 230 bp, Zea mays
gcacgagcccaattcctccgagttcgagcgaccatgtcggggcgtggcaagggcgggaagggtctgggcaaaggcggcgccaagcgtcaccgcaaggttctccgcgacaacatccagggcatcacgaagccggcgatccggaggctggcgaggaggggcggcgtgaagcgcatctcggggctcatctacgaggagacccgcggcgtgctcaagatcttcctcgagaacgt

SEQ ID NO: 443 - DNA, 232 bp, Zea mays
gcacgagaaccccaagagcgtcctcaaacccacggcgctggccacgtccaccatcagggccaacgttgccgagcttcgcgcgatgcacggcagcagcaagtagctcgcgcctgccgtccctgtttcgtaaaaactctattatctcgctctgtcacgaccaacgatgcactcgctgcttccagcagcagcgttggctgttgcctgttggcctgtaaattcgtgtggctgaaac

SEQ ID NO: 444 - DNA, 236 bp, Zea mays
gatgggcttgagcgatcaggacattgttgccctctctggtggccacaccttgggaaggtgccacaaagagcggtctggtttcgagggggcctggactacaaaccctttggtctttgacaactcttacttcaaggaacttctgagtggtgataaggagggccttcttcagctcccaagtgacaaagccctgctgagtgaccctgtcttccgccctcttgtcgagaaatatgctgcgg

SEQ ID NO: 445 - DNA, 232 bp, Zea mays
gcacgagcgaaccggcgatccggaggctggcgaggaggggtggcgtgaagcgcatctccgggctgatctacgaggagacccgcggcgtgctcaagatctttctcgagaatgtcatccgcgacgctgtgacctacacggagcacgcccgtcgcaaaaccgtcaccgctatggacgtcgtgtacgccctcaaacgccagggccgcactctctatggcttcggcggctaggttag

SEQ ID NO: 446 - DNA, 240 bp, Zea mays
cggaggcgaaggaggagcagcagcagcaggcggcgccgaggagcggcatcccactcagtgcttgcaaccatggctaggggattgaagaagcacttgaagaggctcaatgcgcccaagcattggatgctcgacaagcttggcggagcttttgctcccaagccatcttctggacctcacaagtccagggagtgccttcctctgatcctcatcatcaggaacaggctcaagtatgctctgaac

SEQ ID NO: 447 - DNA, 240 bp, Zea mays
gtcacccaaggtcctgttgatgtggacattggtgccaatccatccgccgagggtggtgaggacgaaagcgttgatgacacagctgtgaaggtggttgatattgttgacacattccgtctacaggagcaacctccttttgacaagaaatcatttgtgtcttacatcaaaaaatacatcaagaatctcactgctgtgttggagccagagaaagcggatgagttcaaaaagggtgtcgagggt

SEQ ID NO: 448 - DNA, 253 bp, Zea mays
gcacgagccacggtttcgtggcgaggccggagtcgctgaccgacgggtccgtgaacctcatggtctggaactgtaccatccccggcaagcacgggaccgattgggaaggtgggtactacccacttacccttcatttcagtgaagattacccaagcaaacctcccaaatgcaagtttccacagggttttttccatccaaatgtttatccatcaggaacagtctgcctctcaattctgaacgaggatagcgattg

SEQ ID NO: 449 - DNA, 259 bp, Zea mays
caatatctctctgctctgccaaactcgcgataatatactcagggtcttgaaagagataaacgatgctccagatatcatgaagcagatgcccccgctacctgtgaagataaacgaggagctcgtcaactcgttgctccctagaccaactgtacctatgcagtagtgatagcaaaatgagcttttaagataggcagctgaaataaaaaaaaaaaggggcagccctggtacttttttgttcgttttgtagctccatcctctc

SEQ ID NO: 450 - DNA, 253 bp, Zea mays
gcacgaggaacattgtggaggagctcaaacttgcaagggacatttatgagcatgctgttgttttgagtgtgaaacttgaggaccaagatgcgtctgaacgcgatttctgccagctgaagccttattacatggatacatgtggcataattcccgcctcgccagaggagtacccaattttgggactcaatcttctgaggctgttggttcagaatagaattgccgaattccacactgagctggagcttttacctgc

SEQ ID NO: 451 - DNA, 254 bp, Zea mays
gcacgaggcatttcccacagagcttatgatcttgaaggaaaaactgttgggactgttggggctggtcgtattggcatgctcttgcttcagcgtcttaagccctttaactgcaacctactttaccatgacagacttcagattgacccagagcttgagaaagaaattggggccaaatttgaggaggacctgtatgctatgcttccaaagtgtgatgtgattgtgatcaacacacctcttacggagaaaacaagagg

SEQ ID NO: 452 - DNA, 255 bp, Zea mays
gcacgagccgacctccgcttccagtcctccgctgtcgccgcgctgcaggaggccgccgaggcctacctcgtggggctcttcgaggacaccaacctctgcgccatccacgccaagcgcgtcaccatcatgcccaaggacatccagctcgcgcgccgcatcaggggcgagagggcttgatctcccgttgtcgtcgtccacgttgttgggcctttcctctgtgtctctgcttgtagaatccttgcttctgttcggttc

SEQ ID NO: 453 - DNA, 251 bp, Zea mays
gcacgagtattggtgttgtctattattcccctattcaattcttttttcttaggaatacctatggtcagcatgctcctttatgtctggagccgagagaatccaaatgctcagataaatatatacggcctcgtccaattgaggtccttttatcttccatgggctatgctcttattggatgtgatatttgggtcatcattaatgcctggacttctgggtatcatggttggacatctctactacttctttgcagt

SEQ ID NO: 454 - DNA, 253 bp, Zea mays
ctggaaccaaaccaagctgcaaaggtcactggaatgcttttggagatggatcagaccgaggtcctccacctgctcgagtcccctgatgctctcaagtccaaggttgctgaggcgatggatgttctccgcaatgtggcccaccagcaaaacccaaacctcccgactagtcagcttgccgcattatcactgaccgaagcattatgtcctaacttgaaggccataacaaactatcttcagtttccaactcagtgcg

SEQ ID NO: 455 - DNA, 247 bp, Zea mays
gcacgagtgcgccagaggaagtcgctcacgcacacgttccgcccgatcgcgcgccaggtctcgtacgccgccgaggtcaccgccttcgtggaggaccggcggatgaggcgcatgaccggggtcaagaccaaggagctcctcatctgggtcaccctctccgacatgttcgtcgacagggacgacccctccaagatcaccttcaagacgcccaccgggctcggcaggacctaccccgtctccgccttcg

SEQ ID NO: 456 - DNA, 249 bp, Zea mays
gcacgagcccaaacaagcaaccaccgcctccccgatctcgtcgagaggaagcccaatcccgaaaccgccgccctattccaatggcgcccaaggccgagaagaagcccgccgccaagaagcctgcggaggaggagccggcggcggagaaggccacggcggggaagaagcccaaggctgagaagcggctccccgcgggcaagtccgcaggcaaggagggtggcgagaagaaggggaagaggaaggcaaaga

SEQ ID NO: 457 - DNA, 245 bp, Zea mays
gcacgaggtttagtcgcgccgccgccgccgccgaaacagcacatcgctctctcgatctcagccatggcggaggtggagcagccccaggacgcggtgaagctcttcaaccgctggaccttcgacgatgtccaggtgaacgatatctcgctgaacgactacctggctgtgactgcggcgaacacgcgacattcctgccgcactccgcggggcgctactccaagaagcggttccgcaaggcgcagtgc

SEQ ID NO: 458 - DNA, 250 bp, Zea mays
gcacgagtcaagccccagactggccgctgggtgttccccgagaccaacactggcatcattgtccttgctgagggtcgcctgatgaaccttgggtgtgctactggccatcctagctttgtcatgtcctgctcattcactaaccaggtcattgcccaacttgaactgtggaaggagaagagctctggcaagtatgagaagaaggtgtatgtgctccccaagcaccttgatgagaaggttgctgctctccact

SEQ ID NO: 459 - DNA, 243 bp, Zea mays
gcacgagctcatgtttagcaaatttgaatacgatggaatactcaacccaacatttactgaaggtccgtttgagcttcctttttcgagtattagagcatacatcaatgagccgatcactccaaggttcgttcatgtgagttctgcgggagttacaagacctgaaagaccggggttagatttaagcaagcagccacctgctgttcgattgaacaaagagcttggctccattttaacttttaagtt

SEQ ID NO: 460 - DNA, 243 bp, Zea mays
gcacgagggaacatcgtggaacaggcggccatcagggacgtccaggaagcatgcgtctatgatggctacgtcctcccgaagctgtacgctaaggtgcaccactgcgtctcgtgcgcgatccacgctcacatcgtccgcgtccgatcccgtgagaagcgcagggaccgcaagccgccggagcgcttcaggcgcagggaggataggcctgctggtggacaaggaggcccccgccctggtcctggt

SEQ ID NO: 461 - DNA, 247 bp, Zea mays
tggagctccatggagagaaagggcattgccagggatgttctgtcctatgggagcatgatctcctgcttctcaaaggccgggagcctcgactcagtcatgaaactcttcaaccgcatgaacgaggctggcgttgctccagatcggaaagtgtacaatgctattgtgttcgccctggccaagggacggtgcgtgaaggaggcgaagatgcttgtcaggagtatggaggagaagcaggttgccccagaca

SEQ ID NO: 462 - DNA, 241 bp, Zea mays
gcacgagccgacctccacaccgccgacggcctcaagtccctcgaggctcacctcgccggcaaaacctatgtgtctggtgactccattactaaggatgacattaaggtcttcgccgcggtgccgtcgaagcctggcgctgagtttcctaatgccgcccgctggtacgagaccgtctctgcggctgtagcctcaagattccctggtaaggctgttggtgtaaatctgcctgcgggatcagctc

SEQ ID NO: 463 - DNA, 228 bp, Zea mays
gcacgagctaggaagcgtcgaaggataaacactgacgatgctgatgtccgttggcacaagacaggcaacacaaagccagtactagttgatggaaaacaccttggttgtaagaaaataatggtgctttatataagcccgttgaagggtggaaaggctgagaagaccaattgggtgatccaccagtaccacctaggcactggagaggatgagagagatggtgaatatgtt

SEQ ID NO: 464 - DNA, 228 bp, Zea mays
gcacgagcgcctgatggccctcgtcctggacgccaagggtgactacgacggcgcccttgagcacctcgtgcttgtctccatgaccatggttgccaatggccgtgacattgaggttgccaccattgacgtcgccataggcaacacgtacctcgccctcgcccgcttcgacgaggccgtcttctcctaccagaaggcactgactgttctcaaatcggcccgtggcgacga

SEQ ID NO: 465 - DNA, 228 bp, Zea mays
gcacgagggcagacattaatcgaagcccatgttgatgtcaagacaaccgacaactacatgttgcgtttgttctgcatcggcttcaccaagaggcgcccaaaccaggtcaagagaacctgctatgctcaggcatcccagatccgtcagatccgccgtaagatggttgagattatgatcaaccaggcttctacatgtgacctgaaagaacttgtttcgaagttcattcca

SEQ ID NO: 466 - DNA, 66 bp, Zea mays
gcacgatgttggcttctcgtcgccctccggttcgggttcgggttcgtgaggttctccggggttcgg

SEQ ID NO: 467 - DNA, 226 bp, Zea mays
cacgaggaagaaggtcaagaacatcaagcacagcggcaacatcagcctcgacgacgtcatcgagatcgccaagaccatgcggaacaggtccatggccaaggagttggccgggaccgtcaaggagatcctggggacctgcgtcagcgtcgggtgcaccgtcgatgggaaggaccccaaggacttgcagcaggagatcgatgatggtgaggtcgagatcccctcagct

SEQ ID NO: 468 - DNA, 177 bp, Zea mays
gctagtctatgtttgttaccattgacggcttgttcggttagctctcaatccatgtggattgagcgggattggatgggtttgaatcccaaacagctcaaacttcttcacaattttttccaatcccatccaatccatgtgtattgggaataaccgaacaagccctgatgatgattgtgt

SEQ ID NO: 469 - DNA, 224 bp, Zea mays
gcacgaggcttcttcaagctgcatactaccgccgcatgaggtggtcagtcttgaagtcccgtaagctggtcctggatgttgtcaactgaggactaccattacccttttttatatttaaatatgagctgttaaggagtattcaaaataatgaatttgtgatgtacaattttgccactgggggctaggttccatgcctagagattattttgttttctttactctgc

SEQ ID NO: 470 - DNA, 223 bp, Zea mays
gcacgagaagcatggaaaaagcatggattcttgtgttgaagtagtcgaggttgagtcagctctacgacataaagcaaaattggaaaggcaccaacgcacagctgagcgagcggcgaaagccttgctgaaaagaatatgcgggatatgctggtgcagagggagcatgctgagaaacatagactggctgaatttcttgatcctgaagtcaagagatggtcaaatg

SEQ ID NO: 471 - DNA, 219 bp, Zea mays
gcacgaggagccctcagagttcgaggactccgttgcccaggctttctttgatctggagaacgggaaccaggagctcaagagcgacctcaaggacctgtacatcaacaatgctatccagatggatgttaccgggagcaggaaggctgttgtcatccacgtcccataccgcctgcgcaaggccttcaggaagatccatgtcagactcgtcagggagctgga

SEQ ID NO: 472 - DNA, 222 bp, Zea mays
gcacgagcccagctcaagttccagaggaacaagaggtctgttgctgaggagagggctggacgaaagcttggtggactcagggttctcaactcctactgggtgaatgaggatagcacctacaagtactttgagatcattcttgttgatgtggcccacactactatccgcaatgatccaaggatcaactggctatgcaatcctgtgcacaagcaccgggagctc

SEQ ID NO: 473 - DNA, 221 bp, Zea mays
gcacgagaatcacattgatgcactcctgaggctgagtggagttaccgcagagggcctaggtgttaaggttgagccatcagcggttccttcagcttcaattcttgatgttgctgatggacaggccccagctgctgacgaggatgacgatgatgatgttgacctttttggcgaggagactgaagaggagaagaaggctgctgaagaacgtgctgcggctgcca

SEQ ID NO: 474 - DNA, 209 bp, Zea mays
gcacgagctcttgcctgtggtactggtgcttgtgcagtggttgttgcagctgttcttgagggtcgagctgagcggaaatgtgtagttgatttgcctggcgggccattggaaattgagtggagggaggatgacaatcatgtttacatgactggtcctgcagaggtcgtcttttatggatctgttgtccactaggtactggggaccaagat

SEQ ID NO: 475 - DNA, 222 bp, Zea mays
gcacgagctgcttttgaccaaggctaagcgataccttgaggatgttattgctcacaagcaggcaattcccttccggagatactgtggaggtgttggtcgcaccgcacaagcaaagtctcgccactccaatgggcagggtcgctggcctgttaagtcagctaggttcatattggatttgctgaagaatgctgagagtaacgctgatgtgaaaggcttggacgt

SEQ ID NO: 476 - DNA, 220 bp, Zea mays
gcacgaggggcattggtgatggaactgtgagctatgggatggacgatgctgatgacatatttatgcggtcctggacaggaactatcattggtcctcccaacactgttcacgagggacgaatctatcagttaaagctgttttgtgatacagattatccagataaaccaccgactgtccgattccagactcggatcaatatgacatgtgtgaaccaagaaac

SEQ ID NO: 477 - DNA, 196 bp, Zea mays
gcacgagctctactggcgcggcgtcgtcgggcttgtgtgccactgctatcctgtgatctgccctgagtggctcctatcgtgttatgtttctgtcggttcttatctatctgtcgttgtgtggtttacaacttacgttgtaagactttattcccccgctttgctactgggttattaagtttggcgttattgttttctt

SEQ ID NO: 478 - DNA, 229 bp, Zea mays
gcacgagcacgccccgcatcgatggcgcccaaggccgagaagaaacccgcggcgaagaagccggcggaggaggagcccgcggccgagaaggcgcccgccgggaagaagccgaagggtagaagcgggtccccgctggcaagtccgctgccaaggaaggcggcgagggcaagaggggcaagaagaagggcaagaagagcgtggagacctacaagatctacatcttcaaggt

SEQ ID NO: 479 - DNA, 226 bp, Zea mays
gcacgaggaagcgtatccatgtccgtgtggagcatgtgcagccgtcccgctgcacagaagagttccgcctgaggaaggcgaagaatgaccagctgaaggcggatgccaaaaagcgcggcgaggttatcagcaccaagaggcagccattgggtcccaagcccggcttcatggtcgagggcaccaccattgagaccgtaactcccatcccatatgatgtggtcaatga

SEQ ID NO: 480 - DNA, 225 bp, Zea mays
gcacgagcgagttttttttttttttttttgcaaagaaagaaatttggtccattgaaataaggttccaagatacagatcataatcttttcgaaaacattgctaaagcacaaatggtgacatgcttcctctggctctcaaggtttgatgtgaaactttccatgtttacttctcgtagatccaggggtgctggctgctctgccaatcagcagggccctcggggaacca

SEQ ID NO: 481 - DNA, 224 bp, Zea mays
gcacgaggctttttttttttttttttagacatgaaacaatagagatcttagcaaaactttgcacgacaaggtacaataagtagtaacatgttcagatgattgcacggacatggaacaatctccaaattatagtcgaaaagcaccagcctagaagagagatttcttttgaattaaaaagacattctatagactactcatggaacatagtctataaactcaggctg

SEQ ID NO: 482 - DNA, 224 bp, Zea mays
gcacgaggtcgaggtcatcaagatggactacgtcaacacggccatggagcggctcgagaagaacgacgtccgctaccgcttcgtcatcgacgtcgccggcagcctcggctctgcgcctaggcatggctgcaaaggtttcaatcagagcccagccgcaataatttgttagctaccgaatgaatgatggtctacgcttgttgatgagttggtgctttgtcgtggtt

SEQ ID NO: 483 - DNA, 225 bp, Zea mays
gcacgaggacagcccgtcagcccctctcgtttttcatccgccttcgcctccaaccgcgtgcgctccacgcctcctccaggaaagcgagagcttctgcataagaacaacaaatcaaaagcttgatcagctcggtgcctacaaaacctcaacaaccaagtttcatgtctgatctcgacgtccagcttccatctgcctttgatccgtttgctgaggcaaatgctgagg

SEQ ID NO: 484 - DNA, 221 bp, Zea mays
gcacgaggccaagggttgtgaggtgatcgtgagtggaaagctcagggcccaaagagccaagtccatgaagttcaaggatggctacatgatctcatctggtcagccagtgaacgagtacattgactcggctgtgagacacgttcttctcagacagggtgttcttggcatcaaggtgaagatcatgcttgactgggacccgaaggtcaaggttggcccgatca

SEQ ID NO: 485 - DNA, 220 bp, Zea mays
gcacgagtgcagataagcatgaatgctccagtcatggttgagcttgagggagaaactgaccctcttgagattgcgatgaaggagcttagagcgcgcaagatacccttcacgatcagacggtacctacctgatggaagttatgaagactggggagtagacgagctcattgtggaggactcctggaaacgccaggttggtggagactgaagatgctgatcta

SEQ ID NO: 486 - DNA, 220 bp, Zea mays
gcacgagcatggagatgggagggatgagcgacgctgagcggctgttcttcttcgagatggcctgcaagaactccgaggtcgcgtacgagcagaaccccaacgacgccgacaacctgacgcggtggggcggcgcgctgctggagctgtcgcaggtccgaaccggccccgacagcctcaagcttcttgaagatgcggaagccaaactggaggaggcacttca

SEQ ID NO: 487 - DNA, 224 bp, Zea mays
tttctgcctccctatcgtgggtcgtccccaatggcctttggtcgcagacgatctttgctgcttgtctatgctgagaataaatgtgaacggtgcccctggacgctggatccatgctggttttggacacgttgtctttttgtgtttaacttatctgctaccgtcctgtaacgaattcactaagttctagttcttttgtgctttgttaagaatataaacaatgaggt

SEQ ID NO: 488 - DNA, 216 bp, Zea mays
gcacgagggcaatggatgtcttgacctgggacaggttctacctcagtggtcggctgcagaaaccggtccatgttcttgttgacaactgggatataaggaaggtcaactcaattaacctagaaatggcaacttcagcttctctactccttttaccagcggagttcacggagtacgacctatatgctcaaatctgcagtctatcatatatgggtgatt

SEQ ID NO: 489 - DNA, 219 bp, Zea mays
ggcacgaggggagttctacaagaaggcggtggcctccttctggacggcggaggaggttgacctctctgccgacgcccggcactgggacgaggcgctgtcccccgacgagcggcacttcatctcccacgtgctcgccttcttcgctgcctccgacggcatcgtgctcgagaacctcgcttcccgcttcatgaccgacgtgcaggtcgccgaggcgcgggc

SEQ ID NO: 490 - DNA, 67 bp, Zea mays
gcacgaggctcgagtgcctcaaggagtgggacggcaagccgctgcccatcaacgtcaagtaaagaac

SEQ ID NO: 491 - DNA, 236 bp, Zea mays
gcacgagagcacgacgcgatgggccactccaacgtgtggaactcgcaccctaagaactacggccctggctcccgcgtctggaagtacgggctcatgtgctgcaggcagtgcttccgcagcaacgccaaggacattggtttcatcaagtaccgttgaagaggccactgtgctgctgtggagaacttcctacatcaaagaaatgggtccttcattagaaggcctaatttatgcgcttt

SEQ ID NO: 492 - DNA, 237 bp, Zea mays
gcacgagggcaatctaaatttgtcatttgcttatgtcgaaggggagagcttactgatgggtctgaaggaggtggctgtgtcaagtggtagtgcctgcactagtgccagcttggagccctcatatgtgctgcgggcacttggggtggaggaggatatggcacacacttctattcgtttcggcatgggtcgctttaccactgacgaagaggtggacagagcaattgagcttactgtgca

SEQ ID NO: 493 - DNA, 236 bp, Zea mays
gcacgagggcatagcgaaattcaatgttccattggcacacatgatgtttgccggggctgacttcattatcgtcccaagcaggtttgagccatgtggtctcattcagctgcaagggatgagatatggagtgattcctatctgttcatccactggaggacttgtcgacacggttgaggagggcgtcaccggattccacatgggttctttcaatgtcgagtgtgaaactgtagacccag

SEQ ID NO: 494 - DNA, 239 bp, Zea mays
gcacgaggtaagcagcagcaggaaccctagcaccgccgcatccgcagccatgggtatcgacctcgttgccggtgggaggaacaagaagaccaagcgcacagcgccgaagtccgacgatgtttatctcaagctccttgtcaagctctaccgtttcttggtcaggaggaccaagagcaacttcaatgctgtcattctcaagaggctcttcatgagcaaaaccaatcgcccaccaatctcca

SEQ ID NO: 495 - DNA, 244 bp, Zea mays
ctcgtctgctcgcatttcctcccaatccatcccgcctccaaacccgaactccaagtcgccccgcatcgatggcgcccaaggccgagaagaagcccgcggcgaagaagccggcggaggaggagcccgctgccgagaaggcgccggccgggaagaagcccaaggcggagaagcgtgtcccagcaggcaagtccgccggcaaggtcggcggcgatggaaagatgggccggaagatgggcaagatgag

SEQ ID NO: 496 - DNA, 238 bp, Zea mays
gcacgaggtcaaggtcagcatggatggcgcgccgtacctcaggaagattgacctcaagacttacaagaactacaaggacctgtcgactgcgcttgagaagatgttcagtggcttcagtactggcaaggatggcttatctgagtaccgcaaggatggtgaatatgttctgacttacgaggacaaggatggagattggatgcttgttggcgatgtaccatgggagatgttcgctgactct

SEQ ID NO: 497 - DNA, 268 bp, Zea mays
actagtggatccccgggctgcaggggcctccgcagtggaattgttagagaagtacttccatccagatcatatgtcatccgaagagaagatgaaattggagctccaaagggtgagggacgaattcaagatgtccgagaatgactgtggttctgcacgagttcaaattgcccagctgactctgaaaatcaagcatctgtcaactgttctacacaagaaggataaacattctagaaaggggcttcaggagatggtccaaaggaggaagaaa

SEQ ID NO: 498 - DNA, 202 bp, Zea mays
gcacgagggcgtcctgtgggaggtcgagggaaagtgggtcacccaaggtcctgttgatgtggacattggtgccaatccatccgccgagggtggtgaggacgaaagcgttgatgacacagctgtgaaggtggttgatattgttgacacattccgtctacaggagcaacctccttttgaccagaaattcattgtgtcctacatc

SEQ ID NO: 499 - DNA, 234 bp, Zea mays
gcacgaggcaagaggagaaagctgctgagaaaaaacgacgagcagaagaggcacagcaagctggccccaatgctgctgctgctcaaagcaatggaactggctatcaagcgtctcgtctgggcaaggcttcgcaggagccacctgctcctccgaacaacatcctcttcatccagaacttgccagaccagaccacgagcatgatgctccagatcctgttccagcagtatcccggct

SEQ ID NO: 500 - DNA, 232 bp, Zea mays
gcacgagcgacagtgtgctcttgtcttcttagtttaagtgggctgattctccagaatcatctgattccagctgtggattttatgtttcatcacccagattgcttctctgatgttctaatcctgtccagcgttgcaacagctagtcagttctttatatcctacaccattcgaacatttggggctctcacatttgctaccataatgacaactagacagctggtaagtatattgc

SEQ ID NO: 501 - DNA, 231 bp, Zea mays
gcacgagctgacgcattgctcaagactatatatgtttttggcttcggtgttcctttgttcattgatgctgatcaaggaactggtgggaaatggggcctatggattctccacaaacttgtgcttactggagtttatgggttgattgtgttcatgcatcattcaagatggagaaacatgctgcctgcaaaaccagcatactacaactatgtatgtgcgatgttgctattgaat

SEQ ID NO: 502 - DNA, 241 bp, Zea mays
caactcctgagcactttctcctcgtccccgacaagccaatcgaagccgagatacggccatggactccaccggcaccggagcagggggtaacgggaagaagggagcggccgggcgcaaggtcggcgggccaaggaagaagtcggtgtcgaggtccgtgaaggccgggctccagttccccgtcggccgcatcgggcgctacttgaagaagggccgctacgcgcacgtgtcggcaccggcgccc

SEQ ID NO: 503 - DNA, 229 bp, Zea mays
gcacgagctactatagcacactgttcttcttcgagtacctgggtcctctcatcatctaccccatgttctactatctgcccgtctacaagtacttcgggcacgacggggagcgggccatgcaccctgtccagacctacgcaatgtactactggtgcttccactacttcaagcggatcatggagacgttcttcgtgcaccgcttcagccacgcgacgtcgccgctctcgaa

SEQ ID NO: 504 - DNA, 227 bp, Zea mays
gcacgagcagaccgccaattcgtctgcctctattgttttcggatgtagcaactcacagtcaggagacctgacaaaggcagatagggcagttgatggaatttttgggttcggacagcatcaactgtctgtaatttcgcaacttaactctcttggggtgtcccctaaggtgttctctcattgcctgacaggttcggataatggtggtggcattcttgtgcttggtgaaa

SEQ ID NO: 505 - DNA, 228 bp, Zea mays
gcacgaggagaagctcgccactgaggccgccaagctcgcgcgctataacaagaagcctaccatcacctcccgtgagatccagacctccgtgcgcctcgtccttcccggggagctcgccaagcacgccgtctccgaggggaccaaggccgtcaccaagttcacctcggcctaggctgcgcgggcgccgcttgcaggattctctcctgtgttcacgtctcttgctgtagt

SEQ ID NO: 506 - DNA, 226 bp, Zea mays
gcacgagctggacgttgtggtggcctgtgaggatgacgatgacaatgacgtcgacatcccgcttgtgtctatttacttccggtaaagaggagggtgtcgctacctgtttacatggaacctgtctgtgcgatgtttatcagaaggatcgagtctataagttgcgcatgcaaccgagaactaggctgtgttcaatgtaaacacatactgatgagtctataagttggct

SEQ ID NO: 507 - DNA, 228 bp, Zea mays
gcacgaggcaaggcgcacttcacggccccgtcctccgtccgccgcgtgctcatgtccgcggcgctatcgacggagctccgccacaagtacaatgtgcgttccatcccgatccgcaaggacgacgaggtgcaggtcgtgcgcggcacctacaagggccgtgagggcaaagtggtgcaggtgtaccgccgtcgctgggtcatccacgttgagcggatcacccgcgagaag

SEQ ID NO: 508 - DNA, 226 bp, Zea mays
gcacgagctcaaggtcgtcgaggccatcggtgaggtgtttgtttgttcttgtagctgacctctgttcagccaactagcgtcgtcagttaactgttcctttgctggtacacttgtgcaagcacgatcttctgcagatgtgtatcttgctggaacagtcatgctgatatttgggatgggtctctacggcctcttcatcagcaacgctcccgcgagtgttgctcctgaa

SEQ ID NO: 509 - DNA, 214 bp, Zea mays
gcagaggtggtgttggtgatcaggtggggctaggctacgacctgtgatcaaagagcacatcgacctgttctctcagaacgagataagattcagcgtgatggcgatcttgaagaaccggaaggagatgttcacggtggagatcaaagaactccagacgcagagggagggcctcttgcagcagatgggcgatcccaacgcaagcaggcatgttgag

SEQ ID NO: 510 - DNA, 228 bp, Zea mays
caaggctgcaaccttgaaaggtcacacagaacgtgcaactgatgttgtcttctctcctgctgatgactgcttagcaacagcttcagctgatagaactgcaaaattatggaaaccagatgggtcacttttgatgtcttttgatggccaccttgatcgtcttgctcgccttgcttttcatccatctggaaagtaccttggtacagctagctttgacaagacttggagatt

SEQ ID NO: 511 - DNA, 222 bp, Zea mays
gcacgagcagatgtatgggttcacacacaagtcactagcaagcaggagagtgaagaggatcaggaacgagaccagcaacccgcttgagacgaaggatgagcttgggctgcttcatccagcattcaaggctgtgaagacttccacatgataattagagtacagttccacttgtttattttgttggctcgttctagatcctgttgggtctataatccaaagtgt

SEQ ID NO: 512 - DNA, 226 bp, Zea mays
ctgctgctgacgctgccggggctggacggcctgcgccggggcatgatctccgtggtgcggacgcgctgaagcccatgatgtcggtggtgcccttctgcctcttcctgctcatggacatctactggaagtacgagacgcgccccacctgcgacgacgagcacgcctgcaccccctccgagcacctccgccaccagaagtccatcatgaagtcgcagcggaacgcgct

SEQ ID NO: 513 - DNA, 149 bp, Zea mays
gcacgagaagctgtggacgtggttggtcaggcaggaaggcctaagacaattaccggctttcagacacactccacaccagtcttgcttgcagcagggtagagagctgaactagcaactgaaaaatacatcccactgactccggtattaga

SEQ ID NO: 514 - DNA, 224 bp, Zea mays
gcacgaggccatatctcacgatccactcgagcaccaagccgagggaaggtgaggagcgatggcgcgcggcgtggtgtcggcgaagggcggcgcggtcgcgggcaagaagaaggggtcggtttccttcacgatcgactgcaccaagccagtggaggacaagatcatggaggtcgcctcgctcgagaagttcctgcaggagcgcatcaaggtcgccggcggcaagg

SEQ ID NO: 515 - DNA, 75 bp, Zea mays
gcacgaggcaacgacgtcgagttagtctctcgctccgccgccctcatcaaccagaaatgccatgtcaagaagaag

SEQ ID NO: 516 - DNA, 244 bp, Zea mays
gcacgaggcccaaatggttgtccaagttgaggctgtccgggtgcaaaaggagcttgcagcgactgagattgatggttattgtgaaggcgaactaatcaaggttacactttctggaaaccagcaacctattagagttgaaatcacagaagctgcgatggagttgggtgctgaaaaactttccgggttggtcaacgatgcttacaaggatgcacaccaacggagcgtccaggccatgaaagagagg

SEQ ID NO: 517 - DNA, 245 bp, Zea mays
gcacgaggcaagagctcactgttgaggagcgtaaccttctatctgttgcctacaagaatgtgattgcggccccccgtgcctcatggcgcattatctcctccatcgagcagaaagaggagtcccgtaagaatgaggaacatgttgcacagatcaaggaataccgtggcaagattgaggctgaattgagcaacatttgtgatggtatcctagagctgcttgacacgcaccttgtgccttcctccact

SEQ ID NO: 518 - DNA, 246 bp, Zea mays
gcacgagcggcggggaagaagcccaaggccgagaagcgcctcccggcgggcaagtccaaggggggcggcgagggcaagacggggaaaaagaaggcgaagaagtccgtggagacctacaagatctacatcttcaaggtgctgaagcaggtgcaccccgacatcggcatttcgtccaaggccatgtccatcatgaactccttcatcaacgacatcttcgagaagctcgcggccgagtccgccaagctg

SEQ ID NO: 519 - DNA, 251 bp, Zea mays
tccctgtgcatcaccgaagtgctgttcgatatcgacgctgacggcgataaaaccgtcgacgtcgttatcgtgccgcgcacaaatgctaagatcacgctcaacgctcgccccaccatcaagaatcggaactaggagctagttgctactagtgctcatcaagcacactgtacgtacgtacgtatgtactcgatcgcgtggtcattcagcgaccatcatcgtttatatgctgtcacgcacagcgcgggccggcc

SEQ ID NO: 520 - DNA, 240 bp, Zea mays
gcacgaggcaagaggcaggtcatgatcaggccgtcgtccaaggtcatcatcaagttcctgacggtcatgcagcgccacggctacattggagagttcgagtacgttgatgaccaccgatcgggcaagatcgtggtcgaactcaacgggaggctgaacaagtgcggcgtcatcagccctcgctttgatatcggcgtgaaagacattgagggatggactgcaaggctgctcccgtccaggcag

SEQ ID NO: 521 - DNA, 247 bp, Zea mays
ttcggcacgaggtggtgtacaaggcgctggacaaggccaccaacgagacgatcgcgctcaagaagatccgcctcgagcaggaggacgagggcgtcccgtccaccgccatccgcgagatctctctcctcaaggagatgaaccacggcaacatcgtcagattacatgatgttgtccacagcgagaagcgcatataccttgtcttcgagtacctggatctggacctcaagaagttcatggactcctgccc

SEQ ID NO: 522 - DNA, 239 bp, Zea mays
gcacgagggcgccgccgtcatctacaacaaggacaagccctgggacgaccactggatcttctgggtgggccctctcgtgggcgctgccatcgcggccttctaccaccagtacatcctccgggctggcgccatcaaggccctcggctccttcaggagcaacgcgtgatgagcggggcttggctgtggagcaatggcgggcgacctacgggcggggggccgtgagcgaggagaatgccatc

SEQ ID NO: 523 - DNA, 241 bp, Zea mays
gcacgaggcagcgcctgcaggaagagggttggacttacgggattcaactgccggtgtgggaacttgtactgcgcactccaccgctactccgacaagcacgactgcaagttcgactaccggactgctgccagggacgccattgccaaggctaatccggtggtgaaggcagacaagctcgacaagatctagggggggttccctacggttgggtatcaggaagattgtaaaccgcggtaactcg

SEQ ID NO: 524 - DNA, 241 bp, Zea mays
gcacgagccgtgacgatcatgatggtgaacgcggtggcggtagcgtggcgtcggcacgcacgctgtacagcgagttcccgcagtggagcaagctgcttggcggcgccttcttcagcttctgggtgctctgccacctctacccgttcgccaagggcctcctgggccgccgcggccgtgtgccgaccatcgtgttcgtctggtcggggctcatctccatgaccatctcgctgctgtgggtcta

SEQ ID NO: 525 - DNA, 234 bp, Zea mays
gcacgaggcgcgccggaccccagcgcggactgctgcagcgcgctgagcgccgtgtcgcacgagtgcgcctgcagcaccatgggcatcatcaacagcctgcccggccggtgccacctcgcccaagccaactgctccgcttgaagcagggacctggcacgcgtgctgcaatggatggcaggcggggagacgcataagaagtgtttccatttcacagtgagagcagtcgagctccaa

SEQ ID NO: 526 - DNA, 73 bp, Zea mays
gcacgagtcacagtcgacgggaaagaagctggcgttctaaagagccacggtcctttgagtttcttgaaggttc

SEQ ID NO: 527 - DNA, 234 bp, Zea mays
gcacgagcattggtcgatactggccaacaaatctggctccacagagcggttgcgtcaactcttgcaactatagaggagcctacagttcaagcaaatgcctcaagaagtgtggccagccatcacagactttgtaccatgttccccgttcgtttctccaaccaggcagcaatgatctagtccttttcgagcattttggtggtgacccaagcaagatatcctttgtgatgaggcaga

SEQ ID NO: 528 - DNA, 234 bp, Zea mays
gcacgaggggaatttggacccaaatgtgatagaagatgagctgaggcagatatgtgtacagtttggagaacttatatatgtgaaaattcctgttggtaaaggatgtggttttgtacagtatgcatctagggcatcagctgaagaggcagtacaacgtcttcatggcacaatgattggccaacaagctgttcggctttcatggggccgaagtcctgcgagtaaacaggattcatc

SEQ ID NO: 529 - DNA, 225 bp, Zea mays
gcacgagcagccatctcagtggtgtctgtttttgtgtttgcagttgctccagtgtgctacgcccacctcgctgcagcccaggtgagcacgttcctgagattggaggagatgtcagacgcgtcctccagccagggaggagggcatacctcggctggcagtgctcctgtgccggagctgcctcgcctgcatgacaaagtcaggagctccatgttcttctgctagctg

SEQ ID NO: 530 - DNA, 194 bp, Zea mays
gacaaaactcctgctttatattaaaaaaaaggatggaataattatcactagttgctcacataccatgctggttaaacatttctctttcagtagtagcccttacggtatccatgaagtactcttatgcaaaccatcttatttatgccactgagaggtttatggcgaaaagggttccagcccccacctagggacga

SEQ ID NO: 531 - DNA, 225 bp, Zea mays
gcacgagggtaaccaacgtcgggcagcccgggacgtacaaggtggccgcgagctcgccgccgggcaccccggtgacggtgaccgtggagccgtcgacgctgagcttcagcagggccggcgagaagcagagctacacggtgagcttcacggcgggcgggatgccgtcgggcaccaacgggttcgggcggctcgtctggtccagcgaccaccacgtggtcgccagcc

SEQ ID NO: 532 - DNA, 226 bp, Zea mays
gcacgagaggacaaggagggcatcccacccgaccagcagcgcctcatcttcgccggcaagcagctggaggatggccgcaccctggcggattacaacatccagaaggagagcactctccacctggtgctccgcctcaggggtggcatgcagatttttgtgaagacattgactggcaagaccatcaccttggaggtggagagctctgacaccattgacaatgtgaagg

SEQ ID NO: 533 - DNA, 228 bp, Zea mays
ttcggcacgaggaagcttgaggagaagcgtgccaaggcgatggagaaggcgcagaacgaggtggccaaggcgcggcggaaggcggaggagaagcgcgcgtccgcggaggccaagcggggcaccaaggtggcgcgagtgctggagctcgccaacttcatgagggccgtggggagggcgccctccaccaagcgctccttcttctgaacccaccggcctcttcttcaccag

SEQ ID NO: 534 - DNA, 223 bp, Zea mays
gcacgaggcgcttcggctacgccccgctcgacgccttctactagggcacccatgcgtccacccagctcagccccgggttccgcggcacgcagctcctccagggcgacgtcaccgccgccgagttcaggcaggagcagtccgcgtgcaacttcgccgtctacgtggacctcaacgccaatctcagggtgaaggtctgggcgttcaaggtccgcgggctcaaggc

SEQ ID NO: 535 - DNA, 209 bp, Zea mays
gcacgagcacaagaccaccttctgggaggcggctctggcgaggctcaagacgtacgatggcgtcccgccgccgtacgacaagaccaagcgtatggtcatccctgacgctcttaaggttctgaggctacagcctggacacaagtactgcctcctcggcgagctctctaaggaggtcgggtggaactaccatgacaccatcagggaacttg

SEQ ID NO: 536 - DNA, 222 bp, Zea mays
gcacgagggtcgtcgctggcaagtccgctgccaaggaaggcggcgagggcaagaggggcaagaagaagggcaagaagagcgtggagacctacaagatgtacatcttcaaggtgctgaagcaggtgcacccggacattggcatctcctccaaggccatgtccatcatgaactccttcattaacgatatcttcgagaagctcgctgctgaggccgccaagctcg

SEQ ID NO: 537 - DNA, 222 bp, Zea mays
gcacgaggtggcctccagttcgtgccttcagaagaaatctggccacctctagcagagcatcccttgaacatcagaatgggaagaaggaagacaaacctgaacagaccacaaaaagagctccatttgtaaagatcaacatggacggcatccctattggtagaaaaatcgatctgagtgccctcggtagttacgatgagctgtctctgtctgtcgacaagctat

SEQ ID NO: 538 - DNA, 221 bp, Zea mays
gcagagctacattggagagttcgagtacgttgatgaccaccgatcgggcaagatcgtggtcgaactcaacgggaggctgaacaagtgcggcgtcatcagccctcgctttgatatcggcgtgaaagacattgagggatggactgcaaggctgctcccgtccaggcagttcggatacatcgtcctcacaacttcggcaggcatcatggaccacgaggaggccc

SEQ ID NO: 539 - DNA, 219 bp, Zea mays
gcacgagagattgccaagatcacaactgaaggatcaaccatctacccaccatattccttgaagacctactggggcttctctcactttgaaaacccagcccagggcgctgtgggatcatggtagatttatgcgccgcgcacgccgcatatcatgccatgaacttaggcgaaaccaatctgtgctgctgaaatcgaacacttatgaacgtttgttctgaac

SEQ ID NO: 540 - DNA, 216 bp, Zea mays
gcacgagacaagattggtggtattggaactgttcctgttgggcgtgttgagactggtatcatcaagcctggtatggttgttacctttggtcctagtggccttactactgaggtgaagtctgttgaaatgcaccatgaggctctccaggaggcccttcctggtgacaatgttggcttcaatgttaagaatgttgctgtgaaggatctgaagcgtggg

SEQ ID NO: 541 - DNA, 219 bp, Zea mays
gcacgaggaagagcccacacatgtgtcaaatgcgccagagaacttcaaagggagtttggtggattggataacgtacctgtcaaacaactctatacttcaggatgcagttgacaagtctttgattggaaaggacaacgatgctgagctgcttcagtgcatgaaggttgcatgctcttgtgtgctttcttctccaaaggaaaggcctacaatgtttgaagt

SEQ ID NO: 542 - DNA, 218 bp, Zea mays
gcacgagctgcaacgtcgagcaccacgtcggtgaccgcggtgtcttcgccagggcctctggggactacgccattgtgatcagccacaaccctgacaacggcacatcgaggattaagctgccctctggcgccaagaagattgtccccagcagctgccgtgctatgattgggcaggttgctggtggaggcaggactgagaagccgatgctcaaggctggt

SEQ ID NO: 543 - DNA, 216 bp, Zea mays
gcacgagggtcctcgcatgcccatgtttccacctggtgtccctggagttggtcagcagctgttctatggtcagccaccaccagccttcatcaaccctcaggctggatttgctttccagcaacctctgatgcctggtatgaggcctggtggtccaatgccgaactttatgatgcctatggttcagcaaggacagcaaccacagcgtcctgctggtag

SEQ ID NO: 544 - DNA, 214 bp, Zea mays
gcacgaggagaccccacggcgtctggtgattccgacaagtccaagtccgaggtgaacgacgaggacgaggagggtgacgagtgatgtatgacggatgaaactctgtccaagtgtttgcagtcagggaaaaaaatcttcgtcgttgtcggcctaaccgggctttctcgaaggactttctagatgcagtagattagtgccgtcttctctgagtagt

SEQ ID NO: 545 - DNA, 218 bp, Zea mays
gcacgaggccgactacaacattcagaaggagtccaccctccacctggtgctccgcctccgcggtggcgccaagaagcgtaagaagaagacgtacaccaagcccaagaagatcaagcacaagcacaagaaggtgaagctctccgtgctgcagttctataaggtggacgacgccactggcaaggtgacccgcctccgcaaggagtgccccaacacagagt

SEQ ID NO: 546 - DNA, 215 bp, Zea mays
gcacgaggctgcccaaggtggcgtcatacatcctatcactcggtatgttatgaactatctccgagctgcgtgtggatcgcggcagacattggaagaggtgatggaaggtgactttggggctaatggaggtgcgcctgtggctgttgatcctgaccgtcccacatcatcccttgctgtgcacattgcttggatcatggatgttcttcaaaagaatc

SEQ ID NO: 547 - DNA, 215 bp, Zea mays
gcacgagcttcgctctcacgatccctcggcagtcggcgacggctgggcgaccgccacttccgccttctcttcctactgagcgtctccaggcacgcttctgaattcggagttgccagcattcgctcgaggtgccggaccagatctcaccatcatgcaggctagcgatagattcaacataaactctcagcttgagcatcttcaagccaaatatgttg

SEQ ID NO: 548 - DNA, 218 bp, Zea mays
gcacgagcacaggtctagtgtgcctggagctgtacaaggtcattgctggggagcaccccatggaggactaccgcaacacattcgccaacctagctatacctctgctgtctatggcggagccggttggggccaagctgatgaagcatcaagatatgaggtggaccgtatgggaccggtggactatcaggggcaacctgactgtggcggaactgctgcag

SEQ ID NO: 549 - DNA, 218 bp, Zea mays
gcacgaggtaccgccagctcttccaccctgagcagctcatcagtggcaaggaggatgccgctaacaatttcgcccgtggccactacacaattggcaaggagattgttgatctgtgccttgaccgtatccgcaagcttgctgacaactgcaccggcctccagggcttcctggtcttcaatgccgttggtggtggcactggctctggccttggttctctc

SEQ ID NO: 550 - DNA, 220 bp, Zea mays
gcacgagagcactcgccgccactcaccagcaaattcccaagccgccccttcccccatctctttcgcgccccatttgatcgattcctgatggcgcccaaggccgagaagaagcccgcggagaagaagccggcggaggagaaggccgagaagaagccaagggcggagaagcgcgtgccgagcaaggagggcggcgagaagaagggaaagaagaaggcgaaga

SEQ ID NO: 551 - DNA, 211 bp, Zea mays
gcacgaaccgccgccgccgcagcagccatgccgcccaaattggacccctctcaggtggtggaggtcttcgtccgcgtgacgggaggcgaggtcggcgcggcgtcgtcgctggcccccaagatcggcccgctcggtctctccccgaagaagatcggtgaggacatcgccaaggagaccgccaaggactggaagggcctccgcgtcaccgtca

SEQ ID NO: 552 - DNA, 211 bp, Zea mays
gcacgaggctatactgatgtgttgccatttgatcaaagcagggtacagttagagtcttcaacaggcaatgattacatcaatgccagccatatagagattgctggcagaaatctaacgaagttcatttctactcaaggaccacttgccaatacaattgaggatttttggcagatggtatatgagaaccactgtcctgtgattgttatgctca

SEQ ID NO: 553 - DNA, 211 bp, Zea mays
gcacgaggctgcccggacatgtgcacaactggaggcactgaatgtttccgtgctaggtggcgtgtctcagacagtagacttgcagacgttgtacaacatagaaggctgggatgcgtacgcgttggcttttcaggcgacggaagagcaggcacatcttcaattcatgaaccctggcatggaggatgatccaacttgtggtcctatcctagac

SEQ ID NO: 554 - DNA, 209 bp, Zea mays
gcacgagcgggagggtgctcttcgtcgccgctttcctcctctccgcctaccaggagtttaatgaattcggtgctgatggtggaccagcagctaaggcccttcggcccaaattcaacgtgtttgtcaaaaatgtatctgctcatctgggagtagctgtgccacacattgagttgaagcatgtgattgctgctacaattggtcttaagggt

SEQ ID NO: 555 - DNA, 209 bp, Zea mays
gcacgagcagatggacgcggaggcgcacaggccatgaagtgggcgcgggacaactacatggtctacgattactgcgccgacaccaagcgcttctcgcagggcgcgccgcctgagtgctccatggcgtagtcggcgtatagaggtgctgggctgaaccacggtgcacttcgattgcgatgtcgatcagtgcacactatatacgacgcacg

SEQ ID NO: 556 - DNA, 209 bp, Zea mays
gcacgaggccgccgccaccgccacctaccccagcgcgccgccgccgcagccaccatgggtcgcgtccgcaccaagaccgtgaagaagacctccaggcaggtgatcgagaagtactactcccgcatgaccctcgacttccacaccaacaagaaggtgctcgaggaggtctcgattctgccctcgaagcgcctccgcaacaaggtggctgg

SEQ ID NO: 557 - DNA, 209 bp, Zea mays
ggcacgagccaacatggtgttcgtgccgacgggcggggtggtcatccaggtggtgccgctgggcgggctggagttcgtggcgggctacttccggggtccgtccagggacatggggctgcgctacctcgagtaccggatcacgccggaagagagcaccctgatcaaccagtacccgcgcgaccaccccatcttcacggaccccaacggga

SEQ ID NO: 558 - DNA, 204 bp, Zea mays
gcacgaggttggctgccgcgaactagagtacatagctgcctatgtatctgatatcacaaatggggcgctggaatccattggcactttctgcaagaatctctatgatttccggcttgttctacttgacaaacagaagaagataacagacctgccacttgacaacggcgtccgtgccctactgaggaactgcgtcaaacttcggag

SEQ ID NO: 559 - DNA, 203 bp, Zea mays
gcacgagtggagatgctgaagaggtggacttctggaaacctttcggagccatcttcaagctcccagaggcttgattttacaatgtaacaaaacacacatgctgctcatgacatttcgagcatgtacctctggatgtttgtaggctcagaaaaggtcctggtcttaggctctgaaaacctcatctggcgaccatacgttattta

SEQ ID NO: 560 - DNA, 207 bp, Zea mays
gcacgagctctccccgaagaagatcggcgaggacattgccaaggagacggccaaggactggaagggcctgcgcgtcaccgtcaagctcactgtccagaaccgccaggccaaggtctccgtcgtcccctccgccgccgcgctcgtcatcaaggcgctcaaggagcccgagagggacaggaagaaggtcaagaacatcaagcacagcgg

SEQ ID NO: 561 - DNA, 204 bp, Zea mays
gcacgagaggtggccgggatgcgtaaggtggagcagctggacgtcgcgcacaaccgcctgtcggggtccgtcccggaggccatctgcgaccttccgcgcctcaagaacctcaccatcgcatacaacttcttcaccggtgagccgccgtcctgcgcgcgcgtggtgccacgaggcggcgacacgaagaattgcctacccagccgc

SEQ ID NO: 562 - DNA, 203 bp, Zea mays
gcacgagggccaagcttgaggctgccaacaaggctgtctcgaagattggacagcacatgtctggtggtggctctggcggctcgcagtcaggatctggacctcagggtggcggcgaccaggcgccggaggcagagtatgaggaggttaagaagtgaggctgcgggagttcaagggaattgtagcggcttgtttagaagtagctc

SEQ ID NO: 563 - DNA, 203 bp, Zea mays
gcacgagcccaggttcactcctgagcaggctaaactggtgaagggctcggcagactacatcggtatcaacgagtacacatccagctacatgaaggggcagaagctggtccagctggcgcccagtagctactctgccgattggcaggttcaatatgtttttgcacgcaatggcaaaccgattggaccacaggcgaattctaagt

SEQ ID NO: 564 - DNA, 240 bp, Zea mays
gcacgagggcgagagagtcaggattcaggacgcggcgaggccaccatgagcactctcaagttctgccgggaatgcaacaacatgctgtacccgcgggaggacaaggagacgcgcaccctcctgtacgcgtgccaaacgtgcgagcatgaggagattgccactgatacttgtgtgtacaaaagggttatccgtaagcctggtggtgagcccaaagatgtcctgaaggatgcagcaactgat

SEQ ID NO: 565 - DNA, 245 bp, Zea mays
tggaagcttcgagttttttttttcttccttttggcttactgcgcaagaagaagggtaacaagaggacggcggcgatggcgaagaggctgctcccatctctgaaccgggtgctggttgagaagctggtgcagcccaagaagaccgccggcggcatcctcctcccggaaacatccaagcagctgaatgctgctaaagtggtggctgttggccctggtgagcgcgacaaggcaggcaatctgatccca

SEQ ID NO: 566 - DNA, 244 bp, Zea mays
  unsure (1)..(244): unsure at all n locations
cgcctacgtgcatcagctcaaagggagcagcgccagtgttggcgctcagaaagtgaagtttacttgcatgcagttccgtcagttatgtcaggataagaacagagacgggtgcatcatggcattggctgttgtgagaaatgagttctatgatctgcgcaataaattccagactatgcttcagcttgagcagcaaatccaggctcaacaataaatcgaagcagaaagcgtactgncatgtggcctc

SEQ ID NO: 567 - DNA, 238 bp, Zea mays
gcacgaggatcttattgctaccggtggaacactatgtgcagctgtcaaacttattgaacgtgttggagcaaaggttgttgagtgtgcttgtgtcattgaattgccagaactgaagggccgagacaagcttggggacaggccagtttttgtccttgtggaagcagacgcctgagcggaacttgggacttctcagagagtttggcgccgtcgatgctccctctctggagacaacacagtt

SEQ ID NO: 568 - DNA, 240 bp, Zea mays
taggtgggctggcttctcctccccctcttaccaagtcctcttcgggttagtgttacttagggtttggtggatgggcgatggctgcggcttatgtggagtaccgtttcttcgtcggcgggcttgccttgtccaccagcaacgagtcgcttgagaatgccttctcctcctacggcgagatcctcgactccaaggtcatcaccgaccgggagacggggaggtctcgcggcttcggcttcgtta

SEQ ID NO: 569 - DNA, 232 bp, Zea mays
gcacgagctgccaacgcataaatcctctgaatgtgctgtgttgagagttttttctagttgctctgcaaggatatagaacaatgttctaagactaccatgtttttaagtctgcctgatgcttataattcatgaacgatttttgcagctagctgtaatgtgactatttatcttatctgcttgttcaaaaaaaaaaaaaaaaaaaaaaaaaaaaaaaaaaaaaactcaagggggg

SEQ ID NO: 570 - DNA, 234 bp, Zea mays
gcacgagggctgatgagatagcggacaggctgaattcttctccttcggaacgaacgacctgacgcagatgacctttgggtacagcagggatgatgtgggaaagttcattcccgtctatcttgctcagggcatcctccaacatgaccccttcgaggtcctggaccagaagggagtgggcgagctggtgaagtttgctacagagaggggccgcaaagctaggcctaacttgaaggt

SEQ ID NO: 571 - DNA, 233 bp, Zea mays
gcacgagtggagcagtagctgacaaaggttctgtactgaggtttattccttacacaatgcaagcagttaagcaaggattacaagatcttggtgcagattctctccagtcagctcatgatcttttgcggtcagagacactcagattagaggtgagaaccggtgctgcccaggctgaaggaggtatccatggactggtttcatacgagaagaaggcattctaggtccataactaa

SEQ ID NO: 572 - DNA, 241 bp, Zea mays
cgccgctcgccgtttgcccctcgtctccgcaccgcgcgctgttgtccatccttgtgcagcaaaaatgacggctggctacattgttggctcactggtcggatcctttgccattgcatacctgtgtgacacatttatctctgacaagaaggcatttggaggtagcacccccaagactgtttctgagaaggagtggtggcaagccacagacaccaagttccaggcctggcctcgcactgctggg

SEQ ID NO: 573 - DNA, 233 bp, Zea mays
gcacgagcaaggtcgtataccggagtatgctagcctgtatttctgcatgtgcattgatgccgaggacaatgagcttgaagtccttgagatcatccatcatttcgtcgagatactggaccgctattttggcagtgtatgtgagttggatttgatattcaattttcataaggcctactacatactggatgagattctcatcgctggtgaacttcaagaatctagcaagaagaatg

SEQ ID NO: 574 - DNA, 234 bp, Zea mays
gcacgaggtccgccgacacctgggcctggggcttccgcgcctcctcccccgtcgcgcaggtcacgttcgccaaccccggcgtgcaggatgaccccgcgtgctgcccgctgctggacgccgtcgccatcaaggatctgccctcgccgtacccgaccaaagacaacctgatcaagaacgacggcttcgagatctgtccccaggtgctcaggaactcgacggtcggcgtgctgctgc

SEQ ID NO: 575 - DNA, 229 bp, Zea mays
gcacgagagtaggagaagcccaaataatacgaaggttgatacagcgccgaagatgtgagcaggaaagcttcggcgtggtagcagaaaaggaaaccgacttaaagatgaaaaggctattcagacctcggtggattactatagaattactaccaaatgtaaagggcatggatgtaattttatatgggctgtgtcccgtgcctataaataggtgaacagtacccccgtactg

SEQ ID NO: 576 - DNA, 225 bp, Zea mays
gcacgagtcaagatgtggtccatgatattgccatggattactacggggagcgcctagctatagcctcctctgataacacaataaagatcattggcgtaagtggaacctcacaccagcagcctgcaaccttgagtggacaccagggcccagtatggcaagtcgcatgggctcatcccaagtttggttccatgtttgcatcctgcagctacgacggccgggtgatca

SEQ ID NO: 577 - DNA, 230 bp, Zea mays
gcacgagctgaactgaagaagattgaggaacaactggaaaagaagaaggctgaatatgcagagaagatgaagaacaaggttgcaatgatacacaaggaagccgaagagaagcgagcgatggtggaggtaaaacgcggtgaggaggtcctgaaggccgaggagatggctgccaagtaccgggccaccggccacgctcctaagaagctcatcggttgcttcggagcctaaga

SEQ ID NO: 578 - DNA, 233 bp, Zea mays
gcacgaggataccgtcactggagacattgtattcgtcctccagcagaaggaccactccaagttcaaaagaaagggtgaagatctcttttatgagcacaccctgtctctgaccgaagctctatgtgggttccaatttgttcttacacacctggacaacaggcagcttctgatcaaatcaaaccccggcgaagttgttaaacctgaccaattcaaggcgataaatgacgagggga

SEQ ID NO: 579 - DNA, 233 bp, Zea mays
gcacgagaacatacggcgcatttgaaggtgccactacgctgacctcgctcaggctcgtcaccagcagcagaacctggggcccctggggtgtcgagaacgggacgcgtttctccgtcacggcgcccatcggcagcagcatcgtgggattctatgcgcgggcgggaaccaggctcgtcgatgctatcggtgtttacttgcgtcagatttaattcgaataatagcaggggagctac

SEQ ID NO: 580 - DNA, 228 bp, Zea mays
gcacgaggcgaaagacaacaagaagacgcgcatcatcccgcgccacgtgctcctggcgatccgcaacgacgaggagctcgggaagctgctggccggcgtcaccatcgcgcacggcggcgtcctccccaacatccactccgtgctcctgcccaagaaggcggcggagaaggcggccagcggcggcagcaaggagcccaagtcccccaagaagggcgccaagtcccccaa

SEQ ID NO: 581 - DNA, 228 bp, Zea mays
gcacgaggctttctgtttttgatgcggccatgagatacaaatctgagggccatgctactataatcctcgctggcgctgagtatggaagcggcagttctcgtgattgggctgctaagggtccgatgctcctgggagttaaagctgtaattgccaagagctttgagcgtatccacagaagcaacttggtggggatgggaatcattcctctgtgcttcaaagctggtgagg

SEQ ID NO: 582 - DNA, 229 bp, Zea mays
gcacgagctggcatctactcatcccataagacttggacttgcacttaacttctcagttttctattacgagattctgaactctccagacaaagcttgcaaccttgccaggcaggcgtttgatgaggctatttctcagttggatacgcttggcgaggattcatacaaagatagcaccttgatcatgcagctcctgagggacaacctaaccctatggaccgttgacagcaca

SEQ ID NO: 583 - DNA, 186 bp, Zea mays
gcacgagctgctgccaacgcataaatcctctgaatgtgctgtgttgagagttttttctagttgctctgcaaggatatagaacaatgttctaagactaccatgtttttaagtctgcctgatgcttataattcatgaacgatttttgcagctagctgtaatgtgactatttatcttatctgcttgttc

SEQ ID NO: 584 - DNA, 223 bp, Zea mays
gcacgaggagagcttgttccgtccaggcaaccaaaaagcaagttgccccgccgcgcagaggaagaagagagcagaggaggatggctcgtacgaagcagaccgcccgcaagtccacgggaggcaaggccccccgcaagcagctcgccaccaaggcggcgaggaagtcggcgccgacgaccggcggcgtgaagaagccccacaggtacaggcccggaaccgtggc

SEQ ID NO: 585 - DNA, 227 bp, Zea mays
ttcggcacgaggccaaaatgaacctgagcgatgaggttgatttggaagattatgtttccagaccggataagatcagtgctgctgatattgctgctatctgccaagaggctggcatgcatgctgtccgcaaaaaccgatatgtcatcctccccaaggactttgaaaagggctaccgaaccaacgtgaagaagcccgagacagactttgatttctacaaatgagtcaac

SEQ ID NO: 586 - DNA, 224 bp, Zea mays
gcacgaggttccaactcctgagcactttctcctcgtccccgacaagccaatcgaagccgagatacggccatggactccaccggcaccggagcagggggtaaggggaagaagggagcggccgggcgcaaggtcggcgggccaaggaagaagtcggtgtcgaggtccgtgaaggccgggctccagttccccgtcggccgcatcgggcgctacttgaagaagggccg

SEQ ID NO: 587 - DNA, 225 bp, Zea mays
gcacgaggcctcatgtaccgtggtgatgtggttcccaaggacgtgaacgctgctgtggccacaatcaagaccaagcgcaccatccagttcgtggactggtgcccgactggcttcaagtgcggaatcaactaccagcctcccagcgtcgtcccaggcggtgatctggccaaggtgcagcgtgccgtgtgtatgatctccaactccaccagtgttgtggaggtcttc

SEQ ID NO: 588 - DNA, 229 bp, Zea mays
gcacgaggctgagctcaaggccgtctgtacagaggctggaatgtttgctctccgtgagagaagggtgcacgttacacaggaggacttcgagatggcagtggccaaggtgatgaagaaagacacggagaagaacatgtccctgcgcaagctctggaagtgaggctcatgccttgatgtacccaccgccacctttcacggcctctccctgaacggtgtaacggcatgctac

SEQ ID NO: 589 - DNA, 215 bp, Zea mays
gcacgagctgcagagcaggctgtaaaggcgatcaagggcaaagagtccggtgaaccagttccggagtatgactacctgccatacttctactcccgatcattcgacctggcgtggcaattctacggcgacaacgtgggcgaaaccatcctgtttggcgacagtgaccccacctccagcaagcccaagttcggctcgtactggattaaggacggcaa

SEQ ID NO: 590 - DNA, 162 bp, Zea mays
gcacgaggccttcagcacctacggcgaggtcctcgagtccaagatcatcctcgatcggaagacgcagaggtcccgcggcttcggcttcgtcaccttctccacggaggaggcgatgcggaacccatcgagggcatgaacggcaaggagctggacggccgcaac

SEQ ID NO: 591 - DNA, 214 bp, Zea mays
gcacgaggggatgaggatgctaagttcaagctttgcaaggttaggtctgttcagtttgggcagaagggcatcccttatctgaacacgtatgacggccgcaccatccgctaccctgaccccctcatcaaggccaacgacaccatcaagatcgatctggagaccaacaagattgtggacttcatcaagtttgatgttggcaacgtcgtcatggtga

SEQ ID NO: 592 - DNA, 220 bp, Zea mays
gcacgagggttaaagaagcatgcagagcagctgttcttcagaacaagccaaggcttgttgaggctatgtatttctgtgagttgaccacgccaaccgagcagttaggtgcaacttatgcagttcttggtaagaggcgggcaaggattctgaaagaagagatgcaagaaggaacctcgttatttacagtgcacgcttacctgccagttgcggagagcgttgg

SEQ ID NO: 593 - DNA, 234 bp, Zea mays
gcacgagcttgtgtatgatttccacaggaatggatcacttcatgatctactccacctttcagatgagtacagcaagccacttagctggaacactcgtatcaagatcgcactcggctctgcccgtgcactggagtaccttcatgaaatatgttctccatccatcatccataagaatttcaagtcgtcaaacattttgctggactcagaattcaatccacacctttcagatgctgg

SEQ ID NO: 594 - DNA, 213 bp, Zea mays
gcacgaggaaggacccgaccggtgccaaggtgaccaaggctgctgccaagaagaaatgatgcgacctgtcgttgatgcagcgtctgcttttccaatacgtagctgagatgttccattttggcataagttttgtatgctgtggttgctgacttgctgttaccttgtgaactgttgagctctactattgggtgcccgtttatctgtttatgtagc

SEQ ID NO: 595 - DNA, 234 bp, Zea mays
gcacgagcaacatggtggagcaggagctgcctggaggcgggctcctcgtgtaccagagcttctgtgctgctgaagacgctgttgctacctcgcccaaatctgttttccactgctttgacggcgagaacgtggagagtgctcctcctcctatgaagaaggactacaagctggctaatcttctctgctgggaggaggaagcggatgccatggaggagaaggcgggagtgcttgatg

SEQ ID NO: 596 - DNA, 233 bp, Zea mays
gcacgagccgtcggctacgctggcggctccaagtccaaccccgagtaccgcaacctcgccgaccacgccgagtgcgtcaaggttgagtatgatccccggttgattcactacaggcaacttttggatgtgttctgggcaagtcatgacccacgtgaggtgtttgggcaagggccagatgttggcaaccagtatagatctgtcatcttcactaatggaaccatcgaggccagatt

SEQ ID NO: 597 - DNA, 238 bp, Zea mays
gcacgaggccatccgtgctgatccttctgtggtcaagtcaaccaagcagccaccaaaggagcacaagaggtacaaccccaagaaactgacatacgagcagaggaaggccagtctcattgaaaggctcaaccaactcaactcctcgggcggcgcagatgacgacgatgaggatgacgagtaaagtttggtcccatcgaagtagtgctatcttatgcggcgatcagtatttgtgctatgg

SEQ ID NO: 598 - DNA, 238 bp, Zea mays
gcacgagccaagcgccaccgcaaggtgctgcgtgacaacatccagggcatcaccaagccggcgatccgcaggttggcgaggaggggcggcgtcaagcgcatctccgggctcatctacgaggagacccgcggcgtgctcaagatcttcctcgagaacgtcatccgcgacgccgtcacctacaccgagcacgcccgccgcaagactgtgaccgccatggacgttgtctacgctctcaagc

SEQ ID NO: 599 - DNA, 234 bp, Zea mays
gcacgagccaagatccaggacaaggagggcattccaccggaccagcagcgcctgatttttgctggcaagcagctggaggatggccgtaccctcgccgactacaacatccagaaggagagcaccctccacctggtgctccgcttgcgaggtggtatgcagatctttgtgaagaccttgactggcaagaccataaccctggaggttgagagctccgacaccatcgacaacgtgaag

SEQ ID NO: 600 - DNA, 233 bp, Zea mays
gcacgagccatctctcgcgagaagaccaaggtcaccgtcacctctgacggacccttctccaagaggtacctgaagtacttgaccaagaagtacttgaagaagcacaacgtgcgggattggctacgcgtggttgctgccaacaaggaccgaaacgtctatgagctccgctacttcaacattgctgagaacgagggcgaggaagaagattagattgcactacgcttatattttag

SEQ ID NO: 601 - DNA, 231 bp, Zea mays
gcacgagctcatgtttagcaaatttgaatacgatggaatactcaacccaacatttactgaaggtccgtttgagcttcctttttcgagtattagagcatacatcaatgagccgatcactccaaggttcgttcatgtgagttctgcgggagttacaagacctgaaagaccggggttagatttaagcaagcagccacctgctgttcgattgaacaaagagcttggctccatttt

SEQ ID NO: 602 - DNA, 239 bp, Zea mays
ctcgcgcccccgctcgcttcacttctctaggtgcgcaccgatcagaagagatggcggtgccgctgctgacgaagaagatcgtgaagaagcgggtcaagcagttcaagaggccccacctcgaccgctacaagtgccttaagccaagctggcgcaggccaaagggtattgactcccgtgtcaggaggaagttcaagggatgcaccttgatgcccaacattggttatggttctgacaagtcg

SEQ ID NO: 603 - DNA, 231 bp, Zea mays
gcacgagctctgatcgaccgtccgtcaaagttgctagaggcgggcacgtgcaccaccgaatccctctcagaactttttttttcttagtgctatgctactgtgcgatcgtcaggtataacaaaatgtatattcttaaggggtgtttggtttgcccctgctaaaatttagcccctatcacatcgaatgtttaaacctccgttcagggtattaaatgtagtcggattataaaac

SEQ ID NO: 604 - DNA, 235 bp, Zea mays
gcacgagccccgtcggccgcatcgggcgctacctcaagaagggccgctacgcgcagccgtcggcagcggtgcccccgtctacctcgcggccgtcctggagtacctcgccgctgaggtcctggagctcgccggcaacgctgccaaggacaacaagaagacgcgcatcgtcccgcgccacgtgctgctggcgatccgcaacgacgaggagctcgggaagctgctgaccggcgtgacc

SEQ ID NO: 605 - DNA, 226 bp, Zea mays
gcacgagcctgtgcctaaaggtattgtctatggcaagccaaagcaccagggtatcacccagctcaagttccagaggaacaagaggtctgttgctgaggagagggctggacgaaagcttggtggactcagggttctcaactcctactgggtgaatgaggatagcacctacaagtactttgagatcattcttgttgatgtggcccacactaccatccgcaatgatcca

SEQ ID NO: 606 - DNA, 226 bp, Zea mays
gcacgagcccgcgcctgcacttttttatggttggattcgctccactgacctcacggggctcccagcagtaccgtgccctcactgtgccagagctgacccagcagatgtgggactccaagaacatgatgtgtgctgctgaccctcgccacggtcgctacctcacggcatctgctatgttccgtgggaagatgagcaccaaggaagtggatgagcaaatgctgaacgt

SEQ ID NO: 607 - DNA, 226 bp, Zea mays
gcacgagactacgctgacctcgctcaggctcgtcaccagcagcagaacctggggcccctggggtgtcgagaacgggacgcgtttctccgtcacggcgcccatcggcagcagcatcgtgggattctatgcgcgggcgggaaccaggctcgtcgatgctatcggtgtttacttgcgtcagatttaattcgaataatagcaggggagctactgctagctacgtacctgc

SEQ ID NO: 608 - DNA, 212 bp, Zea mays
cgccgccatgtcgaagcgaggcaggggaggttcggcggggaacaagttccgcatgtcgctgggtctgccagtggccgcgacggtgaactgcgcggacaacaccggcgccaagaacctctacatcatctccgtcaagggcatcaagggccgcctcaatcgcctcccgtccgcctgcgttggcgacatggtcatggccaccgtcaagaagggga

SEQ ID NO: 609 - DNA, 237 bp, Zea mays
gcacgaggtcccttgtatcgctgctagtcagcactgagtcgtttgaggtgctcgtggtgatgttaggtactagatgggtgtcattacttatgaatgcgatgttgctgtgacagaactgcatttccttttgtactatggttgtccaagttgtcattaccatgatgtgaggtagcttaactggttgttgctataccttatgcagcattttgctgaagttatcaccatgaggtgaggtag

SEQ ID NO: 610 - DNA, 238 bp, Zea mays
gcacgaggggattcaactggcagaagttccagatgccatctgtcaaaagcaagaatggatggctattagctggagggcttcatgcagataatgtttgtgaagccttttctgctctgaaaccagatggtgttgatgttagcagcggcatatgtggtcgagatggtatccgaaaagatgcagacaggattaattccttcataagtaatgtgaaatccctaaatttcctatcgtaaggtca

SEQ ID NO: 611 - DNA, 240 bp, Zea mays
gcacgaggagagagagagagagagagagagagagagagagagagagagcccgaggcaagatggttctccagaacgacatcgaccttctgaacccgccggcagagctcgagaaactcaagcacaagaagaagcgcctcgtccaatcccccaactccttcttcatggatgtcaagtgccagggatgcttcagcataaccacggttttcagccactcccagactgttgttgtgtgcccaggct

SEQ ID NO: 612 - DNA, 238 bp, Zea mays
gcacgagaagcccaccatcacctcccgtgagatccagacctccgtgcgcctcgtcctccccggggagctcgccaagcacgccgtctccgagggcaccaaggccgtcaccaagttcacctcgtcctaggctgcgtggcctccgcttgcaggcttccctcgtatgttcgcgtgtcttgctgtagttaggtgctgctgtgtctggtctcctccggtagcaactgttatctgatggaacagt

SEQ ID NO: 613 - DNA, 241 bp, Zea mays
tgactgcagccacgaataattcaccggaccgtaaaatcaaagaatatactcctcgacgaagattatgaggcccatcttacagacttcggcatcgctaagagcttatgtgtctcgcagactcacacgtcaacctacgtcatgggcactattggttacattgatcccgagtacgcccgcacctcccgcctcaacgagaagtctgatgtctacagctacggcatcgttttactggagctgctga

SEQ ID NO: 614 - DNA, 231 bp, Zea mays
gcacgagctgtggcgagcggtgctacgacaagccgtggccctccaccaggggcgcgcaacaccagggctggtgctgcgaatgttgctgtgaggccattacctgctctcaaggaaaacgtgaagcgcgtcatgttctactgctaagattgacgctgcgctgatgctgtgagcaagcaattatcgttatggtggtgatgctaggacaccgttatgcaccggtaactttaatac

SEQ ID NO: 615 - DNA, 237 bp, Zea mays
tcacgactctgtccttcccaattctcaggcaaccccgtcgtcttccgccatgatccggttcatcctgctgcagaaccggcaggggaaaacacggctggccaagtactatgtcgctctcgaggactccgagaagcacaaggttgagtacgaggtgcatcggctcgtggtcaaccgggaccccaagttcaccaacttcgtcgagttccgcacgcacaaagttatatataggagatatgc

SEQ ID NO: 616 - DNA, 237 bp, Zea mays
ccggcagcggcagcagcctacccgggttcagcttgcccggcagcggcagcatgcccctcttcggcggcggctccccgggcttcagcggcttcggcggcatgcccgggtcgcccaccgccggctccgtccccgagcacgccaacaagccctgaacgccaacaagcgtggtagtagagtggtgctactgttactgtagtacgtcgtcgtcttcatgcatgcgtggttcgtggtttcccc

SEQ ID NO: 617 - DNA, 230 bp, Zea mays
gcacgagaggagacgcgccaaggagagcccgcaaggaggcgactatgagggccaagtggaagaagaagcgcatgaggaggctgaagaggaagcgccgaaagatgaggcagagatccaagtaggctgatggggattgtggatggtggtgtcggcatagttgtgttacgtttcttcgatgcgtgagttcatggagagatgtcacatcctagttcgtcgtcaccgtttgccat

SEQ ID NO: 618 - DNA, 230 bp, Zea mays
gcacgaggccaaggctgtgaagtctggggcagccaagaagaagaccaagaagatccgcacgtctgtgacatttcaccgccccacgaccctgaagaaggctagggaccccaagtacccacgaatcagcactaccggaaggaacaagcttgatcagtaccaaattctcaagtacccccttaccacagaatcagcgatgaagaagattgaagataacaacactctggtcttca

SEQ ID NO: 619 - DNA, 224 bp, Zea mays
gcacgagccatagtcgggccagcaggaactccataccatgatggtctgttcttcttcgatgtccgttttccttgcgaatacccaaagtgcccaccaaaagtatactaccattctggcggacttcggctgaacccgaacctgtacgagagcgggaaagtgtgcctgagccttctgaacacctggtggggcaaggggtgcgagaagtggggcaagtcgagctccag

SEQ ID NO: 620 - DNA, 227 bp, Zea mays
gcacgaggcttgctgttgcatcttctatccagacttcgtaatagggtggatgtggtcaccgttggcagactctccttgaatttcactggcttcaacagggaaagtgcttccatatttgggaatcagctgtattctttgatccagaaattggtgccgtattcacaagccatacctctgtcaattgagtatctcaacacagctacacttcaacctagaaaggacaacaa

SEQ ID NO: 621 - DNA, 223 bp, Zea mays
gcacgagatcaactccgccgtcgggctgctgctcgtcagcttcaccgtctacatcatcccggccctggcgcacgtcctcacctaccgcacggcgtccgcgcgcatgaacgccgcggagaagccgcccttcttcctgccgagctggacggggatgttcgtcctcaacatgttcatcgtggtgtgggtgctggtggtcggcttcgggctgggcggctgggccagc

SEQ ID NO: 622 - DNA, 224 bp, Zea mays
ttcggcacgagagaacatctctgctggagtacttggtggtgccacagcaatctggatcttatttgaattgcttggctaccatctccttacttttgtttgccatggtctcatattcgccctgggtgttctctttctctggtccaatgcttcatcgtttatccacaaggctccaccaaagatcccagaggtgatcattcctgaagatttagttgtcaacattgcgc

SEQ ID NO: 623 - DNA, 220 bp, Zea mays
gcacgagcctgggcgtcttgatcagcttatctatattcctctgcccgatgagcagtccaggcttcagatcttcaaagcctgtctcaggaagtctcctgtggccaaggatgttgacttgaatgctctcgccaaacacacccagggtttcagcggtgcagatatcacagagatctgccagcgcgcgtgcaagtatgccatcagggagaacatcgagaaggat

SEQ ID NO: 624 - DNA, 222 bp, Zea mays
gcacgagattttcatggaggtacatgatgaccccttgaatgcaccatgcgatggcccaactcaatggccgttgcgcaatctggaagagctgttggaggaattaattgcaattgctcgagttaccaagggaaagaagccattcaagatcgacctcactccgttccaggagtgatctgctttggttgatagaaagcacaatgccaccatccatggaattccaca

SEQ ID NO: 625 - DNA, 228 bp, Zea mays
tgcgcttggggatgctgcggcatggcctgtgcaggggcttatcaggcacttcaggccagagttggagcggaggatccgcgagcgagctgaaagggagctgttggcggcttctgcataatgtgtcagccatgttgcccctgtactagtttcctgatttcttcctaccgaaataatacaaactgatggagctcctttctgtgtaaggaaatgtagccttcctggtttctt

SEQ ID NO: 626 - DNA, 221 bp, Zea mays
gcacgagccccggcggcacattcctggcagcagcattcccgggttcagcatgcccggcagcggcagcagcctacccgggttcagcttgcccggcagcggcagcatgcccctcttcggcggcggctccccgggcttcagcggcttcggcggcatgcccgggtcgcccaccgccggctccgtccccgagcacgccaacaagccctgaacgccaacaagcgtgg

SEQ ID NO: 627 - DNA, 219 bp, Zea mays
gcacgagcttcaatctccccagcaatccctagcagaagccttccatcctcactcgctcgatggcccgcacgaagcagacggcgaggaagtccaccggcggcaaggcgccgaggaagcagctggcgactaaggcggcccgcaagtctgcccctgcgaccggcggagtgaagaagccccactgcttccgccccggcaccgtcgcgctccgggagatccgca

SEQ ID NO: 628 - DNA, 218 bp, Zea mays
gcacgaggtactccaacaattcagggtctatcagagatgcattgtgcttcttccaagacgaacagctaggtcaagatattgcttttgttcagtatcctcagaactttgaaaatgtggtgcaaaatgacatctatggcaatcccatcaacaccgtcaatgagttggaccatccttgcttggatggatggggtggaatgtgttactatggcacaggatgc

SEQ ID NO: 629 - DNA, 219 bp, Zea mays
gcacgagatccaaccgggaatcagccaggcgttcgagaagcagaaaggcggctcacttgaatgaactggaggcacaggtagcacaattaagagtcgaaaactcttcgctgctaaggcggcttgctgatgttaaccagaagttcaatgaagctgctgttgacaatagggtgctaaaggcagacgtcgaaaccttaagagcaaaggtgaagatggcagagg

SEQ ID NO: 630 - DNA, 219 bp, Zea mays
gcacgagggcattcccatcggcgttgtcctggtgaaggagaagatcgccgcagccataaactacggcgaccacggcacgacgtttggcggcgggcctctcgcctgccagaccgcgataacggtgttcgacaagatcacgagacccggtttcctggccgaggtgtcgaggaaaggggagagcttcaagcagctgctccgcgccaagctgagcgggaaccc

SEQ ID NO: 631 - DNA, 220 bp, Zea mays
gcacgaggccaggcgacgagcgccggtcggtcgtcgccatcgacggcggcctgttcgagcactacgccgagttcaggaagcgcctggaggccacgctggtggagctgctcggggaggaggcgtctaggctggtggaggtcaagctcaccaaggacgggtctggcctcggagccgccctcattgcagctgcccactcgcagtactgaacgcccaacggccg

SEQ ID NO: 632 - DNA, 215 bp, Zea mays
gcacgaggcgaagaagccggcggcgcaccctccctacgctgagatgattgtagaggcgatcgctgccctcaaggagaggaaggggtcgagctcggtggccatcagcaagtacgtcgaggggaagcatggcggcaagctccccaccaacttccgcaagcagctcactgtgcagctgaagaagctcgctgccgccggcaagctgacgagggtgaaga

SEQ ID NO: 633 - DNA, 214 bp, Zea mays
gcacgagcctcagccaaggactggagaggtggcagggctgccagctttaacatcattcccagcagcaccggtgctgccaaggctgtcggtaaggttcttcctgaattgaatggcaagctcactggcatgtccttccgggttcccaccgtggatgtgtcagttgttgacctcactgtcagaatcgagaagggggcctcttacgaggaaatcaaga

SEQ ID NO: 634 - DNA, 215 bp, Zea mays
gcacgaggcagaacctcgcaaccgaatccgagctgaagagcatcgagaagaagatcgacgatgtcgttgaggaggctgtcgagtttgctgacgcgagcccgcatccgccgcgcaccagctgttggagaacgtgtttgccgaccccaaaggctttggtatcggccccgatggtaagtacaggtgcgaggatcccaagttcacccaaggcaccgccc

SEQ ID NO: 635 - DNA, 215 bp, Zea mays
gcacgaggaatcacaatcagagcttctagggaggctccgtgggcttaaggaggatttgctgagttggaggagtaatttagactcccaagtgacgaaatacaaagtggaactctctgacatcaagagtgcactcaataatgaaatagagcagcttcgctcagatttccaagagctgaggaccacccttaagaagcagcaggaagatgtgtcactta

SEQ ID NO: 636 - DNA, 215 bp, Zea mays
gcacgagaaaccgcatcctctcatcagcttccttccacattcgtctcgagatctcgccccgtcgccatggacgcgatcgacagcgtggtggatcccctccgcgacttcgccaaggacagcgtccgcctcgtcaagcgctgccacaagcccgaccgcaaggagttcaccaaggtggcggcgcggacggcgatcgggttcgtcgtcatgggcttcgt

SEQ ID NO: 637 - DNA, 215 bp, Zea mays
gcacgaggtcaaggccgggctgcagttccccgtcggccggatcgggcgctacctcaagaagggccggtacgcgcagctgtgggcactggcgcccccgtctacctcgccgccgtcctggagtacctcgccgccgaggttctggagttggcagggaacgcggcgaaagacaacaagaagacgcgcatcatcccgcgccacgtgctcctggcgatccg

SEQ ID NO: 638 - DNA, 182 bp, Zea mays
gcacgagcccccatccccctcgaccccgacaaacccgacccgatggcgcccaaggccgagaagaagccagcggagaagaagccggcggccgaggagaaggcggagaagacgaccgcagtaagaagcccaagtccgagaagcgcctgccggcctcgaagtcctccggcaaggagggcggcgag

SEQ ID NO: 639 - DNA, 182 bp, Zea mays
gcacgagaaggaacttctcatttctttcaagagagcaactggacagaagccccagaggatcatattctacagggatggtgtcagtgagggacagttctatcaagtattgttgtatgaacttgatgccatcagaaaggcatgtgcatccttggagcccaactaccagcctccagttacttttg

SEQ ID NO: 640 - DNA, 181 bp, Zea mays
gcacgaggtttgatccttgcaaagagatggcatacattcctttggatgaggatatgaaggtgaaaggtaaagcggctattgatgttgtgtgcaaccccttggggaaatctggaggtgctctgatccagcagttcatgatcctgtcatttggttctctcgcgaactcgacaccctaccttgg

SEQ ID NO: 641 - DNA, 179 bp, Zea mays
gcacgagaggtaatgaagtttgaagatctgaaagaactgggcagtgaatctgctgtaaaggctgctggaaaatacaagcaggaggggaaaacctatgtggtccaggacggggacatcatctttttcaaattcaacgtgtctggtggcgggaagaagtgaataatgtatgaagatggtag

SEQ ID NO: 642 - DNA, 181 bp, Zea mays
gcacgaggaaattggcagagcaaaagaatttatagtgaaacaactggaagttgagatggggcaatctatggagatgggaaccattcacgctggaaattttctgagacgtttctgctcaactcttgggatgaacaatcaagctgttagggcagcccaggatgcagttaagcactcggaggag

SEQ ID NO: 643 - DNA, 188 bp, Zea mays
gcgctggaattcggagcgtagtggatgatgaagctgggaaatcaaatggtggtctcaagagtgatccaatgtgcaatgcttgtgagatggctgtggtatggatgcagaaccaacttgcccagaacaagacacaggagctcatcctgaactacattaatcagctttgcgagcgtcttccgagtccgatg

SEQ ID NO: 644 - DNA, 175 bp, Zea mays
gcacgaggcggctacagaggaaagagtattcagtcagccctcatcggaggctcctgtctggctttcacatctgctgtgctggacattggcggcaatacgaccagagttgacaacggcaaagagtactatgcctacacaactgagaagaagcctgcaaattgattccaagtctgca

SEQ ID NO: 645 - DNA, 179 bp, Zea mays
gcacgagccaaattcaaagtcacagcggcgaaactctcggcgatgtctggccgcggcaagggcgggaagggtctgggcaagggcggcgccaagcgccaccgcaaggtgctgcgtgacaacatccagggcatcaccaagccggcgatccgcaggttggcgaggaggggcggcgtcaagcg

SEQ ID NO: 646 - DNA, 178 bp, Zea mays
gcacgaggaggaacagctggcccaaggtgcgtggtgtggccatgaaccctgtggagcatccccacggaggaggtaaccaccaacacatcggtcacgcctctactgtccgccgagacgctccccctggccagaaggttggtctcattgccgctaggaggactggaaggctcaggggtca

SEQ ID NO: 647 - DNA, 177 bp, Zea mays
gcacgagggcacctacaacatccttgtcattgatgagcatgagcatgagctctgcgagtccgtccttgtgagcagcccggacaaggggtgtgccaatgttgtggctggtcgtgagagggcccccgtcttccttaccagcaacaacggtgttgcatccaacgttcgtttggcaaatgc

SEQ ID NO: 648 - DNA, 183 bp, Zea mays
caaatctgcggcatcattgcttcggatgagaagcgacatgaaactgcgtacaccaagatcgtggagaagctgtttgagatcgaccctgatggtaccgtggtcgctctggctgacatgatgaggaagaagatctcaatgcctgcccacctgatgtttgacgggcaggacgacaagctgttcgag

SEQ ID NO: 649 - DNA, 174 bp, Zea mays
gcacgagatacacccaaaatccccaaaccctagcgaactcggcacggcggcgatggcagcggcgggcctgcggaaggggaacgcgcgcctcccacccgaagtgaaccgggtgctgtacgtgcggaatctgccgttcaacatctcgagcgaggagatgtacgacatcttcggcaa

SEQ ID NO: 650 - DNA, 180 bp, Zea mays
cgccgacgccgcaggaggagacgcatcgaggttagcacgcgaagaagcgaccatgagggccaagtggaagaagaagcgcatgaggaggctcaagaggaagcgcagaaagatgaggcagagatccaagtaggcagatcgagatggattgtggacctgatgacatgcgtgggtacatacatt

SEQ ID NO: 651 - DNA, 172 bp, Zea mays
gcacgagcgcaagactgtgaccgccatggacgttgtctacgctctcaagcgccagggccgcaccctctacggtttcggcggttaggtcgcccctctcccggtggcgaattacgtggtggcggtggtggtcgtgttgtgttcttggtctagttagtctgtgttgtctttatcg

SEQ ID NO: 652 - DNA, 174 bp, Zea mays
gcacgaggaaaggatgcacacccttccatctaccgcaagcagaacctgactgacgaggagaggagatcgcccgaaagatttcaggactgcagccactggtgcctccctggagtaccagattcctggaatgaactggtttatgctcaacttctgatcaagcagcatcaaatgcgc

SEQ ID NO: 653 - DNA, 173 bp, Zea mays
gcacgagatctctttgacctacatagcttctgaaaggataattcctggctacggtggtggtatgagttcagcaaaagcagctcttgagagtgatacaagagttcttgcatatgaagcaggtcgaaaaggcaaaatcagagtgaacaccatatcagcaggtccattgggaagcc

SEQ ID NO: 654 - DNA, 178 bp, Zea mays
gaaagttacagttgtatttgtcctaggtggtcctggaagtggaaaaggcacacagtgtgccaacatcgtggagcactttggattcacccatcttagtgctggagatcttctgcgtgcagagattaaatctggctctgagaacggaaccatgattgagaacatgataaaggagggaaag

SEQ ID NO: 655 - DNA, 173 bp, Zea mays
gcacgagaaaagatgcacctggtgcaccaagacaatggtggttcggcggtggtactgacttgactccttcatacatcattgaagaggacgtgaagcatttccattctgttcaaaagcaagcatgtgataaatttgatccaagttttcacccaagattcaaaaaatggtgtgat

SEQ ID NO: 656 - DNA, 175 bp, Zea mays
gcacgagccgcggaaggtgcgcatcaggttccgcgacgtcctggacacgcgcgacctcggctacacgtacgacgccgagtccgacaaggacctgccatggctgcgctgcaagatctcgtcgctggtgccccacggcaaggacagcccgccgaggtcgtcgtcggcaaggaaggcg

SEQ ID NO: 657 - DNA, 234 bp, Zea mays
gcacgagcgatgctccccctggccagaaggtcggtctcattgcggctaggaggactggaaggctcagaggccaggctgctgccacagcctccaaggctgacaaggccacctagagtattgttgttcttgttttatctatccctctgctgtgatttattagatggttaaaaaggacgtgttccgctatggatggtactatggtgaaacattgtgtcagtttttgtggtatctgta

SEQ ID NO: 658 - DNA, 223 bp, Zea mays
gcacgaggatccacaactatttgcttgcttggctctgagtcacacctgaccgatcaatgcaggtgtcactttgcttttaactgtttacatataaagagtcgagtttcgcacgtggccacctgggtcctgattaatctacccatatagctacgttgggtttagatgcttaggcattcttgtaaattgttttcttaaaactagttttgtttctcagagatttaat

SEQ ID NO: 659 - DNA, 182 bp, Zea mays
gcacgagcggcggtcctgcatacaaccagccaatgatatatggcagaggaccagcaccggcaggaatgaggatggtgccgatggtgcttcctgatggccgccttggctatgtcctgcaacaaactggtggaatgccgcctccgcccccaccgcggaggggtagttgacgaagagacagtggc

SEQ ID NO: 660 - DNA, 236 bp, Zea mays
ccggaaggtgctgcgcgacaacatccaggggatcacgaagccggcgatccggaggctggcgaggaggggtggcgtgaagcgcatctccgggctgatctacgaggagacccgcggcgtgctcaagatctttctcgagaatgtcatccgcgacgctgtgacctacacggagcacgcccgtcgcaaaaccgtcaccgctatggacgtcgtgtacgccctcaaacgccagggccgcactc

SEQ ID NO: 661 - DNA, 230 bp, Zea mays
gcacgaggaaaaccagacagcttggcctcattgtgtgcagaggcacggcagtcatgctggtctcaccgactgatggaactgatgagatcgccaacccttttcttgcggaaggagcataagcttgcagttggtcgattatttagaaccgtgctctcatgtcaccctcagaacgatgtgtcccagtgggaaaaagaactctattctcgtaccggttggtgatgaactctgta

SEQ ID NO: 662 - DNA, 229 bp, Zea mays
gcacgaggacagccggtagccatcaagaagcttacagtctctagcttggtcaagtcaaaggatgacttcgagcgacaagtgaagacgctcagcaaggtgcggcaccacaatatcgtcgcgctcagaggcttctactggacttcgtcactgcagctcctcatctatgattacctacctggaggaaacctgcacaaacacctgcacgagtgcaacacagacagcttacttt

SEQ ID NO: 663 - DNA, 230 bp, Zea mays
ttcggcacgagttggaatggtggtggtggtgctggacagaataatctctttgtagcatcctttttcttcgatagggctgctgaggctggatttgtgaacgccaatgcacctgttgctaaggttaaaccctcagacttcagacaagctgctgagcgcgcttgctctttgagtgtgaagaacgccgaggctacctttcctggtgtccaaaaggataacattccatatatctg

SEQ ID NO: 664 - DNA, 225 bp, Zea mays
gcacgagctcaccccaccaacagcaagcgaaaatctcccgatcccctctagtctccgcggcgaagatgtcggggcgcggcaagggcgggaagggcctgggcaagggcggacgaacgccaccggaaggtgctccgcgacaacatccaggggatcacgaagccggcgatccggcggctggcgcgcaggggcggcgtgaagcgcatctccgggctcatctacgaggag

SEQ ID NO: 665 - DNA, 224 bp, Zea mays
gcacgagcaagaacagcgatgcggcgacagatgacgaaagggccaggcttgaggtggtgggagagtaccaccttggggagtttgtgaacagattccgccacggttcactggtgatgcgccttccagactcggatatagggcagatccctacggtcatctttggcacaataaacggggtgattggcattattgcctccctcccgcacgaccaatacatcttcctg

SEQ ID NO: 666 - DNA, 230 bp, Zea mays
ttcggcacgaggactgggccaaactcaatcattggcagagctgttgttgttcacgctgatcctgatgatcttggaaagggtgggcacgagctcagcaagagcactggaaacgccggtggccgtgttgcttgtgggatcattggactccagggctgaaaacgatcgccggacttgggggtgcctgagaggtccgtctcctgccgtccccagcagacgagcctgaacattcg

SEQ ID NO: 667 - DNA, 230 bp, Zea mays
tttctatctgctcgctgcttactgatcccaacccagacgatcctcttgtccctgagattgctcacatgtacaagacggatcggcctaagtacgaggcaacagcccgcagctggacccagaaatatgccatgggatgaaaatgaaatgaagtcgaaactccatattcggcattactgcttaaatgcagacgattgtggtgttgccccatgaaactgtctgtggggacgtat

SEQ ID NO: 668 - DNA, 223 bp, Zea mays
gcacgagcggcacgagaagctctcccagatgatctacggcgggctggcgtcgctcatcttcagcgggtacatcgtctacgacacaaacaacatcatcaagcgctacacgtacgaccagtacgtctgggccgcagtctcactgtacctggacgttatcaacctcttcctgtccctgatgaccctcttcagggcagccgactaggcgctctgctctcatcctgtc

SEQ ID NO: 669 - DNA, 221 bp, Zea mays
gcacgaggaatcactcagtgattagcgtaggtgctttgcgaagtgcttagttgtaacaccctgaatttggggatataaaattccttctctaatatccaccaaattcgggtgttaccttctcttgcctctttcttttcgttctccctttcaaagcgataagagttatctagaggtcatctaaattcctaagtgaatggttgttgttgcatcatgctgaaata

SEQ ID NO: 670 - DNA, 220 bp, Zea mays
gcacgaggtgcgacgacggccgcctgatcgatcgaccaaccattccgccgtcgccgccggccggatcatcgatcgtcgtcatgatgatatctatcaatctacgcgtgatgatcgatggctacttgtctactgctatgtactactaaataaaatctctccgtgtgtgcacgtacgcttgcatgtgcatggtagcatgtatgtacgacgtcgtccatgtatg

SEQ ID NO: 671 - DNA, 222 bp, Zea mays
gcacgagcaacgccgaggcaggagaaggcggccgaccagcgggccccggcggccgagcgccggcgggagacgcggccgcggttcgcgcccgagttcgacgggctgcactgcttcgagtccatcgtctccgcctgaacttcgaggggcctcctcgtcacatgccgcccccgcgcttggattcgttcctgtcggcggtcaccgagtgaaaaggcgacggcgacg

SEQ ID NO: 672 - DNA, 223 bp, Zea mays
gcacgaggctgctctacatcgtggcgcagtgcctcggcgccatctgcggcgtcggcctcgtcaaggcgttccagagcgcctacttcgacaggtacggcggcggcgccaactcgctcgcctccggctactcccgcggcaccggcctcggcgccgagatcatcggcaccttcgtgctcgtctacaccgtcttctccgccaccgaccccaagcgcaacgcccgcga

SEQ ID NO: 673 - DNA, 218 bp, Zea mays
gcacgaggttagcaagtggttcagcggtgtctgttcatggaggaaccccattaccactgtgctagtgcacattctctttataatgctggtgtgctttcctgagctcatacttccaacagtgttcctgtacatgttccttatagggatttggaacttccgctatcgacctcgttatcctccacacatgaataccaagatctctcatgcggaggctgttc

SEQ ID NO: 674 - DNA, 234 bp, Zea mays
gcacgaggccgtttggctcacagtcagagctgcaagataagatgcaggtgcaggggcagggctctagcgtcaccaagattggactatggggtggaccgggagggtcggcacaggacatcacggcggagcggccgccgcagcgtctgcacagcgtcaccgttcgtgctggcgtcgccgtcgactccatcgagttcacctatactgacagcgctgggcagaggcgcgccgctgggc

SEQ ID NO: 675 - DNA, 234 bp, Zea mays
gcacgaggggaaatctgggaaggatggctggtatcctcctggtcatggtgatgtgtttccttctttgaataacagcggaaaacttgacatcttattggctcagggcaaggagtatgtctttgttgcaaactcagacaacttgggtgctatagtcgacatcaagatcctaaaccatctgatcaataaccagaacgagtactgcatggaggttactccaaagacgctggctgacgt

SEQ ID NO: 676 - DNA, 235 bp, Zea mays
gcacgaggcgggttcgaggcggccgtcggagctgagaatggcgggtgcaagtgcggcgccaactgcacctgcgacccctgcacctgcaagtgagacgacggcggcggcgatgacgctgcagggtctgcaggccctgatggggtcggaaggactctttatctctctagctaattaataagctctagctagtatataatattctagcagtgtcgtttgctgtgttttgttcgagtca

SEQ ID NO: 677 - DNA, 237 bp, Zea mays
gcacgagccccgttccttgagaagctgaagaagaggggctatgaggtgctgttcatggtggatgccattgacgagtattctattggacagctgaaggagtttgagggcaagaagctcgtctctgccaccaaggagggcctgaagctggacgagagtgaggatgagaagaagcgcaaggaggagctcaaggagaagtttgagggcctctgcaaggtcatcaaggaggtgctgggcgac

SEQ ID NO: 678 - DNA, 229 bp, Zea mays
gcacgagagcaggtgcaccccgacatcggcatatcctccaaggccatgtccatcatgaactccttcatcaacgacatctttgagaagctggccggcgaggccgccaagctggcgcggtacaacaagaagcccaccatcacgtcccgcgagatccagacctccgtgcgcctagtcctccccggagagctcgccaagcacgccgtctccgagggaaccaaggccgtcacca

SEQ ID NO: 679 - DNA, 226 bp, Zea mays
gcacgagctcatcgaagagtcgaacgttcaaccggtgaatagccctgtgacggtttgcggtgacatccatgggcagttccatgacctgatgaagctcttcgcgacggggggccacgtcccagagacgaactatattttcatgggtgattttgtggaccgtggcttcaacagtctggaggttttcaccatcctgttgctactaaaagcgaggtatcctgcacacata

SEQ ID NO: 680 - DNA, 227 bp, Zea mays
gcacgaggagggttggcttctcctccccctcaggttcgggttcgggttcgtgaggttctccggggttcgggttcgtgggtgagcggatcgagatggcagcgtcagatgatgagtaccgctacttcgtcggcggcctcgcctggaccacggacgaccactccctccacaacgccttcagcacctacggcgaggtcctcgagtccaagatcatcctcgatcgggagacg

SEQ ID NO: 681 - DNA, 229 bp, Zea mays
gcacgagggaaggctctcgtgaccaacgggatgtccgccatggagaccgacatcaacgcgccgccgccgcccgccccagctggcgagggatcctctgcggccggtccgtcctcctcccgcaagcccaacaagcgcttcgagatcaagaagtggaacgccgtcgcgctctgggcatgggatatcgtcgtcgacaactgcgctatctgccgcaaccacatcatggatctat

SEQ ID NO: 682 - DNA, 228 bp, Zea mays
ttcggcacgagctgcggtgacgcgatcctccgccatgtcgcaaccggagatggctccaattggtgcacgttctatttcaactcaagttgtgaggaaccggatgaagagtatcaaaaacatccagaagatcacaaaggctatgaagatggttgcagcatcaaagcttcgggctgttcagacgaggactgaaaattcacgcggcttgtggcagccgttcaccgcccttct

SEQ ID NO: 683 - DNA, 215 bp, Zea mays
gcacgagggcggctggagggactgatgtgtgggcccatcctggcttcggccgagttatcttatctatctatagtatcgtgttaccgttcgcttctgtcaccgtgttagtgtccgttctacctttggattaggtgttggtaccctgttgttcgctttggttgctcccgctatgaaacgagacgagagaagaatgagcaaggtttttgttcgcagct

SEQ ID NO: 684 - DNA, 224 bp, Zea mays
gcacgagatacacccaaaatccccaaaccctagcgaactcggcacggcggcgatggcagcggcgggcctgcggaaggggaacgcgcgcctcccacccgaagtgaaccgggtgctgtacgtgcggaatctgccgttcaacatctcgagcgaggagatgtacgacatcttcggcaagtacggcgcgattcggcagatccggctgggcaacgccaaggacacgcgcg

SEQ ID NO: 685 - DNA, 224 bp, Zea mays
gcacgagcgacgtcgagttagtctctcgctccgccgccctcatcaaccagaaatgccatgtcaagaagaaggatatcaggaagtttttggatggtatctatgtgagcgacaagggtgtgatcgaagaggagcagtgagggacaattagttgttatcgtttgagttggaattattgtttggtttgcaattttctcaaggtgaactttgtaatcggttaggatgtg

SEQ ID NO: 686 - DNA, 224 bp, Zea mays
gcacgagggaggcagggcgtggtggaaagggaaaccttcctctgaacgatgcacctacagtagtcgcgtccgagccgtgggacggcaaagatggagaggtcattgaggaggatgaattctccctcgacgagctcatgggcgacactcctcagcaaacgatgagttgtgattctgatggttcttggactgatctgcgtgtcggttagccagactgtaaatctgag

SEQ ID NO: 687 - DNA, 230 bp, Zea mays; identical to SEQ ID NO: 26

SEQ ID NO: 688 - DNA, 235 bp, Zea mays
gcacgaggcacaacggcacgattctcctcctccgtccgcgtactctcggtttcggcgatgtcggggcgcggcaagggcggcaaggggctgggcaagggcggcgccaagcgccaccgcaaggtgctgcgcgacaacatccagggcatcacgaagccggcgatccgtaggctggccaggaggggcggcgtcaagcgcatttctgggctcatctacgaggagacccgcggcgtgctca

SEQ ID NO: 689 - DNA, 241 bp, Zea mays
ggactacgaaccctttggtctttgacaactcttacttcaaggaacttctgagtggcgacaaggagggccttcttcagctcccaagtgacaaagccctgctgagcgaccctgtcttccgccctcttgtggagaaatatgctgcagatgagaaggcattctttgatgactacaaagaggcccacctcaagctctccgaactggggtatgctgatgcttaaatggtccatatcctggagcggga

SEQ ID NO: 690 - DNA, 237 bp, Zea mays
gcacgagcccacgaccaactgctggccctcttcgtcccattgttcaatgccagactctcaagtacaacatgaagtcaagggctgggagaggctttacccttgaggagttgaaggctgcgggcattccaaaaaggcttgctccaaccattggcatttctgtggatcaccgccgcaagaacaaatcccttgaggggctgcaggccaatgtccagaggcttaagacatacaaggccaagc

SEQ ID NO: 691 - DNA, 244 bp, Zea mays
caggtgctgcccaggtaagtcggcggcggcgatgacaacgcgcttcaagaagaaccgcaagaagcgcggccacgtgtccgccgggcacggccgcatcggcaagcacaggaagcacccgggaggtcgcggtaacgccggtggcatgcaccaccaccgtatcctcttcgacaagtaccatccgggctacttcggcaaggttggcatgcgttacttccataagctccgcaacaagttctactgccct

SEQ ID NO: 692 - DNA, 244 bp, Zea mays
cgccgctgacccaggttgtcttgatggcgcccgctgtagaagccgtgaaggagacaggcaccttccagaaggttcctgccttgaacgaaaggatactgtcagccatgtccaggaggtctgttgctgcacacccttggcatgatctggagataggtcctggtgctccaaccatattcaactgcgtcattgagataccaaggggctactaggttaaatatgaacttgacaagaaaactggactgat

SEQ ID NO: 693 - DNA, 237 bp, Zea mays
gcagagctgacctgatggcagcattcagtgacccagaggtcatcgcggctttacaagatgtgatgaacaatcctgccaactttgctaagcaccatgcgaatcctaaggtgggccctatcatcgcaaagatgatggccaagttcaatgggtcccagtgatggttatgtcgcagtcaggttttgtgagcagcaagcaaaggtttgttggacagtgaacaggtgttcttttcgtgcatct

SEQ ID NO: 694 - DNA, 240 bp, Zea mays
tcctgatgcaggagcctgttgttcctggttcgttcctgagagctagagcaattggccttatgcccatgattgaccagggtgaaaaggatgacaagataatagcagtatgtgctgatgatcctgaataccgtcactacaacgacatcagcgagctgtctcctcaccgcctgcaagagatcaagcgcttctttgaagattacaagaaaaacgagaacaaagaagtcgcagttgatgcattct

SEQ ID NO: 695 - DNA, 233 bp, Zea mays
gcacgagcgcatgcccaacctgcacggtccatcttcaggtcgaggttccagcttctggttcggagacgatagagtgcggcgtatgtcagaaccctttcctcgtcagcgcccgttgaaccgagttcagcggcttcaggcgccgtgcggcggagtcttctcggattcgcaagcgaagagtcggtcctgttcaatcgagcctggcgcttgaattccggctatccctgtctgtctgt

SEQ ID NO: 696 - DNA, 239 bp, Zea mays
tggccgtggaggcggcggctacggcggtggcgggcgccgtgatggcggtggcggctacggtcttgtagacggctacggtggcgaaaaaggagaccgtggtggtggcggcggctacggcggtggcaaccgtggcggcggctacggcaactccgacgggaactggaggaactaagcggtggagcccgcgctaccaagttatcctgttcgctacggtgatgtttaccctagtccagagggtt

SEQ ID NO: 697 - DNA, 227 bp, Zea mays
gcacgagggaggtcgtacttgacttctgggtcctctgcactctacctcttcttgtatgcaaccttctacttcttcacaaagcttgagatcaccaagtttgtctcagctgttatgtacttcggttacatgctcattgcctcgtacgccttcttcgccttgaccggcacaatcggattctatgcttgcttcctgttcacaaggctgatttactcatcggtcaagatcga

SEQ ID NO: 698 - DNA, 248 bp, Zea mays
cggcacgagctacgacgagcagtgggcggcccacaagagcagcagcaagctgatggtgatcgacttctcggcgtcctggtgcgggccctgccgcttcacgggacccggccttcaaggagctggcctcccgcttcaccgatgccatcttcgtcaaggttaacgtcgacgagctcgcggaggacgcaaggacatggaaggtagaggcgatgccaacgatcgtactggtcaaggatggccaggaggtaggc

SEQ ID NO: 699 - DNA, 229 bp, Zea mays
gcacgaggtccgtcctaccaccacagctcaccgcggtttggctttctcccctcttccgcacccgcttctcgctccggattccctctgctctttccctaacgaaggtagccatggcggggagaggtaaggcgatcggctcaggcgccgccaagaaggccacgtccaggagctccaaggctggcctccagttccccgtgggaaggatcgccaggttcctcaaggccggcaa

SEQ ID NO: 700 - DNA, 227 bp, Zea mays
gcacgagctgaagcttctagacgttcgacgtggaggggaggctcccgccgccgccgccgctgccatggcgtccaccaaggtgcagcgtatcatgacccagcccatcaacctcatcttccgtttcctccagagcaaagcgcgcatccagatctggctcttcgagcagaaggacctccggattgagggtcgcatcatcggattcgatgagtacatgaacttggtcctcg

SEQ ID NO: 701 - DNA, 228 bp, Zea mays
gcacgagcctgtgcctaaaggtattgtctatggcaagccaaagcaccagggtatcacccagctcaagttccagaggaacaagaggtctgttgctgaggagagggctggacgaaagcttggtggactcagggttctcaactcctactgggtgaatgaggatagcacctacaagtactttgagatcattcttgttgatgtggcccacactaccatccgcaatgatccaag

SEQ ID NO: 702 - DNA, 234 bp, Zea mays
gcacgagcacacataaagttcactgtgctgctgatgcccaatggatcagataagataacatcacatcctctacaggagttaaagcccaccaaatccattgaagacaatgcagagataaaggcatggcttgctttggggacgaaatcaaagaagaagggtggtgggaagaagaagaaaggcaagaaaggagatgcagcagaagcagatcccatggaggaggcgacaaacggtgct

SEQ ID NO: 703 - DNA, 234 bp, Zea mays
gcacgagaggaaggacctctacggcaacattgtgctcagtggaggttcgactatgttccccggtatcgctgatcgtatgagcaaggagatcacttcccttgcaccaagcagcatgaagatcaaggtcgtcgcaccacctgagaggaagtacagtgtctggataggagggtcgatcctagcctcgctcagcactttccaacagatgtggatatccaaggaggagtatgatgagtc

SEQ ID NO: 704 - DNA, 234 bp, Zea mays
caaaaccagaccatcaaacaagtgccagcgccctctcgcagtcgccgcaatggagagcaccttcatcatgatcaagcctgacggcgtccagaggggcctcattggtgagatcatcagccgttttgagaagaagggcttctacctcaaggccttgaagcttgtgaacgtggagaggtcgtttgctgagaagcactacgccgatctcgcctccaagcccttcttccagggcctcgt

SEQ ID NO: 705 - DNA, 222 bp, Zea mays
gcacgagaaacatgggttatcagaaccaacctgagcatgagcaatttgcacaactattacaagcaccacacgaggatgcgcagatgataataaaaggtcgatttccagttccaagactagttgtctgtgaccaacatggctcacaggcaaggtttttgttggctaagctgaatccatcggccacatataactcagctcatgatgttgctccaggttccgaca

SEQ ID NO: 706 - DNA, 227 bp, Zea mays
gcacgaggaactacgactctgatgtccaggttgacactgaaacatttcttagtcgcattgttccagagggtccatctgctccatggaggcacaccatagaaggacctgatgacatgccagcacatatcaaatcatcaatgtttggttgttccctgatgattcctatcaccaatggacgtctcaacatgggaacttggcagggtatttggctctgtgaacatcgagat

SEQ ID NO: 707 - DNA, 230 bp, Zea mays
gcacgagatcatcctggccaagctctcggtcgtgcccgtcaggaggggctactggggaaacaagatcggccagccgcacactgtgccctgcaaggtcaccggcaagtgcgggtccgtcaccgtgcgcatggtgccggcgcccagggggtccgggattgtcgctgcccgcgtgcccaagaaggtcctccagttcgccggcattgaagatgtctttacctcgtcccgtggct

SEQ ID NO: 708 - DNA, 231 bp, Zea mays
gcacgagggatagagcaaggccacacacacacacacaccactaggctaggttagccttttaatcgtcgtcgagaagcaagaagggcgcgcacgcaagcaggcaagcaagaagagagccgatcgaccgagagctagcacgcgatggcgaggtcttccaagatgatggtggcggcagctctgctggccttggccctggccgtgtcgaccgccgacgcgaggaacatcaagacc

SEQ ID NO: 709 - DNA, 232 bp, Zea mays
gcacgagatctcacccctgaggagggtgaaccaggccatctacctcctcaccactggtgccagggagagtgctttccggaacatcaaaaccattgccgagtgccttgcagatgagctgatcaacgctgccaagggctcatccaacagttacgccatcaagaagaaggacgagattgagcgtgttgccaaggccaaccgttgaactgagcttgtatcctggtgcactctgcgc

SEQ ID NO: 710 - DNA, 219 bp, Zea mays
gcacgaggttttgagatctctgttccgtcagagaatgcagtggatcttgcagaggccatcctagagagatcggaaggcaaggtgcggctgaccggcttgggcgcccgtgacagtctccgactggaggcaggcctgtgcctgtacggcaacgacatggagcagcacatcacgccggtggaagccggcctctcatgggcgatcggcaagaggaggagggca

SEQ ID NO: 711 - DNA, 219 bp, Zea mays
gcacgaggtcaggtcattcccactgccaggagggtcatctatgcctctcagctcacggccaagccaaggctgctggagccagtctacctggtggagatccaggccccagaaaatgcacttggtggtatctacggtgttctgaaccagaagagaggtcatgtctttgaggagatgcagaggccgggtaccccgctctacaacatcaaggctttcctccct

SEQ ID NO: 712 - DNA, 227 bp, Zea mays
ctttgaagcctgagttcatcgacatcatcaacgcggccaccgtgaagtccgcttaagatgctacgctgaagacgaacatactttttttttgctcaactgtgctatgtaagctagtagcttttgcgcaggagcagagactgttttgcctgcccccaacttctagcttgagcttgctaataatgtttacctctggacgtatcaataatggtgcttatgtatcccctttt

SEQ ID NO: 713 - DNA, 213 bp, Zea mays
  unsure (1)..(213): unsure at all n locations
gagccacatttcgaccggcggcggtgcgagcttggaactcttggaaggcaagactctacctggtgtccttgccctcgatgacgcctagatnnnnnnnnnnnnnnnnnnnncaggttctgccagctttgcgtgtcatcttgtttcggaccttggtgtagcactgcaaggctaaggtttactcctccacacatggactttcgaggataggcttgc

SEQ ID NO: 714 - DNA, 193 bp, Zea mays
gcacgagccaacatgctagaccatgctcccttgtgtaatttcataagactacaacccttttagggcttgttcgtttgtgtctgtgtctaagggaattgaaggtgattaaatttccttctatacaaatagaggggctttaatccactccaatacttttcaatccacgcctaaccgaacaagcccttaatatgat

SEQ ID NO: 715 - DNA, 224 bp, Zea mays
gcacgagtaagcgcataaagttacagatatgggatactgctggtcaagaacgttttcgaactattacaaccgcctactacaggggtgcaatgggaattttgcttgtctatgatgttactgatgagtcatctttcaataatataagaaactggataaggaacattgagcaacatgcttccgacaatgtgaataaaattttggtaggcaacaaagctgacatggat

SEQ ID NO: 716 - DNA, 251 bp, Zea mays
gcacgagccgcaacttcacagcgtatcatcgttttccatcgctcctactcctatcatccagaaaatctgagcggtattgatggcgcccaaggcggagaagaagccggcggcgaagaaggtggcggaggaggagccctcggagaaggcggctccggcggagaaggcccccgcggggaagaagcccaaggcggagaagcggctacctgcgggcaagtccgccggcaaggagggcggcgacaagaagggtagga

SEQ ID NO: 717 - DNA, 197 bp, Zea mays
gcacgagatcatccagaaaatctgagcggtattgatggcgcccaaggcggagaagaagccggcggcgaagaaggtggcggaggaggagccctcggagaaggcggctccggcggagaaggcccccgcggggaagaagcccaaggcggagaagcggctacctgcgggcaagtccgccggcaaggagggcggcgacaaga

SEQ ID NO: 718 - DNA, 251 bp, Zea mays
gcacgaggatgcattccattgtgcaacgccctgtggttgtgaatggtgacatccttgcgaggccaatgatgtaccttgcgctgacttacgaccacaggttgatcgatggcagagaggctgtcttcttcctgcggcgcatcaaggatgttgtcgaggaccccaggaggttgctgcttgacatataaattcatgcaccagcgctgcgctgccctgccggactgttttgtgcaattgtgcttatctggaaataa

SEQ ID NO: 719 - DNA, 252 bp, Zea mays
gcacgagccacgatgacctcggcaagcgctgcgctaagtactacgaggccggtgcccgctttgccaagtggcgtgctgttctcaagattggccccaacgagccgtcacagcttgccattgacctgaatgctcagggtctggctcgctacgccatcatctgccaggagaacggtctggtgccaattgttgagcctgagatccttgttgatggccctcatgacattgatcgctgcgcttacgtcactgagacag

SEQ ID NO: 720 - DNA, 249 bp, Zea mays
gcacgaggccgcaaccagatccgaaacctgagccaaaaccaacaccacaaccacctttcccacagcccgagtctcaaccagatcccaaaccccaacccgaaccatccaagccagatcctaaaccccaacccgagccatccaagccagaccctcagccagagcccaaacctacaccagagccaaaaccccaaccagaaccatcgaagccggagccaccgtcgtctcttccaccaccatttggcacgggcg

SEQ ID NO: 721 - DNA, 248 bp, Zea mays
  unsure (1)..(248): unsure at all n locations
gcacgagctctcaactcccaaggtccctttttttttctcgatctggaagcgccgcagtagcagccatggacgtgagcggagcaggcggtaaggcgaagaagggcgcggcggggcgcaaggccggcgggccgacgaagaagtcggtgtcgcggtcctccagggccgggctgcagttccccgtcagccgcgtcgggcggtacctcaaaaagggccggtacgcgcaggtgntaggcacgggtgcccccgtc

SEQ ID NO: 722 - DNA, 241 bp, Zea mays
gcacgagctcggtttccgaaccttcctgacatgtctccaaagaaggtttctgctactcataatgtatatgtctcgccactacgatcatcaaagatggatactttactctcaccaagcccaaagagctattatgcatgtgtcggcgagagtacctatgcgttccaaagcccctccaaggacctgaaggctatcaacaaccgcctaaatagttggaagaaagttagcggacgattgaacttcg

SEQ ID NO: 723 - DNA, 240 bp, Zea mays
gcacgagagaacacccagggtcttatctttgttgtggacagcaatgaccgtgactgtgttgttgaagccagagatgagctccacaggatgctgaacgaggatgagctacgtgatgctgtgctgcttgtttttgccaacaagcaagatcttcccaatgccatgaatgctgctgagattactgacaagcttggattacactccctgcgccagctacactggtacatccagagcacttgtgcc

SEQ ID NO: 724 - DNA, 241 bp, Zea mays
gcacgaggcctctcaggacggaacggtcgtcatctggacagcagcaaaagaaggtgagcagtgggacggccgggtgctgtatgatttcagaacccccgtttggaggctgtcgtggtcactgactgggaacatactggcggtttccgacggcaacaacaatgtgaccctgtggaaggaagctgtggatggcgaatggcagcaagtgacgactgttgagccataggtcctctcgagttattcc

SEQ ID NO: 725 - DNA, 240 bp, Zea mays
gcacgagcgcactggcctcacaatctgcctgcttggacctgcttggcgtcaaaggtgccaacagggaatctccggggtccaacgcgaggctcttggccacggtggttgcgggtgcggtcctagctggggagctgtcccttatctctgcgcaggccgctggccatctggtcaagagccacatgaaatacaacagatccagcaaggatatgtccaagacccttgcagaggaaacagacaaac

SEQ ID NO: 726 - DNA, 72 bp, Zea mays
gcacgaggcgccaagcgccaccgcaaagtgctgcgcgactacatccaatgcatcacgaaaccgacgatccgt

SEQ ID NO: 727 - DNA, 227 bp, Zea mays
gcacgagaggacttgaaaaagaaagaaagtgctgaaagagaagaacggggcaagaagtccctgagcatcaacgagttcttgaagccagctgaaggcgaaaggtactataaccctagtggccgtggccgtggtaggggccgtggggggttccgtggtggttacaacggcggttatcggggaccagctgctgctccagcgatcgaagaccaggctcagttccctgccct

SEQ ID NO: 728 - DNA, 215 bp, Zea mays; identical to SEQ ID NO: 683

SEQ ID NO: 729 - DNA, 226 bp, Zea mays
gcacgagccttgctgaagatggctcccactaaggaagaggagattaaactgagagaattcaaagaggagtcttctccagttaagcttaacccagctgagaagttcctcaaggcagtgctcgatgtgccttttgccttcaagagagtcgatgcgatgctttacatagcgaacttcgatgcagaggtcaattacctcaagaagtcgttcgagacccttgaggctgctt

SEQ ID NO: 730 - DNA, 229 bp, Zea mays
ctccaaagaaggtttctgctacccataacgtgtacgtctcaccgctacggtcatcgaagatggacactcttctgtccccgagctccaagagctactacgcgtgcgtcggcgagagcacctacgcgttccagagcccctccaaggacctgaaggctatcaacaaccgcctaaacagtgtgtccggcgggaagaaagtcagcggccggctgaacttcgacgtcgtcagcga

SEQ ID NO: 731 - DNA, 223 bp, Zea mays
gcacgagctcacttaacgccgccgcggtactagctccgcgcccccgacgccggtgattacgagcaggagcaagatgggttcggaatggccaagtctaagaaccacacggcgcataaccagtcgttcaaggcgcacaagaacggcatcaagaagcccaagcgccaccgccagagctccaccaaagggatggaccccaagtttctgaggaacttgaggtactcaa

SEQ ID NO: 732 - DNA, 220 bp, Zea mays
gcacgaggtttggtggcctcagggatggatactatatccatggccagtgtgcgatcatcatgtttgatgtaacctcaaggcttacttacaagaatgttcctacgtggcatagggacctgtgcagggtctgtgaaaacatccccattgtcctctgcggtaataaggttgatgtgaagaacaggcaggtcaaagccaagcaggttactttccacaggaagaa

SEQ ID NO: 733 - DNA, 220 bp, Zea mays
gcacgagggcagatcatccacctccatcaaatgcgcgccaattccgttctgaaccctcatcagtacttgagaaagttgagatagagaaggcaaagcaggatgatgatctgactgatctaagcaacatactgacggagctgaaagggatggccgttgacatgggctctgagatcgagaggcaaacaaaagcaatgggggatgcagagaaggattatgacga

SEQ ID NO: 734 - DNA, 216 bp, Zea mays
gcacgaggaagatctctcaacttcctttggcttcaggcaagcaaaagaggattgctgtgattactcaaggtgctgatccagtggttgttgctgaggatgggaaggtgaaaacgttccctgtgatcctattgcccaaggagaagcttgttgacaccaacggcgcaggtgatgctttcgttggaggcttcctctcacagttggttctaggcaagggca

SEQ ID NO: 735 - DNA, 216 bp, Zea mays
gcacgagatttcagaggcattcctctgaagtatgctcatgtggataatggacgggtcagctttctctcctttgatgaagttacactccccagcttgccctgatgggtagcagcagaacatgtgaagtgataaatagtgtgtttggtttgaggaatgaagtgatccatcttcttctcactcctcacttttttatttggtttgtggaatagaatgggt

SEQ ID NO: 736 - DNA, 215 bp, Zea mays
gcacgagatcaaatcaagtggcgcctcctcttgactgggagcaatatgtgtctgaaatagcaactgatatacttacagaacaaagccctaaaaggctatttgctgtacgccagaaattctatgaattactcgtcaattgtatcccacccgaaagtattttgaagaagttgttggcagaattactgaggaagttagatgcggatctgaaacatgag

SEQ ID NO: 737 - DNA, 215 bp, Zea mays
gcacgagccgggacgtacaaggtggcagcgagcgccgccgccggcggcaccccggtgacggtgaccgtggagccgtcgacgctgagcttcagcagggccggcgagaagcagagctacacggtgagcttcacggcgggcgggatgccgtcgggcaccaacgggttcgggcggctcgtctggtccagcgaccaccacgtggtcgccagcccgatcgc

SEQ ID NO: 738 - DNA, 222 bp, Zea mays
tcgagttttttttttttttttttttccaagaaaatgaatgtagtataacattgctggtcgttgcaatatcagtccccattacatcaaataataatagatcgcagctgtgtcgagctacgccggggagcttagctgagttttacattgtgcgcgaaagcaaatttgccagggttccataaacaactgaaccctctttttttctgcagggtttatgtacaggag

SEQ ID NO: 739 - DNA, 236 bp, Zea mays
gcacgagaagcagcgtcgcaaatggagcaggaagcgagcccgaatggaacgagaccttcgtcttcaccgtctccgacgacaccccgcagctgcacctcaagatcatggacagcgacctcaccaacgacgatttcgtcggcgaacaaccatccccctggaggccgtgtttcaggaaggcagccttcccccggcggttcacccggtcgtcaaggaggagaagtactgcggagaggtca

SEQ ID NO: 740 - DNA, 231 bp, Zea mays
gcacgagcgaaggactttctagatgcagtagattagtgccgtcttctctgagtagtttccttgcaagtgtcgtcccgtccctggagtgaggcagtttagtttgtagtttcttcgcttcatcggcactcgaccgttgttggattgggatgtttagcctgcagtctgtacttaccccaagcatctatgatgcctgttttaaatctcagatcacaatagacgtttgttttaaaa

SEQ ID NO: 741 - DNA, 230 bp, Zea mays
gcacgagcccaccatcacgtcccgcgagatccagacctccgtgcgcctcgtgctccccggcgagctcgccaagcacgccgtctctgagggcaccaaggccgtcaccaagttcacctcctcctaggcttgcacgctcgccctttgtaggcatctcttgtgttgatgttccccttgttgtagttatatgttgctggtttctctgtcggcgctgctcgtaactgcgtcatgta

SEQ ID NO: 742 - DNA, 230 bp, Zea mays
gcacgagattcccaccaaacttcaaggaagtagtgaagacgatattcaagcgcttgtttcgtgtttatgcccacatataccactcgcatttccagaagattgttagccttaaagaggaggcccatctcaatacctgtttcaagcacttcattctgtttacaaatgagttggcctgattgacaagaaggagctggctccactccaggagctcattgaatccatcatcgttc

SEQ ID NO: 743 - DNA, 228 bp, Zea mays
gcacgaggagacatatcagcggtataagtaccctactatgagcaaaacacaggggaatttcaagcttactgttgttgagggtgaatttaccgattctcagattgttgttatgcttggtgaaaacgggacagggaaaactaccttcattagaatgctggctgggttgttgaagccagacacagtggaaggaactgatattgaaattcctgaattcaatgtgtcttacaa

SEQ ID NO: 744 - DNA, 231 bp, Zea mays
gcacgagaaagcaatctacaaaactgtttgggagatcaagcagaaaactttagttgacatggcggtcgaccgcggatgctacatcgaccaaagccagagcctcaatgtccacatggagcaagcaaactttgggaagctgacgtctcttcacttccatgcttggtccaagggcctgaaaactggaatgtactatctacgcacacgagctgctgctgatgcgatcaagttcac

SEQ ID NO: 745 - DNA, 229 bp, Zea mays
gcacgagggaacgtcaagggaccggttcgcgagggagacatcctcacactgctcgagtctgagagggaggctaggaggctgcgttgaggcggaatagtgtattggtagttttcgtatggagttggatgtcatctaattgtgctatgtttgtcaaactttggtatgaccttcaaaacacctgccttgtatgattatttgtgagcctggtgataagaatgcagtttggttt

SEQ ID NO: 746 - DNA, 230 bp, Zea mays
gcacgagcatcgatccagcagcttgggaggacaagaagtgccccggcgagtcccgcttccctgctcaggtgagggttgcaacgcgcaagatctgttcgccgctggaggaggacgctttccgccccatcctccaccactacgacggccccaagttcaggctggagctcagtgtccctgaggcgctctcccttcttgatatatttgcggagaagatttttgacagacagaca

SEQ ID NO: 747 - DNA, 227 bp, Zea mays
gcacgagatccgcagccatgggtatcgacctcgttgccggtgggaggaacaagaagaccaagcgcacagcgccgaagtccgacgatgtttatctcaagctccttgtcaagctctaccgtttcttggtcaggaggaccaagagcaacttcaatgctgtcattctcaagaggctcttcatgagcaaaaccaatcgcccaccaatctccatgcgccgccttgtcaagttc

SEQ ID NO: 748 - DNA, 225 bp, Zea mays
gcacgagcataggagagctgctgcagccatggcctctagaaaactcaaggatgagatcgtccccgtgccaacaaagatcgttgatcctaaaactggagaggagaaggaagttgtgatatcagttgatgatgggattaggccagggaccacaacatctggattggcgaaactcaaaccagttttagaaaagcatgggactacaactgcaggcaattccagtcaagt

SEQ ID NO: 749 - DNA, 223 bp, Zea mays
gcacgagcttcatactgctttcctgctccctggcggtgttctgcaacatgagccaatacctctgcatcgggcggttctcagcgacctcattccaggtcctgggccacatgaagaccgtgtgcgtgctgatcctgggctggatcctgtttgactcggccctcaccgtgaagaacatcctcgggatgctgctcgccgtgatgggcatggtggtctacagctgggc

SEQ ID NO: 750 - DNA, 225 bp, Zea mays
gcacgaggcttcctcccgttagactaggttaggctagggtgtcgaccagctcgcggaaatggtggccttcaggttccatcagtaccaggtggtggggcgcgcgctgccgacgcccggcgacgagcaccccaagatctaccgcatgaagctctgggccaccaacgaagtccgcgccaagagcaagttctggtacttcctgaggaagttgaagaaggttaagaagag

SEQ ID NO: 751 - DNA, 224 bp, Zea mays
gcacgaggccatacctcccatattgctgtcaagtttgttgagctgattaccaagatcgacaggcgttctggcaaggagcttgagaaagagcccaagttcttgaagaacggtgatgctggtatggtgaagatgattcccaccaagcccatggtggtggagacattctcgcagtatcctcccctgggtaggtttgctgtccgtgacatgagacagacggttgctgt

SEQ ID NO: 752 - DNA, 224 bp, Zea mays
gcacgaggaataacaagatgcccgatctgaacctgcagcatggccctctggtgctctctccgccaagaaagttacgtagggtgatagcgcatgaatggatggaaggtatgcacagagcagataaagtggacgagcatccttctgggatgaggcacaccgatgacatgcccagtcagaagagttctagaattccaatgtcagttgatgttggagctttgtttggc

SEQ ID NO: 753 - DNA, 224 bp, Zea mays
gcacgagccaggacccttgttcgccgccgccgcctctgatctccgcgatgttgtcaggattcaatatgtcgaccagcacattcgctacttcctgcacgctgttgggcaatgttagaacaacgcaggcctcccagacagcggtgaagagcccttcgtctctaagcttcttcagccaagttacgaaggttccaagcctgaagacctccaagaaactggatgtctcc

SEQ ID NO: 754 - DNA, 226 bp, Zea mays
gcacgagtctagcgtcaccaagattggactatggggtggaccgggagggtcggcacaggacatcacggcggagcggccgccgcagcgtctgcacagcgtcaccgttcgtgctggcgtcgccgtcgactccatcgagttcacctatactgacagcgctgggcagaggcgcgccgctgggcgatggggtggactcgggggcaatgttcgaacgatcgaccttggcgac

SEQ ID NO: 755 - DNA, 223 bp, Zea mays
gcacgaggaaccaccctgggcagattggcaacggctatgcccctgtgctggactgccacacctcccacatcgctgtcaagtttgctgagctcattaccaagatcgacaggcgctctggcaaggagcttgagaaggagccaaagttcctgaagaacggtgatgctggtatggtgaagatgatacccaccaagcccatggtggtggagacattctcagcgtatcc

SEQ ID NO: 756 - DNA, 220 bp, Zea mays
gcacgagggcgaagatacttgcaacgggagtcagcaagggacagaaacagaagactacaccaaatttacagtgctgaaactgaagcaggagctgaccaagcgcgggtttggtgcccaactcctccagttgaaaaatcccaacaagaaggatattgttgccctgtatgaaaagcatgtcgtcggcaagtagtacttgtatgctttctagacttccatgtag

SEQ ID NO: 757 - DNA, 216 bp, Zea mays
gcacgagatatcatgctccagagtatgcaatgaccggtcaactaacccagaaaagtgatgtatatagcttcggagtagttcttttggagcttttgacaggtagaaagccagtagaccatacaatgcctagagggcagcagagcctagtaacttgggctaccccaaggttaactgaagacaaggtgaagcagtgtgtagatccacggttgatggggg

SEQ ID NO: 758 - DNA, 225 bp, Zea mays
ttcggcacgagacaagatctcacagggcggcctgcagagaatctatgagaagtacacctggaagctctactccgagaggctgatgaccctgaccggcgtgtacgggttctggaagtacgtgagcaacctggagaggcgcgagacccgccgctacatcgagatgttctacgccctgaagtaccgtagcctggcaagccaggttccgctgtccttcgattagtacgg

SEQ ID NO: 759 - DNA, 232 bp, Zea mays
gcacgagcgaacgccggagctcgacaaggacgaccgacgacgcacgcggagatccggcgtactgcaaattttgaaaactgaactgtaagatggcatcagcagagctttcccgtgaggaaaatgtgtacatggcgaactcgctgagcaggcggagaggtacgaggagatggttgagttcatggagaaggtagccaagactgttgactcggaggagctcactgtggaggagcga

SEQ ID NO: 760 - DNA, 228 bp, Zea mays
gcacgagccgcagcagccaaaacctacctaccgcgcgcagccccccatcgccgccaagatgcagatctttgtgaagactctgacggggaagaccatcactttggaggtggagtcctccgacaccattgacaatgtgaaggccaagatccaggacaaggagggcatccccccggaccagcagcggctcatcttcgccggcaagcagctcgaggacggtcgcaccctcgc

SEQ ID NO: 761 - DNA, 232 bp, Zea mays
gcacgagcggcgagcgaatgacggacggccgcgacgacagcctcttcgaccacttctcggcggtggcgcacgcgccgggcgtgtacacggcggcggactacggcgacatggtggagcacttcgtgcgcacgtagagggtggcggggctccaggggctgtctggcgaggggcgccgcgcgcaagactacgtgtgcgggctgccgcgcaagatccgcagcatggaggagctggc

SEQ ID NO: 762 - DNA, 147 bp, Zea mays
gcacgaggtggtggtcttagtttatcatgtatcgctcgcagtttaatttagcggtttaggtgtggatctgtgaaccccatggcgcctctgcttgattcgtgtttcacctgttatgttctgagattcatgataatgctatgagaactg

SEQ ID NO: 763 - DNA, 225 bp, Zea mays
gcacggttaaacctgaccaattcaaggcgataaatgacgaggggatgcctatttaccagaggcccttcatgaaggggaagctctacattcatttcacggtggagttccccgactcgctggcaccagagcagtgcaaggctctcgagtcggtacttccgccaaagccttcgtccaagctgacagacatggagatagatgaatgcgaggagacaaccatgcatgatg

SEQ ID NO: 764 - DNA, 226 bp, Zea mays
gcacgagccgcggtcaacatcgagcgcctctggtcgatggtgcccaccgacaaggcggcggaggccggcggcgacaaggccccgcagatcgacgtcacgcagttcggctacttcaaggtgctcgggaagggggtgctgccgccaaagcccattgtcgtcaaggccaagctcatctccaaggtcgccgagaagaagatcaaggcagcaggcggcgccgtcgtgctca

SEQ ID NO: 765 - DNA, 224 bp, Zea mays
gcacgagccgtaagccaagaagtaaagcggccaagaaggggggcgcgatgctgtaaatttgatatcggagaggctcgggtacactggtcattcagtatccgagaccgatagctgaggctagtggcgatggaggactgtgttattactactataaactggtggttgtgtttctgtaactggtgaatgatcaagttggaagcttttagtctatcttagatatatca

SEQ ID NO: 766 - DNA, 223 bp, Zea mays
gcacgagattatggacatgaatgcacagtacgggggattcgccgcagcaatagagtccccgaaatcttgggtgatgaatgttgtgccgaccatcgcgaagatgcccaccctgggggctgtgtatgagcgaggattgatcggcatatatcatgactggtgtgaggctttctctacttatccaaggacgtatgatcttatccacgctagcggtcttttcaccttg

SEQ ID NO: 767 - DNA, 221 bp, Zea mays
gcacgagcaggaggagacgcatcgaggttagcacgcgaagaagcgaccatgagggccaagtggaataagaagcgcatgacgaggctcaagagggagcgcagaaagatgaggcagagatccaagtaggcagatcgagatggattgtggacctgatgacatgcgtgggtacatacatttcttcggatgcgttggtgtgcctgtggagagatgtcaacctgcca

SEQ ID NO: 768 - DNA, 219 bp, Zea mays
gcacgagacttaatgtccaagttagtgatgtgaagaatgttatcatctggggtaaccactcgtcctctcagtaccctgatgttaaccatgccacagtgaagacttccactggggagaagcctgttcgtgagcttgtctctgatgacgagtggcttaatggtgaattcatcacaactgtccaacagcgtggtgctgcaatcattaaagcgagaaagttct

SEQ ID NO: 769 - DNA, 223 bp, Zea mays
tgtgtggaggtggttaccatgtgaacctgattccctataacccaattgaaggctccgagtacaagagaccttacagaaaagtggtccaagcctttgttgatgctttagaagcacgcaagataaccgttagcgttcgacggacccgtgggcttgacgctaacgcagcctgtgggcagctgaggaatgagtttcagaagaatccactacttgagattgaaccgtc

SEQ ID NO: 770 - DNA, 220 bp, Zea mays
agcacgaggccaaatgccgcaaagcagctatgggattgaaggattgtcacatataacagttgctggtgcgctcaatcatgggatgaaggaggtggaagtgtggcttcagacaataagtccaggtcaaaggacgccaatccacaggcattcctgtgaagaagttttcactgtcctcaaagggaagggtacgctcttgatgggatcaagctcactaaagtac

SEQ ID NO: 771 - DNA, 217 bp, Zea mays
gcacgaggagcgacgccgcgctcatgggcgccgtcatcctgggcctcatgaacatcggcggcatcctcgcgtcgggcttcgccatggaccgctacggccggaagctgctcttcatgatcggtggcgcgctcatgttcacgtgccaggtggcgatggcgagcataatcggatcacacctcggcaacgggagcaagatgcccaaggggtacgcggtgac

SEQ ID NO: 772 - DNA, 218 bp, Zea mays
gcacgagcgaatatcgaagctgccaaggattggagagaaaagcgggatgagttcaagaaaaaggtaaggcaatgtgtccgcaaatctcaggaaatgctctgaaggagaaacatatggggagttgaacgagtgctgcaacttcacaaccagttacctagccagcattcttttgcttttcccctgtatattttccattcagtgtcattcgtatggtggtg

SEQ ID NO: 773 - DNA, 219 bp, Zea mays
gcacgaggtcgggccttttcgttggcatcaacaagggtcatgtcgtcaccaagcgcgagctgcctccccgcccgtgccaccgcaaggggaaatcaacgaagagggtgtctatggtcaggggcctgatcagagaggttgctgggtttgctccttatgagaagcgtatcactgagcttctgaaggttggcaaggacaagcgtgccctgaagcttgctaaga

SEQ ID NO: 774 - DNA, 217 bp, Zea mays
gcacgaggtagtccctctcctctcgaggtggcggcgctccccccgtcttcttcttcttcttcttcctgtactatatagcctcccctcgcaaatcgtcactgacgttcattccgcttgcttgattgttccaggtattagcagtcgaccggttcctcggagcacgatgaagtttgttgctgcctacctgcttgctgtcctcgctgggaacgccagcccc

SEQ ID NO: 775 - DNA, 217 bp, Zea mays
gcacgaggcaactccgacgggaactggaggaactgagcggtggggcccgcgcggccaagttatcctgttcgctaccgtgatgtttaccctagtccagagggtttatcttcgttcgtgtcgtgtttgttgttgcccatctgtgtttttgattgcaaggtcgctctgtgtcagttgttagtgctgtgttcatcctcggtttcagcagacccatgcatca

SEQ ID NO: 776 - DNA, 240 bp, Zea mays
gcacgagcctctccgtcgctcgcctcgcgcctacgccaccacctctgccatggccccgaagaaggataaggccccgccgccgtcgtccaagccggccaagtccggaggcgggaagcagaagaagaagaagtggagcaagggtaagcaaaaggagaaggtcaacaacgctgtgctcttcgaccaggccacctatgacaagttgctctccgaggtgcccaagtacaagcagatcaccccatc

SEQ ID NO: 777 - DNA, 235 bp, Zea mays
gcacgagaggatatgcccttccccatgccattcttcgtctggatcttgctggtcgggacctcacagactccctcatgaaaattctcactgagaggggttattccttcacaacctctgccgagcgagaaattgtgagggacatcaaggagaagcttgcatatatagctcttgactatgagcaagagttggagactgccaagaacagctcctcagttgaaaagagctatgagctgcc

SEQ ID NO: 778 - DNA, 232 bp, Zea mays
gcacgagagacgaggtgtgcccggccggatggaaaccaggggagaggtcgatgaagcccgaccccaagggaagcaaagagtacttcgcggccatctagattcgtcgtcattgagaagcaggtgcccgttaagtgctccagcagtaggttctcgtgttcagcggactcgcgttttgacaagtgtgttgtgctgatgtgcatcccgatttgagtgctgttctttgccaccttgt

SEQ ID NO: 779 - DNA, 235 bp, Zea mays
gcacgaggtcaacaaaattttggtgggcaacaaggccgatatggacgaaagcaagagggctgtacctactgcgaaaggacaagcacttgctgatgagtatgggatcaagttttttgaaacgagtgccaagacaaacctgaacgtggagcaagtgttcttctccatcgcacgtgacatcaagcagaggcttgcagagactgattcaaagccagaggacaaggcaatcaaaattaac

SEQ ID NO: 780 - DNA, 236 bp, Zea mays
gcacgagcctcgacgtcgatttcaaggatgtcgccaccggtgggcccgacgcactctctacccacgacaagaaggtcgccgcctgcaagacggccaaagcgcgccttgaggagaggttcaagaccggcaagaacaggtggttctttaccaagctccgcttctagatgctcggcctcccgaatagtcctgctttagctgtcgatatgttgtatcggacacactccatctctgttttc

SEQ ID NO: 781 - DNA, 233 bp, Zea mays
gcacgagcttgctttggggacgaaatcaaagaagaagggtggtggaaagaagaagaaaggcaagaaaggagatgcagcaggagatcccatggaggcgacaaacgatgctacaagccaagaataattctgatttttggaattactgcacccagcattttctctcttgtttcttcgctgcatctgatggtgttatattacattcagttgcgaaaaaatgaatacttttttctagt

SEQ ID NO: 782 - DNA, 229 bp, Zea mays
gcacgaggaactgcttgatgctgatgaggtattctgcacaggaactgctgttgtggtgtctcctgttgggagcattacatatcaagggaaaagagtggaatacggccaccaaggtgttggcgttgtgtcccagcagctgtacacttcactgacgagtcttcagatgggtcaaaccgaggattggatgggctggactgtgcaactgaattagttggccgtggttcgtgga

SEQ ID NO: 783 - DNA, 232 bp, Zea mays
gcacgagggttggtggagtacatcatttccggccccgtggtggcgatggtgtaggaggggaaggacgtcgtgttgactggccgcaggatcattggggccaccaggccttgggaggaagcccccggtaccattcgtggggactacgccgtggaagtcggcaggaatgtcatccatggaagcgactccgtggagaacgggaagaggagatcgctctctggttccctgaaggtgt

SEQ ID NO: 784 - DNA, 228 bp, Zea mays
gcacgaggtgttttgagaagctggtcggcgctcctagatcccttcgcctctctcgcgttcgaggctaggtagccgccaccatgagccgctcggggcagcctccggatctcaagaagtacatggacaagaagcttcagattaagctgaatgcaaaccgtgttgttattggcacacttcggggattcgaccagttcatgaatctggtgatcgacaacactgtggaggtca

SEQ ID NO: 785 - DNA, 228 bp, Zea mays
gcacgagaaaccagaccatcaaacaagtgccagcgccctctcgcagtcgccgcaatggagagcaccttcatcatgatcaagcctgacggcgtccagaggggcatcattggtgagatcatcagccgttttgagaagaagggcttctacctcaaggccttgaagcttgtgaacgtggagaggtcgtttgctgagaagcactacgccgatctcgcctccaagcccttcttc

SEQ ID NO: 786 - DNA, 223 bp, Zea mays
gcacgagggctagcgactgcttccaatgctggaccgctacgtcttaagtagcaaggtgcagagcgcgcttggatacatggctccagagtttgcgtgcaggaccgtgaagatcacggagaaatgcgatgtgtacgggttcggcgtccttatcctcgagatcctgacagggaggacgcccgtggagtacatggaggacgacgtggtcgtgctctgcgatgtggtg

SEQ ID NO: 787 - DNA, 226 bp, Zea mays
ggcacgagggtaacacgagatagctccaaaatcacagctgagcaggttcacggcctcatgtcacaggtcataaaagacatccttttcaactctgttcacccgtcaagcaaggcaagcacaagtgctccaccagattcatccggtcctgagcctatggttgaagcctgagttccagcggaaggggacaatggatatttgtgttatgttatctgattcagaaggtgca

SEQ ID NO: 788 - DNA, 226 bp, Zea mays
gcacgagcccagttcttcatctgcaccgtcgcgaccccttggctcgacggcaagcacgtcgtcttcggccaggtcgtcgagggcatggacgtcgtcaaggccatcgagaaggtgggcacccgcaacggctccacctccaaggtggtcaaggtcgctgactgcggacagctctcctagatctctctgatctggtctgttcggccgccctccctccgtcatcgtcgac

SEQ ID NO: 789 - DNA, 226 bp, Zea mays
gcacgagctgcccggggccagatccatggcttccggatgtctctttggtacgagcacctgggaatgctggaagacgtcttccagcggcccgagagcgtagagtgtgtgcagaaggtgaacgaggtcgccgagaagtactgggacctgtactcgagcgacgacctggagcaggacctcccgggccacctcctcagctacccgatcggtgtcactgccgacggcagcg

SEQ ID NO: 790 - DNA, 225 bp, Zea mays
gcacgagagaagccccgcggccgcacgcacaagaggatgcagtacaaccgccgcttcgtcaccgccgtcgtcggcttcggcaagaagcgcgggcccaactcctccgagaagtaggcgccgctcggctcgtaccggttcctcatccttcctgctctccgtatgcttatgctcttgatggtactagtttcgttgttcgcaagcagaggaagaaccttctgtgattcg

SEQ ID NO: 791 - DNA, 219 bp, Zea mays
tatgaaccaaccattggtgtggaagttcatccgttggatttcaccactaactgtggtaagatcaggttctactgctgggataccgcaggcaagagaagtttggtggcctcagggatggatactatatccatggccagtgtgcgatcatcatgtttgatgtaacctcaaggcttacttacaagaatgttcctacgtggcatagggacttgtgcagggtct

SEQ ID NO: 792 - DNA, 218 bp, Zea mays
ttttagtggaaactatcttgccattggtggttcagatataagggtctaccaagtagctaatgttaaggccgaatggaatctcatcaagacattaccagatttatctggaacagggaaagtaacttcggtaaagttcggagcagatgctaagtacatagccgtaggttctatggaccgcaatctacggatatttggcctccctggagacgactaaatgg

SEQ ID NO: 793 - DNA, 212 bp, Zea mays
gcacgaggccagccgcacactgtgccctgcaaggtcaccggcaagtgcgggtccgtcaccgtgcgcatggtgccggcgcccagggggtccgggattgtcgctgcccgcgtgcccaagaaggtcctccagttcgccggcattgaagatgtctttacctcgtcccgtggctccaccaagacactcggtaacttcgtcaaggcaacctttgattg

SEQ ID NO: 794 - DNA, 218 bp, Zea mays
tgctgatgggggtgccgaagcagcgctggacgccggaggaagaggccgcgctcaaggccggcgtcgccaagcacgggcccggcaagtggcgcaccatcctccgggactcggacttcagcgcgctcctgcgcatccgctccaatgttgacctcaaggacaagtggcgcaacttgagcgtcaccgcaggcggttacgggactagagagaaggcaaggatg

SEQ ID NO: 795 - DNA, 211 bp, Zea mays
gcacgagcaaccttgactggtacaagggcccaaccctacttgaggctctggacttgatcaatgagccaaagaggccttcagacaagcccctgcgtctcccccttcaggatgtgtacaagattggtggtattggaactgtccctgttggacgtgttgagactggtgtcattaagcctggtatggttgttacttttgggcctactggtcttac

SEQ ID NO: 796 - DNA, 207 bp, Zea mays
gcacgagctttctcttcttccaatcattggtggttgtgctctagctgctgtcacagagctgaactttaatatggttggatttatgggtgccatgatatccaaccttgcatttgttttccgcaacatcttctcgaagaggggcatgaaggggaagtccgtcagtggcatgaattactacgcttgcctgtcaattatgtccctggtcat

SEQ ID NO: 797 - DNA, 207 bp, Zea mays
gcacgagacgccgtctccgagagcaccaaggccgtcaccaagttcacctcggcctaggctgcgcggccgccgcttgcaggattctctcctgtgttcacgtctcttgctgtagttaggtgctgctgcctgctggcttctatgtatgttatctatctgtctgtagcaactgtgttatctgataggaccgtaatggtgcttattcaaccc

SEQ ID NO: 798 - DNA, 207 bp, Zea mays
gcacgaggattgatgaagagtgctattggtgagggcatgacacgtcgagaccattcggatgtatctaatcagctttatgccaactatgctattggaaaggatgttcaggccatgaaggctgtcgttggagaggaggcactctcgtctgaggatctgctttacttagagttccttgacaagtttgagaggaagtttgtgacacaagga

SEQ ID NO: 799 - DNA, 209 bp, Zea mays
gcacgagactactagcttcatcaccaccattgggattgacttcaaaataagaacagttgagcttgatggtaagcgcataaagttacagatatgggatactgctggtcaagaacgttttcgaactattacaaccgcctactacaggggtgcaatgggaattttgcttgtctatgatgttactgatgagtcatctttcaataatataagaa

SEQ ID NO: 800 - DNA, 208 bp, Zea mays
gcacgagctggatcccattatggatatcttgcaatcaccttctcgctggcctttggaattcgagaagaaacagcaggagatcattgacctgtggcatggatgcaacgtttccttggtccacaggacttactttttcctgctgttcaaaggggacccagccgacgccatttacatggaagtggagcttaggaggttatcatttctcaag

SEQ ID NO: 801 - DNA, 209 bp, Zea mays
gcacgaggatacactgaaggtgcgagctggattctaccgcaacttcctccttcccaagggcaaggctacacttctgaccccagaagtcctcaaggaaatgcagctggagcaggagagaatagaagctgagaagaagcgggtaaaagaagacgcgcaacaacttgctcgagtttttgaaaccattggcgctttcaaactccctcgcaaag

SEQ ID NO: 802 - DNA, 211 bp, Zea mays
cgcgcacccgctcgcttcacttctctaggtgcgcaccgatcagaagagatggcggtgccgctgctgacgaagaagatcgtgaagaagcgggtcaagcagttcaagaggccccacctcgaccgctacaagtgccttaagccaagctggcgcaggccaaagggtattgactcccgtgtcaggaggaagttcaagggatgcaccttgatgccca

SEQ ID NO: 803 - DNA, 204 bp, Zea mays
gcacgagattatgcacctggtgtgccaataattctcgtagggacaaagcttgatcttcgagatgacaagcagttctttgtggaccatcctggtgctgttcctatcactactgctcagggagaggagctaagaaagcaaataggcgcgccatactacatcgagtgcagcttaaagacccaactaaacgtgaagggtgtcttcgat

SEQ ID NO: 804 - DNA, 205 bp, Zea mays
gcacgagcttttaagacgaaggtcattccatccaaacatcaatagtaatggaagcatatgtcttgacattcttaaggagcagtggagccctgctttgacaatctctaaggttttgctttctatctgctccctgcttactgatcccaacccagacgaccctcttgtccccgataacagtttcatgggcaacacctcgtgccgaatt

SEQ ID NO: 805 - DNA, 203 bp, Zea mays
gcacgagaccttgttctccgcctcagaggtggtatgcagatctttgtaaagaccctgactggaaaaaccataaccctggaggttgagagctcggacaccatcgacaatgtgaaggcgaagatccaggacaaggagggcatccccccggaccagcagcgtctgatcttcgccggcaaacagctggaggatggccgcaccctagc

SEQ ID NO: 806 - DNA, 203 bp, Zea mays
gcacgaggttggtggtgacccctttgcagcgtcccttgccgtcccaccaccatcctatgtgcagatggcagatttggagaagaagcaacagctcttgtcgcaggagcagattatgtggcaacagtaccagagggacggcatgcaagggcaatcgagcctgaacaagctcgaccaggcttaccacaatggtttcgcgcccaacc

SEQ ID NO: 807 - DNA, 201 bp, Zea mays
gcacgagattatgcacctggtgtgccaataattctcgtagggacaaagcttgatcttcgagatgacaagcagttctttgtggaccatcctggtgctgttcctatcactactgctcagggagaggagctaagaaagcaaataggcgcgccatactacatcgagtgcagcttaaagacccaactaaacgtgaagggtgtcttc

SEQ ID NO: 808 - DNA, 202 bp, Zea mays
gcacgagcggcgatccgcagttggagaggaggggcggcgtcaagcgcatctccgggctcatctacgaggagacccgcggcgtgctcaagatcttcctcgagaacgtcatccgcgacgcagtcacctacaccgagacgcccgccgcaagactgtgaccgccatggacgttgtctacgctctcaagcgccagggccgcaccctc

SEQ ID NO: 809 - DNA, 201 bp, Zea mays
gcacgagtggcctttgtggccctagactacgagcaggagctggagaccgctaagagcagctcctccgtcgagaagagctacgagctgcccgatgggcaggtcattacgatcggcgcggagaggttcagatgcccagaggtgcttttgcagccgtcgctgatcgggatggaagctcccggcatccacgagaccacctacaac

SEQ ID NO: 810 - DNA, 201 bp, Zea mays
gcacgagacgtcgtcaaggccatcagagaaggtgggcacccgcaacggctccacctccaaggtggtcaaggtcgctgactgcggacagctctcctagatctctctgatctggtctgttcggccgccctccctccgtcatcgtcgactccccctgcgtccgttcctttggatctgaataagatggtggtgatctgagtggtg

SEQ ID NO: 811 - DNA, 198 bp, Zea mays
gcacgaggagaagtttgccactggtgtttccatggttgcctccctgtcactggcgatctcgtacccgacccttgctgctgtgccccacatgttcatcaatgggtacaagaatgtgcttgctgttgctgtcgagacagactactcgtacccacatgctgacaagatcaaggagtacctcaaggacccaagcaagtttgc

SEQ ID NO: 812 - DNA, 271 bp, Zea mays
cgacacccttgtgcagcttctgaaagccagatatccgaacctgcctccaacttttatagatgttctaaaggtccagtacaatgtggatgtggggaatgcaatcgtggaggcatactctagggttcttgtcggggtagcattcagcatactgtcgcgcgtggcggagatactgctggaggatgacctggtcaagaggcccaacacccccatggcctcactgaagttcgacctctcctccgacgtgtacttggccggcataacagagacgccg

SEQ ID NO: 813 - DNA, 264 bp, Zea mays
gcacgagagcagataggcgctgtggcgtacatagaatgcagctcaaagacacagaggaacgtaaaggctgtgttcgacactgcaattaaagtagtgctgcaaccaccgaggagaagagaagttaccaggaagaaaatgaaggcaaggtcgaatcagtctctgagaagatacctctgtggaagcggatgtttcacatcgtaaagcacaggctcttctgcgactgttgtactggactggctagatggttgcagctctatgaatgag

SEQ ID NO: 814 - DNA, 263 bp, Zea mays
gcacgagtaaattcatttgctaaagcccttgaggttattccacgccaactttgcgataatgctggatttgatgccactgacgttctcaataagctgaggcagaaacatgcatctggtgaaggtgctaattatggtgtagacataaacactggcggaattactgattcctttgcaaactttgtttgggaacctgctgttgtaaagatcaatgctataaatgctgcaaccgaagcttcctgccttattcttagcgtcgacgagac

SEQ ID NO: 815 - DNA, 263 bp, Zea mays
gcacgaggtggcgtgaagcgcatctccgggctgatctacgaggagacccgcggcgtgctcaagatctttctcgagaatgtcatccgcgacgctgtgacctacacggagcacgcccgtcgcaaaaccgtcaccgctatggacgtcgtgtacgccctcaaacgccagggccgcactctctatggcttcggcggctaggttaggtgtgggtaattgcctgtccaggtgtctcggatctgtggtactagtttggctgccttcctgtg

SEQ ID NO: 816 - DNA, 264 bp, Zea mays
gcacgagggccggcggcgacaaggccccgcagatcgacgtcacgcagttcggctacttcaaggtgctcgggaagggggtgctgccgccaaagcccattgtcgtcaaggccaagctcatctccaaggtcgccgagaagaagatcaaggcagcaggcggcgccgtcgtgctcaccgcctaggtttcagtccttgttcgcctcctggttttgaaatctatatctgaactgatagtgctttcctgtctcggcaatttgtgttaagaaa

SEQ ID NO: 817 - DNA, 262 bp, Zea mays
gcacgaggcggtgtgctcaagatctttctggagaacgtcatccgtgacgccgtcacctacaccgagcacgcccgccgcaagaccgtcaccgccatggatgtcgtctacgcgctcaagcgacagggccgcaccctctacggcttcggcggctaggtcgcttcctcatctggtggcgaactgcatctgtgtcggcggtggtcgtgttgtgtgcctaatctagtgtagtccgttctctatatcgtcgctgtgttctgtggtgtct

SEQ ID NO: 818 - DNA, 264 bp, Zea mays
gcacgagggttccatcagtaccaggtggtgggtcgcgcgctgccgaccccaaccgatgagcaccccaagatctaccgcatgaagctctgggccaccaacgaggttcgcgccaagtccaagttttggtacttcctgagaaagctcaagaaggtgaagaagagcaatggccagatgcttgccatcaacgagatctttgagcgcaacccgaccaccatcaagaactatggcatctggctgcgctaccagagcaggactggttaccac

SEQ ID NO: 819 - DNA, 261 bp, Zea mays
gcacgagccgcggcttctacggccccggcggcgcctacgccgtcttcgcgggccgcgaggccagccgcgccctcggcaagatgtccaaggacgaggccgacgtctccggggacctctccgggctcaccgacaaggagctcggcgtcctcgccgacatgggagatcaagttccaggccaagtaccccgtcgtcgcccgactcgccgccgacgcctgaactcgtcagtctcggtctaaatttactctgtcctgcctcttgcgg

SEQ ID NO: 820 - DNA, 260 bp, Zea mays
gcacgaggcttgatggcgtgaccatcctccggtccgagaaggtcaaggatgagctcatccttgacggaaacgacgtcgagctcgtatctcgctccgccgccctcatcaaccagaaatgtcatgtgaagaagaaggatatccgaaagtttttggacggtatctatgtgagcgacaagggcgtcatcgaagaggagcagtgagcgacagagtagccgaaatgccacgagatgaatatgaatgtcgtttgagttgcaattttg

SEQ ID NO: 821 - DNA, 260 bp, Zea mays
gcacgagcacaccaatcgcccacaagcgctcgcaggagaggtcgaaaccctagcttttgcggcggcggcgagagaagatgatctacgacgtgaactcccccctcttccgttccttcctcagccagaagggcggcgccgacaagaggaaaatggaggagcataaaccaaaggagcagaggcccaaggctaacgagaacaagcctgtgatgaacgaatgaatatctccagaagctttgttcaatgtgcaaccaagtccgatg

SEQ ID NO: 822 - DNA, 260 bp, Zea mays
gcacgaggcaaacaccgcgaaccgcccccgctcccaaacccgaccgagcaaagcgcaaagccccccaaccgcggatcaatccgcagcatcgatggcgcccaaggcggagaaaaagccggcggcgaagaagcccgcggaggaggagcccgcgaccgagaaggcggagaaggctccggcagggaagaagccgaagggtacgaaacgcctccccgcgggcaagtccggcgccggcgagggcaagaagggcaagaagaaagcca

SEQ ID NO: 823 - DNA, 255 bp, Zea mays
gcacgagcaccggcaaggggccactcaacaactgggccacccaccttagcgacccactccataccaccatcttcgacacggtcggaggatcctcttaagcccgccattgatccgctccgtccatcgatcgaaacgtggtcttgaattaactatgatagatctctatgagcctggagatggatcaacccgtcgtgcgttgtttcattttgtgatgaatgggagagagggtatgggacaagattgatcaacccgtcg

SEQ ID NO: 824 - DNA, 260 bp, Zea mays
tcgaatttttctttttttttttttcaagcaaaaaatgtactatgatcatagaatcccgaatggtctgattcttctactcgggtagagacaattcatacaacaatgcaccttaacagcaacagattactctgattacaccaccgtaatgttcaaccgcttaaaacatctcgtattattacgacacggggatagcaacaacagtgcggagaaaatcacaaatcttcagaccatagaaacctagatcaagggatagacctaga

SEQ ID NO: 825 - DNA, 253 bp, Zea mays
gcacgaggcttctttcagttctcgggagctgctgcaacttcctgacactgttctatattgtctttgtggcactgtacactgtaccagttctgtatgagaaatatgaggacaaggttgatgcttttggtgagaaggctatgactgaactgaagaagtattatgccattttcgatgagaagtgcctatcgaagattccaaagggcccccttaaggataagaagcactagattggtagtaaggtatttgctatgaa

SEQ ID NO: 826 - DNA, 258 bp, Zea mays
tcagggccatcccgttcaagagcaggtcttaagctgccgcgggtgtgctgagacatgtggggaatgtattgtctgcccacgcctagtttctctgctgaatcttccatctctcttcccttcaagactgctcactgctgcactgctctgttatctgaacccagaacttcgtgtactcctgtaccgagctgtgtgtatgtttttttttcttccatcgtgtttgttgcaagggttcccgtctccttttatgcgttgggatcg

SEQ ID NO: 827 - DNA, 252 bp, Zea mays
gcacgaggtcgcaccaagtttatccacggacatgatacagcagtttgtgcccaacatccgttctggtagcttcgccgacattgggcctcggaggtatatggaggacgagcacatccgaatagatgatctttccgcccatctcggctcgatgttggtctgccctctgcctagcgccttctacggggtctttgacggccatggcggcccggacgccgcagcctacatgaagaggcatgcgatgaggttcttgtt

SEQ ID NO: 828 - DNA, 252 bp, Zea mays
gcacgagccaatctccagcgtttttgtcaatctggtaaatgccgacttcaccgcaaagcagaggggagttcgcatcacggaggagaggatcctgctggacggctcacctgaaacacctatcgactacattcaagttcagattgccaatgtcgagtccaaatttcccagtgcgatatctgagactggagaaatcactgtggagggcagagtgaaggatggtgttcctcatctaacaaaggttggagcattcca

SEQ ID NO: 829 - DNA, 251 bp, Zea mays
gcacgaggcggagcaggtggcagagctccaggcccgcgcggccgccgtacccgacgacctcctcgtctgcctcgtgggcaacatggtcacggaggagggcctgcccacctacatgaccatgggcaaccgcgtgaccggcgccagcgacgccaccggctgcgacgaccatggctgggcgcgctggctgcgcggctggaccgctgaggagaaccgccacggcgacctgctcaaccgctacctctacctgtgcg

SEQ ID NO: 830 - DNA, 260 bp, Zea mays
tcgagttttttttttttttttttttttgcttaaagcgacagacttcaattacaaatgcaaatactagagcagttcagcaagtgatgatggaaggaaacacccaaacattacccaggggggccaggacacaaacaaaggtttttcaacaccacaacctggctcgacagccaaacagattcatgcaagcagatcagtattcctcctcctcgtcaccgtcatcactgccgccctctgcggcgacctcctcgtagtccttctcc

SEQ ID NO: 831 - DNA, 252 bp, Zea mays
cgccggcaagcagctggaggatggtcgcaccttggctgactacaacatccagaaggagagcaccctccacttggtgctccgcctcaggggtggcatgcagatctttgtgaagacattgactggcaagaccatcaccttggaggtggagtcgtctgacacaatcgataatgtcaaagccaagatccaggacaaggagggcattccaccggaccagcagcgcctgatctttgctggcaagcagctggaggatgg

SEQ ID NO: 832 - DNA, 248 bp, Zea mays
gcacgagcaaacaagcaaccaccgcctccccgatctcgtcgagaggaagcccaatcccgaaaccgccgccctattccaatggcgcccaaggccgagaagaagcccgccgccaagaagcctgcggaggaggagccggcggcggagaaggccacggcggggaagaagcccaaggctgagaagcggctccccgcgggcaagtccgcaggcaaggagggtggcgagaagaaggggaagaagaaggcaaagaa

SEQ ID NO: 833 - DNA, 246 bp, Zea mays
gcacgagggcgggtgcaagtgcggcgccaactgcacctgcgacccctgcacctgcaagtgagacgacggcggcggcgatgacgctgcagggtctgcaggccctgatggggtcggaaggactctttatctctctagctaattaataagctctagctagtatataatattctagcagtgtcgtttgctgtgttttgttcgagtcagttagacagtcagccgcgtgccatgggccatgcccatggcata

SEQ ID NO: 834 - DNA, 246 bp, Zea mays
gcacgaggcgaagttcacccaggatttggcgctgatcggagctctgctcttctttctgggcatgaagaactccatcccgaagcggcagggcggcaagaagaaggcccccaaggcgaagacgaactagggctgcttagatagctgcacgcctcaggcggggtgtatcaggccacaggtctatttcgaagcaggcccagcgcgatgcagcgaatgccatcgagctgcgcttttacatgtttatcatca

SEQ ID NO: 835 - DNA, 238 bp, Zea mays
gcacgaggccgggctccagttccccgtcggccgcatcgggcgctacctcaagaagggccgctacgcgcacgcgtcggcagcggtgcccccgtctacctcgcggccgtcctggagtacctcgccgctgaggtcctggagctcgccggcaacgctgccaaggacaacaagaagacgcgcatcgtcccgcgccacgtgctgctggcgatccgcaacgacgaggagctcgggaagctgctga

SEQ ID NO: 836 - DNA, 239 bp, Zea mays
  unsure (1)..(239): unsure at all n locations
gcacgagcttggttgatccggaccggacgacaagacaccgctaggtgttcgttgcagcgcacgancggcttctgcagcttctcaggccaagatgggactctggcagcacagttggtgaatttgatgggcactcaaagagggttctaagctgtgacttcaagccaacacgtccatttaccattgtgataggtggtgaagatattctagctaacttttatgaaggaccaccatctaaattc

SEQ ID NO: 837 - DNA, 240 bp, Zea mays
gcacgagcacttatggactaagcctcaatatgctacaagggtgggctattgctgtcctctgcagtttggaaaatagaatgatatcagtggaaagaatgttgcagtatacgactattccttcagaaccaccacttacaatatcagaacgccaaccaaatagacagtggccaacaaagggcgaaattaagttttttaacctccatgttcgatatgcaccgcagctgccttttgttctaaaag

SEQ ID NO: 838 - DNA, 240 bp, Zea mays
gcacgaggccatgtccatcatgaactccttcattaacgatatcttcgagaagctcgctgctgaggccgccaagctcgcgcgctataacaagaagcctaccatcacctcccgtgagatccagacctccgtgcgcctcgtccttcccggggagctcgccaagcacgccgtctccgagggcaccaaggccgtcaccaagttcacctcggcctaggctgcgcggccgccgcttgcaggattctc

SEQ ID NO: 839 - DNA, 238 bp, Zea mays
cacgagatcaaccccgatgaggctgtcgcctatggtgctgctgtccaggctgccatcctgagcggtgagggcaatgagaaggtgcaggacctgcttctgctggacgtcacccctctgtccctgggtctggagactgctggaggagttatgacagtgctgatcccgaggaacaccaccatccccaccaagaaggagcaggtattctccacctactcggacaaccagcccggtgtcctga

SEQ ID NO: 840 - DNA, 239 bp, Zea mays
gcacgaggtcaaggtcagcatggatggcgcgccgtacctcaggaagattgacctcaagacttacaagaactacaaggacctgtcgactgcgcttgagaagatgttcagtggcttcagtactggcaaggatggcttatctgagtaccgcaaggatggtgaatatgttctgacttacgaggacaaggatggagattggatgcttgttggcgatgtaccatgggagatgttcgctgactctt

SEQ ID NO: 841 - DNA, 234 bp, Zea mays
gcacgagccaactctttcccaaatccaccgccggctcggctcgcccatcttcgcgccaagcaccgaatctccgatggcccgcacgaagcagacggcgcgcaagtcgacgggcggcaaggcgccccgcaagcagctggccaccaaggcggcgcgcaagtcggcgccggcaaccggtggcgtgaagaagcctcaccgcttccgccccggcaccgtcgcgctccgggagattcgcaa

SEQ ID NO: 842 - DNA, 234 bp, Zea mays
gcacgagctggagaggaacaggaaggacaaggactccaaattcagactcattcttgttgagagcaggatccaccgccttgcccgctactacaagcgtaccaagaagctcccacccacctggaagtacgagtcaaccacggcgagcactctggtggcctaagtgatatcctctgatggcttggtctttagcacctatgagcttgttctagatatgaatttatgtaattcttgtta

SEQ ID NO: 843 - DNA, 241 bp, Zea mays
gcacgagctccgcctccgctcctcgcgccgccgccgcgtctcctcctgtacaggtaatgagaggaagagggcgaaatggtgaagcacaacaacgtcatccccaacgggcacttcaagaagcactggcagaactatgtcaagacatggttcaaccagcccgcccgcaagcagaggcgccgcatcgctcgtcaaaagaaggctactaagatattcccccgcccgactgctggtcctctacgcc

SEQ ID NO: 844 - DNA, 240 bp, Zea mays
gcacgagattggtcagacagtaggtgttccgcaacgagctatgggttggcaaggacccccacagagcccctcttcttatattgtcaagaagattttgcggttggaagtaccgacagaagcataccctaatttcaattttatcggccgtcttcttggaccaaggggaaactctttaaagaggattgaagcctccacaggctgtcgtgttttcatcagagggaaaggctcaattaaagattc

SEQ ID NO: 845 - DNA, 242 bp, Zea mays
gcacgaggcgacatgggcgtctacacctttgtgtgccgcaacaacggcggcgagtggaccgccaagcagcactccggcgagatcgaggcttccgccgctaccccatacgagctgcagcgccgcctcgtcgctgccgcctccgcggccgactctgcctacggcgtccagtcgtccttctccatggtcacccccagctccgccgtgttccaggtgatcgtcgatgctgtcggtggtggtgcaat

SEQ ID NO: 846 - DNA, 237 bp, Zea mays
gcacgagagatcgtggagaccctcgtcccggggctcaaggacgaggtgatgaagatcacgcccgtccagaagcagacccgcgccgggcagcgcacgcgtttcaaggccttcgtcgtcgtcggcgacggggacggccacgtcgggctcggcgtcaagtgcgccaaggaggtcgccaccgccatccgtggcgccatcatcctggccaagctctcggtcgtgcccgtcaggaggggctac

SEQ ID NO: 847 - DNA, 238 bp, Zea mays
gcacgagctgaagaaggccagggacccgaagtacccaagaatcagcactactggaagaaacaagcttgatcagtaccaaattctcaagtaccccctcaccacagaatctgcaatgaagaagattgaagataacaacactctggtctttattgttgacctcaaggcagacaagaaaaagatcaaggctgcggtcaagaagatgtatgacattcaagcaaagaaggtcaacaccctgatc

SEQ ID NO: 848 - DNA, 239 bp, Zea mays
gcacgagctgacctccggcttcagcctggatgaccccaacaccttcggcaaccggatccaccgcatgctcaaactcggtctgagcatcgatgaggatgagcctgttgaggcagaggctgagatgcctcagcttgaggacgacgctggtgaaagcaagatggaggaggtcgactaagtgtcgcatcgcatgcttgccgtttatcttatccctagctaagctacctgtgatagcttaattt

SEQ ID NO: 849 - DNA, 238 bp, Zea mays
gcacgagcatactacagaaatgtaacatttgtggagggcttttccaaaacctctgttgtcaagcatgcatctgatgtcaaagggaattctataaaggttttgaactgccatgattctgttatctacatattagcaccgctgaagtatgctactgtgtacggttgttctgatgctacagttgttcttggtgctgttggtaaggtagtaaaagtggagcattgtgaaagagtgcatatca

SEQ ID NO: 850 - DNA, 239 bp, Zea mays
gcacgagtgtcgctgtgaatgacgagtgcatgctcaagttcggcgagctgcagtcgaagaggctgcaccgcttcctaactttcaagatggacgacaagttcaaggagatcgttgtggaccaggtcggggatcgcgctaccagctacgaggacttcacaaacagcctccccgagaatgactgccgatacgcgatctatgatttcgactttgtcactgcagaagatgtccagaagagcagg

SEQ ID NO: 851 - DNA, 240 bp, Zea mays
gcacgaggcggcgcgaagtcaccggaaggtgctgcgcgacaacatccagggcatcaccaagccggcgatccggcggctggcgatgaggggcggcgtcaagcgcatctcggggctcatctacgaggagacccgcggcgtgctcaagatcttcctcgagaacgtcatccgcgacgccgtcacctacactgagcacgcccgccgcaagaccgtcaccgccatggacgtcgtctacgcgctcaa

SEQ ID NO: 852 - DNA, 240 bp, Zea mays
gcacgaggtgggctcctacctaaaggaacagcttaacaatctgaaagacaagcatgagatcatcggtgacgttaggggcaaaggcttccttcttggagttgagctggtgacagaccatgaaaagaaaaccccagccaaagctgagatctcacgtgtcatgaaccatatgaaagatatgggagtgttggttggtaagggtggtttctacgggaacgtttttaggataacaccaccgttgtg

SEQ ID NO: 853 - DNA, 241 bp, Zea mays
gcacgaggaggactagagctgaacccctgaagaaaccatcacttccacagctcgttgttgagcctacggaagcaaggtcaaattcgtttgttgggacccatgaatatcttgccccagagatcattcgaggagatggccatggcagctcggttgattggtggactcttggaatcttcctttacgaattactctatggcaagacaccattcaggggaccggacaatgacgaaacactctcaaa

SEQ ID NO: 854 - DNA, 231 bp, Zea mays
gcacgaggccaactccctggctcggaaatcttgggcgacgctctgtacacaatcgacatcgggcagaacgacttcacctcgaaccttggatccctcggggtcgaaagcgtcaagcgaacctaccttcagtcgtcagccagatctcctggacgatacaggacttgtacagcagcatcggagctcgcagcttcatggtgttcaacatggtgcccgtaggatgctacccggcat

SEQ ID NO: 855 - DNA, 230 bp, Zea mays
gcacgagagcaactacaacagcatggattaaaggggaaggtgttatgatctggctgcttgccattatctacttcatatctggtgcgcctggggcttatgtgttatggtatcgacctctttataatgcaatgagaactgagagcgctttgaagtttgggtggtttttcctattttacatgattcatataatattctgtgtgtgggcagctgtggctcctccattccctttc

SEQ ID NO: 856 - DNA, 232 bp, Zea mays
gcacgagatgcgatgcgtcatttagagaagagctaaatttgacataatggatcttaatgttgtccagtttgcacccaagacgtttattcctgcactatttggacatgcttcaaatgatatgtttattcagcctcatcacacagaccatattcatcaggcttatgcgggggataaaaatctaatcaaatttgagggtgatcacaattcgccaagaccccagttttattacgac

SEQ ID NO: 857 - DNA, 233 bp, Zea mays
gcacgagattaagtgtcagagcggaggatcttcgagttccttttgaaaggtttggccctgttcgggatgtttacattccaaaggactattactctggggagcctcgaggatttgcctttgtagagtttgttgatccttacgatgcctctgaagcccagtatcacatgaatcgccaagttttctttggtcgggaaatagctgttgttcttgctgctgagtcacgaaaaaggcca

SEQ ID NO: 858 - DNA, 234 bp, Zea mays
gcacgaggagaatgcctccagaagcaatagatcttgtttcccgtcttcttcagtattcgccgaatctgcgatgtagcgcacttgaggcgtgtgctcattcattctttgacgaattacgagaatcacatgcaagactccctaatggacgcccatttcctccactattcaactttaagcaggaactagcaaacgcaccaccggagcttgtcagcaggctattaccagagcatgctc

SEQ ID NO: 859 - DNA, 235 bp, Zea mays
gcacgagctggagaggaacaggaaggacaaggactccaaattcagactcattcttgttgagagcaggatccaccgccttgcccgctactacaagcgtaccaagaagctcccacccacctggaagtacgagtcaaccacggcgagcactctggtggcctaagtgatatcctctgatggcttggtctttagcacctatgagcttgttctagatatgaatttatgtaattcttgttat

SEQ ID NO: 860 - DNA, 234 bp, Zea mays
gcacgaggagagaactaatctcgagttttttttttttttttttttttgtaacttctgttctcaactttcattgtcgaaatgatctcactaacatattcaaggatatcaaattgttccacgcagattgattgtattacgaactgaccttacactcgagcacagtacaaaacatagcaaatccagatccacggtatcggtaccagcctgaaaaggtacataaaagagctacggcta

SEQ ID NO: 861 - DNA, 236 bp, Zea mays
ggttcggcgcggggttgcccatctgtgtttttgattgcgaggtcgctctgtgtcagttgttagtgctgtgttcgtcctcggtttcggcgggcccgtgcgtcgggcggcgtgggctgcggatcgatggatgctgttgcccccgtcaggctttgttctgagttgatcttgagggaaaagtggtgcttcttggtgctgcgggagggggggggggggggggggggggggggctcgggggg

SEQ ID NO: 862 - DNA, 232 bp, Zea mays
gcacgagagaccctagccgccatatctcacgatccgctcgagcgccaagccgagggaaggtgaggagcgatggcgcgcggcgtggtgtcggcgaagggcggcgcggtcgcgggcgagaagaaggggtcggtttccttcacgatcgactgcgccaagccagtggaggacaagatcatggaggtcgcctcgctcgagaagttcctgcaggagcgcatcaaggtcgccggcggca

SEQ ID NO: 863 - DNA, 241 bp, Zea mays
gggggttcggcgcgagggttgatggagagtgctgttggtgagggcatgacacgtcgaggccgttcggatgtgtctgatcggctttgtgccgactgtgctgttggaaaggatgttcgggccatgaaggctgtcgtgggagaggaggcgctctcgtctgaggatctgctttgcttagagttccttgacaagtttgagaggaagtttgtgacacgaggagcatgtgacgcgcggagcatcttcc

SEQ ID NO: 864 - DNA, 225 bp, Zea mays
gggcgccgccatgtcgaagcgaggcacgggaggttcggcggggaacaagttccgcgtgtcgctgggtctgccagtggccgcgacggtgaactgcgcgggcgacgccggcgccgagggcctctgcgtcgtctccgtcaagggcatcgagggccgcctcggtcgcctcccgtccgcctgcgttggcgacatggtcatggccaccgtcgcgaaggggaagcccgacct

SEQ ID NO: 865 - DNA, 225 bp, Zea mays
gcacgagagagaatcttctgagaggcatttatgcatatggttttgagaaaccatctgcaattcagcagagaggaattgttcccttctgcaacgggcttgatgtcattcagcaagcgcaatctggtacaggaaagacagcgaccttctgttctgggatcttgcagcagcttgactatggtctggttgaatgccatgccctggttcttgctcccacccgtgagcttg

SEQ ID NO: 866 - DNA, 229 bp, Zea mays
gcacgagttcctgctgagctcaaaccccttccgcctccccatccaccattccatccgccgccgccgccgccgcctgtgcaagatgaatgtggagaagctcaagaagatggctggcgctgtacgcaccggagggaagggcagcatgcgcaggaagaagaaggcagttcacaagaccacgaccaccgatgacaagcggcttcagagcaccttgaaaaggatcggggggaac

SEQ ID NO: 867 - DNA, 230 bp, Zea mays
gcacgagcgaaggcgtatgctcaggagagtgggctcttcttcatggagacatctgctaaggctgcgatcgatgtgaatgacatattttatgagattgcgaagagattgcttcaagggcgacgggctccaagcccacaggctggaatggttctgaatcagagaccaaatgagaggacggtcagcagttcttcatgctgctcttgagctgtgtttcgacctcgtagtgccgt

SEQ ID NO: 868 - DNA, 225 bp, Zea mays
gcatcgatgaggacaagtctgctggggccggagctgagatgcctccgctggaggatgacgccggcgaaagcgagagggaggaggtcgactaagcttcggatcactgtcgtttatccctgattgcgtatgataagctagatcttggctgctgtgtgaggttttccgcgcgttgacggttctcctgccggccaggcgatgagtttgctggggctatatggtactctg

SEQ ID NO: 869 - DNA, 219 bp, Zea mays
gcacgagggagactgagatggggggttttgtcaagacccgcgggaccgatgcgtacttcaagcgtttccaggtgaagttcaagagaaggcgcgctggcgagacagactgcagggccaggataaggctgattaaccaagacgggggcgagtgcaatacgcccggatgcagatttgttgtgcgatttaccagcaaggacatcgcagcgcaaatcatctctg

SEQ ID NO: 870 - DNA, 230 bp, Zea mays
tggtggtagtgccggtggtggtcaaagttctctgggttatctctttggaagcggtgagccccccgaaccagcagtggcgccagctgcaagtgctccacctgttgagaaaccatctgctgcaaagactgatgcggccaagcaggttgctgctggggttaccagccagaccaataactaccacagggctgatggtcagagcactggcaacttccttacggaccgtccttcaa

SEQ ID NO: 871 - DNA, 224 bp, Zea mays
gcacgagctatgcccctgtgcgggactgccacgcctcccgcatcgctgtcaagtttgctgagctcattaccaagatcgacaggcgctctggcaaggagcttggaaggagccaaagttcctgaagagcggtgatgctggtatggtgaagatgatacccgccaagcccatggtggtggagacattctcagcgtatcctccccttggtaggtttgctgtccgtgaca

SEQ ID NO: 872 - DNA, 225 bp, Zea mays
gggtgatggtcccgagtgcgggcgttgcggtggtatcgaggggctcccgcctcgccgcttggctgagatcaggcgcttcttcgaggactgcgagaagaatgagagcgaggcggctgctgtgaatgactttctgccggcgagcgccgcttgtgaagccgtgcggcgctctgtgggcctgtgtgctgcgtgcgtcgttgagggcctgaggaggtaggattctgatgg

SEQ ID NO: 873 - DNA, 223 bp, Zea mays
gcacgagagtacaaggagtacgccggaagcttcgccgtcgtgccgggctccggcgccgggaagacgcggaaagtgaagctccctgtgcatcaccgaagtgctgttcgatatcgacgctgacggcgataaaaccgtcgacgtcgttatcgtgccgcgcacaaatgctaagatcacgctcaacgctcgccccaccatcaagaatcggaactaggagctagttgct

SEQ ID NO: 874 - DNA, 220 bp, Zea mays
gcgcgagggacaggctcttcactctgcgaatatgggacactgctggccaggaaaggtttcagagtctcggcgttgcattctaccggggagcagattgttgtgtcctagtctatgatgttaattctatgaaatcatttgacaacctgaatgactggcgagaagagtttctgattcaggctagcccatcagatcctgataatttcccttttgttctgttggg

SEQ ID NO: 875 - DNA, 255 bp, Zea mays
gcacgaggtttatcttcgttcgtgtcgtgtttgttgttgcccatctgtgtttttgattgcaaggtcgctctgtgtcagttgttagtgctgtgttcatcctcggtttcagcagacccatgcatcaaacagcatggactgcggatcgatggatgctgttacccccgtcaggctttattctaagttaatcttaaggaaaaaatggtgcttcttggtgctgcaaaaaaaaaaaaaaaaaaaaaaaaactcgaggggggg

SEQ ID NO: 876 - DNA, 236 bp, Zea mays
tatgatcgctggtcatctgtggatgatatagggtcgctctctgttatatatcaaatgttggagtcagataccgccgaaggagttttgtaatttaggtaatcttgggttcttctcagattaaactgtcctgaggcgggaatgaggaggttgcaggttgctcgtgagcatgctgcgagtgatcatgaaaggcttgtctatgaaggatggatattgtatgatactaggcactgcgagga

SEQ ID NO: 877 - DNA, 254 bp, Zea mays
gcacgagcggcgacgagggtgacgagtactagacgttctactggcgcggcgtcgtcgggcttgtgtgccactgctatcctgtgatctgccctgagtggctcctatcgtgttatgtttctgtcggttcttatctatctgtcgttgtgtggtttacaacttacgttgtaagactttattcccccgctttgctactgggttattaagtttggcgttattgttttcttaaaaaaaaaaaaaaaaaaaactcgaggggg

SEQ ID NO: 878 - DNA, 254 bp, Zea mays
gcacgaggcgatgttgatgcagtcatgctagacattgatggaactcagaataaatcgaagttgggtgccaatgctattctcggagtctccttgagtgtatgtagggcaggcgctggtgcaaagggagttcctctgtataaacatattcaggagctagcaggaattaaggagcttgtcatgcctgttcctgcttttaatgtaataaatggaggtagccatgctggcaacaatctggccatgcaggagttcatgat

SEQ ID NO: 879 - DNA, 256 bp, Zea mays
gcacgagggaatacgatgcccaggagaaggaactggtgcagcttaagcgtgaggcccgtttgaagggtggtttctatgtcagtcctgaagcaaagctgctctttgtggtccgcatccggggtattaacgccatgcaccctaagaccaggaagatcttgcagcttctgcgattgaggcagatcttcaatggtgtgttcctcaaagtcaacaaggcgactattaacatgctacgcagggttgagccatatgttgcata

SEQ ID NO: 880 - DNA, 148 bp, Zea mays
gcacgaggaataacgtgaacgcattgccctttctgttacgtgttttattttattgtgtttctgtggtcgtatatctgttttgtgacgtgttccctgcttctcccatgtgaattccagaagaactatgagaaaattcaggttggttgtc

SEQ ID NO: 881 - DNA, 253 bp, Zea mays
gcacgagatgacatcatggaatttgaaaagatcctgaagagtaatagaagaacaataatggacgatccttttatccgtaactatattgaggacttattgaagaacatcagaacccaagtgctgctcaagcttattaaaccatatactcgaatcaggataccattcatttcacaggaactcaattttccagaaaaggatgtcgagcagctgttggtgtcactcattctggacaaccgtatccaaggccacatag

SEQ ID NO: 882 - DNA, 252 bp, Zea mays
gcacgagggagttcaatatccctacagactggatgcttgataacaatcttattagcaagataaagtttgcttctgtgaaattagcgaagatgtacatgaaaagggttgcaatggagcttcagtacatgggtcctctgaacaaggatccagctctggagtacatgctgcttcaggctgtgagatttgccttcaggatgcatcagtttgctggaggtttcgatccggagaccatggatgcattcgaggagctga

SEQ ID NO: 883 - DNA, 257 bp, Zea mays
ttgagatgagaggtgctgatggtggcccatggaggagattgtgtgcgctgcctgcattttgggttgggctgctgtacgatgaggaatcattacaaagcattttagacatgacttttgactggacacaggaggaaagagagatgctaagacataaggtaccgttgactggtctgaagacaccatttcgcgatggatatgttagagatttagccgaggaagttctaaaactggccaagaatggattggaaagaagagga

SEQ ID NO: 884 - DNA, 257 bp, Zea mays
ttctgaccaccgccgtgctaccactgttgctgctagattggatgctcagcagaaaaagctcaaccttcctgtccttcccacaaccacaattggttcattccctcagactgtggaactcaggagggtccgtcgtgagtacaaggcaaagaagatctccgaggaggaatacatcagtgccatcaaggaagaaatcagcaaggttgtcaagatccaagaggagcttgacattgatgtgcttgtgcatggagagccagaga

SEQ ID NO: 885 - DNA, 255 bp, Zea mays
ttcggcacgaggagaatccaggggatggatgagtcatctttacctctgtcagtcaattgctggccgtctgtatctggaaatgaaacctatgtgaacattgaatatgaagcttctgagatgtttgatctgcacaatgttgtcatatctatacctctgcccgcagttcgggaggctccaagtgtcagacagatagatggagagtggaagttggactcaagaaactctgtgttggaatggtctattctccttattgat

SEQ ID NO: 886 - DNA, 252 bp, Zea mays
gcacgaggcctggggaaggagcacgtcaaggtgtgggcggacagaacagcctggtgatcaagggcgagggcgagaaggaggatagcgaggacgaggccgccccgcctccgagatacagcggccgcatcgagctcgcgccagaggtttacaggatggacaagatcaaggcggagatgaagaacggcgtgctcaaggtggtcgtgccgaaggtgaaggagcagcagcgcaaggacgtgttccaagtcaacgtcg

SEQ ID NO: 887 - DNA, 240 bp, Zea mays
gcacaacggcacgattctcctcctccgtccgcgtactctcggtttcggcgatgtcggggcgcggcaagggcggcaaggggctgggcaagggcggcgccaagcgccaccgcaaagtgctgcgcgacaacatccagggcatcacgaagccggcgatccgtatgctggccaggaggggcggcgtcaagcgcatttctgggctcatctacgaggagacccgcggcgtgctcaagatcttcctcg

SEQ ID NO: 888 - DNA, 253 bp, Zea mays
caatgtgaaggccaagatccaggacaaggagggcatccccccggaccagcagcggctcatcttcgccggcaagcagctcgaggacggtcgcaccctcgccgactacaacatccagaaggagtccacactccacctggtgctccgcctccgcggcggcgccaagaagcgtaagaagaagacgtacaccaagcccaagaagatcaaacacaagcacaagaaggttaagctctccgtgctgcagttctataaggtg

SEQ ID NO: 889 - DNA, 67 bp, Zea mays
gcacgaggaccggcgagaggctcaagtcccccggcgaggagtgcaacaaggtgttcgtcggcatcag

SEQ ID NO: 890 - DNA, 246 bp, Zea mays
gcacgagggaagggtctgggcaaaggcggcgccaagcgtcaccgcaaggttctccgcgacaacatccagggcatcacgaagccggcgatccggaggctggcgacgaggggcgacgtgaagcgcatctcggggctcatctacgaggagacccgcggcgtgctcaagatcttcctcgagaacgtcatccgcgacgccgtaagctacacggagcacggccgccgcaagaccgtcaccgccatggacgtc

SEQ ID NO: 891 - DNA, 235 bp, Zea mays
gcacgagggcgaccgtggtggtcgcgtggtggccggcgcggcggccgccagcaggaggaggagaagtgggtgcccgtcaccaagctcgggcgcctcgtgaaggagaaccggatcaacaagattgaggagatctacctgcactcgctgccggtcaaggagcaccagatcgtggagaccctcgtcccggggctcaaggacgaggtgatgaagatcacgcccgtccagaagcagaccc

SEQ ID NO: 892 - DNA, 235 bp, Zea mays
gcacgagaccgtttctgccactcatggtgacatggaccagaacactagagacatcatcatgagggagttccggtctggctcctcccgtgtgctcatcaccactgacctgcttgctcgtggtattgatgttcagcaggtgtccctggtcatcaactatgatcttcccacccagccagagaactacctgcatcgtattggtcgtagtggtcgttttggtaggaagggtgttgccatc

SEQ ID NO: 893 - DNA, 238 bp, Zea mays
gcacgagctccagaggaagcgtgctagaattgctgacaagaagaagaggatcgctaagaagaagtctgaggctgctgagtaccagaagcttcttgcccagaggctgaaagaacagagggaccgccgcagtgagagcttggccaagaggaggtctaagctttctgccgccgccaaggcttctgctgccacctctgcctaagaatgatcagtgctttgagatgttttcaaggcctatttt

SEQ ID NO: 894 - DNA, 238 bp, Zea mays
caacgtggtggatgacatggtctcaagcaatgccattctctatgggcccggcgagcatcccgatcatgttgttgtcatcaagtatgtgccgtatgtgggagacagtaagagggctatggacgagtacacatcagagatcttcatgggcggcaagagcaccatcgtgctgcacaacacctgcgaggactcgctcctcgccgcaccgatcatcctcgatctggtgctcctggctgagctc

SEQ ID NO: 895 - DNA, 231 bp, Zea mays
gcacgagctcttttcctctataactacaccactcaccagcttcatggggtatttgaggctgccagttttggtgggtctaatattgatcccactgcatgggaggataagaagtgtaaaggtgaatctagattcccagcgcaggtgaggatccgcgttaggaagctgtgcaagccgttggaagaggattccttcaggccagttttgcaccactatgatggcccaaagtttcgc

SEQ ID NO: 896 - DNA, 233 bp, Zea mays
gcacgaggcggcgcggcctacaaccgttttcgtgctcacacacccaaaccttagtcgcgattaggccccaaggactcgagatgaagtcgagggcacggtccaccgccggcgactccaggctctcggtgaggaagaccaaggcagagaaggacccaaacaagcccaagaggcctccgagcgtgttcttcgtcttcatggaggagttcaggaaggactacaaggagaagcacccc

SEQ ID NO: 897 - DNA, 230 bp, Zea mays
gcacgagccaacatccaccagcacctcctccccaagaaggctggctcgtccaaggcttccaccgtcgatgacgatgacaactgaagctgcccactggagaaggcattcgctaccgtcttgtttcctaggtttagcacgcagttagtcgccatgtctttgagagagttcgatgtgtttgggaatgacaatagttcctttcttggttccctaagttcgttgaatcagatgtg

SEQ ID NO: 898 - DNA, 230 bp, Zea mays
gcacgagggaacctgaacaagtgcggtggcgtggtgggtgtgttcaactgccagggagccgggtggtgccgcgtgaccaagcggacgcgcgtgcacgacgcgtcgccgggcacgctgaccggcaccgtgcgtgccgacgacgtcgacgccatagcgcgcgtcgctggtgacggccgcgggtgggacggcgagaccgtggtgtatgctcaccgcacgctggagctagtgcg

SEQ ID NO: 899 - DNA, 231 bp, Zea mays
gcacgagccaagatgatggtggcggcagcactgctggccttggccctggccgtgtcgaccgccgaggcgaggaacatcaagaccacgacgacggagaagaaggacgacgcggtggtgcagccgcagaccttcccgcccttcgaccgcctcggcggcggcgcgtccccggtgttcggcggcctccccggcggcagcattcctggcagcagcattcccgggttcagcatgccc

SEQ ID NO: 900 - DNA, 232 bp, Zea mays
gcacgaggtacattcaaagcacttgtgctacaacgggtgagggattgtatgaaggcctggactggctgtccagcaacattgcaaccaagtcctaaattgtcaagcgaggtttggatcatctaggagcttttggatgatgatgatgatgatggtgctggatatttagggttgggttggtatttccgtatgtaagatgtatgcccctgagctcggcagtttttgagctctgctt

SEQ ID NO: 901 - DNA, 236 bp, Zea mays
tcggccccggccaccggcggcgtgaagaagccccaccgcttccgccccggcaccgtcgcgctccggagatccgcaagtaccagaagagcactgagctgctcatccgcaagctccccttccagcgcctcgtccgcgagatcgcgcaggacttcaagactgatctgaggttccagtcctccgccgtcgcggcgctgcaggaggccgccgaggcgtacctggtggggctcttcgaggac

SEQ ID NO: 902 - DNA, 225 bp, Zea mays
gcacgaggttcatcctggtggttttgtgaggtcgaaagcggcgagcgaattagaagatgctggacaagctgtgggacgacgtggtggccggtcctcgccggagacgggcctcgagaagctccgcaaggccaccaccgctcgcccgctcgtcatcaacaaagacgcggacggcggtagttacaagcgggcgcagtcgatgccgtcgactccgacgacgccggtgac

SEQ ID NO: 903 - DNA, 225 bp, Zea mays
gcacgaggctccaaagggaaacccttcttcggcggcgacggtcgggctcgtggacatcgcgctcgggagcttcgtggtgtggatcagggtggtggacgaggcggccggcgtaaagcttctggacgaggccaagttcccggccttgacggcgtgggcggacgcttcttggcggtggacgccgtgaaggaggtgatgccggacgccggaaggctgttggagcactac

SEQ ID NO: 904 - DNA, 225 bp, Zea mays
gcacgaggcggctacggacgcggtggcggctacggcggtcggcgcgatggtggcggtggcggctacggctgcggtggcggcggcggctggagggactgatgtgtgggcccatcctggcttcggccgagttatcttatctatctatagtatcgtgttaccgttcgcttctgtcaccgtgttagtgtccgttctacctttggattaggtgttggtaccctgttgttc

SEQ ID NO: 905 - DNA, 227 bp, Zea mays
gcacgaggcgaaccctcatggactgatcaggaagtacgggctgatgtgctgcaggcagtgcttccgcagcaacgccaaggacattggcttcatcaagtaccgctgaagtcagctgggcgggctatctgaatgccatctcttggacagtgtagtagaggcgatgccacaattttaattactgtcatttagatgttcccttcagaactctgctatttaagtccgccatg

SEQ ID NO: 906 - DNA, 226 bp, Zea mays
gcacgagcactcctggagcacactgatgtctccatcctgctcgacaacgaggccatctatgacatctgcaggcgctccctcgacattgagaggcccaactactccaacttgaatcgccttgtgtctcaggtgatctcatcgctgactgcttctctgaggttcgatggtgccctcaatgtggatgtgaacgagttccagaccaacctggttccttacccgaggatcc

SEQ ID NO: 907 - DNA, 229 bp, Zea mays
gcacgagcagaggaggtagtggatccaaacctcaatgttaagccaccaaaacgtgccctcaagcggacaatcctggttggtttcaagtgtgtcgatcctgacgctgacaagaggccaaagatgagtcacgttgtccagatgcttgaagcagttcagaatgcatatcatgaagatcaaagcaagctcagccaggtgggatcacagcagtcgttagaggagacctcaaaca

SEQ ID NO: 908 - DNA, 227 bp, Zea mays
gcacgagggaggccaccctgaatctcaatgccatgaacaagctcagcaccaagaagccatgggccctgtccttctccttcggccgtgccctccaggcgagcaccctcaaggcctgggctggcaaggtggagaacgtggagaaggctagagcggccttcctcgccaggtgcaaggccaactccgaggctaccctcggcacctacaagggtgatgctgccgccgacacc

SEQ ID NO: 909 - DNA, 227 bp, Zea mays
gcacgagctcggcttcgtcgtgctcatgcgcccccacttgggctggatggagcgctacggactccccgccggcgcgccctgcaccgccaggaagtacctcgcgtaccagtggaccctcctcgccgtcgccatcatcatcctcctagtcggattcgcggccggcatggcgatgctcttccgcggcgccaacgccaacgacagctgccactggtgtcactacctcagct

SEQ ID NO: 910 - DNA, 252 bp, Zea mays
gcacgaggagaagatcatgcaggcgcagaccctgtcggactcgagcaagcaggcgtacatgcgcggcaagaaggtgctcgagatcaacctcaggcaccccatcatcaaggagctccgcgacaaggtcgcccaggacaacgagagcgaggagctgaagcacacggcgaggctggtgtaccagacggccctgatggagagcgggttcaacctccccgaccccaaggagttcgcgtccagcatctacaagtcggt

SEQ ID NO: 911 - DNA, 250 bp, Zea mays
gcacgagtttttttccattacaactcaacaaacgtgcttattattttactacaccccacgcaattattactgccacacgtctaagactcatgcattcttggataggaggcggcggcggcacagtaactagctagctagacggccctaggaacaaggtagagcggctcgttcctgcgaacatcagcccgaacgtctcgtccatgctcaccttcccgccaccgtcttccttctcattggggacctcccagtc

SEQ ID NO: 912 - DNA, 250 bp, Zea mays
gcacgaggcggcgggtggcccgggagagcgtggcggtggcggtggattcggcggaggtgccgaggacttccgcgagtccatggtgcagatggtggtggagaaggagatctacgcgtgggacgacctcaacgacctcctccaccagttcctctccctcaactcgccgcgccaccacccgctcatcctccacgccttcgccgacctctggacccgcaacggcctcttctgcccgccatctccctgccagttc

SEQ ID NO: 913 - DNA, 254 bp, Zea mays
gcacgagcgagcactcgccgccactcaccagcaaattcccaagccgccccttcccccatctctttcgcgccccatttgatcgattcctgatggcgcccaaggccgagaagaagcccgcggagaagaagccggcggaggagaaggccgagaagaagccaagggcggagaagcgcgtgccgagcaaggagggcggcgagaagaagggaaagaagaaggcgaagaagagcgtcgagacgtacaagatctacatcttc

SEQ ID NO: 914 - DNA, 258 bp, Zea mays
ctggagcgtgaggaacatctcgtggcagccttttcatatttcgacaaagatggtagtggctatatcacagtggacgaactacagcaagcttgcaaagagcataacatgccggatgcttttcttgatgatgtcatcaacgaagctgatcaggacaatgatggccgcattgactatggagaatttgttgccatgatgaccaagggcaatatgggagtcggtcgaagaacaatgagaaacagcttgaatatcagcatgagg

SEQ ID NO: 915 - DNA, 255 bp, Zea mays
gcacgaggcaatccctagcagaagccttccatcctcactcgctcgatggcccgcacgaagcagacggcgaggaagtccaccggcggcaaggcgccgaggaagcagctggcgactaaggcggcccgcaagtctgcccctgcgaccggcggagtgaagaagctccaccgcttccgccccggcaccgtcgcgctccgggagatccgcaagtaccagaagagcacggagctgctgatccgcaagctgccgttccagcgc

SEQ ID NO: 916 - DNA, 255 bp, Zea mays
gcacgagacaacgacaaccatccctgcaaaattattaatacacgaacaaatccgtccaaaaatgctagcaagtaaatcataaattatccacccaactggtaacaaaacggagaggcttatcattctaactacggcactcactgatcactccaatgacatagcataacttccaaagttctattgaatggacctacaaatgtatatgatcaagcagtcttgggcttgggcttaagtctcttcaattgcgagtatagg

SEQ ID NO: 917 - DNA, 246 bp, Zea mays
gcacgaggctactagccagtgttgaccttggatgcagtgatgagatactgactatcatagctatgattcaaacagggaatatattctacaggccacgagaaaaacaagctcaagctgatcaaaagagggctaaattttttcagccagagggagaccaccttactctacttgctgtatatgaggcctggaaggctaagaacttttcagggccctggtgttttgagaactttgttcaatcaagatcat

SEQ ID NO: 918 - DNA, 248 bp, Zea mays
gcacgagaggacctccaattttttgttggtgagtccatgaaggatgatgcgtctgtggtattcgcctattacaaggatggtgccactaatccgacattcctctatttctctcatggtcttaaggagatcaagtgctaggcgtgcggcgaaattagttacccatgttgggtactatctatgtactattattatatccaaaactatagttgtcctggctgaattgaactcaaaagggtttgtttgagaaa

SEQ ID NO: 919 - DNA, 247 bp, Zea mays
gcacgagcagagctcagcagtgctcggacacgctcaaaagttatgggcttcagtttcactgtgcattggatatgtaactttctggtgggactatttttcctggagcttgtgcacaagtttggggttggagcagtctatgcaggttttggtggggtctccctgctgacagcactcttcgcctacaatttcatagttgaaacaaaaggacgttcgcttgaggaaattgagatgtccatgagcagtgcta

SEQ ID NO: 920 - DNA, 247 bp, Zea mays
gcacgaggagagaagcagttgaggcactgattcaagagcttccaaaattcaggctgaaagctgttccaacggactgcagtgaatgccccatctgccttgaagaatttcatgttggcaatgaggtccgtgggctcccatgcgcgcacaatttccatgtggagtgcatcgaccagtggcttcggctgaatgtcaagtgcccacggtgccggtgctccgtcttccccaacctggacctgagtgcgttgaa

SEQ ID NO: 921 - DNA, 248 bp, Zea mays
gcacgaggatgcattccattgtgcacgccctgtggttgtgaatggtgacatccttgcgaggccaatgatgtaccttgcgctgacttacgaccacaggttgatcgatggcagagaggctgtcttcttcctgcggcgcatcaaggatgttgtcgaggaccccaggaggttgctgcttgacatataaattcatgcaccagcgctgcgctgccctgccggactgttttgtgcaattgtgcttatctggaaat

SEQ ID NO: 922 - DNA, 256 bp, Zea mays
ccgcgaaccgaaagccgtagtgaagccgaagacacccgccaagcccaaggccaagccagctgccaaggcgaactcaagaccgccggcgctaagccgaagccacttgctaagaaagccggccgccccgccaaggcggcgaagacgtcggccaaggacacgccagggaagaaggcgccggtggccaagaagtccgctgctgccgcgaagaaggcccctgccaagaaggccgctccctcgaagaaggcggcgaccccgg

SEQ ID NO: 923 - DNA, 238 bp, Zea mays
gcacgagctcccagccgtcgtctgctgcggactccgcctccattttgctctgtttcttgcaagttgctcttgcggtagttcccccaactgccaccatgcagaacgaggagggtaagactgtggacctctatgtccccaggaagtgctcggccacaaacaggatcatcactgccaaggaccatgcctctgtccagatcaacattggccacttggatgcgaatggcctgtatgatggtca

SEQ ID NO: 924 - DNA, 238 bp, Zea mays
gcacgaggttccaactcctgagcactttctcctcgtccccgacaagccaatcgaagccgagatacggccatggactccaccggcaccggagcagggggtaatgggaagaagggagcggccgggcgcaaggtcggcgggccaaggaagaagtcggtgtcgaggtccgtgaaggccgggctccagttccccgtcggccgcatcgggcgctacttgaagaagggccgctacgcgcacgtgt

SEQ ID NO: 925 - DNA, 240 bp, Zea mays
gcacgagaggacttgaaaaagaaagaaagtgctgaaagagaagaacggggcaagaagtccctgagcatcaacgagttcttgaagccagctgaaggcgaaaggtactataaccctagtggccgtggccgtggtaggggccgtggggggttccgtggtggttacaacggcggttatcggggaccagctgctgctccagcgatcgaagaccaggctcagttccctgccctggcctaagcacag

SEQ ID NO: 926 - DNA, 239 bp, Zea mays
gcacgagagcattcatgggtggtgtgtttgctggcctcttgaggcttgacctgaatgaggatcctctcaaggaatggataagtcggacagtggaggcttctggaatagctgaggaaaacagctctgaagaatcaagtgaggcagatcaaaatgatgcacctcagcaaattgagattgagtgaggtgcattgtctacttttgtccacttgtcacttttcccttgtaacttatcctgaata

SEQ ID NO: 927 - DNA, 241 bp, Zea mays
gcacgagcccaaccgcgccgccgggtcgggctactggaaggccacgggcgcggacaagcccgtggagcacgacggccggacggccggggatcaagaaggcgctcgtgttctaccacggcaagccgccgcgcggggtcaagacgcagtggatcatgcacgactaccgcctcgccgaagccggcggcgcccgcgtcacagaagtccggcgccggcacgctcacgctggatgactgggtgctgt

SEQ ID NO: 928 - DNA, 191 bp, Zea mays
ctcttagggatgtggagattgaaatcattgatatattaatctccattcgctacgtcgcaatgacattgagattgatggaaggatttggtgtgaacgccgagcattctgataactgcgggggattctaaattacagtgcgtcggcgatacaagtcccctagaaatgcctatgttgaaagtgatgcctcaagc

SEQ ID NO: 929 - DNA, 112 bp, Zea mays
gcacgagcccatgcatcaaacagcatggactgcggatcgatggatgctgttacccccgtcaggctttattctaagttaatcttaaggaaaaaatggtgcttcttggtgctgc

SEQ ID NO: 930 - DNA, 249 bp, Zea mays
gcacgaggccgtccgtcgaggtaaggtcagcatggtgagggtcagtgtgctcaacgatgcgctcaagtccatgtacaacgctgagaagatcggcaagaggcaggtcatgatcaggccgtcgtccaaggtcatcatcaagttcctgacggtcatgcagcgccacggctacattggagagttcgagtacgttgatgaccaccgatcgggcaagatcgtggtcgaactcaacgggaggctgaacaagtgcgg

SEQ ID NO: 931 - DNA, 251 bp, Zea mays
tggaattgggggcagatgtgcggggctacttcgcttggtctctggtggacaactttgaatggaccgcgggctacaccgaacgttacggcatagtctacgttgaccgtaatgacggctacaaacgctacatgaagaagtcagccaagtggttgaaagagttcaacactgagaaggctggcagcgcctaatgatgtgccatgcataaaagaccgggtctgtgtgatttgaattctatatttttatttgcacct

SEQ ID NO: 932 - DNA, 247 bp, Zea mays
gcacgaggactggtaaaactaaaggatatggttttgttagttttgctgatgcgtctgatcttacttctgccttgaaagatatgaatggtaaatatgtaggaaatcggccaatcaaattacggaagagcacatggaagaacaggatagacttagaagctttggagaagggaaagacccaaccacagaagaaaatcaaactgcagaaaagaagtgttcttcacaaatgaatctgaaaaattctgctcgt

SEQ ID NO: 933 - DNA, 246 bp, Zea mays
gcacgagcttccttttgccaccatgggctctggttctcttgctgcaatgtcagtgtttgaatcgaagtacaaagaaggccttactaaggaggagggaatacagattgtgtgcgaacatatctgtgctggtattttcaatgacttgggtagtgggagcaacgtggacgtctgcgtgataaccaaggggaagacagaatacttgagaaaccaccagttgccgaatcccaggacttatgctagttcaaa

SEQ ID NO: 934 - DNA, 250 bp, Zea mays
tcgcctttcgcaccacttgcaacatgcgcaactgcaaccagtccaggccagcagatcacacggccatgcagaccccgcctcgctatcccacatcaggaggttacatgagcccagggacgccaccgtcgatgtaccttggtggtggtgctcccccatatggctcttcaatgtttaacgggcctgcaatgacgcgctatggtatcacacagttccctgggggttctgcgtatccatatggatatggtggccg

SEQ ID NO: 935 - DNA, 250 bp, Zea mays
cgccggcgcgcgccgcgtcgccttcatcggcatcccgcccatcggctgcgtcccgtcgcagcgcaccatgtccggcggtctcgaccggggctgctcgcagggccacaacgagatcgccgtcgcatacaacgccgggatggtgcagcagctggcggcgctgcgggccaagtaccccgacacgctgctcgtcttcatggacatctacggcttcctctacgacatgatgatgcacccgcgcagctacggcttc

SEQ ID NO: 936 - DNA, 242 bp, Zea mays
gcacgaggttttccgtctagcctcggtggacagatcgacgctgcccatgctgataaatggacggtcctgatccattgttcgttgtgttattaatgttgtataattgagcaggacacaacacgtacgttaaaaaaaaaaaaaaaaaaaaaaaaaaacttaagacaacaggttcatcaagaccgccgcatacggccactttggccgtgacgacgccgacttcacctgcgaggtggtcaagcccc

SEQ ID NO: 937 - DNA, 191 bp, Zea mays
gcacgaggcgagctcgccaagcacgccgtctccgagggcaccaaggccgttaccaagtttacttcctcttagatcgccgccgcacggagcgacggctctgtttcgtttcctcgtacttttaggccagtgctaataggttgctcgaggaacaatgtagtgtggaaatttctaatatattccaaattgtgctg

SEQ ID NO: 938 - DNA, 242 bp, Zea mays
gcacgaggagaaatatgctgcggatgagaaggctttctttgatgactacaaagaggcccaccttaagctctccgaactggggtttgctgatgcttaaatagaccctatcctggagtgatacattctgctgcatgtggtctttgcatctggagtcaatgtgaacaagcagattgtcgtattgtctttctcgtaataaatttgtcaatgttgagcccttaggcttgaattgtgggaccctttgt

SEQ ID NO: 939 - DNA, 240 bp, Zea mays
gcacgaggctgcgtccgcatggtcaacaacatctacctcaacttcgacgccttccacggcgacaaggcccacggcggcgtccatgacggtaccgagatcgtgctctggaagtggtgcgagggcgacaaccagcgctggaagattctcccttggtgaacgaacgaaagaaactactagctggtaccctaataataattctgctggctgcggcgatcccaaaataaaagaggccgggtgcga

SEQ ID NO: 940 - DNA, 243 bp, Zea mays
ttccgcacgaagctggtggtattcaggatatccaaatcgacgaggctgcactgagagaagggctgccgctccgcaaggctgatcatgcattctacttggactgggctgtccactccttcagaattaccaactgcgagatccaggacaccacccagatccacacccacatgtgctactccaacttcaacgacatcatccactcgatcatcgacatggactcggacgtgatcaccattgagaact

SEQ ID NO: 941 - DNA, 239 bp, Zea mays
gcacgagaagttgcagtctgagtctgtcaaggatgccatctcccagattgttggggatgccaaggagaagaataggaagttcactgagactgtggaacttcagattggtctgaagaattatgatccacagaaggacaagcgtttcagtggctctgttaagttgccccatatccctcgtcccaagatgaaggtgtgcatgcttggtgatgcccagcatgttgaggaggccgagaagatgg

SEQ ID NO: 942 - DNA, 236 bp, Zea mays
gcacgaggctgctgatgcttccccggtctcagctatcgggtttgagggctatgagaagcgccttgagatcacattctctgaggcacctgtctttgtggaccctcatgggcgtggtttgcgtgccctctccagggcccagattgactctgttctggatcttgcacggtgcacaattgtgtctgagctctccaacaaggatttcgactcatatgtcctttctgagtcaagcttgttta

SEQ ID NO: 943 - DNA, 238 bp, Zea mays
gcacgaggactccacgaaggacatcagcgtgctgcaatgtgggcataccatccatttggagtgcatgaacgagatgagagcacaccatcacttctcatgcccagtgtgctcgaggtccgcctgcgacatgtcggccacatggcggaagctcgacgaggaggtcgcggccacgccgatgcctgacatctaccagaagcacatggtgtggatcctgtgcaacgactgcagcgcgacctcg

SEQ ID NO: 944 - DNA, 227 bp, Zea mays
gcacgagacttccacaagctccgcaacaagttctactgccccgcggtcaacatcgagcgcctctggtcgatggtgcccgccgaaaaggcggcggaaccgtcggcgacaaggccccgcagatcgacgtcacgcagttcggctacttcaaggtgctcgggaagggggtgctgccgctcaagcccatcgtcgtcaaggcaaagctcatctccaaggtcgccgagaagaag

SEQ ID NO: 945 - DNA, 233 bp, Zea mays
gcacgagggttctcgcaggtcgtctccaacgcccttgatatgaagctcagggacgaccttgagaggctcaagaagatcaggaaccaccgtggtctgcgtcactactggggcctccgcgtccgtggccagcacaccaagactactggtaggcgtggaaagaccgttggtgtctccaagaagcgatgagctctatatcaccctgagaaatcttggccgcactaccgtgttggttt

SEQ ID NO: 946 - DNA, 230 bp, Zea mays
gcacgaggctgctgcggcgatggcgagatgctgctggagcgcgtggtggcggaggcctgccgcgcgagctcggccggacggtcggtggcaccggacagcggcgaagacgccggggtggacgtcaaggcggacgagttcatcgccaggttctacgcgcagatgaagctgcagtgccagatctcgtggctacagtacaacgagatgatggagaggagcatcagctagattta

SEQ ID NO: 947 - DNA, 232 bp, Zea mays
gcacgagacattgcgcacgaggggaagctgtactgcaagcaccaccacatccagctgatcaaggagaaggggaacttcagccagcttgagaatgaccacgagaagacatcacaggctgggtcactggaggaggatgaacaagagtattgatcactgagcacaaccacagatgaataatgaatcctcttgcatttgcctagagcactatgtatttctgtggcgtggttcgatt

SEQ ID NO: 948 - DNA, 237 bp, Zea mays
cgccggtcctctacgtgctccactacctggggaggaagccgtggctgtgcttccgggactacgactgcaactggaacgtggagatcctgcgggagttcgcgagcgacgtcgcgcacgcccgctggtggaaggtgcacaaccggatgcccaggaagctccagagctactgccttctgaggtcgagcctgaaggccgggctggagtgggagcggcggcaggccgagaaggcgaacttca

SEQ ID NO: 949 - DNA, 231 bp, Zea mays
gcacgaggtcgcactaggtgcggctgtgattttaaattattgcctgcaaggtctcttccatccagcaaggaaagtacgagaagtgtattggaagatatacaactctttgtacatcggcgcgcaggatgcacttgttgcttcttatcctgccctggaagacgatggggataacatctttagtcgtccagagttggcaatgtttgtctgattaacggtacctcatgttgcagc

SEQ ID NO: 950 - DNA, 190 bp, Zea mays
gcacgagccaaggtgaaccgtgccgtgtgtatgatctccaactccaccagtgttgtggaggtcttctcccgcattgaccacaagttcgacctcatgtacgccaatcgcgccttcgttcactggtacgtcggtgagcgtatggaccatgacgatttctccaaggctcgtgaggatcaggcgccgcttgaaa

SEQ ID NO: 951 - DNA, 241 bp, Zea mays
ggcacgagatacgaccataccctacctccaaattcccaattctcaacctctcctccgagttcgagtgaccatgtcggggcgcggaaatggcgggaaggggctgggcaagggcggcgcgaagctcaccgcaaggtcctccgcgacaacatccagggcattacgaagccggcgatccggaggctggcgagaaggggtggcgtgaagcgcatctcggggctcatctacgaggagacccgcggcg

SEQ ID NO: 952 - DNA, 223 bp, Zea mays
gcacgagagctgatgggagtgaaatggatctttctactatcactagcgcttctccaagctgcctactaccgccgcatgaggtggtcagtcttgaagtcccgaaagctggtcctggatgtcgtcaactgaggactatcattacccttttttttattgaaatatgttgagccgttaaggagcattcaaaataatgagttggtggtgtacaattttccactggggc

SEQ ID NO: 953 - DNA, 225 bp, Zea mays
gcacgagcctagcgacacctcggctcgtttgatccccgcggggagctctagttccgccaagcgtgcgtaccggcgtccggatccgggaccgaagatgacggagtccctggtgcggaacaagccggggatggccagcatcaaggagatgccggtggtgcaggacgggccgccgccgggcggtttcgcgcccgtgcgcttcgcccgcaggatccccacctcggggcc

SEQ ID NO: 954 - DNA, 228 bp, Zea mays
gcacgagagaacatcaagaacgcagcctcctccaccggcaacatcacgttgagcgtcaccaagagcaacccggagaccggcgaggtcatcggcgtcttcgagagcgtgcagccgtccgacaccgacctcggggccaaggcgcccaaggatgtcaagatccagggggtctggtacgctcagctcgagtgattcgagtgtctaactgctaggtgtccgaccgccgtcatg

SEQ ID NO: 955 - DNA, 187 bp, Zea mays
gcacgagcagtgtccgccgtcgtgcgctcgctacacctctccctcgaggcctttgccggcgaagagcgcccagtcgcccaccaggatgaagtttgttgctgactacctgcttgctgtcctcgctgggaactccagcccctctgccgaggacttgacagccattctggagtcagttggctgtgaagtt

SEQ ID NO: 956 - DNA, 211 bp, Zea mays
gcacgagccgggctttgcaagattgactctgagggcaaggcaaggaaggttgtaggttgctcctgcgtcgtcgtcaaggactacggtgaagaatctgagggccttaacatagtgcaggagtatgtcaagtcgcactagatgtgtgacatgtttcagtgatactcttgatttggacctgggcttaaaattatgcttttgcatctggggcttg

SEQ ID NO: 957 - DNA, 219 bp, Zea mays
gcacgagctcgtgccgagcaagtctccgtgattggcaaggctggtggtgacaagtggaagtccctgtctgatgccgagaaggctccctacgtgtctaaggcagagaagctcaaggctgagtacaccaagaagatcgacgcttacaacaacaagcagtctggagaccccacggcgtctggtgattccgacaagtccaagtccgaggtgaacgacgaggac

SEQ ID NO: 958 - DNA, 113 bp, Zea mays
gcacgaggccctcaaaggatttgccaagttcttcaaggaatccagcgacgaggagagggagcacgctgaaaagctcatggagtatcagaacaaacgcggaggcagggtgaggc

SEQ ID NO: 959 - DNA, 223 bp, Zea mays
gcacgaggcggcgaaagacaacaagaagacgcgcatcatcccgcgccacgtgctcctggcgatccgcaatgacgaggagctcgggaagctgctggccggcgtcaccatcgcgcacggcggcgtcctccccaacatccactccgtgctcctgcccaagaaggcggcggagaaggcggccagcggcggcagcaaggagcccaagtcccccaagaagggcgccaag

SEQ ID NO: 960 - DNA, 223 bp, Zea mays
gcacgagcaaggtgatgtctgttcagtttggccaaaaaggcatcccctacctgaacacctacgacggccgcaccatccgctaccccgacccgctcatcaaggctaacgacaccatcaagatcgatctggagaccaacaagatcatggacttcatcaattttgatgtcggcaatgtggtcatggtgactggcgggaggaacaccgggcgtgtaggagccatcaa

SEQ ID NO: 961 - DNA, 239 bp, Zea mays
gcacgagctcactcgccgccgccgccgctcgtccctcgccccatcgcgatggcccggatcaaggtgcacgagctgcgggggaagagcaaggcggatctgcaagcgcagttgaaggagtttaagtcggagctctccctgctacgcgtaccaaggtcaccggcggggctcccaacaagctctccaagatcaaggttgtgcgcacctccatcgcgcgcgtgctgaccgtcatctcgcagaag

SEQ ID NO: 962 - DNA, 239 bp, Zea mays
gcacgaggttgacatgcatgacaactttgaccaaataggtcttgcccagaagctggagaagcatgaattgcttgagatgaggaggattgctgcctacatttacaagaaggctggcaggtggaagcaatccattgctctatcaaagaaagataacatgtacaaggattgtatggagacatgctcacaatctggtgaccgtgaactgtcagaggacttgcttgtgtattttatcgagcagg

SEQ ID NO: 963 - DNA, 239 bp, Zea mays
gcacgaggctaaacagagcacacgggtagaaaagcaagatgtcggacggcacggcgacctgcatcgacatcatcctcgccatcatcctgccgccgctcggggtcttcttcaagttcggctgcggggttgagttctggatctgccttatcctcaccttcctcggctacctccccggcatcatctacgccgtctgggccatcaccaagtagccggccggagcagatgaaccacggcccctg

SEQ ID NO: 964 - DNA, 244 bp, Zea mays
tgaaccagaagagaggtcatgtctttgaggagatgcagaggccgggtaccccgctctacaacatcaaggctttcctccctgtcatcgagtcctttggtttctccagccaactgagggccgcaacctctggtcaggcgttcccccagtgtgtctttgaccattgggacatgatgggctcagatcctttggaggccggctcccaggctgctcagctggtgctggatatccgcaagaggaagggtct

SEQ ID NO: 965 - DNA, 239 bp, Zea mays
gcacgaggcaagtctccgtgattggcaaggctggtggtgacaagtggaagtccctgtctgatgccgagaaggctccctacgtgtctaaggcagagaagctcaaggctgagtacaccaagaagatcgacgcttacaacaacaagcagtctggagaccccacggcgtctggtgattccgacaagtccaagtccgaggtgaacgacgaggacgaggagggtgacgagtgatgtatgacggat

SEQ ID NO: 966 - DNA, 239 bp, Zea mays
gcacgaggcacaacggcacgattctcctcctccgtccgcgtagtctcggtttcggcgatgtcggggcgcggcaagggcggcaaggggctgggcaagggcggcgccaagcgccaccgcaaggtgctgcgcgacaacatccagggcatcacgaagccggcgatccgtaggctggccaggaggggcggcgtcaagcgcatttctgggctcatctacgaggagacccgcggcgtgctcaagat

SEQ ID NO: 967 - DNA, 237 bp, Zea mays
gcacgaggaagtctggggcatggatgcagaggagtttaatccatcaaggtttgcagatggcagcagctatcacctaggtgcttacttcccctttgggatcggccctacaatctgcgttggccagaatcttgcaatggtcgaggccaaggtggcgcttgcaatgacccttcagcggtttgcgttcaccgtttcggcgtcttatgctcatgcaccgatgctggtgttcaccctccagcc

SEQ ID NO: 968 - DNA, 221 bp, Zea mays
gcacgaggcacctatgattgacaacccagatttcaaggatgatccgtacatttatgcatttgacagcctgaaatacattggcattgagctgtggcaggttaaatcaggcactttgtttgacaacatcttcatcactgatgatcctgcgttggccaagacttttgcagaggagacatggggcaagcacaaggaggcagagaagactgctttcgatgaggctg

SEQ ID NO: 969 - DNA, 245 bp, Zea mays
cgcgtgacgccgtagaagcgcaggcaccccgacctcaagctcgtcgtcttcgacatctaccagccgctcctcgacctcgtccaaaaccccaccaacgccggattcttcgagtcccggcgggcgtgctgcggcacgggcacgattgagacgtcggtgctgtgccaccagggggcgccggggacgtgcaccaacgccacgggctacgtcttctgggacggcttccaccccacggacgccgccaacaa

SEQ ID NO: 970 - DNA, 237 bp, Zea mays
gcacgagccacggcggcgtcctccccaacatcaacccggtgctcctgcccaagaagaccgctgagaaggcggcggccaaggaggccaagtcgcccaagaaggccgccaagtcccccaagaaggcatagaggggcgggcgcctttaccgctgtgatgttgaatgctcgtgttcagtagatctttacgtctgtagtgtcgtcgttgttattggaactggttagtagatctgtgcattgt

SEQ ID NO: 971 - DNA, 234 bp, Zea mays
gcacgagcaacgacgatttcgtcggcgaacaaccatccccctggaggccgtgtttcaggaaggcagccttcccccggcggttcacccggtcgtcaaggaggagaagtactgcggagaggtcaagctcgcgctcaccttcactccagcagcggaaactcgccgccctgatgacaacgaggaggggccgccttacagcagctggagttgatctatctgccatgggatgcatgcatc

SEQ ID NO: 972 - DNA, 235 bp, Zea mays
gcacgagtaacagtgtcactagatcagacgcatactttagggacctatttaaaaggagtggattatatatccttagtgttaaggaccaaaaggaactcccgaaggaactatttgctgtcaaaatgtatgcactggtgaccagtcaaccaaaaatccagaatagtggaaagagaagacggcctagaaattcacctcgtatgatccggtcttgaagaatgcccggtactaggtggcc

SEQ ID NO: 973 - DNA, 241 bp, Zea mays
tcccaagtcaatattgtgtgagttcttcaaggctggccagtgccagaagggttttaagtgcaaattctctcatgacctgaatgtccagaggaagggtgaaaagattgatatctatacagacaagcgtgatgcagaaaccatggaggactgggatcaggaaactcttgagaaggttgttgaatccaaaaagatggagtatcagcaaaacaaacctaccgatattgtctgcaagtactttctt

SEQ ID NO: 974 - DNA, 227 bp, Zea mays
gcacgagagatgctgcagtgccgggtgttcgcctacgccgacacgcagcgctacaggctgggtcccaactacctgatgctgcccgtcaacgcgcccgctgcgcgcaccacaacaaccactacgacggcgccatgaacttcatgcaccgggacgaggaggtggactactacccgtccaggcacgcgccgctgcggcaggcggcgccgcccacgcaattgcggcccagg

SEQ ID NO: 975 - DNA, 226 bp, Zea mays
gcacgagtggagctctacgagtggaccaaggtggacatctctgatgaggcccagaaggagcgtgtcaatgccatgatcgaggaccaggaacccttcgagggcgaggccttgcttgacgcgaaatgcttcaagtgagtgtgctgtatccagagctgtttagccctctaattggatgtctatgttgatctggtatatcttgctatgaactggttaaagtttgtgctgg

SEQ ID NO: 976 - DNA, 228 bp, Zea mays
gcacgaggttccgtcctcgatccgatccgccgagtgcacaccacctttccccactccgatcgaatcgatggccgccgagggcgagaagaagatgataaccctcaaaagctccgatggcgaggagttcgaggtggaagaggcggtggcgatggagtcgcagaccatccgccacatgatcgaggatgactgcgccgacaacggtatccctcttcctaacgtcaactccaa

SEQ ID NO: 977 - DNA, 229 bp, Zea mays
gcacgagagctgctcctgccaagaagggtgatgccaagacccaggccttgaaggttgccaaggctgtgaagtctgggtcagtaaagaagaccaagaagatccgcacgtccgtgacatttcaccgccccaagaccctgaagaaggctagggaccccaagtacccaagaatcagcactaccggaaggaacaagcttgatcagtaccaaattctcaagtatcccctcaccac

SEQ ID NO: 978 - DNA, 235 bp, Zea mays
ctcgagatgaagtcgagggcacggtccaccgccggcgactccaggctctcggtgaggaagactaaggcagagaaggacccaaacaagcccaagaggcctccgagcgcgttcttcgtcttcatggaggagttcaggaaggactacaaggagaagcaccccaatgtgaagcaagtctccgtgattggcaaggctggtggtgacaagtggaagtccctgtctgatgccgagaaggctc

SEQ ID NO: 979 - DNA, 225 bp, Zea mays
gcacgaggtcaggaaagggcagatcacaaacatcttggaggagaatgtcgtgcagcctttgctggtgagcacaagtgccattacgctggcctgcgagtgtgtcaggatgatcttgaagattgatgacattgtcactgttaggtgagagcatgaagtcggtggtttggtcagattgctctgttctgtctggattgatagtagttaggttactacttagtgtagaac

SEQ ID NO: 980 - DNA, 228 bp, Zea mays
gcacgaggaaggccaagaagagcgtggagacgtacaagatctacatcttcaaggtgctgaagcaggtgcacccggacatcggcatctcctccaaggccatgtccatcatgaactccttcatcaacgacatcttcgagaagctcgccggcgaggcggccaagctcgcccgttacaacaagaagcccaccatcacctcccgggagatccagacctccgtccgcctcgttc

SEQ ID NO: 981 - DNA, 226 bp, Zea mays
gcacgagcgacgctgtgacctacacggagcacgcccgtcgcaaaaccgtcaccgctatggacgtcgtgtacgccctcaaacgccagggccgcactctctatggcttcggcggctaggttaggtgtgggtaattgcctgtccaggtgtctcggatctgtggtactagtttggctgccttcctgtgttcgtattgtagtagttgtggtagctggttgctttgtcgtcc

SEQ ID NO: 982 - DNA, 226 bp, Zea mays
gcacgagcaggactggtcactcggcacgcaggcaggcagcacagcagcagccagctccatccatcctctttcccctcctcgcttcgcttcctcggcggattcctcctccctcggccgtccccgtcccctttttcggcgcgcgagctcgcccgagatggcaaacgcgagatcgggtgtcgctgtgaatgacgagtgcatgctcaagttcggcgagctgcagtcgaag

SEQ ID NO: 983 - DNA, 228 bp, Zea mays
gcacgagaatccttcaagcgcaactgcctcctcctcgtcgtccggtcgtgagaagggatggcgggccgtggcaaggctatcggcgctggcgccgcgaagaaggcaacgtcgaggagctccaaggccggactccagttccccgtcggcaggattgctaggttcctcaaggcgggcaagtacgctgagcgcgtcggcgccggcgcccccgtgtacctcgccgccgtcctc

SEQ ID NO: 984 - DNA, 226 bp, Zea mays
gcacgagcgaaccggcgatccggaggctggcgaggaggggtggcgtgaagcgcatctccgggctgatctacgaggagacccgcggcgtgctcaagatctttctcgagaatgtcatccgcgacgctgtgacctacacggagcacgcccgtcgcaaaaccgtcaccgctatggacgtcgtgtacgccctcaaacgccagggccgcactctctatggcttcggcggcta

SEQ ID NO: 985 - DNA, 228 bp, Zea mays
gcacgaggaacagttttttggactctacacaaaacttttatcttcaactaattatgtgacacgaagacaatcagtgaagtttctttcagagtttctgttggaggccccaaatgctcaaataatgaagcgttacattttggaagttcattacttaaacattatgatgggcctgctaaaggattcaagcaaaaatatcaggatatgtgccttccacatttttaaggtatt

SEQ ID NO: 986 - DNA, 227 bp, Zea mays
gcacgagaggactagaataggctgcttcacattcagtcaccgtcagtctatgaaaaactaatcatttgctgcttttcgtcgtcgtcgtagtagtagtaggtcggtaatcatctgtcgtgggtgtgtttcgtttctatcattaatcaggattagtagtagctgctgctgctgcgggcataacacaaggggggataggaactgcaataccctgttgcgctttggttgtt

SEQ ID NO: 987 - DNA, 189 bp, Zea mays
cagcggcgggagcaaggaggccaagtcgcccaagaaggccgccaagtcccccaagaaggcatagggtttggaggcggatccgatgttgtcatgtgtaggttgtaagcgggcaatgtgattggctgtgtatctgcttcgctcaagttgctttatgtcattcctaatggaataggaaatgccgtgtttctt

SEQ ID NO: 988 - DNA, 223 bp, Zea mays
gcacgagggttaatggccgcatcatcaggaagcggatccatgtccgcgtggagcatgtgcagccctcccgttgcacggaggagttccgcttgaggaaagccaagaatgaccagctcaaggcggatgccaaggcccgcggtgaggtgatcagcaccaagaggcagcctgtgggacccaaacctggcttcatggttgagggtgctacactcgagacagtcactcc

SEQ ID NO: 989 - DNA, 229 bp, Zea mays
gttctcctcaaccaaattcaaagtcacagcggcgaaactctcggcgatgtctggccgcggcaagggcgggaagggtctgggcaagggcggcgtcaagcgccaccgcaaggtgctgcgtgacaacatccagggcatcaccaagccggcgatccgcaggttggcgaggaggggcggcgtcaagcgcatctccgggctcatctacgaggagacccgcggcgtgctcaagatc

SEQ ID NO: 990 - DNA, 224 bp, Zea mays
gcacgaggtaagctggtgaaggatggattcataattaagaagccacagaaaatccactcaaggtcccgggcaaggagggcccatgaggccaagcagaaggggaggcactctggttacggtaagcgcaggggtaccagggaggctaggctccccaccaagatcctttggatgcgcaggatgcgtgtcctcaggcgtctgctgcgcaagtatcgtgaagcaaagaa

SEQ ID NO: 991 - DNA, 223 bp, Zea mays; identical to SEQ ID NO: 988

SEQ ID NO: 992 - DNA, 228 bp, Zea mays
caaccggaggcacaaggtgtgcgaggcgcactccaaggcccccgtcgtgctcgtcgccggcctccgccagcgcttctgccagcaatgcagccggttccacgagctgtcggagttcgacgacgtcaagcgcactgccgcctgcgtctggccggccacaacgagcggcgccggaagagctcggccgacgcgcacgccggcggctgcaataatggattccgccaacacgcc

SEQ ID NO: 993 - DNA, 222 bp, Zea mays
gcacgagaagaacttccagctcgtcgcctctgttgatccttccctaaacatccccgcagcggacaggagaaggtgatcctccagtttgggaagataggcaaggatatattcaccatggactaccggtacccactctcggcgttccaggcctttgcgatctgcctgaccagcttcgacaccaaaccggcctgcgaatgattgacggtagtttaaaatcgcggg

SEQ ID NO: 994 - DNA, 224 bp, Zea mays
gcacgagaagacccgcgccattcgcaggcgcctcaccaagtaccagctctccttgaagactgagagggaaaagaagcgtgagaagtattttcccatgcggaagtacgctatcaaggcctagattagtgaaagaacagcttttatcctatcaagttctgcccagaagtttcttgagtttgatgtaccgcacatctatcgtcattacaatggaatgatgaaaacga

SEQ ID NO: 995 - DNA, 217 bp, Zea mays
gcacgaggacgctgccgccgtcggccgtcctccgccctccagtccgctgctcgcccgaccggagtgaggcggcgcggcgatggagcacgggtcgttgacagactcgacgtcgtcgactttctccatcatggacgaggaccacaccctcgccaactccgccagattcgtcctcaaccaggacccaagggtagcattttgtggatataccatccctcat

SEQ ID NO: 996 - DNA, 216 bp, Zea mays
gcacgagctggaggccatgatccgcgtgcagtgccacaagcgcaaccacccgtcggcgcggctgatgacagcgctccgcgagctcgacctggacgtgtaccacgccagcgtgtccgtcgtcaaggacctcatgatccagcaggtcgccgtcaagatggccagccgcgtgtacacgcaggaccagctcagcgccgcgctctacagccgcctcgcgga

SEQ ID NO: 997 - DNA, 217 bp, Zea mays
gcacgaggggaagctgacattaagaacaggttcgccttacctccacatctggtgttgaaaaacttccaagcgctggatcttggcacgatggacaagacaaatgattccggccttgcttcctacgttgctggtcaagttgatcgcaccctttcctggaaggacgtcaagtggctgcagacaattacctcgttgccgatcctagtcaaagggatcgtga

SEQ ID NO: 998 - DNA, 216 bp, Zea mays
gcacgagatcctgaacagcaaagaacgatccttggtgaaaacctatacccactggttgagcaactggaaccaaaccaagcggcaaaggtcactggaatgcttttggagatggatcagactgaggtcctccacctgcttgagtcccctgatgccctcaagtcaaaggttgctgaggcgatggatgttctccacaatgtggcccatcagcaaaacgca

SEQ ID NO: 999 - DNA, 254 bp, Zea mays
gcacgagccttccagtgtccgccgtcgtgcgctcgctacccctctccctcgaggcctttgccggcgaagagcgcccagtcgcccaccaggatgaagtttgttgctgcctacctgcttgctgtcctcgctgggaactccagcccctctgccgaggacttgacagccattctggagtcagttggctgtgaagttgacaatgaaaagatggaactccttctgtcccaactgagcggtaaggacattaccgagctcat

SEQ ID NO: 1000 - DNA, 261 bp, Zea mays
cgccatctggatcaactgctacttcgcgttcgacccggacgcgccgttcggcgggtacaagatgagcgggttcggcaaggacatgggcatggacgcgctcgacaagtacctgcagaccaagaccgtcgtcactccgctgtacaacactccatggctctgagcgacctcatcctgtccgatgaacagttcaacatcacaaacaagaagaaacatgtcttgtaagatactcctccaaaggatcggttgcctgtacctgtactc

SEQ ID NO: 1001 - DNA, 257 bp, Zea mays
gcacgaggccgagaagaagcccagggcggagaagcgcgtgccgggcaaggccggcggcgagacgaccgggaagacgaaggccaagaagagcgtcgagacgtacaagacctacatctacaaggtgctcaagcaggtgcacccggacattggtatctcgtccaaggccatgtccatcatgaactccttcatcaacgacatcttcgagaagctggctgccgaggccgccaagctcgcccgctacaacaagaagcccacca

SEQ ID NO: 1002 - DNA, 256 bp, Zea mays
gcacgagctgcatcatccgcatggagaactagatttcgctgtctagtttgtgatctggcctgggcttggggttaataaaagaggcaatgctagcctgccctttcgatgaggaggtacatacacgctggcgatggaccgcgcttgtgtgtcgcgttcagtttggcttttgccaagcagtagggtagcttcccgtgtcggtaattatatggtatgaaccatcaccttttggctctacatggtatgaacgtaagataca

SEQ ID NO: 1003 - DNA, 260 bp, Zea mays
gcacgagccctcctccgcgtaccaaggtcaccggcggcgcacccaacaagctctccaagatcaaggtggtgcgcacctcgatcgcgcgcgtgctcacagtgatctcgcagaagcagaagtcggcgttgcgggaggcgtacaagaagaagaacctgctccccctcgacctccgccctaagaagacccgtgccatccgccgccgtctgaccaagcaccagctctctctgaagaccgagagggaaaagaagcgtgagaagtac

SEQ ID NO: 1004 - DNA, 251 bp, Zea mays
gcacgagagatgatcagtggatccgtgtacggtaaagaaagggggcatgatcgttttgcctgcaggaatgtatcatcgctttacgttggatagtgacaactacatcaaggcaatgcgtctatttgtgggtgagcctgtctggacaccatacaatcgtccgcatgaccatctcccggctaggaaggagtacgtcgagaaaatcatcaaccgaggtggaaaccaagccgtcgaagctcgttgagcgtgtccac

SEQ ID NO: 1005 - DNA, 254 bp, Zea mays
gcacgagcgccgctgccgcatctcctctacaggtaagatggagagatagagggcgaaatggtgaagcacaacaacgtcatccccaacgggcacttcaagaagcactggcagaactatgtcaagacatggttcaaccagcccgcccgcaagcagaggcgccgcatcgcacgtcaaaagaaggctgtgaagatattcccacgaccaactgctggccctcttcgtcccattgttcaatgccagactctcaagtacaa

SEQ ID NO: 1006 - DNA, 258 bp, Zea mays
ttcggcacgagcaggcttgtctcccaggtcatctcatccctgacggcttccctgaggttcgatggtgctctgaacgttgatgtgaacgagttccagaccaacctggtgccctacccgaggatccacttcatgctttcgtcctacgctccagtcatttctgctgagaaggcctaccacgagcagctgtccgtggctgaaatcaccaacagcgccttcgagccatcctccatgatggccaagtgcgacccccgccatggc

SEQ ID NO: 1007 - DNA, 103 bp, Zea mays
gcacgaggttgtacgtgaggctgtttcttcggtcctggtactgtcgctgcagcatgcatagcagtggaccagtggtgataaataagttactgtgctttcgacg

SEQ ID NO: 1008 - DNA, 247 bp, Zea mays
gcacgaggaacaacaaggggaggaacagcattggatgtctgttctggcttctgtccaggatggttctgcaaatgaggggcactatccttcctgggcacaagtgggaagtcatggtcgatctgttcttctatagagacccagaggaagcaaaggagcaggaggaggaagttgccgcggcccctgagtttgccgcaatcactgattaccaaggagctgattagtggggtggtgaccagtggacctctga

SEQ ID NO: 1009 - DNA, 244 bp, Zea mays
gcacgagcaccgccgccgacaggcgccgcctgcaactgcctcaagaacgccgccaggggcgtcacggcctcaacgccggcaacgcgccagcatcccctccaagtgcggcgtcagatcccctacaccatcagcacctccaccgactgctccagggtgaactaaaacctagaccacgcgcgacgacggccgcctgatcgatcgaccaaccattccgccgtcgccgccggccggattatcgatcgtc

SEQ ID NO: 1010 - DNA, 250 bp, Zea mays
gcacgagctcgggaagctgctggccggcgtcaccatcgcgcatggcggcgtcctccccaacatccactccgtgctcctgcccaagaaggcggcggagaaggcggccagcggcggcagcaaggagcccaagtcccccaagaagggcgccaagtcccccaagaaggcttagaaagtagggtcttcatttgcgctgtgtgctgtagcatgttcgtgtctagatctgtggatgggatgtgtcctgctctagtat

SEQ ID NO: 1011 - DNA, 246 bp, Zea mays
gcacgaggtgatctgttaaatattgctcgcaatatggctcgtgggcttaagggagttgagaatgtctacacccaacaccagcctcttttgttccaaacgatggaaggaattgttaaagggagattgcgagatgctgactatccacttgttggcaatcatttcagcagggcaggcctcaagatgttgtcatattcattgttggagggacaacttacgaggaagcaaggtcggtagccctttataatg

SEQ ID NO: 1012 - DNA, 238 bp, Zea mays
gcacgagagtaggagaagcccaaataatacgaaggttgatacagcgccgaagatgtgagcaggaaagcttcggcgtggtagcagaaaaggaaaccgacttaaagatgaaaaggctattcagacctcggtggattactatagaattactaccaaatgtaaagggcatggatgtaattttatatgggctgtgtcccgtgcctataaataggtgaacagtacccccgtactgcgggggcgg

SEQ ID NO: 1013 - DNA, 237 bp, Zea mays
gcacgagctcagccgcgccatcaccgtcccggtgaagaagtacacccacgagatacttaccctgtggtacagggcccccgagattctgcttggagccacgcactactccaccccggttgacatatggtccgttggctgcattttcgccgagctggtcactaaccagccacttttccctggcgactcggagctgcagcagctgctccacatcttcaagtaacacagtccattgcttgt

SEQ ID NO: 1014 - DNA, 235 bp, Zea mays
gcacgagccgtcgtccaaggtcatcatcaagttcctgacggtcatgcagcgccacggctacattggagagttcgagtacgttgatgaccaccgatcgggcaagatcgtggtcgaactcaacgggaggctgaacaagtgcggcgtcatcagccctcgctttgatatcggcgtgaaagacattgagggatggactgcaaggctgctcccgtccaggcagttcggatacatcgtcctc

SEQ ID NO: 1015 - DNA, 229 bp, Zea mays
gcacgagctcctctctcgcatccgcagcctttcgagctctactccaccccctcgatctcgaagcgcacagcagcagtcaggcggccatggacgcgagcgcaccgagagccggcgggaaggcgaagaagggcgcggccgggcgcaaggccggcgggccgaggaagaagtcggtgacgaggtccgtcaaggccgggctgcagtttcccgtcggccgcatcgggcggtacct

SEQ ID NO: 1016 - DNA, 229 bp, Zea mays
gcacgaggaacgatcgaccttggcgacgcagaggatgtcagggaagtctcgggaacatacggcgcatttgaaggtgccattacgctgacctcgctcaggctcgtcaccagcagcagaacctggggcccctggggggtcgagaacgggacgcgtttctccatcacggcgcccaacggcagcagcatcgcgggattctatgcgcgggcgggaaccaggctcgtcgacgcta

SEQ ID NO: 1017 - DNA, 228 bp, Zea mays
gcacgagcagtccagaagtgcggcagagtttgcgcaagttggcatgactcccgaggaagtggtatcgaaaataatggcaaacccagatgtagctgtcgcattccagaacccaaaaatacagacagccatcatggactgctaaggtcaaagttcttcaggtgatcaagcatacggttatcccattgatcaggagatccacccatgttctttagcatatcctgtagttgt

SEQ ID NO: 1018 - DNA, 228 bp, Zea mays
gcacgagccgtgctggacacccgcgacacctggtggagacgctgaccaccatcatgtgggtcacctccggccaccactcggccgtcaacttcggccagtaccacttcgccggctacttccccaaccggccgaccaccatccggaagaacatgccggtagaggagggcgggccgggcgaggagatggagaagttcctcaagcagccggagacgacgctgctggacatgc

SEQ ID NO: 1019 - DNA, 229 bp, Zea mays
gcacgagggaaatggaagtctaccagacatagaagggattcggaagagtatagaagcacgtacgaaacagttgctgcctttatatacccagattgcaatacggtttgctgaattgcatgatacttccctaagaatggcagctaaaggtgtgattaagaaagttgtagactgggaagaatcacgctcgttcttctataaaaggctacggaggaggatcgcagaagatgtt

SEQ ID NO: 1020 - DNA, 228 bp, Zea mays
gcacgagatcctcaccacatagagtgcacactgcaggcagcgccatggctgctctcctctctggcctcaccttggtgtccctgtgtttgtgtttgggacactggaggttcagattgcagtgttgatattatatcccccctccgtccagagggattcgacgttattgagtcataataaaatgcattgtgcacggtgggagactgggaggataggaattatagttgttta

SEQ ID NO: 1021 - DNA, 223 bp, Zea mays
gcacgagcaggagcgatgcgtcctccatgccgcatgggcggcgcccacagggcttccagctgagacccttgtggaccggtacgtgacagtgggtgcctactgcctgctgcgctcttgcaccatcgagcccgagtgcatcattggccagcactctatcctcatggaaggttcgctggttgagaccaactcaatcctggaggctggctctgtattgcccccagga

SEQ ID NO: 1022 - DNA, 223 bp, Zea mays
gcacgaggataaactcgagctcgcaacttctcttattgagaaggcgaaggcaaagggggtttctcttttgcttcccactgatattgtagtagcggacaagtttgcagccgatgctgagagcaagattgtccctgccactgctatccctgatgactggatgggtcttgatgttggccctgatgccaccaaaacattcgacgaagcattggacaccaccaagact

SEQ ID NO: 1023 - DNA, 222 bp, Zea mays
gcacgagcgcattcctcccatctcccaagacctcctcagacccgagaagcgcagtgcgtgccatggacgccaccggcactggagctggagggaaggcgaagaagggagcggccggtcgcaaggccggcgggccgaggaagaagtcggtgacgaggtccgtgaaggccgggctccagttccccgttggccgcatcgggcgctacctcaagaagggccgctacg

SEQ ID NO: 1024 - DNA, 223 bp, Zea mays
gcacgagcaggagtgcaaggaggagtttcgacctccatctcctgccccatcctacacagaaaatgatgtgatttcatcgatgctgagacggctgggtgagttggaggacaaggtgcaggtgcttgacacgaagccgtctgagatgccgtttgaaaaggaagaattgctcaatgcagccgtccgccgtgtggatgcattggaagctgagctgatttccacaaag

SEQ ID NO: 1025 - DNA, 223 bp, Zea mays
gcacgagaaaggatttgcagagggttgatcgacgagccaccccttgggtcgtggctgcttggcacccaccttggtataacagctattcctcgcactaccaagaattcgagtgcatgaggcaagaaatggaagaacttttatatgaatatcaggttgacattgttttctcaggacatgtacatgcatacgaaaggatggaccgagtatttaactacacattgga

SEQ ID NO: 1026 - DNA, 224 bp, Zea mays
gcacgaggaaacctgagtggtttgagaagaagggccgcctgttaccaaaagcagcaaggcctccacccaagcagcgagataaggtcgatagcattggccgcctgcccgcgccgacaaagccactccccttcacggtagaggagctggagtttgcagcccagcgtgaggctgcccgcgtgactgcataagatgggagcacgttggcagcacctttttttctgaaa

SEQ ID NO: 1027 - DNA, 223 bp, Zea mays
gcacgaggctgacgttcgccaaggagaagcttgagacggcggacgacgagaacaaggtggtgtcgtacagcgtggtggacggcgagctggcggacttctacaagaacttcaagatcacgctgaaggtgactccggccaaggcggagggcgagggcggcgccgtcgtcagctgggccatggagttcgacaaggccaacgaccaggtgcctgacccggacgtcat

SEQ ID NO: 1028 - DNA, 222 bp, Zea mays
gcacgagagcacactgttccagtgtatgtgcatcgagatatcaagtctgcaaatatcctgatagacagagacttacgagcaaaggttgcagattttggactgacaaaactttcagaaattggaactacatcacagtcactcccatcactacgagttgttggtacatttggttacatgcctccagagtatgctcgatatggtgaggtttctcctaaggtggat

SEQ ID NO: 1029 - DNA, 179 bp, Zea mays
gcacgagggcatcctttcgaagcattatagccgtagctcttttatgtaccttttcaggctggtaccgataccgtggatctggatttgctatgttttgtactgtgctcgagtgtaaggtcagttcgtaatacaatcaatctgcgtggaacaatttgatatccttgaatatgttagtgaga

SEQ ID NO: 1030 - DNA, 232 bp, Zea mays
gcacgagaagcagcgtcgcaaatggagcaggaagcgagcccgaatggaacgagaccttcgtcttcaccgtctccgacgacaccccgcagctgcacctcaagatcatggacagcgacctcaccaacgacgatttcgtcggcgaacaaccatccccctggaggccgtgtttcaggaaggcagccttcccccggcggttcacccggtcgtcaaggaggagaagtactgcggagag

SEQ ID NO: 1031 - DNA, 228 bp, Zea mays
gcacgagcagcggcgagctgcgccgggaggagcgcgaggacgccaagtacctgcgcatggagcggcggatgggcaagttcatgcgcaagttcgtgctgccggacaacgtcgacatggacaagatctcggcggtgtgcagggacggcgtgctcaccgtgaccgtcgagaagctgcccccgcccgagcccaagaaacccaagaccatcgaggtcaaggtcgcctgaggtg

SEQ ID NO: 1032 - DNA, 226 bp, Zea mays
gcacgagatgtcatacttgaaatgaaagaggttgttctcgataagttgtgggatattaacgtcaaggcttctattcttcttattcaggatgctgctccccacctacgggcagggtcatctgtgatccttatttcttcaattgctggttacaatcctgagcaaggattgacaatgtatggtgttacaaagaccgctctctttggtctcacaaaggctcttgctggtg

SEQ ID NO: 1033 - DNA, 230 bp, Zea mays
gcacgagctggagaggaacaggaaggacaaggactccaaattcagactcattcttgttgagagcaggatccaccgccttgcccgctactacaagcgtaccaagaagctcccacccacctggaagtacgagtcaaccacggcgagcactctggtggcctaagtgatatcctctgatggcttggtctttagcacctatgagcttgttctagatatgaatttatgtaattctt

SEQ ID NO: 1034 - DNA, 229 bp, Zea mays
gcacgagagaaggccggccgccccgccaaggccgccaagacgtcagccaaggacacgcccgggaagaaagcggcgcccgccaagaagcccgccgctgcggccaagaaggcccctgccaagaaggccgccccagccaagaaggctgcgaccccgtcgcggaaggtgccgtcccgtaaggcgaagaagtagagcggtggtcttggcaggaatctagggtttcgtgctcctt

SEQ ID NO: 1035 - DNA, 225 bp, Zea mays
aggacgatgaggatcttgaggctgctggtattcaggcgatccagattgatgaggcagctctaagggagggtctgccactgcgcaagtcagagcatgcattctacctgtactgggctgtccactctttcagaatcaccaactgcggagtccaggacaccacccagatccatacccatatgtgctactccaacttcaacgacatcatccactccatcatcgacatgg

SEQ ID NO: 1036 - DNA, 224 bp, Zea mays
gcacgaggcgaccatgagggccaagtggaagaagaagcgcatgaggaggctcaagaggaagcgcagaaagatgaggcagagatccaagtaggcagatcgagatggattgtggacctgatgacatgcgtgggtacatacatttcttcggatgcgttggtgtgcctgtggagagatgtcaacctgccatggtgtcacggtccgccatcagttgaacgtcttgcctg

SEQ ID NO: 1037 - DNA, 223 bp, Zea mays
gcacgaggtatgccgagaataaatgtggatggcgcgtgcctctgggtcgccaggttcatgctgagtctggacatgttttgcacttttgcttcccttcctgctaccatctgtgacagaaccgctcgctaatatgggacctgagattagctttttgctgcttgtggtgaggttgcagttttgttcaaaaaaaaaaaaaaaaaactcgagggggggcccggtaccc

SEQ ID NO: 1038 - DNA, 222 bp, Zea mays
gcacgaagggagaggctttacccttgaggagttgaaggctgcgggcattccaaaaaggcttgctccaaccattggcatttctgtggatcaccgccgcaagaacaaatcccttgaggggctgcaggccaatgtccagaggcttaagacatacaaggccaagctggttatcttcccaaggcgtgctcgcaaggtcaaggctggtgactctactctggaggagct

SEQ ID NO: 1039 - DNA, 147 bp, Zea mays
gcacgagccgcctcgaagctcccttcccaacgggcggcgtgctgaatcctttgcagacgacttaaaacgcgacggggcattgtaagtggcagagtggccttgctgccacgatccactgagatccagccccgcgtcgcacggattcgt

SEQ ID NO: 1040 - DNA, 220 bp, Zea mays
gcacgagcaaaggccttgcggacttcgaggccgccgtctgcctctgcacggccatcaaggccaacgtgctcggcgtcgtcatcgatgtccccatcaagctcagcgccctcgtcaactactgtggcaagtgcgtgcccaagggctacttgtgcgcgtaacagcttccggcggtcacacgctcgtagctgttcacgtacgagattacatatgcacgcaccct

SEQ ID NO: 1041 - DNA, 222 bp, Zea mays
gcacgagccaacacgcgcgtcctcgtgaacggctgggccatcggcagagacccggcggtctgggagaagcccgaggagttcatgccggagaggttcatgcgggacggctgggacaagtccaacagctacagcggccaggacttcaggtacctgccgttcgggtctgggcgccggatctgccccggggccaacttcgcgctcgcgaccatggagatcatgctc

SEQ ID NO: 1042 - DNA, 94 bp, Zea mays
gcacgagccgcggcgaagattccggctgatgaggagcccgcggcggagaagacgaccgccgggaagaagcccaaggcggagaagcgggtccccg

SEQ ID NO: 1043 - DNA, 240 bp, Zea mays
gcacgagcccaaccttcccctacaccagaaaaatccccagttctttggtccgcgtcagagaggcggcggcgatgtctgggcgcggcaagggcggcaagggtctgggcaagggcggcgcgaacgcaccgtgaaggtgctccgcgacaacatccagggcatcaccaagccggcgatccggaggctggctaggaggggtggcgtgaagcgcatctcggggctcatctacgaggagacccgcgg

SEQ ID NO: 1044 - DNA, 243 bp, Zea mays
tgcagcatcaaagctccgggcagttcagacaaggactgaaaattcacgtggcttgtggcaaccgttcaccgcccttcttggggatgctcctagtgttgacgtcaagaagaatgtgattgtggccattacctctgataagggactctgtggtggtattaattcaacatcagtgaaagttagcagggcccttcacaaattgacatctggtccagaaaaagaaaccaagtatgttatattaggaga

SEQ ID NO: 1045 - DNA, 234 bp, Zea mays
gcacgagatcggatcgcggtattgcgtggaagccctgggcctgcctgtcaagacgcagtggcaaccatggtacctgaacaaacaggttgcgggcagatttgtggagtaccatggcatgacgatggtgacgatcagaggagcagggcatttggtgcctctcaacaaacctgcagaagggctcgcactcatcgacacattccttcagggcaaacagcttcccacacacagatgaca

SEQ ID NO: 1046 - DNA, 239 bp, Zea mays
ctcagattgagatcctgaggaagaaggggcactcctactctgagatcatcaacgagagcgtgattgagtcggtggactcgctgaacccgttcatgcacgcccgtggggtcgccttcatggtggacatactgctccacaacggctcgcctgggatccaggaagtgggcgcctcgcttcgactacatcctgacgcagcaggcctttgtggcggtggacaaggacgccccgatcaaccagga

SEQ ID NO: 1047 - DNA, 234 bp, Zea mays
gcacgaggcgaagaagccggcggcgcaccctccctacgctgagatgattgtagaggcgatcgctgccctcaaggagaggaaggggtcgagctcggtggccatcagcaagtacgtcgaggggaagcatggcggcaagctccccaccaacttccgcaagcagctcactgtgcagctgaagaagctcgctgccgccggcaagctgacgagggtgaagaactccttcaagctgccggc

SEQ ID NO: 1048 - DNA, 233 bp, Zea mays
gcacgagcctcccaggtgctgcccaggtaagtcggcggcggcgatgacaacgcgcttcaagaagaaccgcaagaagcgcggccacgtgtccgccgggcacggccgcatcggcaagcacaggaagcacccgggaggtcgcggtaacgccggtggcatgcaccaccaccgtatcctcttcgacaagtaccatccgggctacttcggcaaggttggcatgcgttacttccataagc

SEQ ID NO: 1049 - DNA, 239 bp, Zea mays
ctcaacccggtgcacaggaaggtgcacgtgctggtccacggcggccgccccgtgtgcgagtcgctcgtcatcctgcagtacgtcgacgagacctgggcaggcaccgggacccctctcctccccgccgacgcctacgaccgcgccatggctcgcttctgggcagcctacgtcgacgacaagttctacaaggagtggaaccggctgttctggtcgacgacggcggagaaggcggcggaggc

SEQ ID NO: 1050 - DNA, 236 bp, Zea mays
gcacgagagaaagtccaattgccttcaccttctacctccatgatggcagcccgcaagccggagaagccgctgaggacgacgaggacatcgggaggataatctgcgactgcatcggcgacgacttctccaactacaacagggccatagtcgagactgtccaaatgggctatggcctcgctgaagtgatctatgccgtgctgaacaacggcgtccaaggccgggtcgctgtcaaactt

SEQ ID NO: 1051 - DNA, 230 bp, Zea mays
gcacgaggatgcaagaagttgctgtcgaaacatttggctccatggcaaagacggagaaaattgctttcattcttgagcaggtccggctatgcctagatcgtcaagattatgtccgagcacaaattttatcaaggaaaatcagtactagagtatttgacgcagatccatcaaaggaaaaaaagaaaccaaaggagggtgacaacattgttcaggatgctcctgcagatatt

SEQ ID NO: 1052 - DNA, 229 bp, Zea mays
gcacgaggggatgtcaagttcttcacagagacagaggagaacaaccagatgcgaggcccaaggaccgcagtcccatatttcctatgacttcaattgtacaattttagaagtctattcgaatctgtaagggctaaagatcaatcagatgtgtttattgttttaggtccagattatagtgcaatctgatgcgtttgatttctgttttcctttaaccacatgtacaatagac

SEQ ID NO: 1053 - DNA, 229 bp, Zea mays
gcacgaggcggcaaggggctcgggaagggcggcgcgaagtcaccggaaggtgctgcgcgacaacatccaggggatcacgaagccggcgatccggatgctggcgaagaggggtggcgtgaagcgcatctccgggctgatctacgaggagacccgcggcgtgctcaagatctttctcgagaatgtcatccgcgacgctgtgacctacacggagcacgcccgtcgcaaaacc

SEQ ID NO: 1054 - DNA, 227 bp, Zea mays
gcacgaggggacgttgacacaaaggacaatcctctatccatgcaagatgcgttggaggactacaagaggctagattacctccagcgccacatctcagttattaaagaatcaatagacttgggggcggacgtgcgcggccacttcacatggtctctgttggacaacttcgagtggtctagtggctacaccgagcgttacggcatcatctacgtcgaccgtgacgacgg

SEQ ID NO: 1055 - DNA, 224 bp, Zea mays
gcacgaggtcgtcgccaccctccggcgccgccatcccggtggtggacctctcggtgacgcggcgcgaggacctagtcgagcaggtgaggcacgcggccgggacggtgggcttcttctggctggtgaaccacggcgtggcggaggagctgatgggcggcatgctccgcggggtgcgccagttcaacgagggccccgtggaggcgaacaggcgctctactccaggg

SEQ ID NO: 1056 - DNA, 122 bp, Zea mays
gcacgaggcaagaagaagggcaagaagagcgtggagacctacaagatctacatcttcaaggtgctgaagcaggtgcacccggacattggcatctcctccaaggccatgtccatcatgaactc

SEQ ID NO: 1057 - DNA, 229 bp, Zea mays
gcacgagatttaagctaagcaatgctctatctatatccaggttttcattttcacagtcacaggacatggtctggtcgggtcgcttacttgggcaccttgtactcagggtacagctcggcgaccttggccgcgaagtcgctccagtgggagatggactgggcgcagatgtgcctcccggacgctgccgggctctcgaacaccaggatatgcgccatggcggcgtcgtgca

SEQ ID NO: 1058 - DNA, 230 bp, Zea mays
gcacgaggcttcttcaagctgcatactaccgccgcatgaggtggtcagtcttgaagtcccgtaagctggtcctggatgttgtcaactgaggactaccattacccttttttatatttaaatatgagctgttaaggagtattcaaaataatgaatttgtgatgtacaattttgccactgggggctaggttccatgcctagagattattttgttttctttactctgctgagct

SEQ ID NO: 1059 - DNA, 239 bp, Zea mays
gcacgagcgtgactatcgctcacggcggtgtgctccccaatatcaaccctgttctgctgcccaagaagacggcggagaaggcgtccagtgtggggagcaaggaggcaaagtcgcccaagaaggccgccaagtcccccaagaaggcatagactgactgtctggagtgatctgatgtttagcaggaccttgataccagtatgcggtgatgcgtaggctgtagatgggtcgaatgtgcttgt

SEQ ID NO: 1060 - DNA, 238 bp, Zea mays
gcacgaggccacgtcgccgtcaagttcggcaaggccttcgggatgaaggtcaccgtcatcagcacgtccgccagcaagcgccaggaggccatcgagaacctcggcgcggacgagttcctcatcagccgggacgaggaccagatgaaggcggcgacggggaccatggacggcatcatcgacacggtgtcggcgtggcacccgatcacgccgctgctggcgctgctgaagccgctggggc

SEQ ID NO: 1061 - DNA, 236 bp, Zea mays
gcacgagagcagctcgggtacaaacccaccaccaacctggacgtcggcctcaagaagtttgtcaagtggtacctgtcctattacggctacaccaggggaggatccaagaactcgcgacattgatccgtgctaattctttctccttttcctgctttggcccggccgtggccaccatgctaggtcggacattgacattggattttgttggttggtggaaatatgttatgttaggatgt

SEQ ID NO: 1062 - DNA, 240 bp, Zea mays
gcacgagcgcaacccaacgacttcaagcagccaggggagaggtaccgctcctgggacgccgaccgacaggaccgattcgtgaggcgattcgccgactcgctcggacacccaaaggtcagccaggagctcaggtccatctggatagacctcctcgccaagtgcgacgcgtcgctggaggatgaagattgccacccggctcaacatgaaggcaaacatgtgatgcttctgctgaatagaata

SEQ ID NO: 1063 - DNA, 239 bp, Zea mays
gcacgaggaaggattaaagcatgtaacccggacataagccatagggaagccttcagcactgcagcaaagaattgggcacattttccgaatattcattttggtctagggccctgtgaaagtagcaacaatcttgatgaggccaccggtgcaatgtgccatccccagaaagtccaagatctctactaagacctatatcagcactgccctttgtttcctcttagttctggactagttggtga

SEQ ID NO: 1064 - DNA, 241 bp, Zea mays
gcacgaggtgagatctgtccagattttgacgtgtgcaacgcttgtttccaaaaaggagcggttactcatcctcacaagttaacgaaccatccatcagctgctgaccgtgacgctcagaacgcagaagctcggcaaatgcgtgttcagcagctaagaaagatgctcgatctcctggtacatgcgtcgatgtgccgctccggcagttgccagtatccccactgccgaaaagtaaagggactat

SEQ ID NO: 1065 - DNA, 239 bp, Zea mays
gcacgaggagagatgaaaggctctgccatcactggacccatcggaaaggagtgtgctgatctgtggcctaggattgccagcgcggcaaatgcgattgtctagtggaatcagttgatcgaaatttacttcaaataacatttgtttgtgttgcgaattgggaagagagtttttagttagacgagcttttgatggccctaaagatgttttcccggatgatgtttgtgctgctggaccgtttc

SEQ ID NO: 1066 - DNA, 237 bp, Zea mays
gcacgagcttcatccaacaatggagcggctacacaaggccccgtggcgatcacaaaaaaggagcctatatccatgtactagaattattcagtttcactccacatcgtgatgttttatttttacttttgtcgtgctataacggatagcgctcctcgttggcgccactggcgggtggttctgcctctggtctggtgtgtttgtgtgtggtcacacttgccagccagcagaggcgcctgc

SEQ ID NO: 1067 - DNA, 235 bp, Zea mays
gcacgagcccaaatgtctcttgggaagatattggtggtctggaaaatgttaagagggagctacaggagactgttcaatatccagtggagcatccagataaatttgaaaagtttggcatgtctccttcgaagggtgttttgttttatggccctcctggctgtggcaagactctgttggccaaggcaatcgctaatgaatgccaggctaacttcatcagtgtgaagggtcctgaact

SEQ ID NO: 1068 - DNA, 238 bp, Zea mays
gcacgacgccgagcgcaaggacgccgcggactccacgctcgccgcctaccaggccgcgcaggacatcgccgtcaaggagctgccgcccacgcatcccatcaggctcggcctcgccctcaacttctccgtcttctactacgagatcctcagctcgccggaccgcgcctgctcgctggccaagcaggccttcgacgaagctatttcagagctggatagtcttggggaagagtcgtacaag

SEQ ID NO: 1069 - DNA, 236 bp, Zea mays
gcacgaggctagatccatggatttcacagctgcgctgttacagaggctggaggaggactctacgcagcagcagcagcagagcctcgcgcactcgtggaggccgcgtacgaggccaccctgaagccgtggcacggctggatttcctcggcggcgtgcaagatagcgtggaagctcatccccgagaggaaggtcttcaccggcatgctgctggggacgggccaggactgctctgcact

SEQ ID NO: 1070 - DNA, 238 bp, Zea mays
gcacgagagaagacggagttcgacgtgatgatcgaagaggtgcccagcagcgcgcgtatcgccactatcaaggtggtgcgcgcgctcaccagcctcgcgctcaaggaggccaaggaccttatcgagggtctccccaagaaggtcaaagaggccgtcagcaaggacgaggccgaggacgccaagaagcagctcgaggaggtcggcgccaaggtgtctattgcgtgacactaggtatacg

SEQ ID NO: 1071 - DNA, 243 bp, Zea mays
tttcggcaatgtcggggcgcggcaagggcggcaagggtctgggcaagggcggcgccaagcgccaccgcaaggtcctgcgcgacaacatccagggcatcaccaagccggcgatccggaggctggctaggaggggcggcgtcaagcgcatctccgggctcatctacgaggagacccgcggtgtgctcaagatctttctggagaacgtcatccgtgacgccgtcacctacaccgagcacgcccgcc

SEQ ID NO: 1072 - DNA, 243 bp, Zea mays
ccgcctcaccgcctctctcaatctgataccgcagatccgtcgtccggtgagtggaagccgcacgaacccatggcttccggcgagcttgcctgcacctacgccgctctcatcctcagcgacgatggcatcgccatcaccgccgagaagatcgccacgatcgtgaaggcggccaacatcaaggtcgagtcctactggccggccctcttcgccaagctcctggagaagcgcaacgtcgaggacctc

SEQ ID NO: 1073 - DNA, 232 bp, Zea mays
gcacgagctgatatgagtaaggtgtttgaagacagaacgtttgtgtcatctatccttaattcgcttcctggtgttgatcccaatgatccatctgttaaagatttgctggcatcattgcacagccagggagagcaagagaagaaggaagacaagtcagacaaaacagaagacgagaagaactgatgtagccatgttcatgcttccatgctcacaaagaaattgaacattggtc

SEQ ID NO: 1074 - DNA, 228 bp, Zea mays
gcacgagacccggcggcacaggagaaggcggagaagacgaccgcaggaagaagcccaaggccgagaagcggctgcccgcgtccaagtcctccggcaaggtgggcggcgagatgattgggaagaagatggccaagatgagcgtggagacctacaagatctacatcttcaaggtgctgaagcaggtgcaccccgacatcggcatatcctccagggccatgtccatcatga

SEQ ID NO: 1075 - DNA, 228 bp, Zea mays
gcacgagatgtgaacgagttccagaccaacctggtgccctacccgaggatccacttcatgctttcgtcctacgctccagtcatttctgctgagaaggcctaccacgagcagctgtccgtggctgaaatcaccaacagcgccttcgagccatcctccatgatggccaagtgcgacccccgccatggcaagtacatggcatgctgcctcatgtaccgtggtgatgtggtt

SEQ ID NO: 1076 - DNA, 231 bp, Zea mays
gcacgagtatggatgaagaaagtcttgcttatttaggcgagatcggacagcagacatctttgagacatgctattcaattgatatcacctgccagcgtggtctcaaagactaatggaagagagaaaatctgcaaggctgatctcgaggaagtcagtgggctctatttggatgccaaatcctcggctcggctgctccaggagcaacaagaaagatacatcacctagatttgga

SEQ ID NO: 1077 - DNA, 230 bp, Zea mays
gcacgagggtctgcgcgctcaggttcactgagacagcgagggccaggatcatcaatgccggcggagagtgcctcaccttcgaccagctcgcgctccgtgccccacttgggcaaaacacggttctgctgaggggtcctaagaacgctagggaagctgtcaggcacttcgggcctgcaccaggagtgcctcacagccacaccaagccttatgttcgctcgaagggtaggaag

SEQ ID NO: 1078 - DNA, 240 bp, Zea mays
gcacgagctgagactctgagacacaggaacagaaccctctctgcgccgccgccgccgttgcagtcgcggccacatcgtcgcctatccatccccaccgctcccactgccacgattcacaagaggtgtcgagatgtctcagaacaacccctcccagctcctcccctcagagctgatcgatcggtgcatcgggtccaagatctgggtgatcatgaagggggacaaggagctcgttggcaccct

SEQ ID NO: 1079 - DNA, 82 bp, Zea mays
gcacgatccgcggtggcggcggctacggtggcggcggcggctacggtggtggtggcggcggctacggcggtggcaacgtggc

SEQ ID NO: 1080 - DNA, 237 bp, Zea mays
gcacgaggtcaggtcattcccactgccaggagggtcatctatgcctctcagctcacggccaagccaaggctgctggagccagtctacctggtggagatccaggccccagaaaatgcacttggtggtatctacggtgttctgaaccagaagagaggtcatgtctttgaggagatgcagaggccgggtaccccgctctacaacatcaaggctttcctccctgtcatcgagtcctttggt

SEQ ID NO: 1081 - DNA, 238 bp, Zea mays
gcacgagaatctccccagcaatccctagcagaagccttccatcctcactcgctcgatggcccgcacgaagcagacggcgaggaagtccaccggcggcaaggcgccgaggaagcagctggcgactaaggcggcccgcaagtctgcccctgcgaccggcggagtgaagaagccccaccgcttccgccccggcaccgtcgcgctccgggagatccgcaagtaccagaagagcacggagctg

SEQ ID NO: 1082 - DNA, 231 bp, Zea mays
gcacgagctgcagttccccgtcggccggatcgggcgctacctcaagaagggccggtacgcgcagcgtgggcactggcgcccccgtctacctcgccgccgtcctggagtacctcgccgccgaggttctggagttggcagggaacgcggcgaaagacaacaagaagacgcgcatcatcccgcgccacgtgctcctggcgatccgcaacgacgaggagctcgggaagctgctgg

SEQ ID NO: 1083 - DNA, 238 bp, Zea mays
gcacgaggctactacacccaagtattcaaaggcccgttatgatgagattgtgaaggaagtctcttcctacctgaagaaggttggatacaaccctgataagatccacttcgttccaatctctggttttgaaggtgacaacatgattgagaggtccaccaaccttgactggtacaagggcccaaccctacttgaggctctggacttgatcaatgagccaaagaggccttcagacaagccc

SEQ ID NO: 1084 - DNA, 235 bp, Zea mays
gcacgagggcgtcctgtaggaggtcgagggaaagtgggtcacccaaggtcctgttgatgtggacattggtgccaatccatccgccgaaggtggtgaggacgaaagcgttgatgacacagctgtgaaggtggttgatattgttgacacattccgtctacaggagcaacctccttttgacaagaaatcatttgtgtcttacatcaaaaaatacatcaagaatctcactgctgtgttg

SEQ ID NO: 1085 - DNA, 184 bp, Zea mays
gcacgagggaaagctatcactgcaggcttctttttccacgccgccaggaaggatccccaggaaggatacaggaccttggtcgaaaaccagccagtgtacatccaccctagcagcgcattgttccagcgccagccagactgggtcatctatcacgagctggtgatgacgacaaaggagtacatga

SEQ ID NO: 1086 - DNA, 238 bp, Zea mays
cggaaggagcatagagaggagggcaacgagggcgacgggttctacggcggcataaggaagctccgcggcaaggatgacatctccaagtggaggcagctgtggccaacagacgtcctggagtaagcaggagccgcatcccttctcacaccgagattgatccatcgctcaaatgacacgcctttctttcatcatattgaccaaattcgtcgtctctgtcgcgctgttgtaaacgggttag

SEQ ID NO: 1087 - DNA, 230 bp, Zea mays
gcacgagaacaaatctggcttcaagtcattcaggggatggtgacaacggcctgatggtgggcacgctgcgttcgacagggggtacatcttacagcggctgcaactaacaggcatatgcattttcgcggaaacctgcttgggccttggaagggcaaagcagatgtagaactgtgcatcttccatgttggattaacacttgatgtaatgtattgttatcggtttttactgtg

SEQ ID NO: 1088 - DNA, 156 bp, Zea mays
gcacgaggtcgacgcggctctcaaggaggttcgccataggaagtaccatgtgatcagcacgcagactgatacttacaagaaaaaggtgaagcactcgcacgaggcgtacaagaacctgcagcaggagctaggcatgcgggaggacccggcgttcgg

SEQ ID NO: 1089 - DNA, 236 bp, Zea mays
gcacgagattcagcagcgcaacggaaggaagagtctgacaactgttcagggcttgaagaaagagtacagctacaacaagatcctcaaggatctcaaaaaagagttctgctgcaatggtactgtagtccaggatccagagctaggccaggtcattcaactgcaaggtgatcagcgtaaaaatgtcgctacttttctagtccaggccggaatcgtgaaaaaagatagcatcaagattc

SEQ ID NO: 1090 - DNA, 230 bp, Zea mays
gcacgaggcgacgcagacagctccttggacaggttgtggcagaagaagaaggttgatatcaagcagtagattttacatctagtttaccaagaattggacactgccttagctatgttttgaattcatgtcactatatgcaatgttgtgatttcagctggtaccttaaatctgaagatttagtaaaaaaaaaaaaaagagaagaaaaaaactcgagggggggcccggtaccc

SEQ ID NO: 1091 - DNA, 235 bp, Zea mays
gcacgagcagcctacccgggttcagcttgcccggcagcggcagcatgcccctcttcggcggcggctccccgggcttcagcggcttcggcggcatgcccgggtcgcccaccgccggctccgtccccgagcacgccaacaagccctgaacgccaacaagcgtggtagtagagtggtgctactgttactgtagtacgtcgtcgtcttcatgcatgcgtggttcgtggtttcccctagc

SEQ ID NO: 1092 - DNA, 217 bp, Zea mays
gcacgagagacgaagcccatggcgctcatcaagaaactgcgcaaggcgaaaaaggatgctcctgctggtgagaagcctgagccagtcaagacacatctccgtaacatgatcattgtccctgagatgattggaagcattgttggtgtctacaacggcaaggccttcaaccaggttgagatcaagcctgagatgatcggccactaacttgctgagttct

SEQ ID NO: 1093 - DNA, 223 bp, Zea mays
gcacgagacctgatgcgccgcatccagcggggccccgtccgtggcatctcgctcaagctgcaggaggaggagcgggagcgccgcatggacttcgtcccggagaagtcagcgctcgacgtcgaagagatccgcgtcgacaaggagaccatggagatgctcgcggcacttggcatggccgatctcccgggcgtagaccgccaggctgaggtctccagcgtccccg

SEQ ID NO: 1094 - DNA, 225 bp, Zea mays
gcacgagcatctatggaccatactcatgtgagcacagttgtcaaaggcagtttcggataccttgatcctgaatactttcgcaggcagcagctcacagagaagtctgatgtatactcttttggtgttgtgctgtttgaggtcctctgtgcacggcctgccttgaaccctactcttccaaaagaggaagttagcttggcggagtgggcgttgcactgccagaagaag

SEQ ID NO: 1095 - DNA, 227 bp, Zea mays
gcacgagggtcaatagggtatggaatgtgataaagtccaaattctcgaaggtaactaacacaagctaccttggcatgcttcacgctctttacaagctcaatgatattgaccgtatgaagcagatctatatggagtgggaatctaattatgaaacctttgatgtaaagctgacgaatatgatgattcgcagccatctgaaggttggcatgaccgaggaagcagaaatg

SEQ ID NO: 1096 - DNA, 228 bp, Zea mays
gcacgaggaacatggaaacatacttaaacttctgggatattgcctcgatgcccaagaaaaagaaaagctatactttctggtcgaagaatacataccgaatgttgaaagcttggagaaatttattaatgtctctcgactcgattggtcctcgtgtttcaagataattcaggggatagcaaagggcttacattgcttacataagcatcatattctctatatggatttgaa

SEQ ID NO: 1097 - DNA, 210 bp, Zea mays
gcacgagcttgtcaagagggtcctccggtgctttggcccctcagagttttccgttgccgtgaccatcttcggcgggcgtggccatgccgggacatggggaaaggcacttggtgcagaggtctatgactgcaacaacatggtggagtaggagctgcctggaaggcgggtcctcgtgtaccagagcttctgtgctgctgaagacgctgttgc

SEQ ID NO: 1098 - DNA, 246 bp, Zea mays
gcacgagaaagggttcactttatgataatttacaccagcaaaacagtgacaaaaaggcattagaatggccattgaggctaaaaattgccattgggagtgctagaggtttggcgtggcttcatcacagttgcaaccctcgcattcttcataggaacattagttccaagtgcatattgcttgatgatgactatgagcctaagatttctgattttggcttggcaaggcttatgaatcccatcgacaccc

SEQ ID NO: 1099 - DNA, 245 bp, Zea mays
gcacgaggtcaagtcgcgcaagatgtacgacagctaccccagcaagatcaagtgcgacccgaccaccgtgtccatgagcatcaaggagaacgagcctattgtctacacctatgaggtgaacttcgtggaaagcgacatcaagtggccctccaggtgggatgcctacctcaagatggagggggccaaggtgcactggttctccattctcaactccctcatggtgattgccttccttgctggtattg

SEQ ID NO: 1100 - DNA, 244 bp, Zea mays
gcacgagcttgtctttgtcttgaatcagctatatttcaatgcaactcacccgttgagtgaactttggcaacgggcttggatcatcccctccttttggaatgtcctttcctatgccctcctcggcatcatatgcatcctttggtctccatctcgcaatccaacagggtttgcatattcagaggatgcaggtgagggagctgatgaggaagggctctctctagtaggcagtgcggtgaaaggaacc

SEQ ID NO: 1101 - DNA, 245 bp, Zea mays
gcacgagcagagatgagctgcacaggatgctgaacgaggatgagctacgtgatgctgtgctgcttgttttcgccaacaagcaagatcttcctaatgccatgaatgctgctgagatcactgacaagcttggattacactccctgcggcagcgacactggtacatccagagcacttgtgccacaactggcgagggtctgtacgagggcctggactggctgtccagcaacattgcgagcaaggcttga

SEQ ID NO: 1102 - DNA, 241 bp, Zea mays
gcacgaggatcggtaaggttgttgattggaaagagtctcgggccttcttctacaggagattgcgaaggagagttgctgaggatgccctggccaaggaagttaaagaagctgctggcgagcagctttcccacagatcagcattagactgtatcaagaaatggtatctagcgtccaaaggaactgaaggtgatggtgaaatgtggaatgatgatgaatctttctttgcttggaaggatgatcc

SEQ ID NO: 1103 - DNA, 247 bp, Zea mays
cttggctgtctacacttcgttttcggctgctccctcgtccaagtatatcaacgtagcaaggtggtttaaccacattgatgcgctcgtgaggctgagcggaattactgcagagggccaaggtgtgaaggttgaatcctcagcagttccttcagccccaactccagatgttgctgaagcacaggccccagttgctgaggaggacgacgacgatgatgttgacctttttggtgaggagaccgaagatgag

SEQ ID NO: 1104 - DNA, 243 bp, Zea mays
gcacgagcggaggaccagatccagcgggacctggccatgaacaagttcgactgggaccacccgatgcacctgcaaccgacgagccccacggccattaagcaggtgagctgcgtgtgggacgcgtacgaggccaccaagggcgcccacggggtgtgcatcctgaccgagtgggacgagttcaagaccctggactaccagaagatcttcgacaacatgcagaagcccgccttcgtcttcgacggt

SEQ ID NO: 1105 - DNA, 241 bp, Zea mays
gcacgagctcgcctcgggtcaaaccctaagcagggagttgatttatccgctgcagccatgagtaagttgcagtctgagtctgtcaaggatgccatctcccagattgttggggatgccaaggagaagaataggaagttcactgagactgtggaacttcagattggtctgaagaattatgatccacagaaggacaagcgtttcagtggctctgttaagttgccccatatccctcgtcccaaga

SEQ ID NO: 1106 - DNA, 242 bp, Zea mays
gcacgaggtgaactcccccctcttccgttccttcctcagccagaagggcggcgccgacaagaggaaaatggaggagcataaaccaaaggagcagaggcccaaggctaacgagaacaagcctgtgatgaacgaatgaatatctccagaagctttgttcaatgtgcaaccaagtccgatgtccgtttgctctggtcagcttaaaaccaacgcttccaataatcctatattggtgacttagtttc

SEQ ID NO: 1107 - DNA, 244 bp, Zea mays
gcacgaacagaagcgtaggcggcaacctgaatccctgggagtgctcgcccaagtgcgggtcgcggtgctccaagacgcagtacaggaaggcctgcctcaccttatgcaacaagtgctgcgccaagtgcctctgcgtgccaccggggttctacggcaacaagggcgcctgcccctgctacaacaactggaaaaccaaggaaggagggcccaagtgcccctagaagatccaccgcagctcccgtcc

SEQ ID NO: 1108 - DNA, 237 bp, Zea mays
gcacgagggccctcttcgcgaagctcctggagaagcgcaacgtcgaggagctcatcctctccgttggatctggtggcggagctgctccagttgatgctgccgcacctgctggtggtgctacggctgctgctgccccggctgtcgatgagaagaaggaagaggccaaggaggagtctgatgacgacatgggcttcagcctgttcgactgaggagaccccctcacccagccattagcaa

SEQ ID NO: 1109 - DNA, 237 bp, Zea mays
gcacgagcaggagcctggctacggcgggtaccgtcctccatctgctgggggctacccggcggggtacgggtacagcaacctgcctcgcgctctggcgtctgaacagaccgtccgcgtctactgcaaggccggcgaagggtacagcctcaccgtcaggaacggcaccgtgtgcctggcgccaaccaaccccagggacgagttccagcactgggtgaaggacatgaggcacagcactag

SEQ ID NO: 1110 - DNA, 237 bp, Zea mays
gcacgagggacaacaccatcaggtacaacgccaagcgcaggcactggcgccgcaccaagctcggcttctgagcgcgcggatcggccggctcctgcgtcggaattctagggtctctacctttcctttggttttatcgatgtctcttgtgtttctgtaagctagcaaacagttccagaaagcttttgttaagattttgatgacgctaagaggattgatgctactatgctgtactcagga

SEQ ID NO: 1111 - DNA, 237 bp, Zea mays
gcacgagctcaagcctctccgcaatctccacgacgcatcttccctgtgcaagtacctcgaatcgttctatacgctgcggaagccggttgcctccaccataaacacgttggccggtgctctgtacaaggtcttcagcgcctcgcctgatcaagctaggaacgagatgcgccaggcctgttttgattacttgagcctcggaggcgtcttctcgaatgggcctattgccttactctcggg

SEQ ID NO: 1112 - DNA, 237 bp, Zea mays
gcacgaggcaaagcaggcttttgacgaggccatctcggaactggacaccctgagcgaggagtcctacaaggacagcactttgatcatgcagctccttcgtgataacttgaccctatggacctctgacatctcggaggaccctgctgaagagattagggaggcgcccaagcgggactcgagtgaggggcagtaaagccggctttatgtgcctagaaactagtagctagtgtttgctgc

SEQ ID NO: 1113 - DNA, 238 bp, Zea mays
gcacgagtccacctccccagcagcgcgtgaagcttgaggcaatccccgccctctctagccctgcgcaaccagttcggttccatggccaacagcaatctcccgcgccgaatcatcaaggagacgcagcggcttctcagcgaaccagcaccggggattagcgcgtcgccgtcggaggagaatatgcggtacttcaatgtcatgatccttggccccgcgcagtcaccctatgaaggtggag

SEQ ID NO: 1114 - DNA, 248 bp, Zea mays
gcacgaggacaagctcattctgcgcggccttcagttccatggcttccacggtgtcctgcaggaggagaagacgttgggacagaagttcgtggttgacatcgacgcctggatagacctcgccgctgccggcgagtccgactgcattgctgacaccgtcagctacaccgatatctacaacattgcaaaggatgttgtcgagggcacgccacgcaacctcttggagtcggtagctcactcgatcgcagagg

SEQ ID NO: 1115 - DNA, 164 bp, Zea mays
gcacgagcaagcattcacctgttggttactcgatttgaatatcatttagatctgtttgaggttggaacataaatgcagcagtagtttctgtcttattatattggtacctctgttactgagttgatgtggtcctggctcctgagcttaattttgttttcgtgttc

SEQ ID NO: 1116 - DNA, 254 bp, Zea mays
tcccagccgtcgtctgctgcggactccgcctccattttgctctgtttcttgcaagttgctcttgcggtagttcccccaactgccaccatgcagaacgaggagggtaagactgtggacctctatgtccccaggaagtgctcggccacaaacaggatcatcactgccaaggaccatgcctctgtccagatcaacattggccacttggatgcgaatggcctgtatgatggtcacttcacaacgtttgctctctctgg

SEQ ID NO: 1117 - DNA, 248 bp, Zea mays
gcacgagaacaagtaggcccgctcactaccatgtcctctgggatgagaacaatttcacagcagacgaaatgcaaacactgacaaacaacctttgctacacttatgcccggtgcacacgctcggtttctgttgtccctcctgcatactacgcacacctggcagcattccgggcgcggttctacatggaaccagagatgtcggagaaccagacgtcgaagagctccaatggcacgaacggaggcttggtg

SEQ ID NO: 1118 - DNA, 245 bp, Zea mays
gcacgagctggcatggacgaggatgccccgtctggtgggagcggtgctggtcccaagatcgaagaggtcgattaaattggttagcatcgggcggtttgttttggtgtggtctgaagtactcctgaactctgaaggttgtctgtgagatggggtggtgtccacagtctgtgggctgtggtcgaacttcttaataaatataagttttagttcctaaaaaaagaaaaaaaaaactcgagggggggccc

SEQ ID NO: 1119 - DNA, 248 bp, Zea mays
gcacgaggcgaaccagaccgccatcgagggccgcgacctgcacttctacaccgcgcagatggaggagttccgcgccgcgagaaggccgccgccgacaaggggcggcggctcatgctcatggacgccacggcggcgatgctcatgcggcccgacggccaccccagccgctacgggcactggcccaacgagaaggtgcagctctacaacgactgcatccactggtgcctcccgggacccatcgacatctg

SEQ ID NO: 1120 - DNA, 244 bp, Zea mays
gcacgaggaagcatctgtttggatatcctacagaaccagtggagtcctatatatgatgttgctgcaattttaacttctatccagtccctgctgtgtgatccaaacccaaactcccctgcaaactcagaagcagcaagactgttcagcgagaacaagcgggagtacaaccgcaaagtccgtgagatcgtggagcagagctggacagccgactagtgcataaggatgctcgtcgtgcccgataggg

SEQ ID NO: 1121 - DNA, 245 bp, Zea mays
gcacgaagcgaggagaaaggcgagctgctgctggtgtacgagtacatgcccaatggaagcctggacaaggccctctacggcgagccttgcacgttgtcgtggccgcagagatacacggtcgccgccggcatcgcgtcggtgctgtcgtacctccaccaggagtgcgagcagcgcgtcatccaccgggacatcaagaccagcaacatcctgctggacgtcaacctgagcccgcgcctgggcgactt

SEQ ID NO: 1122 - DNA, 245 bp, Zea mays
gcacgagtggagacctacaagatctacatcttcaaggtgctgaagcaggtgcacccggacatcggcatctcctctaaggccatgtccatcatgaactccttcatcaacgacatcttcgagaagctcgccgccgaggccgccaagctcgcgcggtacaacaagaagcccaccatcacctcccgtgagatccagacctccgtgcgcctcgtcctccccggggagctcgccaagcacgccgtctccga

SEQ ID NO: 1123 - DNA, 248 bp, Zea mays
ttcggcacgaggccaaaatgaacctgagcgatgaggttgatttggaagattatgtttccagaccggataagatcagtgctgctgatattgctgctatctgccaagaggctggcatgcatgctgtccgcaaaaaccgatatgtcatcctccccaaggactttgaaaagggctaccgaaccaacgtgaagaagcccgagacagactttgatttctacaaatgagtcaacccagagtgttgaactcgtttc

SEQ ID NO: 1124 - DNA, 238 bp, Zea mays
gcacgagctcaagcctctccgcaatctccacgacgcatcttccctgtgcaagtacctcgaatcgttctatacgctgcggaagccggttgcctccaccataaacacgttggccggtgctctgtacaaggtcttcagcgcctcgcctgatcaagctaggaacgagatgcgccaggcctgttttgattacttgagcctcggaggcgtcttctcgaatgggcctattgccttactctcgggt

SEQ ID NO: 1125 - DNA, 219 bp, Zea mays
gcacgagcacgcgcgccgcaagaccgtcaccgccatggacgtcgtctacgcgctcaagcgccagggccgcaccctctacggattcggaggctaggcgcctcttcgtagctggggaatgcttagggggatacacgtctctgtcgctgtgggccatagtgttgctgcgttcctggatgtaatccatttatttttctgcaatgaagagatgctggcaagcat

SEQ ID NO: 1126 - DNA, 239 bp, Zea mays
gcacgagactgaagtaaatgaaatcttcaaagatctcgctgtgctagtccatgatcaaggagcaatgatagatgacattgattcccatatagagaacgccgttgtagcgacttcgcaggctaaaggccagctttcaaaggctgctaaaactcagaagtcgaactcttctctgatatgcttgttgctcgttatttttggagtggtcctgctcatagtgataatagtacttgcagcctaaa

SEQ ID NO: 1127 - DNA, 238 bp, Zea mays
gcacgagctcgttcctgtcgcgcaccacgacctccacttccacatctcccccggcgtcggcgcggtcagttgaaccatggcggactccaaggccacctcggcggtcaccctccgcacccgcaagttcatgaccaaccgcctcctggcccgcaagcaattcgtgcttgaggtgatccaccccggccgcgccaacgtctccaaggcggagttgaaggagaggcttgccaaggcgtacgag

SEQ ID NO: 1128 - DNA, 220 bp, Zea mays
gcacgaggtttagataaggaatatgagggcaatgttgaggccactggtgaggacttctctgttgagccagctgatgagaggaggcctttccgtgctctcttggatgttggccttattaggactacaactgggaaccgtgtctttggtgccctcaagggagctttggatggtggactggatattcctcacagcgagaagaggggttctgtgttcaataagg

SEQ ID NO: 1129 - DNA, 234 bp, Zea mays
gcacgaggtccagtcccccaactccttcttcatggatgtcaagtgccagggctgtttcagcataaccactgtgttcagccactcccagactgtggttgtgtgcccaggctgccaaactgttctgtgccaacctaccggtgggaaggccaggctcaccgaggggtgctccttccgtcgcaagggcgattaggtcctgcttctcttaacgtgagaagagataaatttggtgttttg

SEQ ID NO: 1130 - DNA, 238 bp, Zea mays
gcacgaggagactcttcagttgctgtcattgtattcgatgttgcaagcaggcagtccttcttaaatacatctaagtggatagaggaagttcgcactgagaggggcagtgatgttatcattgtgcttgttgggaacaaaactgaccttgttgacaagaggcaagtctcaatagacgaaggggagggcaaggcgaaggaccttggagtcatgtttattgaaaccagtgctaaggctgggt

SEQ ID NO: 1131 - DNA, 244 bp, Zea mays
ttcggcacgagacaagatctcacagggcggcctgcagagaatctatgagaagtacacctggaagctctactccgagaggctgatgaccctgaccggcgtgtacgggttctggaagtacgtgagcaacctggagaggcgcgagacccgccgctacatcgagatgttctacgccctgaagtaccgtagcctggcaagccaggttccgctgtccttcgattagtacggggaaagaagaagaagaaga

SEQ ID NO: 1132 - DNA, 162 bp, Zea mays
gcacgaggaaggttcacgatgctggtcacatggtacctatggatcaaccgaagctgctctggagatgctgaagaggtggacttctggaaacctttcggagccatcttcaagctcccagaggcttgattttacaatgtaacaaaacacacatgctgctcatga

SEQ ID NO: 1133 - DNA, 235 bp, Zea mays
gcacgaggatggctcgaagtcagaggttgatgacgaggatggcagcagtgacgaggaaaacgatgacgatgagtaaacagtctccaaggtcacgaggtagcaaatcgagtgttaggtccccaattagcttactgttttgctgcctttaaatgttaagttgtttcaaacaggtgtttatgaaggggatctattagtttcgcgatgtcgttagtttagtgcattagcaaagaaaaag

SEQ ID NO: 1134 - DNA, 246 bp, Zea mays
ctggagctgtaccattcccggcaagcaggggactgattgggaaagtgggtactacccacttacccttcatttcagtgaagattacccaagcaagcctcccaaatgcaagttcccacagggttttttccacccaaatgtttatccttcaggaacagtctgcctctcaattctcaatgaggatagtggtaggagacctgctatcactgttaagcagattctagttggaatacaagacttgcttgatca

SEQ ID NO: 1135 - DNA, 237 bp, Zea mays
cgctcagcttccgccgatcggcttgccccgtcgatttcgccaacccctcgacccgatcggctccattgatcgtacctcgtcgtccggttgtcgatggccaggacctctttcaaaatggagcacgacctcgagaaaaggcagtccgaatctgccaggatcagcgataagtatcccgacagaattcctgtgattgttgagaaagctggcaaaactgatgtccccgagattgataagaag

SEQ ID NO: 1136 - DNA, 230 bp, Zea mays
gcacgagtagacctggtcgagatggtgttcgccaagggtgatcctggcatcgcggcgctgtacgacaagcttctggtctcagaggatctgtgggcattaggggcgcgtctcagagccaactacgaagaaacaaagcagcttctcctgcaggtcgctgggcacaaggaccttctggagggcgacccgtacctgaagcagaggctgcgcatccgtgactcgtacaccacggc

SEQ ID NO: 1137 - DNA, 237 bp, Zea mays
gcacgagaccggaaggaacaagcttgatcagtaccaaattctcaagtacccccttaccacagaatcagcgatgaagaagattgaagataacaacactctggtcttcattgttgacctcaaggcagacaagaagaagatcaaggctgccgtcaagaagatgtatgacatccaggcaaagaaggtcaacaccttgatcaggcctgatgggaagaagaaggcttacgtgaagctgactcc

SEQ ID NO: 1138 - DNA, 226 bp, Zea mays
gcacgacggcagcagtctacccgggttcagcttgcccggcagcggcagcatgcccctcttcggcggcggctccccgggcttcagcggcttcggcggcatgcccgggtcgcccaccgccggctccgtccccgagcacgccaacaagccctgaacgccaacaagcgtggtagtagagtggtgctactgttactgtagtacgtcgtcgtcttcatgcatgcgtggttcg

SEQ ID NO: 1139 - DNA, 226 bp, Zea mays
gcacgagcctccccggcgagctcgccaagcacgccgtctccgaaggaccaaggcggttaccaagtttacatcctcttagggtgccgccgccgccgcacgttgctaaattttctcatatttaggactgtgctaggttgttcgtgcaacaatgtagaatttgttataattgctgaatgaatcagttacccctgttgaagttttctaatatattaatcttgctagtata

SEQ ID NO: 1140 - DNA, 227 bp, Zea mays
gcacgagccaagatccaggacaaggaagggatcccgccggaccagcagcggctgatctttgccgggaagcagctggaggatggccgcacccttgcggactataacatccaaaaggagtctacgcttcacctcgtgcttaggctccgcggtggcatcattgagccctcgctgcaggcgctcgctcgcaagtacaaccaggacaagatgatctgccgcaaatgctatgc

SEQ ID NO: 1141 - DNA, 131 bp, Zea mays
gcacgagggacatgatcagggaggacgacctgagcagcctgccgtacctaaaggcgtccatgaaggaagcgctgcggctgcacccaccggggcccctgctgctgccgcactactccaccgccgactgccag

SEQ ID NO: 1142 - DNA, 252 bp, Zea mays
gcacgaggctacgtctactaatggagttgaaggcgcacttgcacacccttacttggcatcacttcatgacataagtgatgagccagtctgctcaatgcccttcagcttcgacttcgagcagcatgcattatctgaagaacagatgaaggatctgatctaccaagaggctcttgcattcaacccagattaccagtagccaaagttcggttccagccgggtgattgccttcattgacatggagatttttatccc

SEQ ID NO: 1143 - DNA, 255 bp, Zea mays
gcacgaggtcaacaagcagggccagacgcggctggcgcagtactacgagcacctctccctcgacgagcgacgggccctcgagggcgagatcgtccgcaagtgcctcgcccgcactgaccagcagtgttcgtttgtggagcaccggaactacaaggtcgtttacaggcgctacgcctcccttttcttcctcgtcggcgtcgacagcgatgagaatgagttagctatccttgaattcatacatcttctggtggaaac

SEQ ID NO: 1144 - DNA, 256 bp, Zea mays
gcacgaggtgatgtcgtggaacgtgacgaggtgcgcaacggcgctggaggaggctggctccgactacgagatcgtgcccatcaacttcgccaccgccgagcacaagagccccgagcacctcgtccgcaacccgtttggtcaggttccagctctgcaggatggtgacttgtacctcttcgaatcacgagcaatctgcaagtacgctgctcgcaaaaacaagccagagctgttgagggaaggaaacctcgaggaggca

SEQ ID NO: 1145 - DNA, 257 bp, Zea mays
gcacgacgccacgcccgccgacgccgcgctcatgatgcagctcggatgctacggcgtcttcgtcggctcgggcatcttcaagagcggcgaccccgcgctccgcgcccgcgccatcgtccaggcagtcacccactacagcgaccccaccatcctggccgacgtcagcacggggctcggggaggccatggtcggcatcaacctcaacgaccccaaggtggaacgatacgccgccagatccgagtgaaccctttctttcc

SEQ ID NO: 1146 - DNA, 255 bp, Zea mays
gcacgaggcgtgccacttgacgcagcagacgcgggcgtactcggtgtcgatgctgggcagggacggcacggccgtggacgctgtcgcggtgtgccacgccgacacgtccggctggaaccccaagcacgtcgcgttccaggtgctcagggtgaagcccggcacggtgccgatctgccacttcctgccgcaggaccacgtcgtctggacccgcggcggctgagagtggtcgccgtttgcatgcactggtcatgacgc

SEQ ID NO: 1147 - DNA, 252 bp, Zea mays
gcacgagatcggagcagcactgacaaaaattctccagatatggcaagcaaaaggattcagaaggaactcatggatctccaaaaggacccaccgacatcatgcagtgcagggcctgctggagaggatctattccactggcaggccacaatcatgggtcctagtgacagcccctatgcaggcggggttttctttattaatatccattttcctcctgactacccctttaagcctccaaaagtgaacttccaaaca

SEQ ID NO: 1148 - DNA, 279 bp, Zea mays
actagtggatccccgggctgcaggcggacgtgcagattatttccttgttggcaaggacttccccagctatattgaatgccaagaaaaagttgatgaggcgtaccgagatcagaagttatggacaaggatgtctatcctcaacacggctggctcatccaagttcagcagcgataggacgattcatgagtacgccaaggatatctgggatatcagccctgccatccttcgctagaccaggtggatatcaggttctttcgcctatatttctgtgaaccctca

SEQ ID NO: 1149 - DNA, 257 bp, Zea mays
ttcgcttgtcatgaccaacattcggaagatcatgatcctcggctacatgtacttgcctaccgcgaacaataggaagatgcgcaggaacaacagggaggtggagtcaatcctgcgagagataatcgggaagaggatccaggcaaggtgggtctactgctggagacaaacatgagagacgacatggggatgacgatcgaagacgtgatcgaggagtgcaaggtgttctacttcgccgggatggagaccacgtcggtgct

SEQ ID NO: 1150 - DNA, 250 bp, Zea mays
gcacgaggactacctgatgatcaagggatgctgtgtgggtccaaagaagagggtggtgaccctccgccagtccctcctgaagcagacttcccggctggcgctggaggagatcaagctcaagttcatcgacacatcgtccaaatttgggcatggtcgcttccagactaccgatgagaagcagaggttctttggtaagctcaaggcgtaaggtgctgcggtgcagcgacaagtcccatttgtcaaaatcatc

SEQ ID NO: 1151 - DNA, 245 bp, Zea mays
gcacgagctcacccgccgcagccaaaccctctccagcagccgtcgtcgccaccgctgcagcgcggaggcgacccccatcgccgccaagatgcagatcttcgtgaagaccctgacggggaaaaccatcacgttggaggtggagtcctcggacaccatcgacaacgtgaaggccaagatacaggacaaggagggcatcccgccggaccagcagcggctcatcttcgccggcaagcagctcgacgacg

SEQ ID NO: 1152 - DNA, 244 bp, Zea mays
gcacgagagcagtttcagccctgtaggtgggagggcacaagccaagggacaagcaagaggtttacaccgttcggtggtggcccccggctctgcccaggatcagagctcgctaaagtggagactgctttcttcctccatcaccttgtcctcaattatagatggagaattgatggcgatgacattccaatggcatacccgtatgtggagtttcagagaggtctgccaatagaaatcgagccaacgt

SEQ ID NO: 1153 - DNA, 244 bp, Zea mays
gcacgagaggacacctttctaccaggcattcctaaagctagcaaagtccatatggttgctgcacaggttggcgcactcctttgatccaaaggcaaaggtgtttcaagtgaaaaagggaagtgaattttcggatatccacatggagagcgtcgtgaaggacatcatcctagaagatgtcgcggagaggccgaaagttggcctgatggtgacgcctggtttcctgatcgggaccagtatcatacag

SEQ ID NO: 1154 - DNA, 244 bp, Zea mays
gcacgagccgagaagcgcctcccggcgggcaagtccaaggagggcggcgagggcaagaaggggaaaaagaaggcgaagaagtccgtggagacctacaagatctacatcttcaaggtgctgaagcaggtgcaccccgacatcggcatctcgtccaaggccatgtccatcatgaactccttcatcaacgacatcttcgagaagctcgcggccgagtccgccaagctggcgcgctacaacaagaagc

SEQ ID NO: 1155 - DNA, 240 bp, Zea mays
gcacgaggtctgagtggtagtggcccggcctatatcttcctagcaatagaggccatggctgatggtggagttgctgctgggcttcctcgggaccttgcccttggtcttgcatctcaaacagttcttggtgctgcaactatcgtgagccagacaggcaaacatccagggcaactgaaagatcaggttacttctccagcaggtactaccattgccgggattcaggagctcgagaagggcgca

SEQ ID NO: 1156 - DNA, 239 bp, Zea mays
gcacgagccttgttgatggccctcatgacattgatcgctgcgcttacgtcactgagacagtccttgctcgcccgcgttcaaggttctcaacgagcaccatgtcctcctggagggtaccctcctgaagcccaacatggtgactcctggctccgactctaagaaggtgacacctgaggtgatcgcccagtacaccgtccgtaccctccagaggaccgtccctgctgctgtgcctgctgttg

SEQ ID NO: 1157 - DNA, 239 bp, Zea mays
gcacgagggcataccctgattacgcattggatatgggattaattacaaaaacacaatttaacagggatcaggttttagatttccaacttggtgaattcgcggtcaagctttgtggtacttctggaactgtatcttgccttgctgcgtactttgtctgcaatacaatattcagtgccatcaggacaatcataggcaataaaaattattacgacatcaggaaaccatgcatcggaagccta

SEQ ID NO: 1158 - DNA, 236 bp, Zea mays
gcacgagacccgccgcagccaaaccctctccagcagccgtcgtcgccaccgctgcagcgcggaggcgagctgtatcgtctccaggatgcagatcttcgtgaagaccctgacggggaaaaccatcacgttggaggtggagtcctcggacaccatcgacaacgtgaaggccaagatacaggacaaggagggcatcccgccggaacagcagcggctcatcttcgccggcaagcagctcg

SEQ ID NO: 1159 - DNA, 234 bp, Zea mays
gcacgagtcaacttgtaatggaagggttcaattggtgccaggataagaacgttgtgacagtgttcagcgtgtctcattagtgctaccgatgcgggaacatggctgcgatcctcgaaattggcgagaacatggatcagaacttcctccaattcgacccagctccgcggcagattgagccggacatgacgcgcaagaccccagactactttttgtaatcagcatgctggctttctt

SEQ ID NO: 1160 - DNA, 235 bp, Zea mays
  unsure (1)..(235): unsure at all n locations
gcacgagccaggctctcggtgaggaagaccaaggcagagaaggacccaaacaagcccaagaggcctccggttncggtttgcgtcttcatggaggagttcaggaaggactacaaggagaagcaccccaatgtgaagcaagtctccgtgattggcaaggctggtggtgacaagtggaagtccctgtctgatgccgagaaggctccctacgtgtctaaggcagagaagctcaaggctg

SEQ ID NO: 1161 - DNA, 234 bp, Zea mays
gcacgagagtgtctcgagtttcctcggagcggaggcgatggctggcaagggagggaaaggcttgctcggcgtgtagggtttgggcggccaagtccgccgagaaggacaaggggaagaaggccccaatctcacgctcctcccgcgccggcctccagttccctgttgggcgtatccaccgtcagctgaagcaaaggactcaggcaaatggtcgcgttggtgccaccgcagccgtct

SEQ ID NO: 1162 - DNA, 172 bp, Zea mays
  unsure (1)..(172): unsure at all n locations
gcacgagagcagacgagcctgaacattcggagacatcgtgaaataagagcgtcgctgatctgtgatcagcgtantcgtcagtgatgcacctgtagcaaccgatggactgaactgtgctggattatgctgttggatcacctgagtatgtgttacatgtcggttttgatgtgac

SEQ ID NO: 1163 - DNA, 236 bp, Zea mays
gcacgagactggacttcccattgataggtttcaaactgctaaagatttgaaatttacagctccaatgagggatagcgttgctgcagtatcagaccgtgattttgtacttgagtttcttgctgccaattcgattgctgctgtccatctttcgcgaattggtgaagaatgggttctttgggcatcagaggaatttgggtttctgataccaagtgacaaagtttcaactggaagcagca

SEQ ID NO: 1164 - DNA, 233 bp, Zea mays
gcacgaggtacaggaagcagcacaagaaggatatccatgctgaagcggtaaagaagaggcgccgcgggtttaagttgtcatactccaggtcaattgtgggtgcttccttggaagtaatccagaagaagagagctgagaagccagaggtccgcgatgctgctagagaagctgctcttcgtgagatcaaggagcgcatcaagaagaccaaggatgagaagaaagcgaagaaggcg

SEQ ID NO: 1165 - DNA, 232 bp, Zea mays
  unsure (1)..(232): unsure at all n locations
gcacgaggtgcacctgaggtgcgcgcacgggcagtccatctccgcgatcagattcgcgagcttcgggtcnccggtgtggcacctgcggcaacttccagcagggaggctgccactcggctagctctcacgctgtgctagagaagagatgcattgggctccagagatgcgtcgtcgccatctcccccgacaacttcggaggagacccctgcccgagcgtgacgaagagggtggc

SEQ ID NO: 1166 - DNA, 263 bp, Zea mays
gcacgagctcgtgcagagtcagagaaaacaaccgctagtgataaaaatgaaacattacttgaagaattagaaatcaaacgaaaagaagtcgagactttgaaacatcatcttgtagaagctgaggcaaagtctaaagcagataagaaagttcttgtaaaagaggtcaagtctcttagaaactcccaaacagagatgaagaaagtgttgaatcagtatcttgaacagaagactggtttagagagagttattattagagataaaca

SEQ ID NO: 1167 - DNA, 258 bp, Zea mays
gcacgagccggggtctaagctcccttgtcgacgtcgccggagggcttggcgcggcggcactggctatctcgaccgcgttcccgcatgtccagtgcagtgtcctggatctcccgcatgtcgccgccaatgctcccgctaacaccagtgtcaagtatattgctggcgacatgtttgagagcattccaccggcagacgccgtcttccttaagtgggttttgcatgactggggcgatgctgattgtatcaagatactcaaga

SEQ ID NO: 1168 - DNA, 178 bp, Zea mays
gctagtctatgtttgttaccattgaaggcttgttcggttagctctcaatccatgtggattgagcgggattggatgggtttgaatcccaaacagctcaaacttcttcacaattttttccaatcccatccaatccatgtgtattgggaataaccgaacaagccctgatgatgattgtgtt

SEQ ID NO: 1169 - DNA, 207 bp, Zea mays
gcacgagctggagcaacgtagttgctgcctatgaaccagtttgggctattggaactggtaaagttgccaccccagctcaggctcaggaagtgcacgcctccctgagggattggctaaagaccaatgccagccctgaggttgctgaatctactaggatcatctacggaggctctgtaactgctgcgaactgcaaagagctagcagcac

SEQ ID NO: 1170 - DNA, 257 bp, Zea mays
gcacgaggagcttgagaagctaaagcacaagaagaagcggctagtccagtcccccaactccttcttcatggatgtcaagtgccagggctgtttcagcataaccactgtgttcagccactcccagactgtggttgtgtgcccaggctgccaaactgttctgtggcaacctaccggtgggaaggccaggctcaccgaggggtgctccttccgtcgcaagggcgattaggtcctgcttctcttaacgtgagaagagataa

SEQ ID NO: 1171 - DNA, 260 bp, Zea mays
gcacgagcgcatttcctcccaatccatcccgcctccaaacccgaactccaagtcgccccgcatcgatggcgcccaaggccgagaagaagcccgcggcgaagaagccggcggaggaggagcccgctgccgagaaggcgccggccgggaagaagcccaaggcggagaagcgtgtcccagcaggcaagtccgccggcaaggttggcggcgagggaaagatgggccggaagaagggcaagaagagcgtggagacctacaagatc

SEQ ID NO: 1172 - DNA, 180 bp, Zea mays
gcacgagacaaggaccaaaaggcgggccactgatgcccgaaatcttgactccaacaagcgcaataatgggcgctggtcttggaaaggagtgcgccctgctgacagatggtagattttctggagggtcacatggatttgtcgtcggtcacatatgccctgaagcacaggaaggtggtccaa

SEQ ID NO: 1173 - DNA, 256 bp, Zea mays
gcacgagcctccacgaggacgttcaaacccaggtcgcactcctcgaatcgatggaaaggagttctttcgtcaggccaggagtcgtctatcctacgagcaatttggagcattcttagccaacatcaaagagctcaatgcccataagcagtcacgtgaggaaactctcaagaaagccgaagagatctttggtccagacaataaagatctgtacctgtctttccaaggcctgctgaaccgtagcatggtggcataaggc

SEQ ID NO: 1174 - DNA, 252 bp, Zea mays
gcacgagctggagaggaacaggaacgacaaggactccaaattcagactcattcttgttgagagcaggatccaccgccttgcccgctactacaagcgtaccaagaagctcccacccacctggaagtacgagtcaaccacggcgagcactctggtggcctaagtgatatcctctgatggcttggtctttagcacctatgagcttgttctagatatgaatttatgtaattcttgttatgtctggagctggttaga

SEQ ID NO: 1175 - DNA, 252 bp, Zea mays
gcacgagccgtccacgagctgcatatctgggccatcacagtggggaaggtgctactggcttgccatgtgacggtcgccagggaagccgacgcagacgagatccttgacaaggtgattgggtacatcaagacggagtacaacatcagccatgtgaccattcaggtcgagcgtgaatagagggggagctgtcttttgggctgtcagggcataaatggcgtcacgccttcactggttatcttactctgtcggtta

SEQ ID NO: 1176 - DNA, 253 bp, Zea mays
gcacgagggcaaaggtaagacgcctggcaagggcggcaaccgattctggaagagcattggccttggcttcaagactcccagggaagcaattgaagggacctacattgacaagaaatgcccattcactggaactgtttctatcagaggcagaattattgctgggacatgccacagtgctaagatgaacagaactatcattgttcgcaggaactacctccactttgtaaagaaataccagaggtatgagaagagg

SEQ ID NO: 1177 - DNA, 249 bp, Zea mays
gcacgagaacaaatggtgatgccaggccatcgtgagtcgaacttgcagaaggaacttaaccgatacatccccactgctgctgcatttggtggtgtatgcattggcgcattgaccgtcctggctgatttcatgggtgcgattggttcaggaactggtatattgctcgctgtgacaatcatataccaatacttcgaaacctttgagaaggaaagggcgactgagcttggtttctttggtttttgattagta

SEQ ID NO: 1178 - DNA, 251 bp, Zea mays
ttcggcacgagaggacatccagctcgcgcgccgcatcaggggcgagagggcttgatctcccgttgtcgtcgtccacgttgttgggcctttcctctgtgtctctgcttgtagaatccttgcttctgttcggttccttctgttcgcatgatggtgttcgtagtgttaggagttgcattttctaatctgcttgttcttgcaccggtgcctctgaagtggcgtttccctctatcttaatggaaatggaatgtgct

SEQ ID NO: 1179 - DNA, 245 bp, Zea mays
gcacgagaagcaagatctttgcccgtccttgagtgttcgccaaatctatagaatatgctcgatgtattgggatgacaaatacggtacccaaggcatttcaaccgaggtggttgctgcaatgcgggagatggtcaacaaagatacccagaatcttgtgtcaaattccttcttgttggatgatgacttaagtataccattctctaccgaggatctatcaatggcaatcccgtcaatagattatgctg

SEQ ID NO: 1180 - DNA, 175 bp, Zea mays
  unsure (1)..(175): unsure at all n locations
atcgagatgttctacgccctgaagtaccgtancctggcaagccaggttccgctgtccttcgattagtacggggannnnnnnnnnnnnnnnnncccaggccggagaaccatcgcctgcatttcgatctgtttcaccgcaattcgcattgttagtcgtgtattggagttatgtgtac

SEQ ID NO: 1181 - DNA, 229 bp, Zea mays
gcacgaggacggatctggaggtcaacctcctccaggacagcctcaccaagatccgcaccgccgccacccgactcgagaacgcctccgccgcgctccaggacctatccctccgcccccaagggaagaagatgctcgtgccgcttacggcgtccctctacgttcccggttcactggacgacgcggagaaggtcctcgtcgatgtcggcaccggttacttcatcgagaaaac

SEQ ID NO: 1182 - DNA, 235 bp, Zea mays
ccttgcaccaagcagcatgcagatcaaggtcgtcgcgccacctgagaggaagtacagtgtctggataggagggtcgatcctagcctcgctcagcactttccaacagatgtggatatcaaaggaggagtacgatgagtctggcccggcaattgttcacaggaagtgcttctaggtttctgccaagttcgtcaagtgcttttagggttcgccatgttcatcatcgctacctagtctt

SEQ ID NO: 1183 - DNA, 229 bp, Zea mays
gcacgaggcctgcctctcctcctccagagctcgtcgccaccggccaccgccaccctcgatcacgccgtccgtcgaggtaaggtcagcatggtgagggtcagtgtgctcaacgatgcgctcaagtccatgtacaacgctgagaagatcggcaagaggcaggtcatgatcaggccgtcgtccaaggtcatcatcaagttcctgacggtcatgcagcgccacggctacattg

SEQ ID NO: 1184 - DNA, 228 bp, Zea mays
gcacgaggagctcgccggcaacgcggcaagggacaacaagaagacgcgcatcatcccgcgccacgtgctcctcgccatccgcaacgacgaggagctcggcaagctgctggccggcgtcaccatcgcccacggcggcgtcctccccaacatccacactgtgctcctccccaagaaggtggccgagaaggcggccaaggagcccaagaaggccgctaagtcccccaagaa

SEQ ID NO: 1185 - DNA, 224 bp, Zea mays
gcacgagcggaacgacgaggagcttgggaagctgttgggcggcgtgactatcgctcacggcggtgtgctccccaatatcaaccctgttctgctgcccaagaagacggcggagaaggcgtccagtgtggggagcaaggaggcaaagtcgcccaagaaggccgccaagtcccccaagaaggcatagactgactgtctggagtgatctgatgtttagcaggaccttg

SEQ ID NO: 1186 - DNA, 225 bp, Zea mays
gcacgagaagagaagcaaccatatgtggaccaagctggacagaagaagcaggactatgagaagactaaggcaaactttgataagaaggagagcacaagctcaaagaaggctaagactgaggatgaggatggctcgaagtcagaggttgatgacgaggatggcagcagtgacgaggaaaacgatgacgatgagtaaacagtctccaaggtcacgaggtagcaaatc

SEQ ID NO: 1187 - DNA, 228 bp, Zea mays
gcacgagttaacgccgtcgcggactgctccgcgcccccgacgccggtgattaggagcaggagcaagaggggttcggaatggccaagtctaagaaccacacggcgcataaccagtcgttcaaggcgcacaagaacggcatcaagaagcccaagcgccaccgccagacctccaccaaggggatggaccccaagtttctgaggaacttgaggtactcaaggaagggcaata

SEQ ID NO: 1188 - DNA, 223 bp, Zea mays
gcacgagcagcggatggacctgtgccgcaagtacgcctttggcaagatgctcgtggtaggttctgagccacccttcaagctgaagggcctttggctcttccgtggccaggaggttcccaagtttgtaatggatgaggtctatgacatggagctctacgagtggaccaaggtggacatctctgatgaggcccagaaggagcgtgtcaatgccatgatcgaggac

SEQ ID NO: 1189 - DNA, 220 bp, Zea mays
gcacgaggaaattgctatgtgaaaagaagctgtgtgagtgcatccatgtgggcacgatagcaaccatcctggcgctcgctgagcaacaccgctgccatgcactgaagaaggtctgcttccattttctcagctctcctgcaaatttgagggcagtcgccgccactgacggctttgagcatctgagcagaagctgcccctctgttatggaggagttggttgt

SEQ ID NO: 1190 - DNA, 222 bp, Zea mays
gcacgagggcaacgccggccgcatgcaccaccaccgcatcctcttcgataagtaccacccgggctacttcggcaaggtgggcatgcgctacttccacaggctccgcaacaagttccactgcccgtcggtcaacgtggagcggctctggtcgatggtgcccgccggcaaggccgcggaggcggccggcgcggaccaggccccgctcgtcgacgtgacgcagtt

SEQ ID NO: 1191 - DNA, 250 bp, Zea mays
gcacgagcgcgcccagagccaaatttttctccactcaatcactgcagccatggacgccagcggagccggtagcaaggcgaagaagggggcggctgggcgcaaggctggcggccccaggaagaagtcggtgtcgcggtccgtcaaggccgggctgcagttccccgtcggccggatcgggcgctacctcaagaagggccggtacgcgcacgcgtgaggcaccggcgcccccgtctatctcgccgccgtgctt

SEQ ID NO: 1192 - DNA, 245 bp, Zea mays
gcacgagcgccaacaagcgtggtagtagagtggtgctactgttactgtagtacgtcgtcgtcttcatgcatgcgtggttcgtggtttcccctagctccatacgagcagtagttgggccttgcacgtaccgtacgtctagctagctatatatatatagcttgtgttctactgccttttagtttaattacctgcctgcattggagagttggatctgtttcatttggtggtgtttgctttactattag

SEQ ID NO: 1193 - DNA, 252 bp, Zea mays
ttcggcacgaggagatccgcaagtaccagaagagcacggagctgctgatccgcaagctgccgttccagcgcctggtgcgggagatcgcgcaggacttcaagaccgacctacgcttccagagctctgctgtctccgcgctgcaggaggcggctgaggcctaccttgtcgggctcttcgaggacaccaacctctgcgccatccacgccaagcgcgtcaccatcatgcccaaggacatccagcttgcccgccgca

SEQ ID NO: 1194 - DNA, 242 bp, Zea mays
gcacgagccgcatcctcaaggcccatgggctggcaccagaaatccccgaggacctgtacttcctcatcaagaaggcggtggcgataaggaagcaccttgagaggaacaggaaggacaaagactctaaattcaggctcattcttgtggagagcaggatccaccgccttgcccgctactacaagcgcacaaagaagcttccacccacctggaagtatgagtcaaccacagcgagcactctggtg

SEQ ID NO: 1195 - DNA, 247 bp, Zea mays
gcacgagaaggagggcctgaagctggacgagagtgaggatgagaagaagcgcaaggaggagctcaaggagaagtttgagggcctctgcaaggtcatcaaggaggtgctgggcgacaaggtggagaaggtggtggtctccgaccgcgtggtggactccccctgctgcctggtgaccggcgagtacggttggaccgccaacatggagcggatcatgaaagcccaggcgctgagggactccagcatgtct

SEQ ID NO: 1196 - DNA, 245 bp, Zea mays
gcatgagaaccatgccacagtgaagacttccactggggagaagcctgttcgtgagcttgtctctgatgacgagtggcttaatggtgaattcatcacaactgtccaacagcgtggtgctgcaatcattaaagcgagaaagttctccagtgctctctcggctgctagctctgcttgtgaccacattcgtgattgggttcttggaacacctgagggtacatttgtttccatgggtgtgtactctgatg

SEQ ID NO: 1197 - DNA, 244 bp, Zea mays
caggacgaccgcggcaccggccagtcgtggacgccgaccaacgtcaccgcgcccctggacgccgccatcgtggggttccgcgacctctgcctgcaggcggactacgcggggtccgtatccgtcgctgcctgccgcgacggcgtgcagtggtcgctctaccccgacggctccgtacgcccgcccgcgtggctcctccttcaatggcagtgcctggctgctgatgccagcgggggtgtgacggtga

SEQ ID NO: 1198 - DNA, 242 bp, Zea mays
gcacgaggttcagcaaaagaaatccctaatgacaagcctgccgtcactaagcctagtccctatgaagaactgattggagacatcaaggctagcctaggaagtgctccgacccctacccagctcaaggctgtgctggcctcatcaacccttcctccccaggacgtgatgaatgctctcctggaggctctctttggtggtgtgggtaagggattcaccaaagaggttgtgaagaacaagaagta

SEQ ID NO: 1199 - DNA, 244 bp, Zea mays
gcacgagaatctccccagcaatccctagcagaagccttccatcctcactcgctcgatggcccgcacgaagcagacggcgaggaagtccaccggcggcaaggcgccgaggaagcagctggcgactaaggcggcccgcaagtctgcccctgcgaccggcggagtgaagaagccccaccgcttccgccccggcaccgtcgcgctccgggagatccgcaagtaccagaagagcacggagctgctgatc

SEQ ID NO: 1200 - DNA, 241 bp, Zea mays
gcacgaggcgagacggagcagaacggcaagggctacttcgaggaccgccggccggcgtccaacatggacccctacgtggtcacctccatgatcgccgagaccaccatcgtctggaagccctgaggcaccccgtggccgtgtcgtgtcggtttgctccgcgtacggcgctggccgttgcatcgcagggcccagcggttgcgcaactattttcccttccccgttctgtttgcttgtactatta

SEQ ID NO: 1201 - DNA, 249 bp, Zea mays
taaaaattgtggaagtagggccacgagatggtctacagaacgagaaggacatcgtgccaacacctgtaaaggttgagcttatacgaagattggccacatctggattacctgttgtggaggcaacgagttttgtatctccaaaatgggtacctcagttagctgatgcgaaggatgttatggaagcagttcggactatggggggtgtacgttttcctgtattgactccaaaccttaagggatttgaggcag

SEQ ID NO: 1202 - DNA, 243 bp, Zea mays
gcacgagttaacgccgtcgcggagctgctccgcgcccccgacgccggtgattaggagcaggagcaagaggggttcggaatggccaagtctaagaaccacacggcgcataaccagtcgttcaaggcgcacaagaacggcatcaagaagcccaagcgccaccgccagacatccaccaaggggatggaccccaagtttctgaggaacttgaggtactcaaggaagggcaataagaagagttgtgag

SEQ ID NO: 1203 - DNA, 248 bp, Zea mays
ctctggcatactttcttgctagggacacgattgatcatttcagtacggttgtgaagcccatcatttacctgtctatgttctactacttcaataacccaagatcaacgattgccgacaactacatcgtgctcctcgcgcttgtgtattgtgtgacggggatcggatacactttcgctatctgcttcagtcctggctcagcgcagctgtgttctgcacttgtaccggttgttctgaccctgttagccact

SEQ ID NO: 1204 - DNA, 240 bp, Zea mays
ttcggcacgagagcaagcaaaaattccccaatcctctcgtctccgcggcgaagatgtcggggcgcggcaagggcggcaagggcctgggcaagggcggcgcgaagtcaccggaaggtgctgcgcgacaacatccaggggatcacgaagccggcgatccggaggctggcgcggcggggcggcgtgaagcgcatctcggggctcatctacgaggagacccgcggcgtgctcaagatcttcctg

SEQ ID NO: 1205 - DNA, 236 bp, Zea mays
gcacgagcaagcagggatacacccagttcggaggcctccgccccttcggggtctccttcctattcgccgggtgggacaagcaccacggcttccagctctacatgagcgacccatccgggaactacggcgggtggaaggccgccgctgttggggccaacagccaggccgcgcagtccatgctcaagcaggactacaaggacggcttgacccgcgatgaggccgtcgccctcgcgctt

SEQ ID NO: 1206 - DNA, 235 bp, Zea mays
gcacgaggacagctgatgtcactggaagggttgagctgcttggggagatgaagatggttttgcccggtgacaatgtaactgcgaattttgagttgatatcacctgttcctcttgaacctgggcaaagatttgcgattagggaaggaggaagaacggtcggtgctggagtcgtctccaaagttcttagctgatcagtttccactttcttctccgtagcaattcagtgaacaaacga

SEQ ID NO: 1207 - DNA, 237 bp, Zea mays
gcacgagcggcagatgtcaggcaggggcaagggcggcaaggggctcgggaagggcggcgcgaagtcaccggaaggtgctgcgcgacaacatccaggggatcacgaagccggcgatccggaggctggcgaggaggggtggcgtgaagcgcatctccgggctgatctacgaggagacccgcggcgtgctcaagatctttctcgagaatgtcatccgcgacgctgtgacctacacggagc

SEQ ID NO: 1208 - DNA, 255 bp, Zea mays
gcacgagaagtacgggtggagcgccaacatggagaagatcatgcaggcgcagaccctgtcggactcgagcaagcaggcgtacatgcgcggcaagagggtgctcgagatcaaccccaggcaccccatcatcaaggagctccgcgacaaggtcgcccaggacaacgagagcgaggagctgaagcacacggcgaggctggtgtaccagacggccctgatggagagcgggttcaacctccccgaccccaaggagttcgc

SEQ ID NO: 1209 - DNA, 205 bp, Zea mays
gcacgaggagaaagtctcagtttttttttttttttttttgtaccaacaaaatagtgaacatccaggtaacttgaggtaacaaattcatagtgggagatagaaaaactctggttcaccagtaaaccccaaccagcacagcaacctacgcctagaattaccacaggaaaagtctttcaagtactttccaacataaaacaaagttaaa

SEQ ID NO: 1210 - DNA, 256 bp, Zea mays
gcacgagagtcactcccgggccgccgccgccgccgcctccgcgaaaaaccctagcaggcttcgccgctatcactccaaggggcgcgaccatggtggccacaaagaagacgaagaaatccacggacaacatcaataacaagctgcagcttgttatgaagagtggcaagtacactctcggctacaagaccgtcctcaggactctcaggaactctaagtcgaagctagtgatcatcgctaacaactgcccgccccttcg

SEQ ID NO: 1211 - DNA, 167 bp, Zea mays
gcacgagggatcatcgtattgtattgtagtgtatgtatatcgtcggcctaccatcgttgccattcaccatagtgaggtggttggacatgtttcgcctatatgcacctgtgcttgccgtccttcgggtcggtgctctttggttaatgttcatcgaagacgttgatttc

SEQ ID NO: 1212 - DNA, 261 bp, Zea mays
tatgactgcaacaacatggtggagcaggagctgcctggaggcgggctcctcgtgtaccagagcttctgtgctgctgaagacgctgttgctacctcgcccaaatctgttttccactgctttgacggcgagaacgtggagagtgctcctcctcctatgaagaaggactacaagctggctaatcttctctgctgggaggaggaagcggatgccatggaggagaaggcgggagtgcttgatgagtaagacgggcttctggggtcg

SEQ ID NO: 1213 - DNA, 258 bp, Zea mays
tttggtcgatgaccttcctttgtcaattgtcatacatttatttgatcataccatgttatcgctttaagatttttgtatgtagctgctgatcatccctttgaggctttgtttggtactctagtattgactctaatcctcaatacatgtggattttggtcaatactagagtacccaaactaggtctgatagagattccatggtgtttcctctcctgtttgtttgtctagacttggactggtgttgaatatatagattata

SEQ ID NO: 1214 - DNA, 261 bp, Zea mays
cgccgcctccgacatcgtcccttcgtccccacgagcaaccgataatccgccggcgttgagatgttggtttatcaggatctcctatctggcgacgagctcctgtcggattcattcacctacaaggagctcgagaacggcgtcctgtgggaggtcgagggaaagtgggtcacccaaggtcctgttgatgtggacattggtgccaatccatccgccgagggtggtgaggacgaaagcgttgatgacacagctgtgaaggtggtt

SEQ ID NO: 1215 - DNA, 250 bp, Zea mays
gcacgagctacactgacactgcaaacttcactctgcgctgcggggtgtgccagatcggcgtcatcggtcaacaggaggctgtggaacatgcgcaaccactggccacgtcaacttccaagaatacaaatgacagtacaagatcagactgttgtgctgtaaacttgaccatcatttggttccaactgatattctcctcccgttggatatggttggcgctacattgtatcacagtgtaattcttacggggcaa

SEQ ID NO: 1216 - DNA, 249 bp, Zea mays
gcacgagcgataacccaagtatggggcgactcaaaccttgtcttggctgcatgtggtatggggctgttcgcctttgacacgtttaaggaagacacgcagccaacctacagctttgaccgtggaaacaccattgcagcgagagaagctattggccctgatgatctgtactgtcctacatttgactactcatcatcaagggttcttctcgtctcaagagaccgcccggcacattggaggtacttgtaggct

SEQ ID NO: 1217 - DNA, 248 bp, Zea mays
gcacgagcactttcggttatctggatggaaagttaatataagggcaaaaccaattgttctggacccagggctctatctgtccaagaaatttgatcttactatgactactgagcggagagaattgccaacatctttcaaattatatactggttctgcttggataatgcttacgaagtccttccttgagtactgtatatggggctgggataatctcccacggaaccttctgatgtactatgtcaacttca

SEQ ID NO: 1218 - DNA, 253 bp, Zea mays
gcacgagctttcccaaatccaccgccggctcggctcgcccatcttcgcgccaagcaccgaatctccgatggcccgcacgaagcagacggcgcgcaagtcgacgggcggcaaggcgccccgcaagcagctggccaccaaggcggcgcgcaagtcggcgccggcaaccggtggcgtgaagaagcctcaccgcttccgccccggcaccgtcgcgctccgggagattcgcaagtaccagaagagcacggagctgctc

SEQ ID NO: 1219 - DNA, 248 bp, Zea mays
gcacgagggcaagcaaccacgggcggactcggagcgtcctcctcctcccgtctataaattcccctccttttcttcctccatatataggggccatcagatccaagaagagggaagagcaccaaggaccttcggcgcccgttcaggatccacatcttcccgagcgagttcttggttgacctcttcctcttcggaccacctccaaggctcttggtgtagcttgccactctcaccaatcaagttttcatgtc

SEQ ID NO: 1220 - DNA, 249 bp, Zea mays
gcacgagatcctcccgctgacgggcgagcagtacgcggagaaagtgacggagaactgcgtggcgttctggaaggccgccggcctgtacacggacgccgagggcgtcgccgtggagaagttcagggaggtgttcaagccagagactttcgcgccgggcgcctccatcctcttcacggactcgcccgccggagtcctcaccgtcgccttctccaaggactcgtcggtgccagcgtcctgcggcgtggcgat

SEQ ID NO: 1221 - DNA, 244 bp, Zea mays
gcacgagccacgtcgaggactccatgggccaccagttcgccacccgcatgggcaacgtgttcaccatcggcaagggcaacaagccgtgggtgagcctgcccaagggcaagggtatcaagctcagcatcatcgacgagcagaggaggcgcgactttgctgcccaggctgctgccaaggcataagttctctgaatgtgctgcttggagctttttgctatgtctagtttaatttttatctgcaagga

SEQ ID NO: 1222 - DNA, 245 bp, Zea mays
gcacgaggcagcagcacacagccccatcccaatcctagtcgatcttcttcccctcctcaaggaagaaaagaagctgaaccatggggaagagaaagtcagctgctaagccacctcctaagaagcggatggacaagcttgacactgtcttttcctgcccattctgcaaccacgggagtagtgttgagtgccgaattgacatgaagaatctgattggcgaagatcttgtacaatctgtcaggaaaact

SEQ ID NO: 1223 - DNA, 252 bp, Zea mays
caaaatctacatcttcaaggtcctgaagcaggtgcaccccgacatcggcatctcctccaaggccatgtccatcatgaactccttcatcaacgacatattcgagaagctcgccggcgaggccgccaagctcgcgcggtacaacaagaagcccaccatcacctcccgcgagatccagacctccgtgcgcctcgtcctcccaggagagctcgccaaacatgccgtctccgagggaaccaaggccgtcaccaagtt

SEQ ID NO: 1224 - DNA, 244 bp, Zea mays
gcacgaggctcacgctcttaacttgatctccagaaagggatacagcgaggctcaattgaaggaatgcttggaggaatacgcttccctgaatgtgtggcagatccatccaagcacatttgacatccacttcattgatgcctgatgcagaagccgatgccgatcacctaacatttcatcatgatccaaggatttgaagaccttcgactgaagcctaacaagatttaaaagttttctagtgatagtg

SEQ ID NO: 1225 - DNA, 241 bp, Zea mays
gcacgagccacgtcgaggactccacgggccaccagttcgccacccgcatgggcaacgtgttcaccatcggcaagggcaacaagccgtgggtgagcctgcccaagggcaagggtatcaagctcagcatcatcgaggagcagaggaggcgcgactttgctgcccaggctgctgccaaggcataagttctctgaatgtgctgcttggagctttttgctatgtctagtttaatttttatctgcaa

SEQ ID NO: 1226 - DNA, 257 bp, Zea mays
gcacgagtgaagacggactggtcgcacgcgccgttcgaggccacgttccgggaggtgcgcgtggacgggtgcgcctgggcgggcaacgccacggacggcgacgccgcggaggcgcgccggtgcagcgagtcctcgtggggcaaggagggccgctactggtggaaggagaaggagatgtcggagccgagcgtgcaccagagccaccagctcgtgtgggcgcgcgcgcaccacctcgtctacgactactgcgtcgacac

SEQ ID NO: 1227 - DNA, 264 bp, Zea mays
tttttacgagaaatttgatccagatttcattgatattaggacaaaagcacgtgaggtgttgcagagggaggacgatctgaatgacattgtgcagcttgttggtaaagatgcgctggcagaatctgacaagattacgctggagacagcaaagcttttgagagaagattatttggcacaaaatgcattcaccccatatgataagttctgcccattctacaaatccgtttggatgatgcgcaacattattcacttcaacacattggc

SEQ ID NO: 1228 - DNA, 258 bp, Zea mays
gcacgagctcaggagcatcatctggtgttgggttttccattccagttgacacagtcgggggcattgtggaccaactcataaaatttggcagggtgacaagacctattctgggaataaaatttgccccagatcaatccgtagagcagcttgggttgagtggagtgcttgtcttggatgctcctccaaacggaccagctggcaaagcgggtctgcaagcaaccaaacgagatccctatggccggcttatcctgggcgata

SEQ ID NO: 1229 - DNA, 153 bp, Zea mays
gcacgaggctcactgtgcagctgaagaagctcgctgccgccggcaagctgacgagggtgaagaactccttcaagctgccggccaccgacgccaagcccaaggccgccaagcccaaggcacccaaggccgcgcccaagcccaagccctcgccga

SEQ ID NO: 1230 - DNA, 260 bp, Zea mays
gcacgagggaagaagggcaagaagagcgtggagacctacaagatctacatcttcaaggtgctgaagcaggtgcacccggacatcggcatctcctctaaggccatgtccatcatgaactccttcatcaacgacatcttcgagaagctcgccgccgaggccgccaagctcgcgcggtacaacaagaagcccaccatcacctcccgtgagatccagacctccgtgcgcctcgtcctccccggggagctcgccaagcacgccgt

SEQ ID NO: 1231 - DNA, 283 bp, Zea mays
actagtggcccccccgggctgcaggcgtcgccccccctcccccctgtcagcataccgtcagtgcccctgccgccggtgaccctccctcccattccgatcgttgggggaagcccgagcccgacgaagaagggacaccggaaggcgtgcccaccgcctccgtctcccccgacgccgacacccacgcccacgccgtcctcggacaagtgccccatcgacgcgctcaagctcggcgcctgcgtggacgttctcgggaacgaggtgcacgtcggcgacgccaacgtcc

SEQ ID NO: 1232 - DNA, 258 bp, Zea mays
ccggacttcatcgccgctaaccagggctctcgtgccaacaatgtcatcaagggcaccaagaaagaacaggtggagcagatcatcaaagatatcagggagtttaaggagaagaacaaagtggacaaggtagttgtgctgtggactgcaaacactgaaaggtacagcaatgtatgtgctggtctcaacgacacaatggagaatctgctggcatctgtggacaagaacgaggcggagatctcgccatcaacactatatgcc

SEQ ID NO: 1233 - DNA, 257 bp, Zea mays
aaaaaaaaaaaaaaactcgagactagttctctctctctcctcgcattttccttgcaaccgattgcctatccccctcccaacccaagaccgatggcgcccaaggccgagaagaagcccgcggcgaagaagccggcggaggaggagcccgcggcggagaagacgaccgccgggaagaagcccaaggcggagaagcgggtccccgcgggcaagtccgccggcaaggtgggcggcgagggcaagcgtggcaagaagaaggg

SEQ ID NO: 1234 - DNA, 252 bp, Zea mays
gcacgagggaccgcatttggaaagaggattgcacagcatggttcctttttatcagatcttgcaaagtgtcggattgaactggagcaggcaaggcttttagtccttgaagctgccgatcaactcgatcgacatgggaacaagaaagcacgtggtatcctcgcgatggccaaggttgcagctccaaatatggccctgaaggtgcttgacatggcgatgcaagttcacggcgcagctggtgtctcgtctgacacg

SEQ ID NO: 1235 - DNA, 253 bp, Zea mays
gcacgaggccgtcccagttcgcttcgcgtcaccgagagctcgtcggcctccgtccccgcgagaagcgagagcatggacacccaagtgaagcttgctgttgtggtaaaggtgatgggcaggaccggctccaggggtcaggtgacccaggtcagagtgaagttcttggatgaccagaaccgtctcatcatgaggaacgtcaagggccctgttcgtgagggtgacatcctgaccctgctcgagtctgagagggagg

SEQ ID NO: 1236 - DNA, 251 bp, Zea mays
gcacgaggaacttcgttgctgtcatagtctgctggatcaaggagggagattcaaagttgtttttccttgcaacaatctatgctttgcttggaattcctctgtcatatttgatatggtacaggccactctaccgtgcaatgaggactaacagtgctttcagttttggatggtttttcctgtgttacctgatccacattggtttttgcataattgctgccattgctccaccaattgtatttcatgggaaatca

SEQ ID NO: 1237 - DNA, 258 bp, Zea mays
cctcgacgccgacttcgaggcccacgtcgcggacttcggcctcgccaagttcctccggggcaacgctggcggttcggagtgcatgtccgctatcgccggctcgtacggctacattgctcctgagtacgcctacacgctgaaggtggacgagaagagcgacgtgtacagcttcggcgtggtgctgctggagctcatcgccgggcgcaagcccgtcggggagttcggcgacggcgtggacatcgtgcactgggtgcggac

SEQ ID NO: 1238 - DNA, 252 bp, Zea mays
gcacgagggcacttcttcgccgcatgaaccgctatgggctgcttgctgagggtcagaacaagcttgattatgttcttgccctcaccgctgagaacttcctcgcaaggcggcttcaaacacttgtcttcaaggctggcatggccaagtccattcaccatgctcgtgtcttgatcaagcagcgtcacatcagggttggcaggcaaattgtcaacgtcccatcattcatggtgagggtggagtctgagaagcaca

SEQ ID NO: 1239 - DNA, 247 bp, Zea mays
gcacgagggccgcaccatccgctaccctgaccccctcatcaaggccaacgacaccatcaagatcgatctggagaccaacaagattgtggacttcatcaagtttgatgttggcaacgtcgtcatggtgactggcggaaggaacactggccgcgtgggtgttatcaagaacagggagaagcacaagggcagctttgagaccattcacgtggaggactccctgggccaccagttcgccacccgtatgggc

SEQ ID NO: 1240 - DNA, 246 bp, Zea mays
gcacgagatctttttcagtagggcagcggcactcctatgccttgcccgagccatcctaaaatcatccaaggtgctttgtctagatgaatgcacagccaatgttgacaaccaaacagcctccctgttgcaaaatactatttctgctgaatgcaaaggcatgactgttctcaccatagcgcatcgtatttcaacagtgatgaagatggacaatattctagttcttgatcaaggaaaactggttgaaga

SEQ ID NO: 1241 - DNA, 245 bp, Zea mays
gcacgagaggacctccaattttttgctggtgagtccatgaaggatgatgcgtctgtggtattcgcctattacaaggatggtgccactaatccgacattcctctatttctctcatggtcttaaggagatcaagtgctaggcgtgcggcgaaattagttacccatgttgggtactatctatgtactattattatatccaaaactatagttgtcctggctgaattgaactcaaaagggtttgtttgag

SEQ ID NO: 1242 - DNA, 245 bp, Zea mays
gcacgaggtgagttctccgaggcccgtgaggacttggctgctcttgagaaggactatgaggaagtcggcgcagagggtgcagatgacgagggtgacgagggcgatgactattgagtagccggttaataattagttcgctggtgcttaatggttgagttattttgagtatactctgtatgggtccactccattgcgtgctgctgctgtgtgtttccattttgtattttgtgataaattgttcgtag

SEQ ID NO: 1243 - DNA, 237 bp, Zea mays
gcacgagtggacacgaagttggcgaggacagtaccccaaaaagggcgcaaatgccattgcaagcattgcctcgcaatgcatttgcggtgacgccaagctgcggcctccaatgtcgcaggtgctggaagagctggaacagctacaagatgccaaatatggtgcaccatcgccattagtcgacatccggaaagcctcgcacgctgcccccaaatcgcctatgaccagcaccccaaaatc

SEQ ID NO: 1244 - DNA, 108 bp, Zea mays
gcacgagccaaggcggcgcgcaagtcggcccctgcgaccagcggcgtgaagaagccgcaccgcttccgcccgggcaccgtggcgctgcgcgaggtgcgcaagtaccag

SEQ ID NO: 1245 - DNA, 238 bp, Zea mays
gcacgagggctaaccagtacaccgctgcactgaatcccatcctcttccaggtcctcatcagtcctatgcttgggggaactaccgaccagaaagttgtggatgagaaccttgagaagctgaagaaggtgctagaggtgtacgaggcacgcctgaccaagtgcaagtaccttgctggagacttcctcagcctcgccgacctgaaccatgtgtctgtcactctctgcctgttcgctacgcc

SEQ ID NO: 1246 - DNA, 242 bp, Zea mays
gcacgaggtgataggctctgagccacccttcaagctgaagggcctttggctcttccgtggccaggatgttcccaagtttgtaatggacgaggtctatgacatggagctctacgagtggaccaaggtggacatctctgatgaggcccagaaggagcgtgtcaatgcgatgattgaggaccaggagccctttgagggcgaggcattgcttgacgcgaaatgcttcaagtgagtgtgcttgcctg

SEQ ID NO: 1247 - DNA, 235 bp, Zea mays
gcacgagaggaagtccaccggcggcaaggcgccgaggaagcagctggcgactaaggcggcccgcaagtctgcccctgcgaccggcggagtgaagaagccccaccgcttccgccccggcaccgtcgcgctccgggagatccgcaagtaccagaagagcacggagctgctgatccgcaagctgccgttccagcgcctggtgcgggagatcgcgcaggacttcaagaccgacctacgc

SEQ ID NO: 1248 - DNA, 233 bp, Zea mays
gcacgagatcacatcagtgctgcccggacatgtgcacaactggaggcactgaatgtttccgtgctaggtggcgtgtctcagacagtagacttgcagacgttgtacaacatagaaggctgggatgcgtacgcgttggcttttcaggcgacggaagagcaggcacatcttcaattcatgaaccctggcatggaggatgatccaacttgtggtcctatcctagacaacgttcccgt

SEQ ID NO: 1249 - DNA, 240 bp, Zea mays
ttcggcacgagcgaaggcgaccattccttcttcgctccttcgccgccgctatggttaagtactcgcaggagccgggcaaccctaccaaatcggccaaggccatgggaagggacctgagggtccacttcaagaacacaagggagacagcttttgcgcttcgcaagctgcctttgaccaaggctaagcgataccttgaggatgttattgctcacaagcaggcaattcccttccggagatact

SEQ ID NO: 1250 - DNA, 243 bp, Zea mays
ctccgatgccttggacaagatcaggtttgagagtttgacggacaagaccaagctggatgcacagccagagctgttcatccacattgtccccgacaaggccaacaacacgctgacaatcatcgacagcggcattggtatgaccaagtcagaccttgtgaacaaccttggtaccattgcgcggtcaggcacgaaggaattcatggaggcacttgctgctggtgctgatgtgtccatgattggcca

SEQ ID NO: 1251 - DNA, 231 bp, Zea mays
gcacgagttccgactccggtgactccaccaccagcaacccgtgcagcgagcgcactccgaccatcgccatgtcgaggcgcggcgactgggtctacgagaacaacggcgggacctgcgtggccatcgccggcgctgattactgtgtcgtcgctgcggacacccgcctctctgtaggatacagtatcctcacgcgtgatcactccaagatctgcgacctggctgacaaatgtg

SEQ ID NO: 1252 - DNA, 231 bp, Zea mays
acgcggagacgttcggcgacaacctgaacctgacgatcccggcgcccgggccgagcgtgatccagtcggtgtgcggggccgccaagtgcgtagtggtcctcatctccggcaggccgctggtggtggagccgtacctgggcgacatggacgcgctggtggcggcgtggctgccggggtcggaggggcagggcgtggcggacgtgctgttcggcgactacgggttcacgggga

SEQ ID NO: 1253 - DNA, 236 bp, Zea mays
cgccgccactcaccagcaaattcccaagccgccccttcccccatctctttcgcgccccatttgatcgattcctgatggcgcccaaggccgagaagaagcccgcggagaagaagccggcggaggagaaggccgagaagaagccaagggcggagaagcgcgtgccgagcaaggagggcggcgagaagaagggaaagaagaaggcgaagaagagcgtcgagacgtacaagatctacatc

SEQ ID NO: 1254 - DNA, 228 bp, Zea mays
gcacgagggctgcggggtcaaggagccagagggggtgcacagcgatcgttctgccggagatcgaaaccctcagctagggtctgaggcgccgggctgcggccgccgagatgtcgacgccggcgaggaagcggctgatgcgggacttcaggcgcctgcagcaggacccgcccgccgggatcagcggcgcgccgcacgacaacaacatcatgctctggaacgccgtcatat

SEQ ID NO: 1255 - DNA, 236 bp, Zea mays
gttggggtctacaacggcaagacattcaaccaggttgagatcaagcctgagatgatcggccactaccttgctgagttctccatctcctataagccggtcaagcatggcaggcccggtatcggtgccacccactcctcgcggtttattcctctgaaatgagctgttacccgtctctgtagtctcccaagagtccgttggcaatgtccattcagcttttctacttgttttgaacaagt

SEQ ID NO: 1256 - DNA, 203 bp, Zea mays
gcacgagctccggcggacaccttactcacgggtactacacggccggcggtaagaagatctccgccacctcgatctactttgagagcctgccgtacaaggtgagcgccgcaacggggtacatcgactacgagaagctcgaggagaaggcacttgacttccgccccaagctcatcatctgcagtggcagtgcgtacccgagggac

SEQ ID NO: 1257 - DNA, 202 bp, Zea mays
gcacgagcttcaatgtcacggccaaatgcggtgagcctggtgcaactgcctgtgctgatccgacaacccattggagctgggacggcattcacctgacggaggctgcctaccgccatatcgccaaaggctggctatacgggcctttcgcggaccaaccgatcatccaatcctcatgatcatgccgttcctgcggtagagttta

SEQ ID NO: 1258 - DNA, 204 bp, Zea mays
gcacgagggagagcgaagaaagaagacgtgctaggttggaacggcatcaaagaactcgtgaacgagcggcaaaggctttggctgagaagaatgaacgtgacatgcagcaacaaagggaccaggctgagagacataggcttgcggaaacactggacttcgagattaagcgctgggctgctggaaaagaaggcaatttgcgtgcat

SEQ ID NO: 1259 - DNA, 206 bp, Zea mays
tgcttgccccgatttgctttatccgcctaccctatcgaacatccagctgttggttactcgaattgtatctcatgtagatctgtctgaggttgagacttaaatggagcagtagtatctgtcatattggtacccctgttactgaattgatgtgatgctgagtttaattttgttttcaaaaaaaaacagataaaactcgagggggggcc

SEQ ID NO: 1260 - DNA, 198 bp, Zea mays
gcacgagatggatttgagtgatctcagtgcttgccttgctgctgttgtgtgttcatcattgcaaccacctcttcgacctctgggatccccagcaggtgattgggcttctgtcatcataaagtatgtattggacagagcaacagttctactcactgatcaccatgtggcttctaactacagcatgcggaatcgatctct

SEQ ID NO: 1261 - DNA, 206 bp, Zea mays
cttttccccactcccgggtctccagcattcctatcctctccccgcccgcccgtgccgccgccgccgccgccgccgcggcttcccttcctctcccgagccaagatgaatgttgaaaagctcaagaagatggcaggtgctgtgcgcaccggggggaagggtagcgtgcgcaggaagaagaaggcagtccacaagactacaaccacaga

SEQ ID NO: 1262 - DNA, 200 bp, Zea mays
gcacgagcgccggcaagtcggagtacttcgcgtcgtcgtccacgctgttcgtggtcgagttcatcctgttccactacgtggagatccggcggtggcaggacatcaagaaccccggcagcgtcaaccaggaccccatcttcaagagctacagcctgccgccgcacgagtgcggctacccgggcagcgtcttcaacccgctc

SEQ ID NO: 1263 - DNA, 198 bp, Zea mays
gcacgaggttgcatctcaccaatgaataaaatgtatgtatcagactcgccccgttttttttttgtccatgtactgcagtgcagcggactgagccgctggcacagcatggcggtaataatcttgtcacagtgacagtgctgtaatcgggagcgtgtttcttgtaatcttgttaggaagtgtttctggttttgtttgagc

SEQ ID NO: 1264 - DNA, 196 bp, Zea mays
gcacgaggctttacaaatgtgaacatctctggtgtgagaactggaaccatagacttgtcttcaaataattgggcatacaagattggactggaaggggaatattataatttgttcaagcctgatcagacaaataaccaacggtggataccacaatccgagccaccaaaaaaaccaacctttgacatggtataaggta

SEQ ID NO: 1265 - DNA, 200 bp, Zea mays
caaatttaccatgggaattggatgcagcaatgctgcgtcggctggagaagcgtattcttgttccattgccagagccggatgctagacatgctatgtttgaagagctcctgccatatacacctggcacaatggagattccctatgatgttcttgtggagaaaactgaagggtattctggctctgatattcgcctggtatgc

SEQ ID NO: 1266 - DNA, 201 bp, Zea mays
tgcacccggacattggcatctcgtccaaggccatgtccatcatgaactccttcatcaacgacatcttcgagaagctggcggcggaggcggccaagctggcgcggtacaacaagaagcctaccattacgtcccgcgagatccagacctccgttcgcctcgtcctccccggcgagctcgccaagcacgccgtctccgagggca

SEQ ID NO: 1267 - DNA, 195 bp, Zea mays
gcacgagcagacttcgctaaggtgtgctttgagaacttcggtgacaaggtgaagaattggttgacctttaacgagccacagacatttacaaccttttcgtacggaacgggagtttttgcccctggacggtgctcaccaggagaaaaatgtgctcagcctattgctaactcactcaccgaaccatacattgctggc

SEQ ID NO: 1268 - DNA, 197 bp, Zea mays
gcacgaggaaagaactacagtggagcagagttggaaggtgttgtcaaaagtgctgtctcatttgctttgaaccggcagataaccatggatgacctcactaaacctttggatgaggaaagcatcaaggttaccatggatgattttgtgaatgcacttcatgaaattacccctgcatttggtgcttccaccgatgatct

SEQ ID NO: 1269 - DNA, 251 bp, Zea mays
gcacgagcgcggtttcgtcgtcgctgaacccgaacgcgccgctcttcatcccggcggcgctgctgcaggtggaggacttctcgccgcagtggtgggacctcatcaccaccaccgcctggttccgcgaccactggtcccgcgagcacgcccacctggacgagatagccgagcagctcgagttggtcgccctccttgcctacgatgaggatgaggacctcttctacggcgagcaggcccccgccgccgccgcc

SEQ ID NO: 1270 - DNA, 263 bp, Zea mays
caagggcggcgcgaacgtcaccgcaaggtcctccgcgacaacatccagggcattacgaagccggcgatccggaggctggcgagaaggggtggcgtgaagcgcgtctcggggctcatctacgaggagacccgcggcgtgctcaagatgttcctcgagaacgtcattcgcgacgctgtcacctacacggagcacgcccgccgcaagaccgtcaccgccatggacgtcgtctacgcgctcaagcggcagggccgcaccctctacgg

SEQ ID NO: 1271 - DNA, 259 bp, Zea mays
gcacgagtcgatttcgaatttcacccagctccgcacgcgcctcaacccttcctctcgggcggcggcgccggcaaggcggcagcaaccggagcgggagctgcgatgaagaagatcttcggcgccaagaaggacaaggggccgcccccctccatccaggacgccaccgagcgaataaacaagcggggtgagacggtggacgagaagatcaagaagctggacgaggagctagccaggtacaaggagcagatccgcaagaccc

SEQ ID NO: 1272 - DNA, 251 bp, Zea mays
ttcggcacgagccaattcttcctcgttccgggtaaggccttgttcgtttgtgtcggattggtgggtcggaacaattcccggccggattgcttctctaatttatataaactttgattagccggaacgattccgggtgcaatccgacgcaaacgaacaagccctaactgagattaatttgtccttgctgtaatgtttagccagtcctgccccgatccggggaactgagagattgtctttatcgcaacattaac

SEQ ID NO: 1273 - DNA, 232 bp, Zea mays
ttcggcacgagagatgctgttcggctaccagccgtgcgccaccaaggacccccgcgtgttcggcgacacggccggggacttcgtgcccgaccgcttcctcggcgaggagggcagcaagctggtgcagtacgtgtactggtccaacggccgcgagaccgacaaccccagcgtcgacaacaagcagtggcccgggaagaacttcgtggtggtcgtcggcaggctcctgctcgtc

SEQ ID NO: 1274 - DNA, 257 bp, Zea mays
gcacgaggtggagtcctgctttaactatctcaaaggttctcctgtcaatctgctcactgctcacggacccaaaccctgatgatcctcttgtccctgagattgctcacatgtacaagaccgacagggccaagtatgagtccaccgcacgctcctggacacagaagtatgccatgggctagaagcaaggctaaaagctggccaaactggtgaatgtgccggaccccaaatcgttatcacctaaataaccagtcaagtcg

SEQ ID NO: 1275 - DNA, 261 bp, Zea mays
gcacgaggatgtcagggaagtctcgggaacatacggcgcatttgaaggtgccattacgctgacctcgctcaggctcgtcaccagcagcagaacctggggcccctggggggtcgagaacgggacgcgtttctccatcacggcgcccaacggcagcagcatcgcgggattctatgcgcgggcgggaaccaggctcgtcgacgctatcggtgtttacatacgtccagtggtgccaggccaggctcggtgaacaagcgagccgag

SEQ ID NO: 1276 - DNA, 249 bp, Zea mays
tctcgccctccgcgcggctccacaggagagcaaaaatggcgaccctctccatggtctccgtccccatcgcaccctcctccttgtccctttccacccggggccgcagctcctccgcatccttccccgctaagaagggaggaatcggtcacggtggcttgcggatcgagtgcatccgtattggtggtgttgagattccaaaccacaagagggttgagtactcgctgcagtacatacatggcattgggcgct

SEQ ID NO: 1277 - DNA, 235 bp, Zea mays
gcacgagggtcgtcgagctagtcacccagctcgaggcggttaaccctactactgctcccgtcgagtcgccggatctcctcgacggcaactggatcctcatatatacagcatattctgagcttctgcctattctagctgctggggcaacacctttggtcacagtaaagcagatatcccaagaaattgactccaaaatcatgacgatagtcaatgcttcgacccttacgactccatt

SEQ ID NO: 1278 - DNA, 224 bp, Zea mays
gggcacgatgcgccgtggtggcggtggcggctacagcggtggcggcggctactgtggcggcggcgggtagggtggtggtggcggcggctacggcggtggcaagcgtggcggcggctacggcaactccgacgggaagtggaggaactgagctgtggggcccgcgcggccaagttatgctgttcgctaccgtggtgtttaccgtagtcgagagggtttatcgtcgg

SEQ ID NO: 1279 - DNA, 158 bp, Zea mays
gcacgagggtcggcgcagacagagtcgcgcatcgtgcgcgtctgccgcgtcttcggcggcaaggaccgccacagcaaggtgaagaccgtcaagggcctgcgcgaccggcgagtgcgggtctccgtgccgagggcgatgcaggtgtacgagctgcagga

SEQ ID NO: 1280 - DNA, 221 bp, Zea mays
gcacgaggatgtcagggaagtctcgggaacatacggcgcatttgaaggtgccattacgctgacctcgctcaggctcgtcaccagcagcagaacctggggcccctggggggtcgagaacgggacgcgtttctccatcacggcgcccaacggcagcagcatcgcgggattctatgcgcgggcgggaaccaggctcgtcgacgctatcggtgtttacatacgtc

SEQ ID NO: 1281 - DNA, 212 bp, Zea mays
gcacgagggtcgtcgagctagtcacccagctcgaggcggttaaccctactactgctcccgtcgagtcgccggatctcctcgacggcaactggatcctcatatatacagcatattctgagcttctgcctattctagctgctggggcaacacctttggtcaaagtagagcagatatcccaggaaattgactccaaaatcatgacgatagtcagt

SEQ ID NO: 1282 - DNA, 225 bp, Zea mays
caagggcggcgcgaacgtcaccgcaaggtcctccgcgacaacatccagggcattacgaagccggcgatccggaggctggcgagaaggggtggcgtgaagcgcatctcggggctcatctacgaggagacccgcggcgtgctcaagatcttcctcgagaacgtcattcgcgacgctgtcacctacacggagcacgcccgccgcaagaccgtcaccgccatggacgtc

SEQ ID NO: 1283 - DNA, 217 bp, Zea mays
gcacgaggtttcgcgtccgcctcagcccgccgcaaggagaggtaagttcaggagacatcttcgagaagctgaaatggctcctaaagctgctcctgccaagaagggtgatgccaagacccaggccttgaaggttgccaaggctgtgaagtctggggcagccaagaagaagaccaagaagatccgcacgtctgtgacatttcatcgccccacgaccctg

SEQ ID NO: 1284 - DNA, 216 bp, Zea mays
gcacgaggctaggcgagctttagagatttgtagacgggcagcagagtttgcagactaccgtgtcaaacagtctcgacagtctgcacagactactgtttctgcaaagaaaggtgatgctgttgtttccatgggtgacatagaagctgctattcaggaagtcttccaggcacctcatattcaagtgatgaagaattgcccaaagtttggaaaagttat

SEQ ID NO: 1285 - DNA, 192 bp, Zea mays
gcacgaggggattctccctgttcgactagagttgtgtgtgtcatctggatctcagaagtggtggtttggtcctgttgccgtagttaattttgctgtcctgtctgtgaacctgaagaactcttggtaattgttacaagcgacctgttccagtttatgtgagaatttgatatgttgtttgggaatcagaagaac

SEQ ID NO: 1286 - DNA, 215 bp, Zea mays
gcacgaggcgtgccacttgacgcagcagacgcgggcgtactcggtgtcgatgctgggcagggacggcacggccgtggacgctgtcgcggtgtgccacgccgacacgtccggctggaaccccaagcacgtcgcgttccaggtgctcagggtgaagcccggcacggtgccgatctgccacttcctgccgcagaccacgtcgtctggacccgcggcgg

SEQ ID NO: 1287 - DNA, 213 bp, Zea mays
gcacgagctctggcaatgaatggagggtgcgtcaaattggctgccacaaatgtacgagacgacctgtagttttcactcagggcttgtttgggagcaagtggaatgaagggtattgataggactataatcccttgctatctaaaattgaatagtggaggattatatgccctccaattcactccattacctttactcccaaacaagccctcaatg

SEQ ID NO: 1288 - DNA, 200 bp, Zea mays
gcacgagggagagtggacttaaggtcaaggaatatgaactgctaaggaggaacttcagtgacacagggtgctttggtttcggaatccaggagcacattgatcttggcatcaagtatgatccttcaaccggtatctacggaatggatttctacgtcgtccttgagcgcgctgggtaccgtgtcgcccgacgccgaaggtgc

SEQ ID NO: 1289 - DNA, 211 bp, Zea mays
gcacgaggagaagagaaagtctcgagtttttttttttgttttttttgatcaagaaaacaataacgccaaacttaataacccagtagcaaagcgggggaataaagtcttacaacgtaagttgtaaaccacacaacgacagatagatgagaaccgagagaaacataacacgataggagccactcagggcagatcacaggatagcagtggcaca

SEQ ID NO: 1290 - DNA, 216 bp, Zea mays
cttacgccaaccttaaccactatgatcttccgcttgcgcttcagaagaagtaccaaggctggttaggcccaaaaattgtggacatatttgctgactatgctgatttttgtttcaagacttttggcaatcgagtcaagaactggttcacattaaatgagccaaggatagtagcattccttggttatgataaagggcttaacccccctaaccggtgca

SEQ ID NO: 1291 - DNA, 211 bp, Zea mays
gcacgaggtaaaagcccgagtcgctcgtctcttcccagatcctccgagcacaacagctctccgtcgccgtcgccatgggtaaggttcacggatcgcttgcccgcgcggggaaggtgcgtgggcagacgcccaaggtggcgaacacggacaagaagaagaagccccgcggccgcgcgtacaagcgcatgcagtacaaccgccgcttcgtcac

SEQ ID NO: 1292 - DNA, 208 bp, Zea mays
gcacgagggggaccttcagattttctataaagcatccaagcataggtttgacagtgatccagactttaaagcaagggctcaacaaggagttgttcggctacacggaggggaggataaatatcgagaagcatggaaaaaaatttgtgacattagcaggagcgaatttgacttggtctacaagcgcctaaatgtggtgcttgaagaaaag

SEQ ID NO: 1293 - DNA, 209 bp, Zea mays
gcacgaggacatcctttgggataacaatgacagcaaatttgctcttgagctggagtgctgcaggcacatttgcctcctacatggtcgtgagtgcgttcactctaatgttcgtcatcctctgggtgccagagacgaagggaagaacccttgaggagatacagtggtccttccagtagtgagctgcagcagcattcatcagtaaatgcagt

SEQ ID NO: 1294 - DNA, 237 bp, Zea mays
gcacgaggccaactccctggctcggaaatcttgggcgacgctctgtacacaatcgacatcgggcagaacgacttcacctcgaaccttggatccctcggggtcgaaagcgtcaagcgaacctaccttcagtcgtcagccagatctcctggacgatacaggacttgtacagcagcatcggagctcgcagcttcatggtgttcaacatggtgcccgtacgatgctacccggcattcctcg

SEQ ID NO: 1295 - DNA, 235 bp, Zea mays
gcacgagcgggaactggaggaactgagcggtggggcccgcgcggccaagttatcctgttcgctaccgtgatgtttaccctagtccagagggtttatcttcgttcgtgtcgtgtttgttgttgcccatctgtgtttttgattgcaaggtcgctctgtgtcagttgttagtgctgtgttcatcctcggtttcagcagacccatgcatcaaacagcatggactgcggatcgatggatg

SEQ ID NO: 1296 - DNA, 239 bp, Zea mays
gcacgaggccagtcaagacacatctccgtaacatgatcattgtccctgagatgattggaagcattgttggtgtctacaacggcaagaccttcaaccaggttgagatcaagcctgagatgatcggccactaccttgctgagttctccatctcctataagccggtcaagcatggcaggcccggtatcggtgccacccactcctcgcggtttattcctctgaaatgagctgttacccggctc

SEQ ID NO: 1297 - DNA, 240 bp, Zea mays
gcacgagcttccctcaccgtgcagtggcttcccgaacgcaccgagccgccggggaaggaccactgggtccagaagatgatcctcggcacgcacacctccgataacgagcccaactacctcatgctcgcgcaggtccagctgccccacgaagacaccgaggccgacgtgcgccactacgacgatgagcactccgacaacgggttgttcggcgcggccaccggcgagtatggaggatgcatt

SEQ ID NO: 1298 - DNA, 240 bp, Zea mays
gcacgagccgagcagaagtttcagacattgctatagctgtccgagagggtgctgatgcagttatgctttcaggagaaactgcacatgggaaatttcccttgaaagctgttaaggtcatgcacactgttgccctgagaaccgaggcaactattcctggtggggaaacacctgcagaccttggtcaggctttcaagaaccacatgagcgaaatgttcgcataccatgcaacaatgatgtcaa

SEQ ID NO: 1299 - DNA, 241 bp, Zea mays
gcacgagatgctgtccagctcgccagaaaagcaacgcccagctgataatgatcgctatgtcaagaactgtcgcaatgggaggtctccgaaagagaccaggtggtggttccatgatgacaccgtgtgatcggtgttccgattattgttgtcctgtatgcatttagttgccagactatgggagatggacttatttcgaacgacccatttgaccagaaattaacatgctcttgtggtttgtaga

SEQ ID NO: 1300 - DNA, 234 bp, Zea mays
gcacgaggactgaaccaatcaagttagagcgttacttgcagcctcattttcgctactacatgcgtgaagtgcgcactgttgtctactcacagtttctggaatcgtacaagagtgtgacaatggaagccatggctgctgcatttggcgtcacagtcgacttttagaccaggaactgtcacgcttcattgccgctgggaagctccactgcaagatagacaaagttgctggcgtctt

SEQ ID NO: 1301 - DNA, 234 bp, Zea mays
gcacgaggaagatcgaggctgaactgagcaatatctgtgatggcatcctgaagctgcttgactcccacctagtgccttcttctactgctgctgaatcaaaggtcttctacctcaagatgaagggtgactatcacaggtatcttgcggaatttaagactggtcctgagaggaaggaatctgctgagagcacgatgatggcctacaaggctgctcaggacattgcgctggctgagt

SEQ ID NO: 1302 - DNA, 234 bp, Zea mays
gcacgaggatgatcagtggatccgtgtagcggtaaagaaagggggcatgatcgttttgcctgcaggaatgtatcatcgctttacgttggatagtgacaactacatcaaggcaatgcgtctatttgtgggtgagcctgtctggacaccatacaatcgtccgcatgaccatctcccggctaggaaggagtacgtcgagaaaatcatcaaccgaggtggaaaccaagccgtcgaagc

SEQ ID NO: 1303 - DNA, 236 bp, Zea mays
gcacgagggatacacctcttctgacacggcagcgtgtactggatgcactattcccctcggttctgggaggcacttgtgctattccaggagcatttggctgtggtaaaactgccattagtcaggcactttccaagtactccaattccgaagctgtggtttatgtgggctgtggtgaacgaggaaacgagatggctgaggttctcatggactttccccagttgacgatgacattgcct

SEQ ID NO: 1304 - DNA, 243 bp, Zea mays
ctaccactactcacaaatcactccgtgggccacgtggagccatgatcttttacaggaagggagtcaaagaaataaataaacaaggaaaagaggttatgtatgattttgaggacaaaatcaatgctgctgtctttcctggtctgcaaggtgggcctcataaccataccattactggcttggctgttgcgctcaaacaggcaactactccagaatacagagcttaccaagagcaagttatcagta

SEQ ID NO: 1305 - DNA, 242 bp, Zea mays
gcacgaggtcaacctgggaggatgaagaggccattaagcagaaatttccacaagcaccagcttggggtcaagctgtcgttaaagaagggggaaatgtcagcagagcagatcacatggaccatgcagaggagcggactcaagcagtgcaacagaaggcacagacagagggagtcaaggaagacaatcagagcccgcgcacctgtcgtgtaccatagccagataccacttacatcggtgcagag

SEQ ID NO: 1306 - DNA, 226 bp, Zea mays
gcacgagacgagcttggcgccggcaacccaaagtccgcggcgttctctgtggtggtagtgacgctgctctccttcgtcctgtcggtcataatctccatcgtcatcctgctgtgccgggactacatcagctacatcttcaccgagggcgacgacgtgtcgcgggcggtcgcccagctcagcccgctgctggcggtcaccctcatcctcaacggcatccagcccgtcc

SEQ ID NO: 1307 - DNA, 223 bp, Zea mays
gcacgaggttgttgtgtgccctggctgccaaactgtcctctgccaacccacaggaggaaaggcaaggctcactgagggctgctctttccgcagaagggagactagagcggatgtggtcttcaagttttgctctatgccagatactagcgtcatgaactgcctttagctaagattttccataagttgttctcgagcagctatgtgttgcatgttggctacttcc

SEQ ID NO: 1308 - DNA, 229 bp, Zea mays
gcacgaggaaccaccctgggcagattggcaacggctatgcccctgtgctggactgccacacctcccacatcgctgtcaagtttgctgagctcattaccaagatcgacaggcgctctggcaaggagcttgagaaggagccaaagttcctgaagaacggtgatgctggtatggtgaagatgatacccaccaagcccatggtggtggagacattctcagcgtatcctcccct

SEQ ID NO: 1309 - DNA, 233 bp, Zea mays
gcacgaggcctcccggcgggcaagtccgccggtaaggagggcggcgagggcaagaaggggaaaaagaaagcgaagaagtccgtggagacctacaagatctacatcttcaaggtgctgaagcaggtgcaccccgacatcggcatctcgtccaaggccatacccatcatgaactccttcatcaacgacatcttcgagaagctcgcggccgagtccgccaagctggcgcgctataa

SEQ ID NO: 1310 - DNA, 237 bp, Zea mays
gttgtgttagggtttcgtctcgtgtataaggcgttcggagctcgcaaatcctttcctctctcgcgttcgaggctaggtagccgtcaccatgagccgctcggggcagcctccggatctcaagaagtacatggacaagaagcttcagattaagatgaatgcaaaccgtgttgttatcggcacacttcgtgggttcgaccagttcatgaatctggtggtggacaacactgtggaggtcaa

SEQ ID NO: 1311 - DNA, 230 bp, Zea mays
gcacgaggacaaggacaaggacaggaagaaggcccccgtgtcgcgctcttcccgcgccggcctccaggtaccctctcgcttctttttctttcgaatttcatctcgatctgtgcacgccatatgttactcagatgctaacttaaactggcgcttcttgtttgcagttcccggtgggtcgcatccaccgccagctcaagtcgcgtgcctctgcgcacggccgcgtcggcgcc

SEQ ID NO: 1312 - DNA, 127 bp, Zea mays
gcacgaggcagcctccaaagccactcccaaacccccgcttccagaaccttctcgaagctccccgccgcctcctccactcgcaccgatggcgaaggaaccaatgcgcgtgctcgtcactggcgccgca

SEQ ID NO: 1313 - DNA, 232 bp, Zea mays
gcacgagctgacagggccagcttgcctgtgacctgtgggctttgcgcgcaggcaaacgagctgaacaaaaacggcgagctgtacgtcatcaggaagcccagcatgaggaccaagatcgtcgacgggacaagcctggccgccgccgccgtgctccacatgatccctgagggcaccgacgaggtgctcctcctgggagacgccggcggcaataagatggcgggcgcgctggctt

SEQ ID NO: 1314 - DNA, 239 bp, Zea mays
gcacgagattacgcaagcagcaagagtgcgaggagttagcccggaaggtagctgacctaacgaccgagaacagcgctctcagagcagaacttgacaacctcaagaaggcttgtcaagacatggaagcagaaaattcacgtctgttgggtggggtggctgacgcccaggtaccaagtgtcacgaccacactgggaatgagcatcgagccgccgaagttgcagctgcagctgcagcagcat

SEQ ID NO: 1315 - DNA, 229 bp, Zea mays
gcacgagcagcaagcgaaaatctcccgatcccctctagtctccgcggcgaagatgtcggggcgcggcaagagcgggaagggcctgggcaagggcggacgaacgccaccggaaggtgctccgcgacaacatccaggggatcacgaagccggcgatccggcggctggcgcgcaggggcggcgtgaagcgcgtctccgggctcatctacgaggagacccgcggcgtcctcaa

SEQ ID NO: 1316 - DNA, 228 bp, Zea mays
gcacgaggttctcgcgcccagagccaaatttttctccactcaatcactgcagccatggacgccagcggagccggtagcaaggcgaagaccgcggcggctgggcgcaaggctggcggccccaggaagaagtcggtgtcgcggtccgtcaaggccgggctgcagttccccgtcggccggatcgggcgctacctcaagaagggccggtacgcgcagctgtgtggcaccggc

SEQ ID NO: 1317 - DNA, 234 bp, Zea mays
cggcaaccggcgaaggacaacaagaagacgcgcatcgtcccgcgccacgtgctcctggcgatccgcaacgacgttgagctcggcaagctgctggctggcgtcaccatcgcgcacggcggtgtcctccccaacatcaacccggttctcctgcccaagaaggtggcggagaaggcgtctagcggcggcagcaaggagagcaagtcccctaagaaggccgccaagtccccaaagaag

SEQ ID NO: 1318 - DNA, 233 bp, Zea mays
tcggtgcgcagggtctacgtcgtgtgcacggaggactacgccatcgtggaggggttccagcgctggatggtggataacagccccgtggacgaggtgaaggagatcgcggcggaccacgtcgtgatgctctcccggcccgacgagctggtgcgctgcctcactgacatcgccgacaagtacgcttgacggcgccgctgttctagcacgtgtgtgtgtgctgcctctcggtcggt

SEQ ID NO: 1319 - DNA, 226 bp, Zea mays
gcacgaggagcatcgacgaggacgaggaggctccggaggctgacaccgacatgccccctctggaggatgacgctggcgagagcaagatggaggaggtcgactaagctgggtttattcttatggaggaaagagagagaacatcgggtctgttctgtgggtcttaccacttatgctattatgcaatctgttgttggtatgctagtgctactattgtctctgctgtctt

SEQ ID NO: 1320 - DNA, 226 bp, Zea mays
gcacgaggacaaggtaagcagcaatcgcaggaaccctagcgccgccgcacccgcagaatgggtatcgacctcgtcgccggtgggaggaataagaagaccaagcgcactgcgcccaagtctgacgatgtctacctcaagctcctcgtcaagctctaccgtttcttggtcaggaggaccaagagcaatttcaacgctgtcattctcaagaggcttttcatgagtaaaa

SEQ ID NO: 1321 - DNA, 229 bp, Zea mays
gcacgagcttcaagcgccgcaacggcggccgcaacaagcatggccgcggtcacgtcaagtacatccggtgctcaaactgcgccaagtgctgccccaaggacaaggcgatcaagaggtttcaggtgaggaacatcgtggaacaggcggccatcagggacgtccaggaagcatgcgtctatgatggctacgtcctcccgaagctgtacgccaaggtgcaccactgcgtctc

SEQ ID NO: 1322 - DNA, 229 bp, Zea mays
cgattgaccatgttgagaagaagctgtcgcagatgatccttgacaagaaatttgctgggacactagatcaaggtgctggctgcctcattatctttgaggattctaagaccgaggaaatcttccctgccactctcgaaaccatttcgaatgtcgggaaggttgtggacagcctttatgtgaggtcggccaagatcatggcttgaaagcagctagtcttacctgtttgctc

SEQ ID NO: 1323 - DNA, 221 bp, Zea mays
gcacgagctcgagaatgtcatccgcgacgctgtgacctacacggagcacgcccgtcgcaaaaccgtcaccgctatggacgtcgtgtacgccctcaaacgccaggcccgcactctctatggcttcggcggctaggttaggtgtgggtaattgcctgtccaggtgtctcggatctgtggtactagtttggctgccttcctgtgttcgtattgtagtagttgtg

SEQ ID NO: 1324 - DNA, 226 bp, Zea mays
ccggttggtcgtgtggagactggtgtcatccagcctggtatggtagtcacctttggtccaactggcctgactactgaggtgaagtctgttgagatgcaccacgaggcgcttcaggaggctcttccgggcgacaatgttggcttcaacgtgaagaacgttgctgtcaaggatctcaagcgtgggttcgtggcctccaactccaaggatgaccctgccaaggaggctg

SEQ ID NO: 1325 - DNA, 224 bp, Zea mays
gcacgagtttttttttaactcgaaaaaaacaaatcttattcataaacaaaatgggttcacagatatttctccatacgttcatgctcattgtggtagacgcagctgaccacctagagctgcatacttacttattcagactgatccagcatgtggcaacatcggaagttcacatgcttacagacgacaaattttcataacaatagcctggcttggctgcttcacag

SEQ ID NO: 1326 - DNA, 225 bp, Zea mays
gcacgagctgaactcttcgtcaacggtgagattgttcagaggactctcgagaggcagaggagggtggagcccgtgccgcagagggcagcagacaggccgaggtacaatgacagaacccgctacgcacgcaggagggagaaccagcgatgaactgtgcgataaaatcataaaaaagaccacagcaacaagtcccaggtggtttcagctctggaattcaaggatcat

SEQ ID NO: 1327 - DNA, 256 bp, Zea mays
gcacgagaacatacaattcaatcatgaagtgtgatgtggatatcaggaaggacctctacggcaacattgtgctcagtggaggttcgactatgttccccggtatcgctgatcggatgagcaaggagatcacttcccttgcaccaagcagcatgaagatcaaggtcgtcgcgccacctgagaggaagtacagtgtctggataggagggtcgatcctagcctcgctcagcactttccaacagatgtggatatcaaagga

SEQ ID NO: 1328 - DNA, 237 bp, Zea mays
gcacgagcggcacgaggcgagagtctcgaaagagtgtcggtggaagtaggcctaaccttattttgtttagagacgggctatgcgttcgatgtagcaaaacaaggctgtggtttgtgtacttcaatatttgggttgtgtgtttcgaatttttttttgaacgtgtctcggattgttgtggtgcgaattggttgtttctgtcgctatggtgagatagtgtcacgtttctttctctatttg

SEQ ID NO: 1329 - DNA, 254 bp, Zea mays
gcacgagctggagtgagtgatttaagggactggcatgagtttccacagtggaagccccagggtttggcacgtgtcgtcccaacactggaacctgaaggagttgaccttctatcgaaaatgcttcagcttgatccttcaaacaggatatcagctttagctgcgatggagcatccctactttaacagccttgacaagtcccagttctagccgttgtactatgtggttcagaaggcgctaccctcgtacagagagat

SEQ ID NO: 1330 - DNA, 261 bp, Zea mays
cttccgtgagggtgtgaagtacggagctggcattggccctggtgtctacgacatccactctcctaggattccctccacagaggagatcgcagaccgcgtcgagaagatgctcgccgtgctcgacaccaacatcctctgggtgaaccctgactgtggtctcaagacacgcaagtacacggaggtcaagcccgccctgaccaacatggtctcggccaccaagctcatccgcacccagcttgccagcgcgaaatgaggtcgttt

SEQ ID NO: 1331 - DNA, 250 bp, Zea mays
gcacgagggtcgtcgagctagtcacccagctcgaggcggttaaccctactactgctcccgtcgagtcgccggatctcctcgacggcaactggatcctcatatatacagcatattctgagcttctgcctattctagctgctggggcaacacctttggtcaaagtaaagcagatatcccaagaaattgactccaaaatcatgacgatagtcaatgcttcgacccttacgactccattcgcttcattttcatt

SEQ ID NO: 1332 - DNA, 251 bp, Zea mays
gcacgagcaggaggcggacaaggtaagcagcaatcgcaggaaccctagcgccgccgcacccgcaggaatgggtatcgacctcgtcgccggtgggaggaataagaagaccaagcgcactgcgcccaagtctgacgatgtctacctcaagctcctcgtcaagctctaccgtttcttggtcaggaggaccaagagcaatttcaacgctgtcattctcaagaggcttttcatgagtaaaaccaaccgaccaccaa

SEQ ID NO: 1333 - DNA, 256 bp, Zea mays
cttcaccggaatcttcatcggcctgctcgccaacttctccttcggcaggtccctcctgctgaagtaccctgagtttttctctgctgggctgttcagcagagccggcccgaccgaggaagaggtgaagagcgcctcgttcaagatgtggtttgtcggtcacggctacagcaacgtggatagctcgttggagctcggaagaagcaagccggacaacgaggtgatcaccaaggtttcgggacccgaggtcggttacgtc

SEQ ID NO: 1334 - DNA, 243 bp, Zea mays
gcacgagcatcaacccggccaggaccctgggcgccgccgtcatctacaacaaggacaagccctgggacgaccactggatcttctgggtgggccctctcgtgggcgctgccatcgcggccttctaccaccagtacatcctccgggctggcgccatcaaggccctcggctccttcacgagcaacgcgtgatgagctggggctggctgttgagcaatggcgggcgacctacgggccgggggccgtg

SEQ ID NO: 1335 - DNA, 245 bp, Zea mays
gcacgagcgtgaattcaataaagcaaacttgcaagtcatctggtttggtaaagaggagggggtaccatttggacacatcaccttacaggcctatgctgatcatgattgtcctcctgctggtggctatccttttcggggcactgtataccaagtgatgcacttgtagctggcctttcccctatggagacgagacaaactctgccaatctgatccttttcgtactctgtagtccccaatggctgcag

SEQ ID NO: 1336 - DNA, 250 bp, Zea mays
ttggttggtggactcaaagggtttgattgttgactctcgtaaaaactccgttcagtcattcaaaaaaccttgggcacatgagcatgagcccttgacaaccttgtacgatgctgttcagtccatcaaacctacagttctgattgggacgtctggagttggaagaacattcacaaaagaagttgttgaggccatggcttccttcaatgagaggcctatcatcttttcactgtcaaatccaacctctcattct

SEQ ID NO: 1337 - DNA, 246 bp, Zea mays
ggcacgacggaggaaggccttcttgcattggtacacgggtgagggcatggatgagatggagttcactgaggcagagagtaacatgaatgacctggtggccgagtaccagcagtaccaagacgccacagctgaggatgaggagtacgaggaggaagaagaggaagatcctgctgcctaagccatcatcccaagtgcttggtaaagatatgatgtcccttgtatcgctgctagtcagcactgagtcgt

SEQ ID NO: 1338 - DNA, 243 bp, Zea mays
gcacgaggttcaccacctaccaggaccagcagaccactgtctccatccaggtctttgagggtgagcgcagtatgaccaaggactgccgtcttctcggcaagttcgacctcaacggcattgcgccagctccaaggggcacaccccagatcgaggtgaccttcgaggtggacgccaacggtatcctaaacgtgaaggcggaggacaagggcacgggcaagtcggagaagatcacgatcacgaacg

SEQ ID NO: 1339 - DNA, 248 bp, Zea mays
ttcggcacgagctcatctgggagtagctgtgccacacattgagttgaagcatgtgattgctgctacaattggtcttaagggtcttggaagcctcctttttattttgagcagctctctcggtgcttatctcctgctgctgtaccttgctttgatcactcctatcatccatgacttctacaactacgatatggagaaggcagaatttgcaggcctctttgcgaagttcacccaggatttgggcgctgatc

SEQ ID NO: 1340 - DNA, 245 bp, Zea mays
gcacgagggtatttataggtagcacagaaggaaggctgcaaataaaaggagggtcgaggtcacgagtccagtattactcgctgagaaaggggaaacttgtcgccacctatgagctaccagaattcagcgctcatatccatcactccgcgataacccaggtatggggcgactcaaaccttgtgttggcagcatgtggtatggggctgtttgccttcgacacattcaaggaagacacgcagccaaca

SEQ ID NO: 1341 - DNA, 238 bp, Zea mays
gcacgagaagttctggccaacaactggtcgtgtggacaacgtctacggggaccgcaacctcatctgcacgctgcagcaggcgacccaggtggccgaggaagccgcggccgcaactgcaactgcgtaatctcgtccgagaaccacgataattgatcgcggcgtgcgaaacatcctcaagaaactataatgcatgcttcctgtaggagggaagcatcgtcatcttcctcgtcatcctttc

SEQ ID NO: 1342 - DNA, 241 bp, Zea mays
ttctacaccaaactgggaagatgttctgtcgttaggggaacaacagaggcttggaatggctcgtttgtttttccatcatcctaagtttggtatcctggacgagtgcaccaatgctacgagtgttgatgtcgaagagcatctgtacagacttgcaactagcatgggcataactgtgatcacttcctctcaaaggcctgctttgatacccttccatgccttggagctgaaggtcattgacggc

SEQ ID NO: 1343 - DNA, 233 bp, Zea mays
gcacgaggtcagccggcggactggtgcagctgaacgagcagagcgagtacgccccgggcctggaggacacgctgatcctgaccatgaagggcatcgctgccggcatgcagaacaccggctaggccaagatacatactcggtttgcgaataacccgtctcccatgagatggtaggcgatatgtgtagcctgtaagcagacagttcgtcggcgtgttgcggaggaatttttatgt

SEQ ID NO: 1344 - DNA, 232 bp, Zea mays
gcacgagcgacctcttgcgccgccgccatgaccttcaagcgccgcaacggcggccgcaacaagcatggccgcggtcacgtcaagtacatccggtgctcaaactgcgccaagtgctgccccaaggacaaggcgatcaagaggtttcaggtgaggaacatcgtggaacaggcggccatcagggacgtccaggaagcatgcgtctatgatggctacgtcctcccgaagctgtacg

SEQ ID NO: 1345 - DNA, 230 bp, Zea mays
gcacgaggctgtccgggattcttccgtcctaatggggaatgggtcacatgcttctgttcatggcattggcacggtggatctgaagtttacttcgggaaagatcgtgtagctgaagaacgtgcatcatgtcccttctatacacaagaatctcgttagcggaacccttctgtgtagacatgggttcaaggtagttttggagtccaataaattagttgtgtctaagtctggac

SEQ ID NO: 1346 - DNA, 214 bp, Zea mays
gcaggagcagagacgaatgaagtatacaaggttgacgagaggggtatacgctggttctacactggtgatattggccagttccatcctgacgggtgccttgagattattgacaggagagaagatatggtagagcttcagcacggagaatatgtgtctcttggcaaggttgaatcggctctagcaacaagtagttatgtggggagcagcatggtct

SEQ ID NO: 1347 - DNA, 217 bp, Zea mays
gaaagcgtatgagttcaaaaagggtgtcgagggtgcaaccaaggtttctccttagcaagctggagtacgtccaattttgtgttggtgagtccatgaaggatgatgcgtctgtggtattcgcctattacaaggatggtgccactaatccgacattcctctatttctctcatggtcttaaggagatcaagtgctaggcgtgcggcgaaattagttaccc

SEQ ID NO: 1348 - DNA, 225 bp, Zea mays
gcacgagcttagcagtaagcatggttctcgcgtctagaggggtgtccccccaaaaggcaatgatgtggagtatcattacatctttaccacagccaattgttgctgttcctgcattcctctgtgccgatgcattccagaaggtgcttcccttttgtactggtttcgcagcagggtgcatgatatggattgttatagcggaggttcttcctgacgcttttaaggaag

SEQ ID NO: 1349 - DNA, 226 bp, Zea mays
gcacgagtccctccgtcatcgtcgactccccctgcgtccgttcctttggatctgaataagatggtggtgatctgagtggtggtcttagtttatcatgtatcgctcgcagtttaatttagcggtttaggtgtggatctgtgaaccccatggcgcctctgcttgattcgtgtttcacctgttatgttctgagattcatgataatgttatgagaactgaaattcccgtt

SEQ ID NO: 1350 - DNA, 227 bp, Zea mays
gcacgaggaagcgtgtcccagcaggcaagtccgccggcaaggagggcggcgacggaaagacgggccggaagaagggcaagaagagcgtggagacctacaagatctacatcttcaaggtgctgaagcaggtgcacccggacatcggcatctcctctaaggccatgtccatcatgacctccttcatcaacgacatcttctagaagctcgccgccgaggccgccaagctc

SEQ ID NO: 1351 - DNA, 225 bp, Zea mays
gcacgaggtcatgtcctgctcattcactaaccaggtcattgcctaacttgaactgtggaaggagaagagctctggcaagtatgagaagaaggtgtatgtgctccccaagcaccttgatgagaaggttgctgctctccacttgggcaagcttggtgccaagctgaccaagctcaccaagtctcaggccgactacatcagcgtgccgatcgagggtccctacaagcc

SEQ ID NO: 1352 - DNA, 230 bp, Zea mays
gcacgaggtctagctagctatatatatatagcttgtgttctactgccttttagtttaattacctgcctgcattggagagttggatctgtttcatttggtggtgtttgctttactattaggtcagtatctgtttgtggagacttggtgtttaatttatttagccgtttgtgactggttgtagctagcggtggtgcggtggtgatgttcttgaggcatgaataatgctacat

SEQ ID NO: 1353 - DNA, 221 bp, Zea mays
gcacgaggaagaacccactcaagaacatggctgctgtgctcaaactcaacccctacctcggcactgcccggaagatggccacccttgctgaggctgctcgtgtgaaggccaggaaggcgaactcgactccaagaggaccaagcttaccccggagactgccaaggttaaggctgctggcaaggcatggtacaagaccatggtctcggacagcgactacaccg

SEQ ID NO: 1354 - DNA, 219 bp, Zea mays
gcacgagactgaccgcaccggcacctacaacatccttgtcattgatgagcatgagcatgagctctgcgagtccgtccttgtgagcagcccggacaaggggtgtgccaatgttgtggctggtcgtgagagggcccccgtcttccttaccagcaacaacggtgttgcatccaacgttcgtttggcaaatgctctggggttccagaaggacgttgcccttcc

SEQ ID NO: 1355 - DNA, 224 bp, Zea mays
gcacgagcagcagcagtgaccaatttatcatcctcgctaccgacggggtatgggacgtgctctccaacgacgaggcggtacatatcgtggcggggacgccggaccgggcgaaggcggccaagcggctggtggagtgcgccgttcgcgcgtggaggcgcaacgagcgcgacatcgccgtcgatgactgctcggcgatctgcctcttcttccacccgccgccgccg

SEQ ID NO: 1356 - DNA, 249 bp, Zea mays
gcacgaggtttcccctagctccatacgagcagtagttgggccttgcacgtaccgtacgtctagctagctatatatatatagcttgtgttctactgccttttagtttaattacctgcctgcattggagagttggatctgtttcatttggtggtgtttgctttactattaggtcagtatctgtttgtggagacttggtgtttaatttatttagccgtttgtgactggttgtagctagcggtggtgcggtgg

SEQ ID NO: 1357 - DNA, 243 bp, Zea mays
gcacgagctgtgctccaattattatggtgaatcttagcatagaacttgaccttctattattttgtatgtttggtttgcatgggataactggcatgggatatatttatgaacattgatatcatttttatgcttactcacatgggataatctgatcttctaactcaagatatttttattttggtaatctgatcttctaactcaagtttgcattcagtttagactttaggttatggtagtcataac

SEQ ID NO: 1358 - DNA, 249 bp, Zea mays
gcacgagccgcagtacgcggtgtcggagctgaacgagaaggacttctggcgcatgttcgacgcgtcgcactacgagcactgccgccaaaagtacggggcggtgggcacgttcatgagcgtgtactacaagtccaagaaggggcgcaagacggagaaggaggtgcaggaggcggaggcggccatactggagccggcctacgcggacgaggaggcctaaaagctcgtggtcgttttgcttagcccatttta

SEQ ID NO: 1359 - DNA, 254 bp, Zea mays
tgttaagttcgaaatctgggatactgccgggcaggagaggtatcatagcttggctcccatgtactataggggtgcagctgctgccattgttgtctatgacatcacaaatccggcctccttcacccgtgccaagaaatgggttcaagaacttcaagctcaaggaaatcagaataccatagtggctcttgctggaaacaaggctgatatgctagatgcgaggcaggtgccagcagaggaagcaaaggcgtatgctc

SEQ ID NO: 1360 - DNA, 246 bp, Zea mays
gcacgagcttcagtgcgcctaattactgttaccgctgtggtaacatggctgctattcttgaaatcggggaaaacatggaccagaacttccttcaattcaaccccgcacctcggcaaattgagccagacataactcgcaaaaccccagactactttctgtaattgtggtggtgaccttaactttctggtgtttgatgctcctctcttccgcagcatcagggtatgtagatcttgtccttagatatgg

SEQ ID NO: 1361 - DNA, 247 bp, Zea mays
gcacgagggaacacagctgcattcctggtttcttcattggcttctgccatcaccggctcgactgtttatgttgacaatgggctcaatacaatggggcttgcaattgacagccctaccataacgtcatagatgtggttgtggtagatagacgacctttcctgctgcattgcggtatcatccttgaataaagatcatagttagttataaatatgagaggtaagggcaggaaagggggaaaattatgaac

SEQ ID NO: 1362 - DNA, 251 bp, Zea mays
gcacgagtcaggattaatggatcattggcacggagggcaatcaaggatctgatggcaaggggattcataaggatgatctctgttcattccagccagcagatatacaccagggcaaccaacacatgagggctgttttgcatcttgtcggcgggtctctagacggcttaatgttgctattatatcatgtttatttcaatcatggctcagtcagccttactgttgtgtcggatgttggaatatttttagattac

SEQ ID NO: 1363 - DNA, 254 bp, Zea mays
gcacgagggctgagaagcggctccccgcgggcaagtccgcaggcaaggagggtggcgagaagaaggggaagaagaaggcaaagaagtcggtggagacgtacaagatctacatcttcaaggtgctgaagcaggtgcacccggacattggcatctcgtccaaggccatgtccatcatgaactccttcatcaacgacatcttcgagaagctggcggcggaggcggccaagctggcgcggtacaacaagaagcctacc

SEQ ID NO: 1364 - DNA, 244 bp, Zea mays
gcacgaggacaggttcctcggcgaggacggcgcgcagtgctccgccacgtcgtctggtccaacggccccgagacggcgtcgcccacgctgcaagacaagcagtgcgctggcaaggacttcgtcgtgctcatcgctcgcctcctcgtcgccgagttcttcctccgctacgactcctttgacgtccaggtcggcgcctccgcgctggggtcgtcggtgaccatcacctcgctcaagaaagccacct

SEQ ID NO: 1365 - DNA, 242 bp, Zea mays
gcacgagcttccttttgccaccatgggctctggttctcttgctgcaatgtcagtgtttgaatcgaagtacaaagaaggccttactagggaggagggaatacagattgtgtgcgaacaagtctgtgctggtattttcaatgacttgggtagtgggagcaacgtggacgtctgcgtgataaccaaggggaagacagaatacttgagaaaccaccagttgccgaatcccaggacttatgctagtt

SEQ ID NO: 1366 - DNA, 242 bp, Zea mays
gcacgaggcaatccggtccccaagtagcccgtcctgttcctgaagccgacctcgtcgtttctccacgctggtgtggccaccgccgccgtcgagatcccggagccgctcgagtcgctacaccacgaggtcgagctcgccgtcgtcatctcccggcgtgggcgcgacgttcccgaggcgtccgccatggactttgttggaggttatgcacttgctttggacatgacagcaagggaccttcagtc

SEQ ID NO: 1367 - DNA, 244 bp, Zea mays
gcacgagccaagatggagaaggacacctccgtcgccgaccgcctcgcccgtatgaaggtcaactacatgaaagaaggaatgcgtacaagtgttgaagcaatcctattggtgcaagagcacaaccatcctcacatactgctcctgcaaatcggtaatacattctgcaaacttcctggtggacggttgaagcctggagaaaatgaaatcgagggtttgaaaagaaagttatgcagcaaacttgctg

SEQ ID NO: 1368 - DNA, 243 bp, Zea mays
gcacgagatttatggcctgaatcttctttttacgcaaccaaacgacgaggatcctctgaaccacgaagctgcagttgtccttcgcgacaatccaaagatgtttgaggcaaatgtgagaagagccatggctggaggctacgtcggccaacactatttccaaagatgtgcttgacttgatgtggtggtggcttgaacacgatcaacagagcccctccccctgtatcagcaccagcgcgcccagct

SEQ ID NO: 1369 - DNA, 244 bp, Zea mays
gcacgaggctcaccccaccaacagcaagcgaaaatctcccgatcccctctagtctccgcggcgaagatgtcggggcgcggcaagggcgggaagggcctgggcaagggcggacgaacgccaccggaaggtgctccgcgacaacatccaggggatcacgaagccggcgatccggcggctggcgcgcaggggcggcgtgaagcgcatctccgggctcatctacgaggagacccgcggcgtcctcaaa

SEQ ID NO: 1370 - DNA, 246 bp, Zea mays
gcacgaagcgggttcgaggcggccgccggagctgagaacggcgggtgcaagtgcggcggcaactgccagtgcgacccctgcaactgcggcaagtgagctaggtgctccaacctgcaggccggccggaggaagctagctaattataaagcttaataaagtatagcggcgtcgctgtgtgtgtttcgagtcagtcagtcagttgcgtgccatggcatgctctgagtctgagatgatgatgatggctga

SEQ ID NO: 1371 - DNA, 244 bp, Zea mays
gcacgagaacgaccctctctttgtctgtcttggtggcaattgagatgttcaactcactgaatgccctgtcagaggatggcagcctcctgagcatgccgccatgggttaatccatggcttcttctggccatgtccgtttcttttgggctgcatttcttgatcctctacgtgcctttcctggctcaagtgtttgggattgtgcccctcagtttgaacgaatggctcttggtgatagcagtggcctt

SEQ ID NO: 1372 - DNA, 254 bp, Zea mays
ttcagtcctgatgatctgcaggagctggtgcattcgctctcttatgtgtaccaaaggagcacaacagccatatcagtcgttgctcccatctgctacgcacatctggcagctgctcaggttggccagttcataaagttcgatgagatgtcggagacgtcctccagtcatggcgggcatacttcggcgggcagcgttccggtccaggagctgccgcgcctgcatgagaaagtgaggagctcgatgttcttttgctg

SEQ ID NO: 1373 - DNA, 239 bp, Zea mays
gcacgagggcaagtacatggcatgctgcctcatgtaccgtggtgatgtggttcccaaggacgtgaacgctgctgtggccacaatcaagaccaagcgcaccatccagttcgtggactggtgcccgactggcttcaagtgcggaatcaactaccagcctcccagcgtcgtcccaggcggtgatctggccaaggtgcagcgtgccgtgtgtatgatctccaactccaccagtgttgtggagg

SEQ ID NO: 1374 - DNA, 243 bp, Zea mays
ccgctgcggctgcgcgcgcaggctgctgccatcggcacggggctcaaccggatcatgagcggcgccaccaccatgtccttcctctcgctctccaacgccatcaccatcgccggcagcttctacctctacgcgtgcatcgccgccgcaggctgggtgttcatgtacttcttcctgccggagaccatgggcaggagcctggaggacaccgtgaagctcttcggcaaggacgcggacgacgaggac

SEQ ID NO: 1375 - DNA, 237 bp, Zea mays
gcacgaggcatccctcttggagccgtgctgggctacgcgctggggcttcatgtgaagggcatctggatcggcatgctgctcggaacgctggtccagactgttgtgcttctcttcataacgttgaagaccgactgggaaaaacaggtggaggttgctcaagagaggctgaagagatggtacatggaagagaacagaagactccaggggtccagacgaaacccttaggccggccctcag

SEQ ID NO: 1376 - DNA, 243 bp, Zea mays
tctggatcgtggagagaagattgagctgcttgtcgacaagaccgagaatcttcgctcacaggcacaagatttcagacagcagggaacaaatgtcaggagaaagatgtggttacagaacatgaaaatcaagctcatcgtcctgggaataatcatcgcactcattctgatcattatcctctctgtctgtcatggtttcaaatgccattaagcacagaccagaatactgatacattcaactgcacc

SEQ ID NO: 1377 - DNA, 250 bp, Zea mays
gtcagggttcagtgatcaaaggatgggacgagggagttatgaccatgcaagtgggtgaagttgctcgtatccagtgcacgcctgattatgcttatggagccggcgggttcccagcctggggaattcaaccaaactcagtgcttgtgttcgagattgaagtcctcagtgcccagtaattcgcatctgtcagctatggaaacgttggccatgcttctcaagtaatgaaataattccgttgtcacctcatgct

SEQ ID NO: 1378 - DNA, 246 bp, Zea mays
gcacgagtggaatcttatcaagacattacccgatttatcaggaacagggaaagtaacttccgtaaaattcggagtagacgcgaaatacatagccataggttctatggaccgcaatctacggatatttggtctccctggagatgatcaaatggaggaatcaaacacagcggccgagtgatgggaattcatggtgcctaatttgtttcttctgccatcatcctcattatactgtggtgatggatagac

SEQ ID NO: 1379 - DNA, 244 bp, Zea mays
gcacgagtctggctgtgggcaggtggcacatggaggtggtgtggagattacagcaagggggaaagattaccctgtgagggaagggagtgtcactgccgcggtctctgctttgtcatttgaaaaggaaaccgtaattggggccaaccttcagtcagacttccgagtgggccgtggatcaaaaatatcagtcagcgctaacctaaatagtagaaatttgggcaatctcagcgtcagaactagcaca

SEQ ID NO: 1380 - DNA, 247 bp, Zea mays
gcacgagggctcttccgtggccaggatgttcccaagtttgtaatggacgaggtctatgacatggagctctacgagtggaccaaggtggacatctctgatgaggcccagaaggagcgtgtcaatgcgatgattgaggaccaggagccctttgagggcgaggccttgcttgacgcgaaatgcttcaagtgagtgtgcttgcctggagacagaactgtttagcccttgaatttgcctatggaagagtttg

SEQ ID NO: 1381 - DNA, 244 bp, Zea mays
gcacgaggtttgccccaaaaatccagcaaacttcaatgtcgacaatgttagagtggctaagctgcttggaggtggtttgcacaattcttctgtggtccgtgggatggttctaaaaaatgatgctgttggtagcatcaaaagggtggagaaggcaaagattgcagtatttgctggtggtgtcgatacctcagcaaccgaaacaaagggaacagtgttgatccattccgctgagcagctagaaaat

SEQ ID NO: 1382 - DNA, 241 bp, Zea mays
gcacgagcttcatcaacgacatctttgagaagctggccggcgaggccgccaagctggcgcggtacaacaagaagcccaccatcacgtcccgcgagatccagacctccgtgcgcctagtcctccccggagagctcgccaagcacgccgtctccgagggaaccaaggccgtcaccaagttcaccagcaactgagcgcgctgcgggatccgcggatctgttagaagggttctttgctgtgtcct

SEQ ID NO: 1383 - DNA, 244 bp, Zea mays
cgtcatcaagggacgtccctgcaaggttgttgaggtctccacttccaagactgggaagcatgggcatgccaagtgccactttgttggcattgacgttttcactggaaagaagcttgaggatattgttccttcttctcacaactgtgatgttccccatgttgatcgcactgagtatcagctgattgacatcactgaagatggatttgtgagccttttgactgacagtggcaacactaaggatgac

SEQ ID NO: 1384 - DNA, 244 bp, Zea mays
gcacgagagagaccgacgcgccggcagatcccaagctcaccggccacgcggaagacggcgaccgacgcggcgatgggtttcatcatggacttcgcggagaatatgatcctccgtctgatggaggacccggacaagcgcgaccaggttcggcgggagcatgtctacaagatgaaggagcggtgcgagcgcactaagccggcgtggagcctccctctgcgcccctacggcttctggaccttcgacc

SEQ ID NO: 1385 - DNA, 243 bp, Zea mays
gcacgaggatacactgaaggtgcgagctggattctaccgcaacttcctccttcccaagggcaaggctacacttctgaccccagaagtcctcaaggaaatgcagctggagcaggagagaatagaagctgagaagaagcgggtaaaagaagacgcgcaacaacttgctcgagtttttgaaaccattggcgctttcaaactccctcgcaaaggtggaaaaggaaaacagatctttgggagtgtcac

SEQ ID NO: 1386 - DNA, 236 bp, Zea mays
gcacgaggcctcatgtaccgtggtgatgtggttcccaaggacgtgaacgctgctgtggccacaatcaagaccaagcgcaccatccagttcgtggactggtgcccgactggcttcaagtgcggaatcaactaccagcctcccagcgtcgtcccaggcggtgatctggccaaggtgcagcgtgccgtgtgtatgatctccaactccaccagtgttgtggaggtcttctcccgcattga

SEQ ID NO: 1387 - DNA, 235 bp, Zea mays
gcacgagatcagttttacttgatgtgaagccatgggacgatgagactgacatggccaagctcgaggaagctgttaggagtgtccagatggaagggctgctctggggcgcatccaagcttgtcccagttggatatggtatcaagaagctgcaaatcatgatgaccatcgtcgacgaccttgtctctgtcgacactctcattgaggactatctgtgcgctgagccagtgaacgagta

SEQ ID NO: 1388 - DNA, 236 bp, Zea mays
gcacgaggttcagcttgcccggcagcggcagcatgcccctcttcggcggcggctccccgggcttcagcggcttcggcggcatgcccgggtcgcccaccgccggctccgtccccgagcacgccaacaagccctgaacgccaacaagcgtggtagtagagtggtgctactgttactgtagtacgtcgtcgtcttcatgcatgcgtggttcgtggtttcccctagctccatacgagcag

SEQ ID NO: 1389 - DNA, 216 bp, Zea mays
gcacgaggcaaggaggcaaagtcgcccaagaaggccgccaagtcccccaagaaggcatagactgactgtctggagtgatctgatgtttagcaggaccttgataccagtatgcggtgatgcgtaggctgtagatgggtcgaatgtgcttgtgtgtgtatgtgccctgctgcaagttgccctttgctatttaaaatggaagaagaaatgccttgtttc

SEQ ID NO: 1390 - DNA, 245 bp, Zea mays
gcacgaggttggagcaggcaatggagggcatggccaacctcaagggcgtgggcgcactgcgggtgcacgacgtcgccgccgccgtgctcttcctggccagcgatgacgcgaggtacatcagcggccacaacctgttcgtcgacggcgggatctccgtcgcgaatccatccactggaacgtccaaagattgaagtcactgcgcggtacatcagtgggacccgtcgcagtcacgtcgctgcgtggca

SEQ ID NO: 1391 - DNA, 238 bp, Zea mays
gcacgaggagaagatgacccagattatgttcgagactttcaatgttcctgccatgtacgttgcaattcaagcagtcctgtcactctatgctagtggccgtactactggtattgttctcgattctggtgatggtgtgagccatactgtgcccatttatgaaggatatgcccttcctcatgctattctacgtctggatcttgctggtcgggacctcaccgactcgctcatgaaaatctca

SEQ ID NO: 1392 - DNA, 249 bp, Zea mays
cgcaccctcgccgactacaacatccagaaggagtcgacgctgcacctggtgctccgcctcaggggaggcgccaagaagcgcaagaagaagacgtacaccaagcccaagaagatcaagcacaagcacaagaaggtgaagctggccgtgctccagttctacaaggttgacgacgccaccggcaaggtcacccgcctccgcaaggagtgccccaacgccgagtgcggcgcgggggtcttcatggccaaccac

SEQ ID NO: 1393 - DNA, 239 bp, Zea mays
gcacgaggacagcttagaccgggtggaacttgttatggcctttgaacaagagttctccgttgagatccctgatgacaaggctgacaagctgacctgttgtgcggatgttgccaagtacatcatatccgaatctgaagcgagtgatacaaatgccggtggatcctgagggacagatgaaaccgagtgcaatgtttctttttctttttgtgtgtgtgtttatcataacgagtctgggttac

SEQ ID NO: 1394 - DNA, 240 bp, Zea mays
gcacgaggcggcggtctcaaccccaggcgagctcggctccggtcacccgtcgatccacgcaaccatgtcgaggaggaagaccagggagcccaaggaggagaacgttacccttggacccactgtccgtgaaggagagtttgtctttggtgttgctcacatctttgcatccttcaatgacaccttcattcatgtcactgatttgtctgggagggaaactttggttcggatcactggtggcat

SEQ ID NO: 1395 - DNA, 269 bp, Zea mays
actagtggacccccgggctgcaggctcccgaccgcaacgcccctcatctccctcgaccccgacatccccgacccgatggcgcccaaggcggagaagaagccagcggagaagaagccggcggccgaggagaaggcggagaagacgaccgcaggaagaagcccaaggccgagaagcggctgcccgcgtccaagtcctccggcaaggagggcggcgagaagaaggggaagaagaaggccaagaagagcgtggagacctacaagatctacatc

SEQ ID NO: 1396 - DNA, 239 bp, Zea mays
gcacgagggtaattgttgctacaaggaggattgtgaggccacccaagaagggttcagctgttctgcgccctcgcaccaggactctgactgctgttcacgatggcatcttggaggatgttgtctacccagctgagattgtggggaagcgtgtcagataccgtctggatggttccaagattatcaagattttcttggacccaaaggagaggaacaacactgaatacaagctggagacctgc

SEQ ID NO: 1397 - DNA, 236 bp, Zea mays
gcacgaggaacattgccaacctgaagcagcattatggcctgagcaagactgcaaatgaggtgactatcctcatagaggcctacaggaccctgagggacaggggccctgtcccagccagccaggttgtgagagaccttagtgggaagttcgcgttcatcctgtatgacaccctgtcgaagtctacctttgttgctgctgacgctgatggtagcatccctttcttctggggcgttgac

SEQ ID NO: 1398 - DNA, 235 bp, Zea mays
gcacgagccaaggcggagaagaagccggcggcgaagaagcccgcagaggaggagcccgcggccccggcggagaaggctcccgctgggaagaagccgaagggacgaagcggctcccggcgggaaaatccgccggcaaggaaggcggtgttgacaagaaggggcggaagaaggccaagaagagcgtggagacgtacaagatctacatcttcaaggtgctgaagcaggtgcacccgga

SEQ ID NO: 1399 - DNA, 241 bp, Zea mays
ctggtctgggactccatcaggcagtgggcgtccgagtacgtcaacgtctactacaagtccgacgaggccgtggccgccgaccccgagctgagggcgttctgggacgaggtgcgcaacgtggggcacggcgacaagaaggacgagccgtggtggcccgtgctggacacccgcgacagcctggtggagacgctgaccaccatcatgtgggtcacctccggccaccactcggccgtcaacttcg

SEQ ID NO: 1400 - DNA, 231 bp, Zea mays
gcacgaggatcatcagagccatcccgttcaagagcaggtcttaagctgccgtggccgtgccgagacatgccagtccgaagaacgggcgtcttcctgtgatgtcttcttgtctgcccacgcctagtttctctgtcgattcctattcgtcgtctcttcagggctggtgctcactgctgcgccgttctgttaaccgaaacaagaactctgtgtattcctgtaccgagctgtgca

SEQ ID NO: 1401 - DNA, 239 bp, Zea mays
ttcggcacgaggctgactgttggtgtttttgacaatggacaacttggagagaagactggggagaagacatctagtggcaaagatgggaagataggcaaggttcggatacgcctttccacactcgaaactggtcgtgtgtacacccactcgtatcctcttctggttctacattcgtcgggggtcaaaaagatgggcgaactgcacctggcaattcgattttcctcaacatctctggtaaa

SEQ ID NO: 1402 - DNA, 233 bp, Zea mays
gcacgaggggaacccaggacgtgccctcaaagaccgaagcagccctgcactgaccgtgaaagctacctacaatggcgacaccgtccggttcaagtttgtgccagcaaggggctggtaccacttgctggaagagatagcaaagaggttcaagctgacggctggagcattccagctcaaatacaaggacgatgaggacgagtgggtgatcctggcgaacgatgccgacctccagg

SEQ ID NO: 1403 - DNA, 232 bp, Zea mays
gcacgaggagaggagaggttgggtctgggacaccatggctccgatgaagctgtacggggcggtgatgtcgtggaacgtgacgaggtgcgcaacggcgctggaggaggctggctccgactacgagatcgtgcccatcaacttcgccaccgccgagcacaagagccccgagcacctcgtccgcaacccgtttggtcaggttccagctctgcaggatggtgacttgtacctcttc

SEQ ID NO: 1404 - DNA, 230 bp, Zea mays
gcacgagagcaagtacccgcggcacgtgcaccaccgtggcgcgtccacgccgcacaacggcgtcaagtactcgtgcaccggcggctacaagtggcgcgacagctagaaggcggaccccaacctgctggcgggcgccatggtcggcgggcctgacaagaacgacggcttcaaggactcgcgcaacaccttcgggcagaacgagccgacgctggtgggcaacgccggcctcg

SEQ ID NO: 1405 - DNA, 231 bp, Zea mays
gcacgaggaggagcccgctgccgagaaggcgccggccgggaagaagcccaaggcggagaagcgtgtcccagcaggcaagtccgccggcaaggagggcggcgagggaaagaggggccggaagaagggcaagaagagcgtggagacctacaagatctacatcttcaaggtgctgaagcaggtgcacccggacatcggcatctcctctaaggccatgtccatcatgaactcctt

SEQ ID NO: 1406 - DNA, 226 bp, Zea mays
gcacgagcttcgccagggcctctggggactacgccattgtgatcagccacaaccctgacaacggcacatcgaggattaagctgccctctggcgccaagaagattgtccccagcagctgccgtgctatgattgggcaggttgctggtggaggcaggactgagaagccgatgctcaaggctggtaacgcgtaccacaagtaccgtgtgaagaggaacagctggcccaa

SEQ ID NO: 1407 - DNA, 236 bp, Zea mays
gcacgagacagcaaccaattagcaagcagcaggagtccatctcctccgtcaccaagatcggactagtggccttctaaggcacagtgctctggtgaccggaatcactggtggctcttctcctgcagtgttcaatgctgcacggctcatgtctaccaagctatttattggtggtcttgactggggtgttgatgacgtgaaactaagagaagcatttagcagctttggagaggttactg

SEQ ID NO: 1408 - DNA, 242 bp, Zea mays
gcacgagaccatccggaagaacatgccggtggaggagggcgggccgggcgaggagatggagaagttcctcaaagcagccggagacgacgctgctggacatgcagacgacgcagatgcaggccatcaaggtcatgacgacgctggacatcctctcgtcgcactcgcccgacgaggagtacatgggggagttcgcggagccgtcgtggctggcggagccatggtgaaggcggcgttcgagaagt

SEQ ID NO: 1409 - DNA, 250 bp, Zea mays
tcgatttcattcaagaataaacttaacatgcgttaatcatgaaactggagtggttgacccgaagaagttcagcgttctggggtaactggcagcgtgattactcaatggaatacatcctaacccatctcaagaaagagatgacatcgccacagaaccgcaagctagttcagcctccggaagggacattcttctaaagatggcagcaactcatgtccatccatggtgactcggaaacagcttccgcacctgg

SEQ ID NO: 1410 - DNA, 242 bp, Zea mays
gcacgagcgatggctttgaagacgtgcctgagaacgacgacaagtcgctgcagaaggcggttgctcaccagcccagttagcgttgccattgaggccggagcgccacaattccagctctacaaatcgggtgtcttcagcggaagctgcaccacgaaccttgaccatggtgtcgtcgcggtcggctacggcgccgagaacgggaaggactactggatcgtccgcaactcgtggggcccgaagtg

SEQ ID NO: 1411 - DNA, 243 bp, Zea mays
gcacgagaagcacaagaaggtgaagctctccgtgctgcagttctataaggtggacgacgccactggcaaggtgaccccgcctccgcaaggagtgccccaacacacccaaaagaggggcgtcttcatggccaaccacttcgaccgccactactgcggcaagtgcggcctcacctatgtctacaaccagaaggcgtaattgcttgccccgatttgctttatccgccaacctatcaagcattcaga

SEQ ID NO: 1412 - DNA, 245 bp, Zea mays
gcacgagctcgagtttttttttttttttttttttttcacatagaaacatatagctgggtaaataaccaatcattacggtcctatcagataacacagtgctacagacagatagataacatacatagaagccagcaggcagcagcacctaactacagcaagagacgtgaacacaggagagaatcctgcaagcggcggccgcgcagcctaggccgaggtgaacttggtgacggccttggtgccctcgg

SEQ ID NO: 1413 - DNA, 246 bp, Zea mays
gcatcgatgaggacaagtctgctgaggccgaagctgagatgcctccgctggaggatgacgccggcgaaacaagattggaggaggtcgactaagcttcggatcactgtagtttatccctaattacatatgataagctaaatcttgactactgtttgaggttttccgcacgttaacggttctcctgccggccaggcaatgagtttgctgtagctatatggtactctgttttacagtttgttcttgtta

SEQ ID NO: 1414 - DNA, 246 bp, Zea mays
gcacgagctcgagtttttttttattttttctatattcagagtccatctcctccgtcaccaagatcggactatatggggcggacagggagggtcggcacaggacatcacggcagagcagccaccacggcgtctgcacagcatcaccgtccgcgctggcgttgccgtcgactccatcgagttcacctacaccgacgacgctgggcagaggcgcactgctgggcggtggggtggacttggcggcaatgt

SEQ ID NO: 1415 - DNA, 238 bp, Zea mays
gcacgagcggacaacaagtccggtaatagtgtccagagtgaggtgcgcaccagttccggcatgtttcctcgagaagaagcaggatgaagtagtaacgaggatagaggagaggatatctgcttggacatttcttccaccagagaatggtgaagccattcagatattacactaccagaatggtgagaaatatgaaccccactacgactacttccatgacaaaaataatcaggccctgggc

SEQ ID NO: 1416 - DNA, 232 bp, Zea mays
gcacgagtggtgctactgttactgtagtacgtcgtcgtcttgaatgacgcgcggttcgtggttttcccctagctccatacgagcagtagttgggcattgcacgtaccgtacgtctagctagctatatatatatagcttgtgttctactgccttttagtttaattacctgcctgcattggagagttggatctgtttcatttggtggtgtttgctttactattaggtcagtatc

SEQ ID NO: 1417 - DNA, 206 bp, Zea mays
gcacgagcctacgtgctcgttgcgtcgttcggtttcgcgatatcagagtaccacctcttgaaagaaagtgtagtagcgtaatgaggcgtgactagtgatgtgatgtattgtactgtattgcaggatgttgcgctaatactgtggtcgatttgcgatgtttgttctgtatcggatgatgtttccttaataagctgctcgaatagatc

SEQ ID NO: 1418 - DNA, 234 bp, Zea mays
gcacgagggcaagtccgccggcaaggagggcggcgagggaaagaggggccggaagaagggcaaggaagagcgtggagacctacaagatctacatccacagagtgctgaagcaggtgcacccggacatcggcatctcctctaaggccatgtccatcatgaactccttcatcaacgacatcttcgagaagctcgccgccgaggccgccaagctcgcgcggtacaacaagaagccca

SEQ ID NO: 1419 - DNA, 52 bp, Zea mays
gcacgagcaggagcatactgcgaacagaccagcgctgggtgctgcaaccgaa

SEQ ID NO: 1420 - DNA, 251 bp, Zea mays
agatgcagagaaaaaatgccaaactcaccaagggcacatatgagaagttgcagcctcaaacaacagactttctagatatttcaaaccccaaagacaatcttggagaaaactttgaggaacttatattgaactaaatacaggtgaaagaaatatggttgcatataataaaaagaaagtactacattgatatagtagaagacaaagacctacaatgctataagtattattgagaccgattgagaagttgaact

SEQ ID NO: 1421 - DNA, 247 bp, Zea mays
ttcggcacgagcaactcccaaggtccctttttttttgtcggtctggaagcgccgcagtagcagccatggacgtgagcggacaggcggtaaggcgaagaccggcgcggcggggcgcaaggccggcgggccgacgaagaagtcggtgtcgcggtcctccagggccgggctgcagttccccgtcagccgcgtcgggcggtacgtcaaaaagggccggtacgcgcagtgctaggcacgggtgcccccgtct

SEQ ID NO: 1422 - DNA, 86 bp, Zea mays
gcacgaggcgacttcctcagcctcgccgacctgaaccatgtgtctgaacatcactgacagttcgataacgccctaagcatctgtgc

SEQ ID NO: 1423 - DNA, 244 bp, Zea mays
gcacgaggtttgctgaacaccaacgtggatgggaagcagaagatcatgttcgccatgacctcaatcaagggtgtcgggcgccgcttctccaacatcgtctgcaacaaggccgacatcgacatgaacaagagggccggcgagctgacgcctgatgagctggagcgcctgatgacggtcgtggccaaccctaggcagttgaaggtgccggactggttcctcaacaggaagaaggattacaaggacg

SEQ ID NO: 1424 - DNA, 245 bp, Zea mays
gcacgagagcaggtgcaccccgacatcggcatatcctccaaggccatgtccatcatgaactccttcatcaacgacatctttgagaagctggccggcgaggccgccaagctggcgcggtacaacaagaagcccaccatcacgtcccgcgagatccagacctccgtgcgcctagtcctccccggagagctcgccaagcacgccgtctccgagggaaccaaggccgtcaccaagttcaccagcaactg

SEQ ID NO: 1425 - DNA, 241 bp, Zea mays
gcacgagacagggcaggttccagggttcaccagctattattacgtaccgtgttcccacaaagactgctcttcaggaggcctactcaactcccatcttcccactggatattctcgctgagagacttcctgagaagaagtttgaatgggctaagaggcttgtggcgaaatatgggtcacttgtgtctgttgtctcatttgttggattgtttatctacctcgttgcgagcccgtcgaagagcag

SEQ ID NO: 1426 - DNA, 245 bp, Zea mays
gcacgagggatctggtttccaccgacttcaccggtgacagcaggtcgagcatcttcgacgccaaggccgggattgccctgaacgaccacttcatcaagctcgtctcttggtacgacaacgagtggggctacagcaaccgcgtcgtcgacctgatccgccacatgttcaagacccagtagagagagatatttctgcctccctatcgtgggtcgtccccaatggcctttggtcgcagacagtctttg

SEQ ID NO: 1427 - DNA, 249 bp, Zea mays
ttcggcacgagccaattcttcctcgttccgggtaaggccttgttcgtttgtgtcggattggtgggtcggaacaattcccggccggattgcttctctaatttatataaactttgattagccggaacgattccgggtgcaatccgacgcaaacgaacaagccctaactgagattaatttgtccttgctgtaatgtttagccagtcctgccccgatccggggaactgagagattgtctttatcgcaacatta

SEQ ID NO: 1428 - DNA, 239 bp, Zea mays
gcacgaggccggttcggagtgatttctatgtgcataggttctgggatgggtgctgctgctgtgttcgagcggggagacggcgttgatgagctcaccaatgctcggggaatctcgacccacaactggctttccaaggacgccatgtaaagctacacccaccaaaatttgccggaactggtagcattgtttccagatcgctgtagggagcgaattggggaataaaatgattttgtatttgt

SEQ ID NO: 1429 - DNA, 240 bp, Zea mays
ggcttgactggcaataaagttgagatgctatgtgacctatgcaacattacactgaacaaaaatgctgtctttggtgacagcagtgcattatcacctggtggtgtgcgcattggtacacctgctatgacctcaaggggtttggttgagaaggacttcgtgcagattgccgagtaccttcaccgagctgtgaccatctgcttgagcatccaggcggacagtggcaagattctcaaggacttc

SEQ ID NO: 1430 - DNA, 238 bp, Zea mays
gcacgaggtccaagaaaaactctcagtacacccattaactgcaccggtcctgggaaatgatcatgcagagttccgtcagcgtggtaccccttcggtagtgcctcccattcttgacggtgatatgcttgtgcaattcttggagctcaccggtgaacaacagcaagccatccttactcatgctttgccagggaaggggcaacataggcccctctcggttttccaggttttgcaaacatta

SEQ ID NO: 1431 - DNA, 245 bp, Zea mays
ctcttgcaccgccgccatgaccttcaagcgccgcaacggcggccgcaacaagcatggccgcggtcacgtcaagtacatccggtgctcaaactgcgccaagtgctgccccaaggacaaggcgatcaagaggtttcaggtgaggaacatcgtggaacaggcggccatcagggacgtccaggaagcatgcgtctatgatggctacgtcctcccgaagctgtacgccaaggtgcaccactgcgtctcgt

SEQ ID NO: 1432 - DNA, 237 bp, Zea mays
gcacgagaaattctcaagtacccccttaccacagaatcagcgatgaagaagattgaagataacaacactctggtcttcattgttgacctcaaggcagacaagaagaagatcaaggctgccgtcaagaagatgtatgacatccaggcaaagaaggtcaacaccttgatcaggcctgatgggaagaagaaggcttacgtgaagctgactcccgactatgatgctcttgatgtggccaac

SEQ ID NO: 1433 - DNA, 243 bp, Zea mays
gcacgagacgggcaccggcggcgagtccatctacggcgagaagttccccgacgagaagttcgtgcgcaacaacaccgcccccggtgtgctctccatgggcaacgccggggccaacaccaacggctcccagttcttcatctgcaccgtcgcgaccccttggctcgacgggcaagcacgtcgtcttcggccaggtcgtcgagggcatggacgtcgtcaaggccatcgagaaggtgggcacccgca

SEQ ID NO: 1434 - DNA, 235 bp, Zea mays
gcacgaggtttgcaactgatttcttcgagataaaggctgtgagtgaaatagagcctgctctcaagaaacaacttataatatccactgttgtgatgaccattggcattgcgctcatgttggcttggtcttccatacaccttcaccatttatgactttggagcccagaagacagtgcaaagctggcaattgttcttgtgtgtggcggttggtctctgggctggcttagtcattggtt

SEQ ID NO: 1435 - DNA, 235 bp, Zea mays
gcacgagcagatgtggctcttcgagcagaaggacctccggattgagggtcgcatcatcggattcgatgagtacatgaacttggtcctcgaagatgctgaggaaatcaacgtcaagaaaaacactaggaagacactgggccggatactcctcaaaggtgacaacataactttgatgatgaacagtggcaagtgaaagttcttatggcaggaacgatgtttggtgctcgcgttgagt

SEQ ID NO: 1436 - DNA, 230 bp, Zea mays
gcacgagggcacactgcccttcggcaccctattcatcgagctcttcttcatcatgtcaagcatatggatgggtcgtgtgtactatgtctttgggttcctcttcgtcgtcttgctgctcctggttattgtctgtgctgaagtttccctggttctaagttacatgcacctgtgtgttgaggattggaagtggtggtggaagtcattcttctcatctggatcggtggcaatct

SEQ ID NO: 1437 - DNA, 233 bp, Zea mays
gcacgagcagagctcagcagtgctcggacacgctcaaaagttatgggcttcagtttcactgtgcattggatatgtaactttctggtgggactatttttcctggagcttgtgcacaagtttggggttggagcagtctatgcaggttttggtggggtctccctgctgacagcactcttcgcctacaatttcatagttgaaacaaaaggacgttcgcttgaggaaattgagatgtc

SEQ ID NO: 1438 - DNA, 236 bp, Zea mays
gcacgagcacgctcaatctcctccaccttcctcgccgcctcactccctctgaggtcgcagatccgtccggttagacgaagccgcccgcacccatggcctccggtgagctcgcctgcacctacggcgccctcatcctcagcgacgacggcatcgccatcaccgccgagaaggtggccaccatcgtgaaggcggccaacatcaaggtcgagtcctactggccggcgctcttcgctaag

SEQ ID NO: 1439 - DNA, 235 bp, Zea mays
gcacgagcaccctccagcgcctccaccttcctcgccgcctcactccctctgaggtcgcagatccgtccggttagacgaagccgcccgcacccatggcctccggtgagctcgcctgcacctacgccgccctcatcctcagcgacgacggcatcgccatcaccgccgagaagatcgccaccatcgtgaaggcggccaacatcaaggtcgagtcctactggccggcgctcttcgctaa

SEQ ID NO: 1440 - DNA, 243 bp, Zea mays
cgggtgtggaagagaagaggtacaaactcatggactgaatgaatacataaaagcagctggttggctgtttcatacagcaagtacacataacacagaagccttttcccttctctctctctctccacacggtgttcagtgtaatttctttggaaaaaagacatgttgaacattgtaaagaaaaaactaataaggaactgtaaaaatggcatgcttactgtaacgaatagggaatacagactgggg

SEQ ID NO: 1441 - DNA, 246 bp, Zea mays
gcacgaggtgcacgttacacaggaggacttcgagatggcagtggccaaggtgatgaagaaagacacggagaagaacatgtccctgcgcaactctggaagtgaggctcatgccttgatgtacccaccgccacctttcacggcctctccctgaacggtgtaacggcatgctacggaccttttgcgacgtgccttgcatgcctgtgtttaaaggtttccttataacggttctaatatgttgttgccaag

SEQ ID NO: 1442 - DNA, 243 bp, Zea mays
gcacgagggatgccagagttgaaaattttctcaacatgtttgaaagcaatgtctacaatatgtctgatgcagagttcaagagtaatgtaagtgctcttattgatatgacactggagaaatacaaaaacatacgcgaagaatcagctttcttctatggagagatttctgaaggaaccctcaaatttgatagagaagaagcagaggttgctgcactgaggggagctcaagaaggaggagttggta

SEQ ID NO: 1443 - DNA, 250 bp, Zea mays
ttcaagcaggaggagatcagcaacatcgcaactctcctaattggttcagccgctggtgccatctccagcactgccaccttccctcttgaggtggcccgcaagcaaatgcaggtaggagcagtaggagggaggcaggtctacaagaatgtgttccatgcgctctactgcataatggagaaggaaggggttggcggcctgtacaaggggctcggaccgagctgcatcaagttgatgcctgcagcaggcgtct

SEQ ID NO: 1444 - DNA, 248 bp, Zea mays
gcacgagcagggataggcttcccgccaacctggtgcaggctcagagagactacttcggcgctcacacgtacgagagggttgacatgcctggttctttccacaccgagtggttcaagattgcgcgcaactccaagatctgaacatggcctcgtgtttgcatatgccagtatgccaccgtgtcgagtaatcaatcatattactgcttgcagggaggaactgtgtttgatttttattttccatgcgcaatg

SEQ ID NO: 1445 - DNA, 251 bp, Zea mays
gcacgagcgcattcctcccatctcccaagacctcctcagacccgagaagcgcactgcggccatggacgccaccggcactggagctggagggaaggcgaagaagggagcggccggtcgcaaggccggcgggccgaggaagaagtcggtgacgaggtccgtgaaggccgggctccagttccccgtcggccgcatcgggcgctacctcaagaagggccgctacgcgcacggcgtcggcagcggtgcccccgtct

SEQ ID NO: 1446 - DNA, 211 bp, Zea mays
gcacgaggcggcaagggcctgggcaagggcggcgcgaagtcgaccggaaggtgctgcgcgacaacatccaggggatcacgaagccggcgatccggaggctggcgcggcggggcggcgtgaagcgcatctcggggctcatctacgaggagacccgcggcgtgctcaagatcttcctggagagacgtcatccgcgacgcggtcacctacactg

SEQ ID NO: 1447 - DNA, 217 bp, Zea mays
gcacgagaggacaagatcagacctctttggaggcattacttccagaacacccagggtcttatctttgttgtggacagcaatgaccgtgaccgtgttgttgaagccagagatgagctccacaggatgctgaacgaggatgagctacgtgatgctgtgctgcttgtttttgccaacaagcaagatcttcccaatgccatgaatgctgctgagattactg

SEQ ID NO: 1448 - DNA, 235 bp, Zea mays
gcacgagggcggccaagctggcgccgtacaacaagaagcctaccattacgtcccgcgagacccagacctccgttcgcctcgtcctccccggcgagctcgccaagcacgccgtctccgagggcaccaaagccgtcaccaagttcaccagctcctaggcgagcgatgcgacgtgcactcgtctcctcttcttgcaggagtacaatagtagtacggttaggtgtgttgccgcggtggt

SEQ ID NO: 1449 - DNA, 251 bp, Zea mays
agaaactgacgcattttataaatcacattcacatcttcatcacaatataaagttactcaacaaccgatagagagatgattcacatagaaacatatagctgggttgaataagcaccattacggtcctatcagataacacagttgctacagacagatagataacatacatagaagccagcaggcagcagcacctaactacagcaagagacgtgaacacaggagagaatcctgcaagcggcggccgcgcaccta

SEQ ID NO: 1450 - DNA, 249 bp, Zea mays
gcacgaggtttgttgggacccatgaatatcttgccccagagatcattcgaggagatggccatggcagctcggttgattggtggactcttggaatcttcctttacgaattactctatggcaagacaccattcaggggaccggacaatgacgaaacactctcaaatgtgatctcacagggcttgaagttccctgacagtcccgcattaagcttccacgcgcgagatctgatcagagggctgcttgtgaaag

SEQ ID NO: 1451 - DNA, 262 bp, Zea mays
tttttacagaaaactaacataattagggactatttggaggacataaatgagataccaaagtcccgcatgttctggcctcgagagatatggagtaaatatgcagataaacttgaggacttcaaatatgaggagaactccaaaaaagcagtacaatgcttgaacaatatggtgactgatgcactgattcatgctgaagagtgccttcagtacatgtcagccttgaaggatcctgccattttccgtttttgtgcaataccccaga

SEQ ID NO: 1452 - DNA, 256 bp, Zea mays
gcacgaggtttgatctagtaaatgtttttgaagtattccttccacagctgttactatatccaaatccttctgatccattaaatggggaggctgcagcactgatgatgcgtgatcgtcctgtttatgaacagaaagtgaaagaatattgtgagaagtatgccaaaccagaggacgctggtatcactccggaagacaagtccagtgatgaagagcttagcgaggaggaagacgactccggtgatggagctatacttgg

SEQ ID NO: 1453 - DNA, 257 bp, Zea mays
gcacgaggcaagatcctctccctccgcatcgacgaccagatcaggagggagatcgggacgctcaagctgctcaagcacccgaatgtcgtccgcttgcacgaggttgctgccagtaaaacgaagatctacatggtgcttgagtttgtcaacggcggcgagctcttcgacaagatcgctatcaaggggaaactgtccgaacacgatggcaggaggctcttccagcagctaatcgacggcgtcagctattgccatgacag

SEQ ID NO: 1454 - DNA, 248 bp, Zea mays
gcacgaggtttgagaaagcgagcctcatttcgtgggcaacgcatcttgctcaagttggccgcttgcttgatcttgtagaccctgcactgcaggatgttgaccgagaccaagcgctgctatgcattactgttgcactcctttgcattcagaggtcaccagctcgccgcccatcaagtgcagaggtgcttgatatgcttgctggtgagggtgagccaccgcctcttccgatagagttctcaccatcacct

SEQ ID NO: 1455 - DNA, 249 bp, Zea mays
gcacgaggaaatgacaacggttgttcacgattcagacatagcacgcagcaggcaggggaggataactttggtgagcgcaccagcacgggcatcagttgccaccgaacaggtagcccagggaagagccaccgccaggagcagcgtggaccttggttgaaggacggtccgtaaggaagttgccagtgttctgaccatcagccctgtggtagttattggtttggctggtaaccccagcagcaacctgcttgg

SEQ ID NO: 1456 - DNA, 249 bp, Zea mays
gcacgagggtgtttctcaagcagctcaagtctggcctgctccttatctctgggcctttcaagatcaatggagtaccgatccgccgtgtgaaccagacctatgtcattgctacatcaaccaaagttgacatctctggtgttgatgtcgccaagtttgatgacaagtactttgccagggagaagaagcagaaggtgaagaagaccgagggcgagctttttgagacagaaaaggaggcatccaagtcactgc

SEQ ID NO: 1457 - DNA, 245 bp, Zea mays
gcacgagccacacctcttcttcttcctcctcctcctagcacagctagcgcctgctccccttcgcctgtgatcatgtcttgcagcagcggcaagtgcgactgtggctccagctgctcctgcggcagctcatgcaactgcatgtcccctaacgtggagaccgccgccgccagcagcatctagaccacggtcctcgacgagccgtccaccaaggctagcgtcggcggcttcgaggcggccaccgaggg

SEQ ID NO: 1458 - DNA, 258 bp, Zea mays
caaggatgctagtgatgggtcagagaaggcgcttctggatgagctgcaggcactggatgatcatctcaaagctcatggcccctacataaatggggagaacgtgtcagcgactgatcttagcctggggccaaagcttttccacctacagatcgcactggagcatttcaaaggctggaagatcccagaaaacctaaccaatgtccatgcctacaccaaggctcttttcagccgtgaatcttttgtcaagactaagccatc

SEQ ID NO: 1459 - DNA, 244 bp, Zea mays
gcacgagggagcataagaggtacaaccccaagaagctgacatatgagcagaggaaggccagcctcattgaaaggctcaaccaactcaactcctccggtggtgctgatgacgacgatgaggacgacgagtaaagttaattgccatcgaagtagtgctatctcaatccagcgatcagcaattgtgtactgtcttatgcggggacctgtagtactgcaataggcatttttgtttaagttttgcgagg

SEQ ID NO: 1460 - DNA, 241 bp, Zea mays
gcacgagaggtcttgctattgatgcatatggccctatcagtgataatgctggaggaatagctgaaatggctgggatgagccataggattcgtgagagaactgatgctctagatgctgcaggaaataccacggctgcaattgggaagggttttgccattggctctgcagccttggtttcccttgcactatttggtgcgtttgtaagccgggctgctatctccactgttgatgttctgactcc

SEQ ID NO: 1461 - DNA, 242 bp, Zea mays
gcacgaggtctcagacagtagacttgcagacgttgtacaacatagaaggctgggatgcgtacgcgttggcttttcaggcgacggaagagcaggcacatcttcaattcatgaaccctggcatggaggatgatccaacttgtggtcctatcctagacaacgttgccgtcaagaagctcttcaccccagacaaaccaaaggataacgtggtgctgaatggagactttgaggagggtccatggatg

SEQ ID NO: 1462 - DNA, 246 bp, Zea mays
gcacgaggctcaccacaccaaccagcaagcaaaaattccccaatcctctcgtctccgcggcgaagatgtcggggcgcggcaagggcggcaagggcctgggcaagggcggcgcgaacgtcaccggaaggtgctgcgcgacaacatccaggggatcacgaagccggcgatccggaggctggcgcggcggggcggcgtgaagcgcatctcggggctcatctacgaggagacccgcggcgtgctcaagat

SEQ ID NO: 1463 - DNA, 237 bp, Zea mays
gcacgagagactctcgcccaagtcgtcgggagtgaggaagaagctaggcaaaagatatactctgtatcgactcgtcattactttggctttggtgcttttgtatctgaggaactttcttacaaactgaaagaaattcccaaggtccgctgggttcttcctgattcatacttggatgtcaaaaacaaggactatggaggcgaacccttcataaatgggcaagctgttccttatgatcct

SEQ ID NO: 1464 - DNA, 239 bp, Zea mays
gtctccatgagctttcaaacaagcgaaggatctctattgctggtgcttccaaactgttggctaacatcctttattcatatcgtgggatgggactgtcgattggtacaatgatcgctggatgggatgagaagggtcctggcttgtactatgttgacagtgagggtgcgcggctcgtggggaacaggttctctgttggctctggttcactgtatgcttatggtatcttggatgatggttac

SEQ ID NO: 1465 - DNA, 233 bp, Zea mays
gcacgaggtctgtcaaggatgccatctcccagattgttggggatgccaaggagaagaataggaagttcactgagactgtggaacttcagattggtctgaagaattatgatccacagaaggacaagcgtttcagtggctctgttaagttgccccatatccctcgtcccaagatgaaggtgtgcatgcttggtgatgcccagcatgttgaggaggccgagaagatgggacttgac

SEQ ID NO: 1466 - DNA, 148 bp, Zea mays; identical to SEQ ID NO: 880

SEQ ID NO: 1467 - DNA, 236 bp, Zea mays
gcaatttcgtggttgtcgtttggttattctgtgaagcagccaagccaggctattgttatgaaaatttgtcgtctgtaagcatgtgaacttccgatgttgccacatgctggatcagtctgaataagtaagtatgcagctctaggtggtcagctgcgtctaccacaatgagcatgaacgtatggagaaatatctgtgaacccattttgtttatgaataagatttgtttttttcgagtt

SEQ ID NO: 1468 - DNA, 231 bp, Zea mays
gcacgagcgagtttttttttttttttttttttttttttttttttagacatcactaacaacatcagaggagcgagcttgcggtcaaaaacacagataggcaacaacaacaacgaacacgaaacgaaacatacggacacgagacgaccacagacgaagataaaccccctctagactagggtgaacacggtagcagaagcgaacaagataactaggcctcagcggaccccaccg

SEQ ID NO: 1469 - DNA, 232 bp, Zea mays
gcacgaggttgaaaagaaaattaggacctctactgttgaaataaacgacgaatcaagagggcgtccattccaaaaggccaagattgagataatcttgggaaagagcgacaaatttgatgagctgatggccgctgctgcagaagagaggggcgaagtggaagatggtgaagagcaggcttgaaaacagtaccgatgacaagctgctgctgctgtgctctgttagtgttgttta

SEQ ID NO: 1470 - DNA, 235 bp, Zea mays
gcacgagaagaagactcgcattattccgcgccacgtgcttctggcgatccggaacgacgaggagcttgggaagctgttgggcggcgtgactatcgctcacggcggtgtgctccccaatatcaaccctgttctgctgcccaagaagacggcggagaaggcgtccagtgtggggagcaaggaggcaaagtcgcccaagaaggccgccaagtcccccaagaaggcatagactgactgt

SEQ ID NO: 1471 - DNA, 235 bp, Zea mays
gcacgaggtcaagaacccatggccaaatgttgatgctcacagtggagttttgctgaaccactttggactatctgaagcacggtattacactgtcttgttcggtgtttcaagaagcatggggataggatctcagctcatctgggaccgtgcccttggcctgccacttgagaggccgaagagtgttaccatggagtggctggagaactactgcaagaacaaggctgcttgaagcttt

SEQ ID NO: 1472 - DNA, 219 bp, Zea mays
gcacgaggtcaagaaaaggagaaattgtgacaaatgtgttgggtgtttgtgcacctgacatgcagtttatatatgtcttacctggttgggagggttctgcacatgacgggcgtgtgcttcgagatgccatctcgaggccgaatggattacgtgtccctcaaggcgagttctgtcccttcatattgaaaaaacaattatttaggcatagttattggtatt

SEQ ID NO: 1473 - DNA, 228 bp, Zea mays
gcacgagctcccgttagactaggttaggctagggtgtcgaccagctcgcggaaatggtggccttcaggttccatcagtaccaggtggtggggcgcgcgctgccgacgcccggcgacgagcaccccaagatctaccgcatgaagctctgggccaccaacgaagtccgcgccaagagcaagttctggtacttcctgaggaagttgaagaaggttaagaagagcaacggtc

SEQ ID NO: 1474 - DNA, 227 bp, Zea mays
gcacgagaaagactgctaattgtctctgtatttggtaattcagctgtagattgctatgatggttgggatttactcgtgaaccagagtttttctatcttatatcctgaattggttatcccaaaagggaaaaaaaaaaaaaaactcgagtttttttttttttttttacacataataactaagataaatcacaagatgatttccatggaaaaggccatacctgagaacag

SEQ ID NO: 1475 - DNA, 232 bp, Zea mays
catgattgagaggtccaccaaccttgactggtacaagggcccaaccctacttgaggctctggacttgatcaatgagccaaagaggccttcagacaagcccctgcgtctcccccttcaggatgtgtacaagattggtggtattggaactgtccctgttggacgtgttgagactggtgtcattaagcctggtatggttgttacttttgggcctactggtcttactactgaggtt

SEQ ID NO: 1476 - DNA, 227 bp, Zea mays
gcacgaggatggatctatgaaaatcatagaccgtaaaaagaatatattcaaactttcacagggtgaatatgtggcagttgaaaatttggagaatgtttatggtcttgtttctgctatagactcgatatggatatatgggaacagctttgagtcctttcttgttgctgtggtcaatcccaacaaggaggttctcgagagttgggctgcagcaaatggaataagtggtg

SEQ ID NO: 1477 - DNA, 225 bp, Zea mays
gcacgaggagacattcacctggcttgagctggcttttgctatagcgtgcaaggggttgctgggtgtcgtacctacctgacttatcattatctgtggttacattctggaccctgtattttctatgctttcatgtctctctactttctagtattaattatcaataagttggtttggaatggttgaattgcaaaaaaaaaaaaaaaaaaaaaactcgagggggggccc

SEQ ID NO: 1478 - DNA, 233 bp, Zea mays
ttcggcacgagaggtcatctcatccctgacggcttccctgaggttcgatggtgctctgaacgttgatgtgaacgagttccagaccaacctggtgccctacccgaggatccacttcatgctttcgtcctacgctccagtcatttctgctgagaaggcctaccacgagcagctgtccgtggctgaaatcaccaacagcgccttcgagccatcctccatgatggccaagtgcgacc

SEQ ID NO: 1479 - DNA, 229 bp, Zea mays
gcacgaggacagccctaccataacgtcatagatgtggttgtggtagatagacgacctttcctgctgcattgcggtatcatccttgaataaagatcatagttagttataaatatgagaggtaagggcaggaaagggggaaaattatgaactggtcttttgcgctttctttgctggagaggaacattagagcgatttccagaatgatgggatgctattatgtgatttcata

SEQ ID NO: 1480 - DNA, 227 bp, Zea mays
gcacgagcctcgcgccaccgtcgccgccgctgcagcgagccaccgccctgccgtcgcctgaggtagacaccaagccaccgccatggggcgtatgcacagccgcgggaagggtatctcttcatcggcgctgccgtacaagaggactcctccgatctggctcaagacagctaccaccgaggtggaggagatgattaccaaggctgcgaagaagggccagatgccgtcgc

SEQ ID NO: 1481 - DNA, 225 bp, Zea mays
gcacgagccgcaacgacgaggagctcgggaagctactggccggcgtcaccatcgcacacggcggggttctgcccaacatcaaccctgtgctgctccccaagaaaaccgctgtcgctgctgccaaggaaggcaaagagaagaagtcacccaagaaggccgccgccgccaagtcgcccaaaaaggtggccgcctcgtaggtccctggcaatgctgatgcactgtctc

SEQ ID NO: 1482 - DNA, 245 bp, Zea mays
gcacgagggattacaagatcttggtgcagattctctccagtcagctcatgatcttttgcggtcagagacactcagattagaggtgagaaccggtgctgcccaggctgaaggaggtatccatggactggtttcatacgagaagaaggcattctaggtccataactaaacaaagaagtattggaacgatagtgcttagctgcatgatatggaagggggtgatgctcatttatcctacctggcaaaag

SEQ ID NO: 1483 - DNA, 251 bp, Zea mays
ttcatgtccatcctgttcaatacctctcaccgtggacttaacagcacaaaattcagttggaaaagtaactcgaagtgtcaagggtcgcaaatgttcaggaatattgagcagactaccaagccttgtggattttaagacgagtacaaaaattgatgccttgagggaggagataagaaacatgattgagcacgatggttctgccaaagggattgtcttcagccagttcacatcattcttggatttgattcagt

SEQ ID NO: 1484 - DNA, 245 bp, Zea mays
gcacgagattggaatggatgttgctgcttctgagttcttcggtgagaaagacaagacttatgatcttaatttcaaggaggagaacaacgatggctcaaagaaaatttcaggcgacagcctgaaagacctgtacaagtcctttgtttctgagtaccctatcgagtcgatcgaagacccatttgatcaggacgactggagcacttatgccaaactcactgatgagattggacagaaagtgcagattg

SEQ ID NO: 1485 - DNA, 251 bp, Zea mays
cttccatccaaacatcaatagtaatggaagcatatgtctcgacattcttaaggagcagtggagccctgctttgacaatctctaaggttttgctttctatctgctcgctgcttactgatcccaacccagacgatcctcttgtccctgagattgctcacatgtacaagacggatcggcctaagtacgaggcaacagcccgcagctggacccagaaatatgccatgggatgaaaatgaaatgaagtcgaaactc

SEQ ID NO: 1486 - DNA, 251 bp, Zea mays
ttcggcacgagaaagagctagcagcacagcctgatgtcgatggttttcttgtcggtggagcttctttgaagcctgagttcatcgacatcatcaacgcggccaccgtgaagtccgcttaagatgctacgctgaagacgaacatactttttttttgctcaactgtgctatgtaagctagtagcttttgcgcaggagcagagactgttttgcctgcccccaacttctagcttgagcttgctaataatgtttacc

SEQ ID NO: 1487 - DNA, 246 bp, Zea mays
gcacgagaacaaatgtcaggagaaagatgtggttacagaacatgaaaatcaagctcatcgtcctgggaataatcatcgcactcattctgatcattatcctctctgtctgtcatggtttcaaatgccattaagcacagaccagaatactgatacattcaactgcacctattatactgctgcttggagcaaaaaaaagtatgatcttttgttgtttcgctagtgtgctgtggcccggtcattatgcat

SEQ ID NO: 1488 - DNA, 246 bp, Zea mays
cacaggctcaccccaccaacagcaagcgaaaatctcccgatcccctctagtctccgcggcgaagatgtcggggcgcggcaagggcgggaagggcctgggcaagggcggacgaacgccaccggaaggtgctccgcgacaacatccaggggatcacgaagccggcgatccggcggctggcgcgcaggggcggcgtgaagcgcatctccgggctcatctacgaggagacccgcggcgtcctcaagatct

SEQ ID NO: 1489 - DNA, 240 bp, Zea mays
gcacgaggtgccaagaagtcggtgagcatcaacgagttcctgaaacctgctgaaggagaaaggtactacggcggccgtggccgtggaaggggccgtggggatcgtggtggttttagaggcggataccgagggggatacagtcgtggcccagctgctgctgctccatccattgaagatcaagctcagttcccaagccttggtgggaagtcaagggcgcccagctgctgctgtcaccgagcg

SEQ ID NO: 1490 - DNA, 246 bp, Zea mays
tcccgatcccctctagtctccgcggcgaagatgtcggggcgcggcaagcgcgggaagggcctgggcaagggcggacgaacgccatcggaaggtgctccgcgacaacatccaggggatcacgaagccggcgatccggcggctggcgcgcaggggcggcgtgaagcgcatctccgggctcatctacgaggagacccgcggcgtcctcaagatcttcctggagaacgtgatccgcgacgccgtcaccta

SEQ ID NO: 1491 - DNA, 242 bp, Zea mays
gcacgaggcggccaggacttcaggtacctgccgttcgggtctgggcgccggatctgccccggggccaacttcgcgctcgcgaccatggagatcatgctcgccaacctcatgtaccatttcgactgggaggtccccaatgagaaggaagacggtggcgggaaggtgagcatggacgagacgttcgggctgatgcttcgcaggaacgagccgctctaccttgttcctagggccgtctagctagc

SEQ ID NO: 1492 - DNA, 236 bp, Zea mays
gcacgacgcggcgaccgtctcacccgcgccgcaaaggtgctcgagcagctcagcggccagacccccgtcttctccaaggcgaggtacacggtgcggtcgttcggcatccggcgtaacgagaagatcgcctgctacgtcacggtgaggggcgagaaggccatgcagctgcttgagagcggcctcaaggtcaaggagtacgagctgctcaggaggaacttcagcgacaccgggtgctt

SEQ ID NO: 1493 - DNA, 235 bp, Zea mays
gcacgagggcaagggtatcaagctcagcatcatcgaggagcagaggaggcgcgactttgctgcccaggctgctgccaaggcataagttctctgaatgtgctgcttggagctttttgctatgtctagtttaatttttatctgcaaggatatagagctaccttcccaagactttatcatcatgttttgttgcttttggttcttgaacagcgtttgcagcttagctgtaatgctttaa

SEQ ID NO: 1494 - DNA, 234 bp, Zea mays
gcacgaggcccgggagagcgtggcggtggcggtggattcggcggagcgtacgaggacttccgcgagtccatggtgcagatggtggtggagaaggagatctacgcgtgggacgacctccgcgacctcctccaccagttcctctccctcaactcgccgcgccaccacccgctcatcctccacgccttcgccgacctctggacccgcaacggcctcttctgcccgccatctccctgc

SEQ ID NO: 1495 - DNA, 236 bp, Zea mays
gcacgagatcaacttgttaagatagccaaggtacttgggacagatgggctgaatgtttatttgaacaagtacagaattgagcttgaccctcagcttgaagccctcgttggaaggcatagcaggaaaccctggttaaagtttatgaacgcagataaccagcacctagtgtctcctgaggccatagatttccttgacaagcttttgcgttatgatcatcaggagaggcttactgcact

SEQ ID NO: 1496 - DNA, 243 bp, Zea mays
tcggtttctcgtattctccgcgattccgcgaaacgtgcctctgtgaatcgtggatttgtactggttcctgttcgatccggtaggtggtttgctgaaaatcttggaatctttctgtaggggagttgatcgagaagcgttggtggacatgggtcagatccagtactccgagaagtacttcgacgacacctacgagtacaggcacgtcgtcctcccgcccgaggtcgccaagctcctccccaagaa

SEQ ID NO: 1497 - DNA, 239 bp, Zea mays
gcacgagccaggctctcggtgaggaagaccaaggcagagaaggacccaaacaagcccaagaggcctccgagcgcgttcttcgtcttcatggaggagttcaggaaggactacaaggagaagcaccccaatgtgaagcaagtctccgtgattggcaaggctggtggtgacaagtggaagtccctgtctgatgccgagaaggctcgctacgtgtctaaggcagagaagctcaaggctgagta

SEQ ID NO: 1498 - DNA, 236 bp, Zea mays
gcacgaggctaagcgcgtcaccatcatgcccaaggacatccagctcgcccgccgcatccgtggcgagcgcgcgtaccatcatctccggggatctgatgaatgtctagttaccaaacaaataggctgtattagcgtcgttgttctgtattcgttattttggattcggttgcagtgaaaaacagctttactaatcttatttgtgatcaaaaaaaatgaaaaaaaactcgagggggggc

SEQ ID NO: 1499 - DNA, 236 bp, Zea mays
gcacgaggccacctccaattgatgaagaaggaagagaaagatttgcacggtcactttatggacagaatgcgaggaagctacctgaaaggacaaatgaaatggctggggtctatgctggttattgcgtcgaactagctagagaaatgtgtataccctgtgttaatatctggtcaaagatgcaggagacagaaggatggcagaaactttacctaagtgacggtctgcatctgacacag

SEQ ID NO: 1500 - DNA, 235 bp, Zea mays
gcacgaggatgacatttgggcagcctcgtattggcaatgctgcatttgcttcttatttcaagacatacttgcctcaagcgatccgagttactcatgcccatgatattgtgcctcacctgccaccatatttctcattcttcccacagaagacctaccatcacttcccaagagaggtatggacccacaatattggactaggaaccctagtgtaccccgtagaaaagatctgtgacga

SEQ ID NO: 1501 - DNA, 227 bp, Zea mays
gcacgagaaaaggactttggtatgtaggagagggagctgaagtgggcacatgcacagaggaccctccatgggctacaggcacctgatgccaagatgttcccagagaaggctgggtacaatgagctgaaccagatggctgaagaggcgaagaggagggccgagattgcaaggctgcgggagcttcacacactcaaagggcatgtggagtctgttgtgaagctgaaggg

SEQ ID NO: 1502 - DNA, 233 bp, Zea mays
gcacgagcatggggagattgattatgaagcagtcgtgaaactagctgaaggtttcaatggggctgatcttcggaacgtgtgcaccgaagctggcatggctgcaattcgtgcagagagagattacgtagtccacgaagacttcatgaaggctgtgaggaagctaaatgatgcaaaaaagctggaatcgagtgcgcattacagtgcagattttggcaaagagtaatgatgctaat

SEQ ID NO: 1503 - DNA, 238 bp, Zea mays
gcgctggaattcggagcgtagtggatgatgaagctgggaaatcaaatggtggtctcaagagtgatccaatgtgcaatgcttgtgagatggctgtggtatggatgcagaaccaacttgcccagaacaagacacaggagctcatcctgaactacattaatcagctttgcgagcgtcttccgagtccgatgggagaatcagccgtggactgtggcagtcttgcgtccatgcctgacattgc

SEQ ID NO: 1504 - DNA, 232 bp, Zea mays
gcacgaggcaggaagagggttggacttacgggattcaactgccggtgtgggaacttgtactgcgcactccaccgctactccgacaagcacgactgcaagttcgactaccggactgctgccagggacgccattgccaaggctaatccggtggtgaaggcagacaagctcgacaagatctagggggggttccctacggttgggtatcaggaagattgtaaaccgcggtaactcg

SEQ ID NO: 1505 - DNA, 232 bp, Zea mays
gcacgagcagaggctcgtcagggaaattgcacaggacttcaaaactgatttgcgtttccagagccatgcggtgcttgccctccaggaggctgctgaggcataccttgttggcctgtttgaggacaccaacctgtgcgccatccatgctaagcgtgtgaccatcatgccaaaggacattcagctggcaaggaggatccgcggcgagagggcctaatcgccacctcaaacatcg

SEQ ID NO: 1506 - DNA, 233 bp, Zea mays
gcacgagcaaggaagaagatggatgccactgcccaagagctgacggaggagaagacgcttgcttactcatgcctcgagtaaattctaccacacccagagagcaattgccaccccaatgttttgaataaaaaaagaaactccaactcgattcatagattctcactcagaactgctgcacgtcgcagtgcaggcgtgttgctggcttcgcccagcttctttttttgcctgtgatt

SEQ ID NO: 1507 - DNA, 226 bp, Zea mays
gcacgagagctcacggcgcccttcgacttcccgcgcttcctcggcctcatgcgcgcccacctcaggcccgagcccttcgaccgcccgctccgcgacgccttccgcgtcctcgacaaggacggctccggcaccgtcgccgtcgccgacctccgccacgtcctcacctccatcggagagaagctcgaggtgcacgagttcgacgagtggatccgcgaggtcgacgtcg

SEQ ID NO: 1508 - DNA, 229 bp, Zea mays
gcacgagtcgagttttttttttttttttttttgagcatgatctattcgagcagcttattaaggaaacatcatccgatacagaacaaacatcgcaaatcgaccacagtattagcgcaacatcctgcaatacagtacaatacatcacatcactagtcacgcctcattacgctactacactttcttcaagaggtggtactctgatatcgcgaaaccgaacgacgcaacgagc

SEQ ID NO: 1509 - DNA, 227 bp, Zea mays
gcacgagcaaatctgttattgatggcattgagcatattggcatgatgaaaggtgatattggtgacagccaagacattttggtgagggtgcactctgagtgcctcacaggcgacatttttggatccgcaagatgtgattgtggcgaccaacttgcgatggcaatggagatgattgagaaggctggaaggggcgtattagtctatctccgtggacatgaaggaaggggt

SEQ ID NO: 1510 - DNA, 227 bp, Zea mays
gcacgaggaaatttgatgtcattgacataatggagtctgctgtgaaaggatacaaggaagctagtggaactatatcaggtcctggggcgttcggcaaactaaagtttgagagtggcatccatagagttcagcgagtgccagcgactgagaaatctggacgaatgcacactagtgctgtatcagttgctgttcttccgcaagctgatgaggttgatgtccagctgcga

SEQ ID NO: 1511 - DNA, 143 bp, Zea mays
gcacgaggtttgcctggtcatgaagtattattactttcgttgaaaccgtgatgctattaagacttaatttttttatggaacatcgaatgtaaggcatacatggttatgagttttgtactaccctttgcagtgtgttcctgttt

SEQ ID NO: 1512 - DNA, 235 bp, Zea mays
gcacgagaagaggaagggaatgcattgttcaaatcgggcaaatatgctagagcttccaagcgatatgagaaggctgccaagtacattgagtacgacacttcgttcagtgaagatgagaagaagcaatccaagcaactgaagatcagctgcaacctaaacaatgctgcctgcaaactgaagttgaaggattacaaggaagctgcgaagttgtgcaccaaggttctggaactagaca

SEQ ID NO: 1513 - DNA, 237 bp, Zea mays
gatgggcttgagcgatcaggacattgttgccctctctggtggccacaccttgggaaggtgccacaaagagcggtctggtttcgagggggcctggactacaaaccctttggtctttgacaactcttacttcaaggaacttctgagtggtgataaggagggccttcttcagctcccaagtgacaaagccctgctgagtgaccctgtcttccgccctcttgtcgagaaatatgctgcgga

SEQ ID NO: 1514 - DNA, 233 bp, Zea mays
gcacgagctgtccttcgccacggtgcgcggcgcgtcccacgaggcgcccttctcgcagcccgagcgctcgctcggcctcttcagggcgttcctcgccggacagcagttgccggaatcgttccagtgacgacggaacgttcctcttcctcgtttagtgtatgttcattgtaagcgtgtacgtgcagctcaccgtatgtcgtcatcatccggccgctcgacactggcaaaacaac

SEQ ID NO: 1515 - DNA, 165 bp, Zea mays
gcacgaggcgcaactaagtcgcgccactccaatgggcagggccgctggcccgtgtaaatcagccaggttcatcctggatttgctgaagaatgctgagagtaacgctgatgtgaaaggcttggatgtggacaacctctatgtttcacacatccaggtgaatcaagc

SEQ ID NO: 1516 - DNA, 228 bp, Zea mays
gcacgagctgcctgctacaaggcgctcaacgagcaccatgtcctcctggagggtaccctcctgaagcccaacatggtgactccaggctccgactccaagaaggtgacccctgaggtgattgctgagtacaccgtccgtaccctccagaggaccgtccctgctgctgtgcctgctgttgtcttcctctctggtggacagagcgaggaggaggccacccgcaacctcaat

SEQ ID NO: 1517 - DNA, 229 bp, Zea mays
gcacgagtgaacccgccgccgacgcagcagcaggagacgcgccaaggagagcccgcaaggaggcgactatgagggccaagtggaagaagaagcgcatgaggaggctgaagaggaagcgccgaaagatgaggcagagatccaagtaggctgatggggattgtggatggtggtgtcggcatagttgtgttacgtttcttcgatgcgtgagttcatggagagatgtcacatc

SEQ ID NO: 1518 - DNA, 229 bp, Zea mays
gcacgagagaatatcatgaagaagtggataccggagcttcagcattatgcacgtggggtgcctgttgtgttggtaggcacaaaatttgatcttcgtgaagacaagcactacttgatggaccatcctgggttggtgcctgttaccacagcacaaggggaggaacttcgtagacaaattggtgctatgtattacatcgaatgcagttcgaagacacagcagttggcttact

SEQ ID NO: 1519 - DNA, 228 bp, Zea mays
gcacgaggtcaaccagcgtatagtgaagcttatagctgagcttatgaggaaccatgacagccctgaagcgttggtgatactcgctagtgcctccgaccttctacttcgtgctaccgatggaatgctcgtcgatggtgaagcttgtactttgccacagcttgagcttctggaagtgaccgctcgggctgtccatcttatcatcgaatggggagattcaggtttatcagt

SEQ ID NO: 1520 - DNA, 230 bp, Zea mays
gcacgagtctcaaaccaacctaggcaattcgccgcagcctctcaccctcgcgagtcccgacctcccgcagccgccgcacagatggcacccaaggcggagaagaagccggcggccaagaagcccgtggaggaggagcccgcgacagagaaggtggagaaggctccggcggggaagaagcccaaggccgagaagcgcctcccggcgggcaagtccaaggagggcggcgaggg

SEQ ID NO: 1521 - DNA, 228 bp, Zea mays
gcacgagcaggatccggctctctacactggagacagacagagtgtacacgcatttctaccctttgctggttttacatccaagtggactcaagaagactggtgagcttcatttggctgtgcggtttacctgcacagcttgggtgaacatgatggcgttgtatggtcgaccgcttcttccaaagatgcactacacacatccaatcgcagtgatgcaattggactacctga

SEQ ID NO: 1522 - DNA, 228 bp, Zea mays
gcacgagatgatgcacccgcgcactacggcttcacgcagtccaccagaggatgctgcggcacgggcctcctcgaggtctccgtcctctgcaacggcgtcacctccgccgtctgccaagacgtcggcgactacctcttctgggacagctaccacccaacggagaaggcgtacaagatcctcgccgacttcgtcttcgacaactacgtcaagctcatcctcgtctagctt

SEQ ID NO: 1523 - DNA, 221 bp, Zea mays
gcacgagacacgtcggacgttaccggcgagaaggccgaggggcttactgccatgggcattcccaacagcatctccatatgagcctgggcagattgtgtctcgtagtaaattgttgtgctgcgccgtgcgatgtgtttcttcattggttttgtcagtctcagggtaggggatggagatcataccatgatctttgtagggttgagagaggagtccacgcttga

SEQ ID NO: 1524 - DNA, 221 bp, Zea mays
gcacgagaattcctctaggaaagcaatgtggctttgttcaatttgttagcagaactgatgctgaagaagcactacaaggattaaatggatcactcattggaaagcaggcagttcgcctttcatgggtccgcagcccatcgcataagcagtctaggggtgactccgtcaacaggaggaacaacatgtactatggcacaccattctacggcggatatggctat

SEQ ID NO: 1525 - DNA, 68 bp, Zea mays
gcacgagatggatacagtatggccagacacacacacataccagtacgctacgttagccttttaatcgt

SEQ ID NO: 1526 - DNA, 223 bp, Zea mays
gcacgaggtttgaggggctgtgcaaggtcatcaaggaggttctgggtgacaaagttgagaaggtggtggtgtctgatcgcgttgtggactcaccgtgctgccttgtgactggcgagtatggctggaccgccaacatggagaggatcatgaaggcacaggccctgagggactcgagcatggcgggctacatgtcgagcaaaaagacaatggagatcaacccaga

SEQ ID NO: 1527 - DNA, 223 bp, Zea mays
gcacgaggcagcgttgaggatctaatcctctccgtgggatctggtggtggcgctgctccagttgctgcttccgccccagctgggggtgctgcagctgctgctgcccctgctgcagaggagaagaaggaagagcccaaggaggagtctgatgacgacatgggcttcagcctgttcgactgagaccctcgctacccagccattagcaaattcgcttatgctgtcc

SEQ ID NO: 1528 - DNA, 245 bp, Zea mays
gcacgagggcaacttctttcatctaatgttctctgtcaggaccagctgaaaaagattttacatgacactgatcttgaaagcattgaacagtgctatatggagatgaacacagtagagttcaaccttgagcaagctctgaatacggttctgatgcaaggcattcctttgggcaaggaaaaacagatttcaattgaacgtaattggcctgtggaagtatcatgcatgtacctttatggggacaattt

SEQ ID NO: 1529 - DNA, 243 bp, Zea mays
gcacgaggccggcagtcgccgtcatcgatggatcgacggaaaactaacccctaacgatgtctggagccggcgaggaggacaagaagcccgcggagggcggcgcccacatcaaccttaaggtcaagggacaggatggcaatgaggtgttctttcgcataaagaggtccacccagctgaagaagctgatgaacgcttattgtgaccgccagtctgtggacatgaatgccattgcgttcctgtttg

SEQ ID NO: 1530 - DNA, 240 bp, Zea mays
gcacgaggagaggtcgaaaccctagcttttgcggcggcggcgagagaagatgatctacgacgtgaactcccccctcttccgttccttcctcagccagaagggcggcgccgacaagaggaaaatggaggagcataaaccaaaggagcagaggcccaaggctaacgagaacaagcctgtgatgaacgaatgaatatctccagaagctttgttcaatgtgcaaccaagtctgatgtccgtttg

SEQ ID NO: 1531 - DNA, 240 bp, Zea mays
gcacgaggcgcctcgtccgtgagatcgcgcaggatttcaagaccgacctccgcttccagtcctccgctgtcgccgcgctgcaggaggccgccgaggcctacctcgtggggctcttcgaggacaccaacctctgcgccatccacgccaagcgcgtcaccatcatgcccaaggacatccagctcgcgcgccgcatcaggggcgagagggcttgatctcccgttgtcgtcgtccacgttgttg

SEQ ID NO: 1532 - DNA, 240 bp, Zea mays
gcacgagccaatatcaaccctgttctgctgcccaagaagacggcggagaaggcgtccagtgtggggagcaaggaggcaaagtcgcccaagaaggccgccaagtcccccaagaaggcatagactgactgtctggagtgatctgatgtttagcaggaccttgataccagtatgcggtgatgcgtaggctgtagatgggtcgaatgtgcttgtgtgtgtatgtgccctgctgcaagttgccct

SEQ ID NO: 1533 - DNA, 239 bp, Zea mays
gcacgagattagagaagcacacgagaaaggtgcaaagattgtactcgttcaggaattgtttgaggggcactatttctgccaagctcaaagactggatttctttcggcgcgctaagccttacaaaggcaatccaactattataaggatgcaacagcttgtaaaggagctggaagttgtcatacctgtcagttttttcgaagaagcaaacaatgcacattataattcggtggctattatcg

SEQ ID NO: 1534 - DNA, 239 bp, Zea mays
gcacgagaccggctccaggggtcaggtgacccaggtcagagtgaagtttttggatgaccagaaccggctcatcatgaggaatgtcaaggggcccgttcgcgagggtgacatcctcaccctgctcgagtccgagagggaggccaggaggctgcgctgaagccctagcgttcttggtgggctcttgtatggtctttggtgtcttggaatttgtgctatgtttgaacttctgtgaccctgtt

SEQ ID NO: 1535 - DNA, 238 bp, Zea mays
gcacgagcaagaagtaccttgcagttgctgtgccagatgagggtgcccagacccttctggttcaggccattgaggcttttggtgggaagtgcaaccctgaggcgctgaaggaggttcccgttgtcctcaaagccctctacgatggagatatcctggacgaggaaaccattgtggactggtacaatgatgctgtcgcagctgggaaggactcccaggttgtcaagaatgccaagccgtt

SEQ ID NO: 1536 - DNA, 237 bp, Zea mays
gcacgagcagaagacaggtggcaacaagggcgccgccgtccatgtggcaactccacacccagcaaaaggcaagaccattgtaaacaatgacaaatcggtcaagtctccaaaatctgcgccaaaatctggtgtcccttgcaaatcgtgcagcaagtcattcatcagtgagacggcacttcaggctcactcgaaggcgaacagtgggggcaagtgagtcgcaggtccaatagagtcaac

SEQ ID NO: 1537 - DNA, 235 bp, Zea mays
gcacgagcgatcacctcggccggcatgggttcgcccagcaggaattgctggaacacgaagagcgcctgctccgggcggtggtgcagcgggacctcgtgcccggcgccgcggacggtgaccaagcaggctcagcccttcgtcgtactccatgctccagccgccaacctcggtcgccacgacgatgtaccaggggtaccaactggtctttacgggaaggcccagggcagggcggcga

SEQ ID NO: 1538 - DNA, 238 bp, Zea mays
gcacgaggccaagaggaagagaaagaatctatacaggggtatccgccagcgcgccttggggcaagtgggctgctgagatcagagatcctcagaagggtgttcgtgtttggcttggtactttcaatagtcctgaggaagctgcaagagcttatgatgccgaagcgcgcaggattcgtggcaagaaggccaaggttaactttcctgatgcaccagcagttggtcagaagcaccgttctgg

SEQ ID NO: 1539 - DNA, 245 bp, Zea mays
ttcggcacgaggcattctcgaattccgattcccaatccagcaaaccctaccagccttttgcaaactcagagagggacccgatggcacccaaggcggagaagaagccggcggcgaagaagcccgcagaggaggagcccgcggccccggcggagaaggctcccgctgggaagaagccgaagcgggagaagcggctcccggcgggaaaatccgccggcaaggaaggcggtgttgacaagaaggggcgg

SEQ ID NO: 1540 - DNA, 232 bp, Zea mays
gcacgaggaaggacccaaccggcgcggaggtgaccaaggcggccgccaagaagaaatgatgcgatcccgtgtctgcttttgcagtgcctggataacttgccactaaagttgtgtatgcggttgttgctgttattgcgtggactgtttgctgcggtgtctcctgtttgtttgggtagcgcacgtcggcctcttcaggtgtctgttgtctgttgtctttactatcagtaatgct

SEQ ID NO: 1541 - DNA, 229 bp, Zea mays
gcacgagagaaggccggccgccccggcaaggcggccaagacgtcggccaaggccacgccagcgaagaaggcgccggtggccaagaagcccgcggccgccgccaacaacgcgccggtagccaacaaggccgctccggcgaacaaggcggctgccactgcccgaaaagcgccgtctcggaaggccaacaagtagaggacgggtaggcgtcggacaaatgtagggtttggtt

SEQ ID NO: 1542 - DNA, 234 bp, Zea mays
gccgcagtcctcagcgaagagataggttgcgcacgagacgtgcaccccgccacagtcgcagtcgcagcaggagccgcagcccataccgtcgcagagaacggcgtggatacaaggatctcgtatgcaagaactgccggagacctgggcactttgctaaggagtgcccatctgcgcctacgtgcaataactgtaaccttccaggccacttcgcagcagaatgcacctcaaaaactg

SEQ ID NO: 1543 - DNA, 230 bp, Zea mays
gcacgaggtttcattggattcaagatctgattttgctattgttgataataaagttcgtaaacttattgaggatctaaaaaatgagcgtactgatcccgagagggcagcaataggagagctgctggtcctttcaaggcataacatggagagtagaatttccattgcaaaccacggtgctatacccttcttggtgaatcttctttactctgcagaccccagcatgcaggaaa

SEQ ID NO: 1544 - DNA, 202 bp, Zea mays
gcacgaggttgccatcaactttgtgacccgcgacgacgaacgtatgctgtttgacattcagaagttctacaacgtgttgattgaggagctgcctgccaatgttgctgaccttctgtgatcaatttcaagaaaaaacaaaacaaaaaagggtggtgaggaacctggtaaggcagctcctcaatcaacacgttgtagctcgtgc

SEQ ID NO: 1545 - DNA, 231 bp, Zea mays
gcacgagatatctcctcgcattttccttgcaaccgattgcctatccccctcccaacccaagaccgatggcgcccaaggccgagaagaagcccgcggcgaagaagccggcggaggaggagcccgcggcggagaagacgaccgccgggaagaagcccaaggcggagaagcgggtccccgcgggcaagtccgccggcaaggatggcggcgagggcaagcgtggcaagaagaagg

SEQ ID NO: 1546 - DNA, 230 bp, Zea mays
gcacgagatggggccttcggacagcccatttgcaggtggggtattcttggtgaacattcacttcccaccggattaccctttcaagccaccaaaggtgtctttccgcaccaaggttttccacccgaacatcaacagcaacggcagcatttgccttgacattcttaaggaacagtggagtcctgctttaactatctcaaaggttctcctgtcaatctgctcactgctcacgg

SEQ ID NO: 1547 - DNA, 232 bp, Zea mays
gcacgaggccatattatgattatgcacttgatctcatcttagacattgagtcttctaatgatgacgggtttaccgaggagcaaaatgaattaatcgagtcatctgcagagatgctgtacggtttaattcatgcacgatacattttaaccagcaagggtctagctgcaatgttggagaagttcaagaactacgactttggtagatgccccagggtgtactgctgtggccagcc

SEQ ID NO: 1548 - DNA, 250 bp, Zea mays
gcacgaggggagacagaaggatattttatcaaaagtggaattgtcacggtgattaaagatgctttaattcctagtggaacaatcatataaagtcagccaacaccatgtatataaggttgggttgcatcatatggtgatcgccaatgtgcatcaagttctctcatcccttgcgagaccatgcttatttccattgcaaaatcatcaagctctgcatcaacttgttgtggataataatgaaataataaatggt

SEQ ID NO: 1549 - DNA, 249 bp, Zea mays
gcacgagggtacttcaagggtcctgagcttcttgttgacttgcaagattatgattactctctggacatgtggagtctgggctgcatgtttgctggaatgatttttcgtaaggagccatttttttacggtcatgacaaccatgatcaacttgttaagatagccaaggtacttggaacagatgggctgaatgtctatttgaacaagtacagaattgagcttgaccctcagctcgaagcccttgttggaagg

SEQ ID NO: 1550 - DNA, 258 bp, Zea mays
ttcggcacgagggcgatcggagcatcccgtcccaagaggagaaactccggccggcgacgcgggggaaaatggggaagacgccggtgcggatgaaggcggtggtgtacgcgctgtcgcccttccagcagaaggtgatgccggggctgtggaaggacatcaccaccaagatccaccacaaggtcaccgagaactggatctccgccacgctcctcctcacccccgtcgtcggcacctaccaatacgccatgtggtacaaag

SEQ ID NO: 1551 - DNA, 246 bp, Zea mays
gcacgagcagaggcgcactgctgggcggtggggtggacttggcggcaatgttcgaacgatcgaccttggcgacgcagaggatgtcagggaagtctcgggaacatacggcgcatttgaaggtgccattacgctgacctcgctcaggggcgtcaccagcagcagaacctggggcccctggggggtcgagaacgggacgcgtttctccatcacggcgcccaacggcagcagcatcgcgggattctatgc

SEQ ID NO: 1552 - DNA, 247 bp, Zea mays
gcacgagggtcacagtgctgtgttacaaggatgcacggttgaggatgaagcttttgttggcatgggggcaaccctattagatggtgtcgttgttggaaagcatgggatggtagctgcaggatcccttgtaagacagaatactaggatcccttgtggagaggtatggggagggaaccctgccaaatttctgaggaagctcacagatgacgagatcgcatttatcacggaatcagcttccaactattcc

SEQ ID NO: 1553 - DNA, 247 bp, Zea mays
gcacgagggtacttcaagggtcctgagcttcttgttgacttgcaagattatgattactctctggacatgtggagtctgggctgcatgtttgctggaatgatttttcgtaaggagccatttttttacggtcatgacaaccatgatcaacttgttaagatagccaaggtacttggaacagatgggctgaatgtctatttgaacaagtacagaattgagcttgaccctcagctcgaagcccttgttggaa

SEQ ID NO: 1554 - DNA, 125 bp, Zea mays
gcacgaggagcagcaccatggccgtctcctccacggccttcgccggcaaggccgtgaacgtgccgtcgtcgtccgccttcggcgaggcccgcgtgacgatgcgcaagacggcggcgaaggccaag

SEQ ID NO: 1555 - DNA, 249 bp, Zea mays
gcacgagtcgatctttgcatggacaagaggacttgcccacagggcaaagctcgacgacaacgctagactactcgacttcgctctcaaactcgaggctgcttgcgttgagaccgtggagtccgggaagatgactaaagatctggcgattcttgtccatggatcttccagcgtcacgagaagccattacctgaacaccgaggagttcatcgacgcagtcgctactgagctccgatcaagactgggagccaa

SEQ ID NO: 1556 - DNA, 239 bp, Zea mays
gcacgagggaagagagacgacggcggccatggcgacctccttccaggggacgaccaccaagtgcaccgcctgcgacaagacggtgtaccttgtggacaagctcaccgccgacaaccgcatctaccacaaggcctgcttccgctgccaccactgcaagggcaccctcaagctcgccaactacaactccttcgagggagtgctctactgcaggcctcacttcgaccagctgttcaagagga

SEQ ID NO: 1557 - DNA, 243 bp, Zea mays
gcacgagcggacatcggcatctcctctaaggccatgtccatcatgaactccttcatcaacgacatcttcgagaagctcgccgccgaggccgccaagctcgcgcggtacaacaagaagcccaccatcacctcccgtgagatccagacctccgtgcgcctcgtcctccccggggagctcgccaagcacgccgtctccgagggcaccaaggccgtcaccaagttcacctcgtcctaggctgcgtgg

SEQ ID NO: 1558 - DNA, 241 bp, Zea mays
gcacgaggcgcggggccggggacgccgctctcgcgcgcatctgcggcaccgtcgccgccgacgagaagcggcacgaggcggcgtacacccgcgtcgtgggcaagttcttcgaggccgacccggacgccgccgtgcgcgccatggcgtacatgatgcggcgccggatcgacatgcccactgtgctcatcaacgacggccgccacagcagcggcgacttctacgctcgcttcgtcgccatcgc

SEQ ID NO: 1559 - DNA, 255 bp, Zea mays
gcacgagcttggccgcagtcaaaccctaaaccctggcgagccgcggctacggtatagccaccgcaacaccgcatctcaagcgcaagacctcctcgcggctatggcgaacgtctgatcccgtcgctgaaccgggttctggtggagaagctgctgaagcccagcaagagcgccggtggcatcctcctcccggagaccaccaagcagctgaacgccgctaaagtcgttgctgttggccctggtgatcgtgatagggat

SEQ ID NO: 1560 - DNA, 255 bp, Zea mays
gcacgaggcgctatgatcaccaagataggctcactgcacgtgaagctatggcacatccctacttcctccaagtcagagctgtggagaacagtagaacgagaccacaataatcgttgtctacaccctcgaaatgaagttgttgctaatttctggaacatcataggctaaaaccgttcaataagcatctcgctccaggaatctgggccatgactccgtggcagtgaatcagatagtatgggtcgcatcatgtgggca

SEQ ID NO: 1561 - DNA, 254 bp, Zea mays
gcacgagaagaagccatgtccgggcgcggtaagggtggcaacgggatcggcaagggcggcgcgaagtcaccggaaggtgctgcgcgacaacatccagggcatcactaagccggcgatccggcggctggcgaggaggggcggcgtcaagcgcatctcggggctcatctacgaggagacccgcggcgtgctcaagatcttcctcgagaacgtcatccgcgacgccgtcacctacactgagcacgcccgccgcaaga

SEQ ID NO: 1562 - DNA, 258 bp, Zea mays
gcacgaggtttctttcaaatctgctgaagatgctaaccgagctcttaccgagatgaatggcaaaatggttggaagcaagcccctttatgtagctcttgcacagcgtaaagatgacagaaaggcaaagctacaggcacagttttcacaaatgcgtcctgttgcaatggcaccttcagtaggtcctcgcatgcccatgtttccacctagtgttcctggagttggtcagcagctgttttatggtcagccacctccagcctt

SEQ ID NO: 1563 - DNA, 250 bp, Zea mays
gcacgagctcatgtttagcaaatttgaatacgatggaatactcaacccaacatttactgaaggtccgtttgagcttcctttttcgagtattagagcatacatcaatgagccgatcactccaaggttcgttcatgtgagttctgcgggagttacaagacctgaaagaccggggttagatttaagcaagcagccacctgctgttcgattgaacaaagagcttggctccattttaacttttaagttgaaggga

SEQ ID NO: 1564 - DNA, 257 bp, Zea mays
cgccggcaatcccacgtccaatcagccgccgctccagccttccatccatccatcccgtagctgctctctattacgccagcgatcgagagaccaagaggagcaggagcgatggcgaggagctcgttcaagctggagcaccccttcgaaaggaggcaagctgaggctaaccgcatcagggagaagtaccccgatagaattcctgtcattgttgagaaggccgagaggagtgacatcccagacatcgacaagaaaaagta

SEQ ID NO: 1565 - DNA, 250 bp, Zea mays
gcacgagctgggatgaaagtgccatgaccgaacgcacacccccagccaaagcacagctgttttgccccgagggtaaaagtatatcttccgtgaagtttgcgagcttgggaaaccccagtggaacctgtagatcataccaaatggggcgctgccaccacccgaactccttatctgttgttgagaaggcttgtctgaacaccaacagctgtacagtctccctgacagacgagagctttgggaaggatttatg

SEQ ID NO: 1566 - DNA, 257 bp, Zea mays
ttcgatctagcacgcgcacagcggccgccgaccacaatggcgtcccttttcaaggacccgagcaagctctcagcgtacagggaccgccgattcaagggcacacaggaggagtatgaggcaacgctgcatgcgtcgacaacgctgtacattgggaatatgtccttctacaccacggaggagcaggcctacgagctcttctcccgcgctggcgagatcaagaagatcatcatggggctcgacaagaactctaagacccc

SEQ ID NO: 1567 - DNA, 245 bp, Zea mays
gcacgagacgacggcaagacagccgatgtgtggtcctgtggagtcactctttatgtgatgctggtcggtggttacccttttgaggacccagacgacccaaagaatttcagaaagacgatcgggaggatcatgtcaatccaatacaagataccagagtatgtgcacgtgtcgcaagactgcaaggagctgctttcaaggatctttgttgcaaactctgcaaagagaataacgatcagggagatcag

SEQ ID NO: 1568 - DNA, 247 bp, Zea mays
cggcacgagaggttatcagcaccaagaggcagccattgggtcccaagcccggcttcatggtcgagggcaccaccattgagaccgtaactcccatcccatatgatgtggtcaatgatctcaagggtggatactaggttgtttggtccatctacctgcagtacccagttctacatctgtgttactctagtgcgtgcaactttgctcactctgagcagtagtatgaacctgttgtctgttcctgttgaaa

SEQ ID NO: 1569 - DNA, 245 bp, Zea mays
gcacgagccctatcctagggtttactcgctcccatccactcccaagtcccaacacccgtcggcgtcgagcagcggcagcggcggcggcgatgacgacgagcctgaagaagaaccggaagaagcgcgggcacgtgtcggcggggcacggccgcatcggcaagcaccggaagcacccgggaggccgcggcaacgccggtggcatgcaccaccaccgcatcctcttcgataagtaccacccgggctac

SEQ ID NO: 1570 - DNA, 245 bp, Zea mays
gcacgaggcaaagtaaagatcattcagtttgccacggaggctgccattactatcctgaggattgacgacatgatcaagtttaccaaggaagagagggtaacgaagagtaagcagcccaccagtagtgggctagtggactcccatgggatggttgccatagcatgtagcacttgttttttcacttatcgtttacttttgcttgctgtgagcattcgtttgtaggaaaagtgagaacggatgtgtat

SEQ ID NO: 1571 - DNA, 246 bp, Zea mays
gcacgagcggcaatgtcggggcgcggcaagggcggcaagggtctgggcaagggcggcgccaagcgccaccgcaaggtcctgcgcgacaacatccagggcatcaccaagccggcgatccggaggctggctaggaggggcggcgtcaagcgcatctccgggctcatctacgaggagacccgcggtgtgctcaagatctttctggagaacgtcatccgtgacgccgtcacctacaccgagcacgcccgc

SEQ ID NO: 1572 - DNA, 234 bp, Zea mays
gcacgagctcatcttttctcgtttagaacctctaaaatttcccccactcgccagtcgcagcagcacctgtagcagtcatggacgccagcggagccggtagcaaggggaagaagggggcggccgggcgcaaggcaggcggccccaggaagaagtcggtgacgcggtccgtcaaggccgggctgcagttccccgtcggccggatcgggcgctacctcaagaagggccggtacgcgc

SEQ ID NO: 1573 - DNA, 133 bp, Zea mays
gcacgagcccatgcatcaaacagcatggactgcggatcgatggatgctgttacccccgtcaggctttattctaagttaatcttaaggaaaaaatggtgcttcttggtgctgcaaaaaaaaaagcaaacaaaaa

SEQ ID NO: 1574 - DNA, 259 bp, Zea mays
gcacgaggttatggtgggacagcagccctactgaattgtgtgaattgggtcgaaagtaactcctgggatggccgttatggtcttgtcgtttgcacggacagcgcggtttatgcggaaggaccagctcgtccaacaggaggtgctgctgctatagcaatgctcattggtcctaatgctccgatttccttcgagagcaaatatagagcttctcatatggctcatgtttatgatttctacaaacctgatcttgcaagtgaat

SEQ ID NO: 1575 - DNA, 253 bp, Zea mays
gcacgaggagaagctaactgatgaggaggtggacgagatgatccgtgaggctgatgtcgatggtgatggccagatcaactacgaggagtttgtcaaggtcatgatggccaagtgagccacagaaccataatctgaaggcagagaagattatgcattgcatattagtcaagatgcaactttttattccatcgacttctagtgaaacattctgctagttgtagttgctgaaaaaggcaatgtagttcctgctttg

SEQ ID NO: 1576 - DNA, 254 bp, Zea mays
gcacgaggacacgcttcgaaaagtgaatgggctaaaacctatcgccgctgaacttggcgtttcgttagctcagctctcgattgcttggtgcgcgtcgaaccccaatgtgtcgtctgtgatcactggagccaccaaagaaagccagattgtggagaacatgaaggccctagatgtcatcccactgctgacgccggaggtcgtcgacaggatcgaggcggtggtccaaagcaagcccaaacgcaacgtcgagtcat

SEQ ID NO: 1577 - DNA, 253 bp, Zea mays
gcacgacggagagggggatttcttagaccaacctgaggaggatgaaatgcctcatgccattagtgttacaccagaggagcaggaggccattggacggcttgagtccctggggttcgacagagcacgcgttattgaagcattcttagcctgcgataggaacgaggagctagcagcaaactatctccttgagcatgctggtgaggaagattaagcgggagtagttttcatacgattttttttagtaccgagtgac

SEQ ID NO: 1578 - DNA, 252 bp, Zea mays
gcacgaggcgatgagcacaagctcgttctggagaacgtcatccgtgacgccgtcacctacaccgagcacgcccgccgcaagaccgtcaccgccatggatgtcgtctacgcgctcaagcgacagggccgcaccctctacggcttcggcggctaggtcgcttcctcatctggtggcgaactgcatctgtgtcggcggtggtcgtgttgtgtgcctaatctagtgtagtccgttctctatatcgtcgctgtgttc

SEQ ID NO: 1579 - DNA, 250 bp, Zea mays
gcacgagtaatggtggaaggaatatctcaattttgcaatgatctgcaggttgatcctcaggatattgtcatgcttgtcatatcatggcacatgaaagccgccacaatgtgtgaatttactcgtcaggaattcattggtggactgcaatcaattggggtagattcaatcgagaagtttcgtggaaaattaccatcattacgagctgagctaaaagatgacaataaattccgtgatatatacaactttgcat

SEQ ID NO: 1580 - DNA, 249 bp, Zea mays
gcacgagccagctccccgtgctgctccagtgaggaacccgccacagccagcacgccaggctcctcctccagctcctgttcgagatggtggtggctccatgtttggaggaattgggtccaccattgctcaaggtatggcgtttggcacgggtagtgccatggcacacagggctgttgatgctgtattaggtccccggaccattcagcatgagactgttgcctcagaagctgctgctgctgcccctgcccc

SEQ ID NO: 1581 - DNA, 230 bp, Zea mays
gcacgaggccaagcgcgtcaccatcatgcccaaggacatccagcttgcccgccgcatccgcggggagagggcctaagcgtcatattttctgtcatcagtgcccgatcagaagatgtagagatatgctgggttctgtagtttgggttactgtcgaatcatcgagtgttggctgttcactgctgtaacttaattatcatgatgcatatgaaatggcaatgaactctgttatc

SEQ ID NO: 1582 - DNA, 247 bp, Zea mays
gcacgaggcaagaatgttgctactttcctagttcaggctgggattgcgaagaaagagaacatcaagattcacgggttctaagggacctgtaaatgcttgtgccctatattgtgtgcctccacatattggggagcttgaagcatcgacagttactagtcattgcttacttatataagaacataagtagtatttgctattgtcaagtgtgccttgcttgatgcaagttgtgttttcgtatcattattat

SEQ ID NO: 1583 - DNA, 252 bp, Zea mays
cgtgaacccgccgccgacgcagcagcaggagacgcgccaaggagagcccgcaaggaggcgactatgagggccaagtggaagaagaagcgcatgaggaggctgaagaggaagcgccgaaagatgaggcagagatccaagtaggctgatggggattgtggatggtggtgtcggcatagttgtgttacgtttcttcgatgcgtgagttcatggagagatgtcacatcctagttcgtcgtcaccgtttgccatggg

SEQ ID NO: 1584 - DNA, 245 bp, Zea mays
gcacgagcaccgctccacacacaataagagagccgagatctagctacctagcacgcgatggcgatggcgatggcgatgtccgcttccaagatgatggcggtcgctgccgccgccctgctagccctggccctggccgtgtcgaccgccgaggcaaggaacatcaagacgacgacgacggcggcgacggagaagaaggacgacgcggtggtgcagccgcagaccttcccgcccttcgaccgcctcgg

SEQ ID NO: 1585 - DNA, 245 bp, Zea mays
gcacgagcgcactccagggacatcgccgcgcaggagaagctcacggcgcccttcgacttcccgcgcttcctcggcctcatgcgcgcccacctcaggcccgagcccttcgaccgcccgctccgcgacgccttccgcgtcctcgacaaggacggctccggcaccgtcgccgtcgccgacctccgccacgtcctcacctccatcggagagaagctcgaggtgcacgagttcgacgagtggatccgcga

SEQ ID NO: 1586 - DNA, 242 bp, Zea mays
gcacgaggaatcgagaagggggcctcttacgaggaaatcaagaaagctattaaggctgcttctgagggcccactcaagggtattatgggctacgtggaggaggatctggtttccaccgacttcaccggtgacagcaggtcgagcatcttcgacgccaaggccgggattgccctgaacgaccacttcatcaagctcgtctcttggtacgacaacgagtggggctacagcaaccgcgtcgtcga

SEQ ID NO: 1587 - DNA, 243 bp, Zea mays
gcacgagcttcagcctcttcgataaggatggcgacggctgcatcactaccaaggagcttggaactgtgatgcgctcccttggccagaaccccactgaagcagagctgcaggacatgatcaacgaggttgatgctgatggcaatgggaccattgacttcccagagttcctgaacctgatggcaaggaagatgaaggacaccgactccgaggaggagcttaaggaggcctttcgcgtcttcgaca

SEQ ID NO: 1588 - DNA, 247 bp, Zea mays
ccgcctcagaggtggtatgcagatctttgtaaagaccctgactggaaaaaccataaccctggaggttgagagctcggacaccatcgacaatgtgaaggcgaagatccaggacaaggagggcatccccccggaccagcagcgtctgatcttcgccggcaaacagctggaggatggccgcaccctagcagactacaacatccaaaaggagagcaccctccaccttgtgctccgtctccgtggtggtcag

SEQ ID NO: 1589 - DNA, 242 bp, Zea mays
gcacgagggaaactggctacacttacattatgccaaagaacatattgaagaaattcatatgcgtacagatctgcgtacacaaatcgctggattcttatatgggctgagtccacaggacaatcctcaagtcaaagagattaggtgtatagccatccctccgcagcatggaacacaccagatggtgactctgccatcaaatcttcctgaacatgagttccttaatgatcttgaacccttgggat

SEQ ID NO: 1590 - DNA, 250 bp, Zea mays
cttggacgatttgaaaacaaatacagaatattctggctacagcatagcctctccagtcgtccagtggttctgggaaatcgttcaggggttcagcaaggaagacaaagctcggttcctccagttcgtcactggcacttcaaaggtaccgttggaaggttttagtgaacttcaagggatctctgggccacaaaggtttcagatacacaaggcatacggcagcacgaaccatctgccttcagctcatacttgc

SEQ ID NO: 1591 - DNA, 122 bp, Zea mays
gcacgagaaattcccaattctcaacctctcctccgagttcgagtgaccatgtcggggcgcggaattttcgggatggggctgggcaagggcggcgcgaagatcaccgcaaggtcctccgcgac

SEQ ID NO: 1592 - DNA, 236 bp, Zea mays
gcacgaggcaggatctgcccagttgctcttgcggtagttcccccaactgtcaccatgcagaacgaggagggtaagactgtggacctctatgtccccaggaagtgctcggccacaaacaggatcatcactgccaaggaccatgcctctgtccagatcaacattggctacttggatgcgaatggcctgtatgatggtcacttcacaacgtttgctctctctgggtttgtccgtgctca

SEQ ID NO: 1593 - DNA, 91 bp, Zea mays
gcacgaggcgaaacgcaccttcgtggactggtaagtcggtaaaggtattgatgacggcgagttctccgaggctcgtgaggatctggccgcg

SEQ ID NO: 1594 - DNA, 77 bp, Zea mays
gcacgaggtcggttgtcctggtggcgagggtgaggacgaacatgatgttgtatggttctggttgaaaaaagacgagc

SEQ ID NO: 1595 - DNA, 111 bp, Zea mays
gcacgaggcgcttcagatgcccggaggtgctcttccagccatccatgatcggtatggaagctccaggaatccacgagacgacctacaactccatcatgaagtgcgacgtgg

SEQ ID NO: 1596 - DNA, 87 bp, Zea mays
gcacgaggctgcgcgggaccgaggacgggacacgcgctctcctggggccgctcgcttccctcacccgcgtggacgcttgtaaacccc

SEQ ID NO: 1597 - DNA, 113 bp, Zea mays
gcacgaggcacaacggcacgattctcctcctccgtccgcgtactctcggtttcggcgatgtcggggcgcggcaagggcggcaaggggctgggcaagggcggcgccaagcgcca

SEQ ID NO: 1598 - DNA, 230 bp, Zea mays
gcacgagcccaactccagatgttgctgaagcacaggccccagttgctgaggaggacgacgacgatgatgttgacctttttggtgaggagaccgaagatgagaagaaggctgctgaagagcgtgctgcagctgccaaggcttctggcaagaagaaagaatctgggaagtcatcagttttacttgatgtgaagccatgggacgatgagactgacatggccaagctcgaggaa

SEQ ID NO: 1599 - DNA, 128 bp, Zea mays
gcacgaggagcattgtagccaaggccataagagatggcgcaattgacgccaccatagatcatgcaaatggctggatggtatcgaaggaaaccggtgatgtctactctacaaatgagccacaaattgca

SEQ ID NO: 1600 - DNA, 81 bp, Zea mays
gcacgaaggcggagaagcccgccaagggcaggaaagggaaggccggcaaggaccccaacaagcctaagagggctcccagcg

SEQ ID NO: 1601 - DNA, 83 bp, Zea mays
gcacgagcggcgatccggcggctggcgcgcaggggcggcgtgaagcgcatctccgggctcatctacgaggagacccgcggcgt

SEQ ID NO: 1602 - DNA, 164 bp, Zea mays
gcacgagaacgcgtgggcactggcgcccccgtctacctcgccgccgtcctggagtacctcgccgccgaggttctggagttggcagggaacgcggcgaaagacaacaagaagacgcgcatcatcccgcgccacgtgttcctggcgatccgcaacgacgaggagct

SEQ ID NO: 1603 - DNA, 262 bp, Zea mays
gcacgagccttcaagcgcaactgcatcctcctcgtcgtccggtcgtgagaagggatggcgggcagtggcaaggctatcggcgctggcgccgcgaagatggcaacgtcgaggagctccaaggccggactccagttccccgtcggcaggattgctaggttcctcaaggcgggcaagtacgctgagcgcgtcggcgccggcgcccccgtgtacctcgccgccgtcctcgagtacctcgcggctgaggttctcgaacttgccggga

SEQ ID NO: 1604 - DNA, 259 bp, Zea mays
gcacgaggttggaagagagacgacggcggccatggcgacctccttccaggggacgaccaccaagtgcaccgcctgcgacaagacggtgtaccttgtggacaagctcaccgccgacaaccgcatctaccacaaggcctgcttccgctgccaccactgcaagggcaccctcaagctcgccaactacaactccttcgagggagtgctctactgcaggcctcacttcgaccagctgttcaagaggacagggagcttggacaag

SEQ ID NO: 1605 - DNA, 269 bp, Zea mays
tgagatcggtgaatttgtcgagtatgacctggacaatgaagatgaggagtggcttgaagaattcaataacgagcggaagaatataaaccctgaaaagttggaggtccttctattcaagttggaagttttggaccacaaagctcgtgaaagagcaggagccataacaccaactttcataggaccagtgccagtcctcttgcagctagatgctgctatagaggctttgcagtacttgtctgttcgatatgccattttccaagctgtatata

SEQ ID NO: 1606 - DNA, 258 bp, Zea mays
gcacgaggtccaaatggttgtccaagttgaggctgtccgggtgcaaaaggagcttgcagcgactgagattgatggttattgtgaaggcgaactaatcaaggttacactttctggaaaccagcaacctattagagttgaaatcacagaagctgcgatggagttgggtgctgaaaaactttccgggttggtcaacgatgcttacaaggatgcacaccaacggagcgtccaggccatgaaagagaggatggctgacttggc

SEQ ID NO: 1607 - DNA, 256 bp, Zea mays
gcacgagtacgcaacgaacttctatattctactacgtgctgttgatcgattggctgccaattatagcagattgcctggaatcttcgacagtgagattgatgaggatatccctaggctgaagactgttgcggcttcagtggcaagtgagatgggtttgaatggagcatccttatccgaagacctgataaccgagatgtgccggttcgggggtgcggagattcatccagtggctgcttttgtcggtggagttgcttcc

SEQ ID NO: 1608 - DNA, 261 bp, Zea mays
caaagcttgtgcctgttggatacggcatcaagaagatgactatcatgttgacaattgtcgacgatcttgtgtccatcgacactctaattgaggaccaccttacgcaagagcccatcaatgagtacgtccagagttgcgacattgtggctttcaacaagatctagagttcagtttctgagtttgggcaacggcagcggctcagctcgtcaagtttgtgctgggatgccagtttatcccttctagtctattacagaaatgttg

SEQ ID NO: 1609 - DNA, 256 bp, Zea mays
gcacgagcaagcttgtcccagttggatatggtatcaagaagctgcaaatcatgatgaccatcgtcgacgaccttgtctctgtcgacactctcattgaggactatctgtgcgctgagccagtgaacgagtacgtgcagagctgcgacatagttgccttcaacaagatctaggcgtgacttccgatcagtccttcccctggggtgctggcgatggtggtggctgggcaatgcaccagcctaatttatccatagctata

SEQ ID NO: 1610 - DNA, 254 bp, Zea mays
gcacgagaaatcttccgtctccaaatcctcctagcgaattcaccacagcttctcaccatcgctagcttcgatggcacccaaggcggacaagaagccggcggcgaagaagcctgcagaggagcccgcgacagagaaggcggagaaggctccggcggggaagaagcccaaggccgagaagcgcctcccggcgggcaagtccgccggtaaggagggcggcgagggcaagaaggggaaaaagaaagcgaagaagtccg

SEQ ID NO: 1611 - DNA, 251 bp, Zea mays
gcacgagggttattccttcaccacgacggcagaacgggaaatcgtgagagacataaaggagaagctggcctttgtggccctagactacgagcaggagctggagaccgctaagagcagctcctccgtcgagaagagctacgagctgcccgatgggcaggtcatcacgatcggcgcggagaggttcagatgcccagaggtgcttttgcagccgtcgctgatcgggatggaagctcccggcatccacgagacca

SEQ ID NO: 1612 - DNA, 248 bp, Zea mays
gcacgagcatcaacggggaggtcatgccggggcagtgggagttccaggtcggaccgtccgtcggcatctcttcgggcgatcaggtgtgggttgctcgctacattcttgagaggatcaccgagatcgccggcgtggtggtgacgttcgacccgaagccgatcccgggcgactggaacggcgcgggcgcccacaccaactacagcaccgagtccatgatgaaggagggcgggtacgaggtgatcaaggcg

SEQ ID NO: 1613 - DNA, 246 bp, Zea mays
gcacgagcttttgtgatgactttcttctcagtgtttgacgttcctgtcttctggcctatactcctctgctactggattgttctctttgtccttacaatgaagcgccagattgtacatatgatcaaatacaaatatgtgcctttcagtatcgggaagcagaaatatggtgggaagaagagtgccgtgagcccgagttcctcaaaagactgattccgaacctgccccagtagaaacttgccaggggaa

SEQ ID NO: 1614 - DNA, 91 bp, Zea mays
gcacgaggacccgcccacctcctgcagcgcagtcctgttggtgaggacatgttccattggcaagcgaccatcatggggccttcggacagcc

SEQ ID NO: 1615 - DNA, 91 bp, Zea mays
gcacgaggcagcaacaaggacaacggaagcaatccacatggataccttccaactcactacgagaaggtccagatgcttctgagcgaccgct

SEQ ID NO: 1616 - DNA, 231 bp, Zea mays
gcacgaggtgatcgtagcgacggtgctgttcgtggtcctcacgccggggctgctctgcacgctgccgggccggggccgcgtcgcagagttcggcagcatgcacaccagcggcctggccatcctcgtccacgccgtcctctacttcgcgctcatcaccatcttcctcatcgccatcggcatccacgtctacgcgggctagtagccgcccggagcaggatgcgatatacggag

SEQ ID NO: 1617 - DNA, 230 bp, Zea mays
gcacgagcacctttagtatcaaagctgagcagccagtatcccaagataccggtgtacaaagttgacattgaattggaaggactgggaaacaaactccgtgatctaaacatatgttcagtgccgacgttccacttctatcacaaggggcagagaattagtgaaatcgtgggtgctgatgcaaagaaaattgaagctaccatggaaagtctccacaagcagcagtagaagtt

SEQ ID NO: 1618 - DNA, 228 bp, Zea mays
gcacgagccaatgctggggactctggtgcggcacagggtcaaaggactacgtacacgtgcgcatccagcagcgtaatggtcgcaagaacctgaccaccgtccagggattgaagaaggagttcagctacagcaagatcctcaaagatctcaagaaagagttctgctgcaatggtacagtggtccaggacccagaacttggacaggtcattcagctccagggtgatcaga

SEQ ID NO: 1619 - DNA, 228 bp, Zea mays
gcacgagggcgtacgcggacacaaccccgatccgaatcgtcgtccttgcgagcctcgccgatcccccactcccctcccctcgcttcaagatgcagatctttgtgaagaccctcaccggcaagactatcaccctcgaggtggagtcttctgacaccattgacaatgtcaaggctaagatccaggacaaggagggcatccctcctgaccagcagcggcttatcttcgccg

SEQ ID NO: 1620 - DNA, 151 bp, Zea mays
gcacgagacctcatcccgactttctgaagcgcactgtgccacatttcaaggacaatgatgagcttgggctagtgcaagcaagatggtcctttgtcaataaggatgagaacctgctgactcggttgcaatatattaacctttgcttccactt

SEQ ID NO: 1621 - DNA, 229 bp, Zea mays
gcacgaggtcaccaagcgcgactgcctccccgcccgtgccaccgcaaggggaaatcaacgaagagggtgtctatggtcaggggcctgatcagagaggttgctgggtttgctccttatgagaagcgtatcactgagcttctgaaggttggcaaggacaagcgtgccctgaagcttgctaagagaaagcttggaactcacaagagggcaaagaagaagagagaggagatgg

SEQ ID NO: 1622 - DNA, 86 bp, Zea mays
gcacgagtccagacctccgtgcgactcgtccttcccggggagctcgccaagcacgccgtctccgagggcaccaaggccgtcaccaa

SEQ ID NO: 1623 - DNA, 132 bp, Zea mays
gcacgagaagatcgccgtcctcggcttcgccttcaagaaggacaccggcgacaccagggagaccccggccatcgatgtctgcaagggcctgctgggtgacaaggcccagatcagcatctacgacccccaggt

SEQ ID NO: 1624 - DNA, 229 bp, Zea mays
ttcggcacgagatttggccttgagggccagttggaagacccattgagatcaggctggcagcttgtattcgtcgaccgtgaggaggacgtccttctcgtgggcgacgacccttggcaggaattcgtgagcacggtgtcctgcataaagatcctctccccgcaggaggtgcagcagatggggaagcagggcctggagctcctgagctcggcccccgcgcggaggctcggta

SEQ ID NO: 1625 - DNA, 226 bp, Zea mays
gcacgaggtcgcctacgagtggcgctacgtcgtcgagaaccagtacgggaccaaggggatggtgaaggggacgtgccacaaccgcgccgagtcggccgccatgaacgacctgtcgaggtcgctggtgctcgtcaactacttcagggacctcccgaacctgccggcggcgtgcaaggacaactcggcgcagtgctggacatggtcaccgcctgccacgacaagtccg

SEQ ID NO: 1626 - DNA, 160 bp, Zea mays
cggccgggtctgacgagtgggcgatctacggcggaaccggggtgtttgccatggcgaggggcgtcataaggagaaggtatctcgccgacagggccggcgggaacactgatgagctcaacatggatgtcttctgccggccgtttggctcacagtcagagct

SEQ ID NO: 1627 - DNA, 130 bp, Zea mays
gcacgagatctaatgcccaccacatgagatccctaggtattttatcgtaggcctttttcaagttgataaaaaccatgtgcaagtccttctgctccttataccgcttcatgacctttcttattaagaaaat

SEQ ID NO: 1628 - DNA, 232 bp, Zea mays
gcacgagggcggcttcggaggcggcacggcggcggcaacaccggtgacgccgacagaggggacggtgatcgcgatccacagcctggaggagtggagcatccagatcgaggaggccaacagcgccaagaagctggtggtgattgacttcactgcaacatggtgtcctccgtgccgcgccatggctccaatttttgctgatatggccaagaagtccccaaatgttgttttcctg

SEQ ID NO: 1629 - DNA, 222 bp, Zea mays
gcacgagacagagtgcggcgcgggcgtcttcatggccaaccacttcgaccgccactactgcggcaagtgcggcctcacctatgtctacaaccagaaggcgtaattgcttgccccgatttgctttatccgccaacctatcaagcattcagatgttggttactcaaattgtatctcatttagatctgtctgaggttgaaacttaaatggagcagtagtatctat

SEQ ID NO: 1630 - DNA, 220 bp, Zea mays
gcacgaggttcaggtcatctcatccctgacggcttccctgaggttcgatggtgctctgaacgttgatgtgaacgagttccagaccaacctggtgccctacccgaggatccacttcatgctttcgtcctacgctccagtcatttctgctgagaaggcctaccacgagcagctgtccgtggctgaaatcaccaacagcgccttcgagccatcctccatgatg

SEQ ID NO: 1631 - DNA, 221 bp, Zea mays
gcacgaggttgactctggcaagtcgaccaccacaggacacctgatgtacaagcttggaggcattgacaagcgtgtgatcgagaggtttgagaaggaggctgctgaaatgaacaagcggtccttcaagtacgcgtgggtgctcgacaagctcaaggctgagcgtgagagaggtatcaccattgatatcgctctgtggaagtttgagaccaccaagtactact

SEQ ID NO: 1632 - DNA, 221 bp, Zea mays
gcacgagaaaccttcagttctatggtcaaacctgctacagttcgaataatgctcactttggctcttcttaatagtggcccgcctattcatcagctagatgtcaagaacacctttcttcaccggaccctaacagagacaatttactgttgtcagcccactggttttgttgattctggcctgcttgatcatgtttgccacctcaacaagtctctctacggcct

SEQ ID NO: 1633 - DNA, 168 bp, Zea mays
gcacgaggtcgtcaccaagcgcgactgcctccccgcccgtgccaccgcaaggggaaatcaacgaagagggtgtctatggtcaggggcctgatcagagaggttgctgggtttgctccttatgagaagcgtatcactgagcttctgaaggttggcaaggacaagcgtgcc

SEQ ID NO: 1634 - DNA, 257 bp, Zea mays
gcacgagggtggtgggtcgcgcgctgccgaccccaaccgatgagcaccccaagatctaccgcatgaagctctgggccaccaacgaggttcgcgccaagtccaagttctggtacttcctgagaaagctcaagaaggtgaagaagagcaatggccagatgctctgccatcaacgagatctttgagcgcaacccgaccaccatcaagaactatggcatctggctgcgctaccagagcaggactggttaccacaacatgta

SEQ ID NO: 1635 - DNA, 255 bp, Zea mays
tcctggtccaccttgccaccatccccatcaccggcaccggcatcaacccggctaggagccttggcgccgccatcatctacaaccgggatcatgcgtggagcgaccattggatcttctgggtcggccccttcatcggcgccgccctggctgccatctaccaccaggtgatcatcagggccatcccgttcaagagcaggtcttaagctgccgcgggtgtgctgagacatgtggggaatgtattgtctgcccacgcct

SEQ ID NO: 1636 - DNA, 251 bp, Zea mays
gcacgagattcgtttctcgcgagccatcgcttcggcatccggaagaaatggccaagtcgaagaaccacacggcgcacaaccagtcgttcaaggcgcacaagaacggcattaagaaacccaagcgccaccgccagacctccaccaaggggatggaccccaagttcctgaggaacctgaggtattctaggaagggcaacaaaaagagtggtgaggctgaagctgaggagtaggaaggaaagcatggctttgtt

SEQ ID NO: 1637 - DNA, 249 bp, Zea mays
gcacgagccacgcgctgtcctccaagctcgcccggtacctcgacccggaggcctccttggacaaggaccaactgctggacgcggtgcactggatccgccaggcggtggggctcatatgcggcctgctctggggagccgtccccctcgtcggcgccgtctggatcgcactatttatggccatctcgactggcattatctattggtactacacctacttgctgaaggtcgacgaggaggaatatggaggcc

SEQ ID NO: 1638 - DNA, 239 bp, Zea mays
gcacgagccggggagctcgccaagcacgccgtctccgagggcaccaaggccgtcaccaagttcacctcggcctaggctgcgcggccgccgcttgcaggattctctcctgtgttcacgtctcttgctgtagttaggtgctgctgcctgctggcttctatgtatgttatctatctgtctgtagcaactgtgttatctgataggaccgtaatggtgcttattcaacccagctatatgttatt

SEQ ID NO: 1639 - DNA, 251 bp, Zea mays
gcacgaggagaagagaaagtctcgagttttttttttttttttttttgatcaagaaaacaataacgccaaacttaataacccagtagcaaagcgggggaataaagtcttacaacgtaagttgtaaaccacacaacgacagatagataagaaccgacagaaacataacacgataggagccactcagggcagatcacaggatagcagtggcacacaagcccgacgacgccgcgccagtagagcgtctagtactc

SEQ ID NO: 1640 - DNA, 251 bp, Zea mays
gcacgaggagaagtttgccactggtgtctccatggttgcctccctgtcactggcgatctcgtacccgacccttgctgctgtgccccacatgttcatcaatgggtacaagaatgtgcttgctgttgctgtcgagacagactacttgtacccacatgctgacaagatcaaggagtacctcaaggacccaagcaagtttgctgttgccgccccggttgctgctggggactctggcgctgcagctgctcccaagg

SEQ ID NO: 1641 - DNA, 245 bp, Zea mays
gcacgagcagagggctactctttgtggttctgtgactacaagtacaatgatgagaacaccgtctcctttgtgaccctgaacaaggttggtggattcctgcagcggatggacctgtgccgcaagtacgcctttgggaagatgctcgtgataggctctgagccacccttcaagctgaagggcctttggctcttccgtggccaggatgttcccaagtttgtaatggacgaggtctatgacatggagct

SEQ ID NO: 1642 - DNA, 245 bp, Zea mays
gcacgagctgaagcgcgcgagagaaacgcgtatacccaggcggcggttgacgaagaggaggagaagaagaagaagatggcttcctccgcatacgcctcatggtccaagcggtggatccgtcccgaggtgtacccgctgttcgtgccgatggccgtggccttgggcatctgctcgtaccagcttgtgcgcaacatcacgggcaaccccgaggtgcgggtgaccaaggagaagagggcggccggcgt

SEQ ID NO: 1643 - DNA, 251 bp, Zea mays
gagaactagtcttgagtttttttgtttttttttttttaatttcagacgagcaatcgcattccattttccattcagtgaggacaacacgtccgaaatagccaaataggcacggcatagaaagcacccaccatcatctacttcagacgttacaacgacgaacagcagcagcgcgacagctcaagccctctcgcccctgatgcggcgggcgagctggatgtccttgggcatgatggtgaccctcttggcgtgga

SEQ ID NO: 1644 - DNA, 245 bp, Zea mays
gcacgagcgtctctgcgctgcaagaggccgccgaggcctacctcgtggggctctttgaggacactaacctgtgcgccatccacgccaagcgcgtcaccatcatgcccaaggacatccagctcgcgcgccgcatcacgggagagagggcctgagcgaggcgagctcctctcaccgcaggcggcgtcgttgttgcttcgggcctgcttgtaggacttgtgcttctcttggtttcctttctggtggca

SEQ ID NO: 1645 - DNA, 245 bp, Zea mays
gcacgagcccaacttgaactgtggaaggagaagagctctggcaagtatgagaagaaggtgtatgtgctccccaagcaccttgatgagaaggttgctgctctccacttgggcaagcttggtgccaagctgaccaagctcaccaagtctcaggccgactacatcagcgtgccgatcgagggtccctacaagcctgcccactaccggtactaggcacacggcttgcagctcactcgggccgttgtgtg

SEQ ID NO: 1646 - DNA, 244 bp, Zea mays
gcacgaggcaaagtccgatcctatggttctctgtacaatggaagaatctggtgagcatatcattgctggagctggtgagcttcatcttgagatttgcctgaaggatctgcaggaggacttcatgggtggtgctgaaattattgtttcccctcccgtcgtctccttccgtgaaacggttcttgagaagtcctgccgtactgtcatgagcaagtctcccaacaagcacaaccgtctgtacatggaa

SEQ ID NO: 1647 - DNA, 239 bp, Zea mays
gcacgaggttgagaagtgcttggtggtcttgctgtaccgagacagatcatctatcaacaaattccagattgccaagatcacaagtgaaggatcaaccatctacccaccatattccttgaagacctactggggcttcactcacttcgaaaacccagcccagggcgctgtgggatcatggtagatttatgctctgcatgccgcgtatcatgccatgaacttaggggagagcaatctgtgct

SEQ ID NO: 1648 - DNA, 239 bp, Zea mays
gcacgagggacaacgagccactcatgagggcactctccaagctaatcaatctcaatagcccagacctggttttatttgttggagaagcattggttggaaatgatgctgtggatcagctcactaaatttaaccagaaactagcagacctatctgctgttcccactgctagattgatcgatggtatcctgctcaccaagtttgacaccatcgacgacaaggttggagcagcgctttccatg

SEQ ID NO: 1649 - DNA, 239 bp, Zea mays
gcacgagtgggtttcagcttgttcgattaaaacaccactgccagtttacagtttctctcgcgaatggtctcacaatattcgctggtttccacaaaataagattgtcaatagctactacgtacttatgctattctgcatgtgatgtacgagtgtgcatcttcaagaatctttaagttgaatggtcccataataatattgataacaatgtaaattgtatgtcttgtacgtactttggtatc

SEQ ID NO: 1650 - DNA, 137 bp, Zea mays
gcacgaggagatttgacttgtttgggattcaaacccatccaatcctactcaatccacatggattgagagctaaccgaacaagccctaagaattttttccaatctcatccaatccatatgtattgggaataaccgaac

SEQ ID NO: 1651 - DNA, 238 bp, Zea mays
gcacgagatctggttacacttccaggatattgtgtttctggaaccattggtcataagttgatgtgtgggaaacctacaagggttgattacgaggacactcatattgatgtcagatgtcagatccatcagctagcattcagtcctcatacagactccaaagggattatggatctgacagaattcctgtcacccaaaaatgtaattctcgttcatggtgaaaagcctcagatggcttttc

SEQ ID NO: 1652 - DNA, 146 bp, Zea mays
gcacgagcccacttgttcctgatgacatacccgcatttgaagccccagaagccgctgcagcaatacgttcccagggtatttgggttcaaaatccgtaagccatgacaaatttgaaggttgaatgtataaaaggttcaaatagcgcc

SEQ ID NO: 1653 - DNA, 237 bp, Zea mays
gcacgagccgcaacttcacagcgtatcatcgttttccatcgctcctactcctatcatccagaaaatctgagcggtattgatggcgcccaaggcggagaagaagccggcggcgaagaaggtggcggaggaggagccctcggagaaggcggctccggcggagaaggcccccgcggggaagaagcccaaggcggagaagcggctacctgcgggcaagtccgccggcaaggagggcggcga

SEQ ID NO: 1654 - DNA, 238 bp, Zea mays
gcacgaggttcattgcatttgtgtctgcagaagcagagactgataacccgcaatctgagctaaagcctggaattgatctacttggttctgtggatgagatattatatgatatttatgacagatatgaaccagtgaatgaaccatctcttgataattgctttgtcacaacgagctatgacgccaccacacattttgagacaactgtaacagatgtcctgaacatgtatacaatgatcac

SEQ ID NO: 1655 - DNA, 240 bp, Zea mays
gcacgagcatgaactacctccgcctcgcctctcgcctcgacgccgtcgtggcccgcctcgacacgcaggccaagatgcaggtcatcggcaagtccatgcagtccatcgtcaagtcgctcgactcctcgctcgccaccgggaacctccagaagatgtccgagaccatggacaatttcgagcgccagttcgtcaacatggaggtccaggccgagttcatggagggcgccatggccggctcca

SEQ ID NO: 1656 - DNA, 133 bp, Zea mays
cgcgccctcatcgccgagaagagctgcgcgcccctcatgctccgcctcgcgtggcactccgcggggacgttcgacgtgtcgtcgaggaccggcggtcccttcggtactatgaagtgcccggcggaactggctc

SEQ ID NO: 1657 - DNA, 151 bp, Zea mays
gcacgaggtcgtgctcagccttaccgcatatactttctgggccgtgaataggggcaaagacttcagcttcctgggtcctttcctgttcgccgccatcatagtgctgcttgtgttcgcactcatccagatcctgttcccactgggcaagctc

SEQ ID NO: 1658 - DNA, 158 bp, Zea mays
gcacgagctgttgtggcagctgcccctgctgctggcggcgctcctgcagctgaggcgaagaaagaagagaaggtggaggagaaggaagaaagtgatgacgacatgggcttcagcctcttcgactaagcctgtgcaatagtctagagtattgtttttga

SEQ ID NO: 1659 - DNA, 229 bp, Zea mays
gcacgagctactatagcacactgttcttcttcgagtacctgggtcctctcatcatctaccccatgttctactatctgcccgtctacaagtacttcgggcacgatggggagcgggccatgcaccctgtccagacctacgcaatgtactactggtgcttccactacttcaagcggatcatggagacgttcttcgtgcaccgcttcagccacgcgacgtcgccgctctcgaa

SEQ ID NO: 1660 - DNA, 228 bp, Zea mays
cgcgggtggtggtcaaagttctctgggttacctctttggaagcggtgagccccccaaaccagcagtggcaccagctgtaagtgctccacctgctgctgcaggtgctccacctgctgagaaaccacctgctgcaaagcctgatggcaccagtcagattgctgctggggttaccagccaaaccaataactaccacagggccgacggtcagaacaccggaaacttccttac

SEQ ID NO: 1661 - DNA, 223 bp, Zea mays
gcacgagaagcacaagaaggtgaagctctccgtgctgcagttctataaggtggacgacgccactggcaaggtgacccgcctccgcaaggagtgccccaacacagagtgcggcgcgggcgtcttcatggccaaccacttcgaccgccactactgcggcaagtgcggcctcacctatgtctacaaccagaaggcgtaattgcttgccccgatttgctttatcggc

SEQ ID NO: 1662 - DNA, 238 bp, Zea mays
gcacgaggttgtaagttttaagcttcacctccagccatgggtaaggagaagtcccacatcaacattgtggttattggccatgtcgactctggcaagtcaaccaccaccggtcacctgatgtacaagcttgcgaggccttgacaagcgtgtgattgagaggttcgagaaggaagccgctgaaatgaacaaacggtccttcaagtacgcttgggtgcttgacaagctcaaggctgagcgt

SEQ ID NO: 1663 - DNA, 231 bp, Zea mays
gcacgagaaagctttggcactgggtctgaccacattcgtgagaaagatggcatctgggctgtgcttgcatggctttctattattgctttcaagaataaggacaaccttggaggagataagcttgtcactgttgaagatattgtccgtcagcattgggccacatatggtcgccattattacacacgctatgactatgagaatgtcgatgctggggctgctaaggagctgatg

SEQ ID NO: 1664 - DNA, 100 bp, Zea mays
gcacgaggttttttctagttgctctgcaaggatatagaacaatgttctaagactaccatgtttttaagtctgcctgatgcttataattcatgaacgattt

SEQ ID NO: 1665 - DNA, 225 bp, Zea mays
gcacgagaccaggtcaagagaacctgctatgctcaggcatcccagattcggcagattcgccgcaagatggttgagattatgatcaaccaggcttctacatgtgaccttaaagaacttgtttctaagttcattccggaagttattggcaaagagattgagaagtctacctccagcatcttcccacttcaaaacgtcttcatccggaaagtgaagatactccagggc

SEQ ID NO: 1666 - DNA, 116 bp, Zea mays
gcacgaggtcggcggcgaggccaacctcaagggcgtcgacgccatgcccgaggacgtcgcccaggcggtgctctacctggccagcgacgaggcgaggtacgtcagcgcggtcaacc

SEQ ID NO: 1667 - DNA, 221 bp, Zea mays
gcacgagcggggttgggaagacgtctttgatgaaccaatatgtgaacaagaagttcagcaaccagtacaaggctacgattggggcggatttcctcaccaaggaggtgcagttcgaggacaggctcttcactctgcaaatatgggacactgctggtcaggaaaggtttcagagtcttggcgttgcattctaccggggagcagattgttgtgtcctagtctat

SEQ ID NO: 1668 - DNA, 180 bp, Zea mays
gcacgagggagctcgccggtaatgctgccagggacaacaagaagactcgcattattccgcgccacgtgcttctggcgatccggaacgacgaggagcttgggaagctgatgggcggcgtgactatcgctcacggcggtgtgctccccaatatcaaccctgttctgctgcccaagaagacgg

SEQ ID NO: 1669 - DNA, 232 bp, Zea mays
gcacgagccgcggcgagttcaaatcccacaatcttcttgtagcacaccactgtcttcgtccaactcggcggcgatgtctgggcgcggcaagggcggcaaggggctgggcaagggcggcgcgaaacgccaccgtaaggttctccgcgacaacatccagggtatcacgaagccggcaatccggaggctggcgaggaggggcggcgtgaagcgtatctccgggcttatctacgag

SEQ ID NO: 1670 - DNA, 239 bp, Zea mays
gcacgagcggatctcagtttttcatcaccaccgtgacaacaagctggttggacgggaagcatgttgtgtttggcaaggtgttgtctggaatggatgttgtgtacaaggtggaagctgagggccggcagagcgggcaaccaaagagcaaggttgtcatagcagatagcggcgagctgccgatgtgatgagctgaactgatgttctatctggaaggatgttaagaagttgctggtgaccat

SEQ ID NO: 1671 - DNA, 238 bp, Zea mays
gcacgagcttgaagtccctgcggcgcaagatcggcctggtgcagcaggagccagtcctcttcgcgtcgagcatcctggaaaacatcgcgtacggcaaggaaggcgcgagctaggaggaggtggtcgacgcggcgaagacggcgaacgtgcacggcttcgtgagccagctgcccgatgggtacaggaccgcggtcggcgagcggggcatgcagctgtcgggcgggcagaagcagcggat

SEQ ID NO: 1672 - DNA, 241 bp, Zea mays
gcacgaggcccgccgaagaagggccaccggaaggcgtgcccgccgcctccgtctcccccgacgcccacgcccacgcccacgccgtcctcggacaagtgccccatcgacgcgctgaagctcggcgcgtgcgtggacattctcgggaacgaggtgcacatcggcgacgccaacgtcaagtgctgccgctcgtgaagggcatcgccgggctctccgcggcggcgtgcctgtgcaccgccatcaa

SEQ ID NO: 1673 - DNA, 239 bp, Zea mays
gcacgaggctgggcgaaaaggcaaaatcagagttaacaccatatcagcaggccctcttgggagccgagctgctaaggcaattggatttattgagaagatgatagagtactcatatgttaatgcaccattgcagaaggagctgttggctgatgaggtggggaacacagctgcattcctggtttcttcattggcttctgccatcaccggctcgactgtttatgttgacaatgggctcaata

SEQ ID NO: 1674 - DNA, 244 bp, Zea mays
cgccaccggaaggcgctccgcgacaacatccaggggatcacgaagccggcgatccggcggctggcgcgcaggggcggcgtgaagcgcatctccgggctcatctacgaggagacccgcggcgtcctcaagatcttcctggagaacgtgatccgcgacgccgtcacctacaccgatcacgcgcgccgcaagaccgtcacagccatggacgtcgtctacgcgctcaagcgccagagccgcaccctct

SEQ ID NO: 1675 - DNA, 235 bp, Zea mays
gcacgagaagagccagagtaccggcttggctcgtcgagaggagccactgagattaagcggcatcccttctttgaaggcctgaactgggccttgatccggtggaccgcaccaccagagaccctgaagaacattgacactgcaccaacacctgtaacgacacgcaagaaaaaggaaggcaaatgtctggaattccggctgaatggtgacgacatcgagttcgagctcttttagttgt

SEQ ID NO: 1676 - DNA, 233 bp, Zea mays
gcacgaggcgccttgacgtggttgcagccgcggggcaccagaagttgatgggatctttgaccactaacgagggactcaggtttggggtggttgtggcacggttcaacgaggtcgtgacaaatttgttactacagggtgccctggaaactttcgagcgatactctgttaaagaagaaaatataacagttgttagtgttcccggaagctttgaggttcctataacagcacaaaag

SEQ ID NO: 1677 - DNA, 233 bp, Zea mays
gcacgagcccagttcttcatctgcaccgtcgcgaccccttggctcgacggcaagcacgtcgtcttcggccaggtcgtcgagggcatggacgtcgtcaaggccatcgagaaggtgggcacccgcaacggctccacctccaaggtggtcaaggtcgctgactgcggacagctctcctagatctctctgatctggtctgttcggccgccctccctccgtcatcgtcgaccccccct

SEQ ID NO: 1678 - DNA, 235 bp, Zea mays
gcacgagggcggttatcaaagtcatggaccagaagggtttgcctataatgttattcagcaccgatgaggcatcaaacaaagccgttatctatgctggtgtgcctcccaatgctcctagcggcttcaaggtgttggactggctaacaccttcaattgcgccactcaagggaagaggcggtggcggcaagaacggcgtcgcccagggccaggggagtgacgcttctcagctcaagga

SEQ ID NO: 1679 - DNA, 235 bp, Zea mays
gcacgagcggcgatgctggcctcactggccgcaagatcatcattgacacctacggtggctggggagcccatggtggtggcgctttctccggcaaggacccaaccaaggttgaccgcagcggagcctatgtcgcaaggcaggctgccaagagcatcgtcgccagcggccttgctcgccgcgccatcgtccaggtgtcttacgccatcggcgtgcccgagcctctctccgtgttcgt

SEQ ID NO: 1680 - DNA, 228 bp, Zea mays
gcacgaggggcaccatctttttcacccaagagggagatggccctaccgctgtcaccggaagtgtctctggcctcaagcctggcctccatgggttccatgtacatgcacttggtgacaccaccaatggatgcatgtcaactggaccacactacaatcctgcgagcaaggagcatggggcaccagaagatgagaaccgccatgctggtgatcttggaaacgtgacagctg

SEQ ID NO: 1681 - DNA, 234 bp, Zea mays
tgcacaactttctcagccagaacctagtaaagacagatcatttgaagcatcttcctcaacaattgggtcagatatgtctgatattgaagatgcgggaccagtgggcaagacaacatcagtttcatctgtttctacagctgcacatgctagaacaatgcggaaggggtcagcggatcatcttgttgtcaacattggttcagagtcagaacgattgattgctgcacaagattcaga

SEQ ID NO: 1682 - DNA, 230 bp, Zea mays
gcacgaggcggggccatgccgccccagccgtgctgcggcggcatccgcagcctgctgcagcaggccaacaacacccccgaccgccgcaccatctgcggctgcctcaagaacgtcgccaacggcgccaacgggagcggcacctacatcagccgcgccgccgcgctgcccagcaagtgcgacgtcgccctgccgtacaagatcagcaccaacgttaactgcaacacgattaa

SEQ ID NO: 1683 - DNA, 256 bp, Zea mays
gcacgaggaaagccctcgtcctgacccctcgcaaaaccctagctccaaccaccatgaagggcaaggccaacgcctccaagaaggatgaggccaggctccgggccggcggcggcggcgccggaaagcgcaagaaggccgccgcgagcggcaagcccaagcgccctccctccgccttcttcgtcttcatgtctgaattcaggcaggagtaccaggcgcagaccctggcaacaagagcgttgcggccgtgagcaaggca

SEQ ID NO: 1684 - DNA, 254 bp, Zea mays
gcacgagagaacatcaagaacgccgcctcctccaccggcaacatcacgttgagcgtcaccaagagcaacccggagaccggcgaggtcatcggcgtcttcgagagcgtgcagccgtccgacaccgacctcggggccaaggcgcccaaggatgtcaagatccagggggtctggtacgctcagctcgagtgattcgagtgtctaactgctaggtgtccgaccgccgtcatggatcttgggaaggtgtatgtatacca

SEQ ID NO: 1685 - DNA, 189 bp, Zea mays
gcacgagtaagagcgtcgctgatctgtgatcatcgtatttgtcattatgcacctgtagcaaccgatggactgaactgtgctggattatgctgttggatcacctgagtatgtgttacatgtcggttttgatgtgacatcctatcgtttcgatgtgttttgtggaagtgttgttgcaagatttcaacagtc

SEQ ID NO: 1686 - DNA, 253 bp, Zea mays
gaggttgaggcagcagctgaggaaacgaaaaagagcaaccatgtcacgaggaagcttgagaagcgcaaggagggacgtacccttgacccacacattgaggagcaatttggcagtggacggttgctggcatgcatttcttcccgccctggacagtgtggccgagctgatgggtacatccttgagggtaaagagcttgagttctacatgaagaagctacagaggaagaagggcaagagcgctgtagcttagagca

SEQ ID NO: 1687 - DNA, 232 bp, Zea mays
gcacgagatcatacggcagcatgctactgcttccatgactccgttactgctctcgattcgtttcttcattatgtattctcgcgcgttgcatcgtttgaagctgttttaagcaacggagaaaaataccatgtgacacgtgtatcctacgaacatgggtttctgtttagttagcagtgggcgcactgtattatgttgccttgttgaaaaacatactagaaaaactctagggggg

SEQ ID NO: 1688 - DNA, 86 bp, Zea mays
tcgagtttttttttttttttttttgcagcaccaagaagcaccattttttccttaagattaacttagaataaagccttacgggggga

SEQ ID NO: 1689 - DNA, 249 bp, Zea mays
gcacgagatgccttgagacagacaagtgtgagacattccaagattgcattacctgggcccggctgaagtttgaggattatttctctaaccgtgtaaagcagctgacattcacttttcctgaagatgcaatgactagctctggtgctcctttctggtccgctcctaagcggttcccgcgacctctggagttctcatcttctgactcaagtcatcttagcttcttgttggctgcttctatattaagggcag

SEQ ID NO: 1690 - DNA, 84 bp, Zea mays
gcacgagggtcccgcggcttcggcttcgtcaccttctccacgtagtaggctatgcggaacgccatcgatggcatgaacggcaag

SEQ ID NO: 1691 - DNA, 248 bp, Zea mays
gcacgagggcaacggcaccatcgatttcccagagtttctcaaccttatggctcgcaagatgaaggacaccgactctgaggaagagctcaaggaggccttccgtgtgtttgacaaggaccagaacggcttcatctcggccgccgagctccgccatgtcatgacaaatcttggtgagaagctaactgatgaggaggtggacgagatgatccgtgaggctgatgtcgatggtgatggccagatcaactacg

SEQ ID NO: 1692 - DNA, 250 bp, Zea mays
gcacgaggaagacgggtgacctagattcttatgagattgaaggcggtgagacaaaagcagagatattgcaaaacctagctgagttccagttttcttgtgtcatgtacaatggtgccctagagaatgcatgcagtgagcttggagcccgtatgtctgccatggacagctctagcagaaatgctggcgatatgcttgatcgtctcacgcttacttacaacaggacacgccaagcatccatcaccacagagct

SEQ ID NO: 1693 - DNA, 243 bp, Zea mays
gcacgaggagtgccgcagcccgtgccaggtgctcggctacgacgtgcctcgtggcaccatggtgctggtgaacgcgtgggcaataggcagggacccagcgctgtgggacgcgccggaggatttcgtgccggaaaggttcgaggagagtggacgagacttcaagggcatggattttgagttcatcccgttcggtgcgggaaggaggatgtgccccggcatggcgttcgggctggcgcacattga

SEQ ID NO: 1694 - DNA, 242 bp, Zea mays
gcacgagagaacactggcaacttccttacggaccgtccttcaaccaaggtccacgctgctcctggcggtggctcttccctgggctacctgttcggtggcaactgatgcccgtgctggtgcgctcaccaaagttatcctcccctgcctgctgcgtgctatgtctgaatcgtgaacaaccgttgtcatttcatgtgtgtaccccgtgcaatgctttgtgcgcatggttgatttctctgtggcaa

SEQ ID NO: 1695 - DNA, 243 bp, Zea mays
gcacgaggttccactggcaggcaaccatcatgggtcctcctgatagtccatatgctggaggtgttttcttagtgaacattcatttccccccggactaccctttcaagcctccaaaggtatcttttaagacgaaggtcttccatccaaacatcaatagtaatggaagcatatgtctcgacattcttaaggagcagtggagccctgctttgacaatctctaaggttttgctttctatctgctcgc

SEQ ID NO: 1696 - DNA, 241 bp, Zea mays
gcacgaggcggtgggtacggtggtggccgtggaggcggcggctacggcggtggcgggcgccgtgatggcggtggcggctacggcggtggcggcggctacggtggcggcggcggctacggtggtggtggcggcggctacggcggtggcaaccgtggcggcggctacggcaactccgacgggaactggaggaactgagcggtggggcccgcgcggccaagttatcctgttcgctaccgtgatg

SEQ ID NO: 1697 - DNA, 244 bp, Zea mays
gcacgaggcccaaggccgccaccaagcccaagccgaagcccaaagccaagtcccccgccaaggcgaacccgccgcaaagcccaaggcagccgtgaagcccgccgctaagccgaaacccgcagcggccaagccaaaggcggccgccaagccgaaggacaggccagctgccaaggctaagccgaagctgcgcgcggccaagccgaagccagcagccaagaaggccggcagctccgccaaggacgcc

SEQ ID NO: 1698 - DNA, 240 bp, Zea mays
gcacgaggtcatcaagagtgtggagaagaaggacccgaccggtgccaaggtgaccaaggctgctgccaagaagaaatgatgcgacctgtcgttgatgcagcgtctgcttttccaatacgtagctgagatgttccattttggcataagttttgtatgctgtggttgctgacttgctgttaccttgtgaactgttgagctctactattgggtgcccgtttatctgtttatgtagcatcttgt

SEQ ID NO: 1699 - DNA, 167 bp, Zea mays
gcacgaggaaggatcttgttgtgactgtccagtctgcgatgggggaggagcagatctgcgcgctgaaggatgttggccccaagtaacttccttggctttggagacggaaccctactctatctcaacttaaatcggaaaagaagtgtatcaccaaaggattgctaccg

SEQ ID NO: 1700 - DNA, 104 bp, Zea mays
caggattagtagtagctgctgctgctgcgggcacaacacaaggggggataggaactgcaataccctgttgcgctttggttgtttcttggaaccgatgttatgtt

SEQ ID NO: 1701 - DNA, 235 bp, Zea mays
gcacgagagggcatggcgcgctgacaatttacttgaaaaacactgataaatacaagtcggtgtcagcatttgctccaattgccaatccgataaactgcccttggggtcagaaagcattctcaaattacctgggctcaactaaatcagattgggaggaatatgacgcaacctgcctgattaaaaagaacagcaaagttcccactactatcctaattgaccagggggaggccgacaa

SEQ ID NO: 1702 - DNA, 235 bp, Zea mays
gcacgagccaacccagacgatcctcttgtccctgagattgctcacatgtacaagacggatcggcctaagtacgaggcaacagcccgcagctggacccagaaatatgccatgggatgaaaatgaaatgaagtcgagactccatattcggcattactgcttaaatgcagacgattgtggtgttgccccatgaaactgtctgtggggacgtatgttcttccattccttgtcgcccgtg

SEQ ID NO: 1703 - DNA, 237 bp, Zea mays
gcacgagccgaaggccaagtcccccgcgaacccaagcccgccacaaagcccaaggcggccgcgaagccgcttccaagccgaaagcagcagcaaaacccaaggcaccagccaagcccaaggccaagcctgctgccaaggcgaactcaaggctgccggcgctaagccgaagccagctgccaagaaggccggccgccccgccaaggcggccaagacgtcggccaaggccacgccaggaaa

SEQ ID NO: 1704 - DNA, 237 bp, Zea mays
gcacgagcttcgccagcgaggagcacccagcaggacaaggcaacaggctgttggaatatggaccaacaaggcatgcatgaccatgaaggggtccacgttgttggatttgaagtcccgccttcaccggattccagctacgacaaccctgttcctgggaatgaagacgaaggccgggagcccccactgatgccacctcatctgcagcacacgctgctgagcttcccaccaagccaagac

SEQ ID NO: 1705 - DNA, 235 bp, Zea mays
gcacgagggagcatcaaagcttgtgcctgttggatacggcatcaagaagatgactatcatgttgacaattgtcgacgatcttgtgtccatcgacactctaattgaggaccaccttacgcaagagcccatcaatgagtacgtccagagttgcgacattgtggctttcaacaagatctagagttcagtttctgagtttgggcaacggcagcggctcagctcgtcaagtttgtgctgg

SEQ ID NO: 1706 - DNA, 233 bp, Zea mays
gcacgagcaacggtggtggatactaccattactcctactctgttgtacgtggatgtgaccgtatagtccctgtggacatctacgtccctgggtgcccaccaactgctgaggcactgctgtacggcgttcttcagctccaaaagaagatcaacaggcgtaaggatttccttcactggtggaccaagtgaagcatgctcctgctatttctcggtcgctatgttttctttgcattg

SEQ ID NO: 1707 - DNA, 232 bp, Zea mays
gcacgaggtcgccgcgcgctaactccgccatcaacagacctccggagaagaggcaacgcgtgccgtcggcgtacaaccgcttcatcaaggacgagatccaacgcatcaaggctggcaatcccgacatctcgcacacggaggccttcagcgcggcggccaagaactgggcgcactttccacacatccactttggactcatgccagatcaccaggggcccaagatgacaagcct

SEQ ID NO: 1708 - DNA, 178 bp, Zea mays
gcacgagcgacgacgaagaggccgacgaggagagggacctgcgggaggcgttcgacgtgttcgacggcaacaaggacgggctcatctccgccgaggagctcggcaccgtgctgggctcgctcggcctgcgccgccagggcaacgcccggaccgccgtcgccgattgccgcgacatgat

SEQ ID NO: 1709 - DNA, 232 bp, Zea mays
gcacgagatcgggcaagatcgtggtcgaactcaacgggaggctgaacaagtgcggcgtcatcagccctcgctttgatatcggcgtgaaagacattgagggatggactgcaaggctgctcccgtccaggcagttcggatacatcgtcctcacaacttcggcaggcatcatggaccacgaggaggcccgccggaagagcgtaggaggcaaggttctaggtttcttctattgaag

SEQ ID NO: 1710 - DNA, 231 bp, Zea mays
gcacgagtccgattcgaccatctttctgccgtgcagttcttgttaaggatgatttgaggagggaacttgaattggatcctgagcttcctgcagtactgctcatggtaggtggagagggcatgggtcctgtcaaaaagactgccagagccctaggagaatcattgtttgacaaagagcttggaaaaccaattgggcagcttattgtcatttgtggccggaacaaaacgctaa

SEQ ID NO: 1711 - DNA, 240 bp, Zea mays
cggtaaagaagaggcgccgcgccaccaagaagccatactccaagtcaattgtgggtgcttccttggaagtaatccagaagaagagagctgagaagccagaggtccgcgatgctgctagagaagctgctcttcgtgagatcaaggagcgcatcaagaagaccaaggatgagaagaaagcgaagaaggcggaggtgagcaagtcccagaagacgcagacaaagggtgcggtccagaagggtt

SEQ ID NO: 1712 - DNA, 232 bp, Zea mays
gcacgaggcgaccaaattctgccgtctccaccgccgccgcagccagcgtcaccggagggatctgccgtctcccttgctccacgcgatgaacaccgacatcaccgcctcgactaagccggagtacccggtggtggatcggaacccggccttcaccaaggtggtcggcaacttctctgcgctcgactacatgcgcctctccaccatctccgccgtctccgtcaccgttggctac

SEQ ID NO: 1713 - DNA, 232 bp, Zea mays
gcacgaggctgtccgtggctgaaatcaccaacagcgccttcgagccatcctccatgatggccaagtgcgacccccgccatggcaagtacatggcatgctgcctcatgtaccgtggtgatgtggttcccaaggacgtgaacgctgctgtggccacaatcaagaccaagcgcaccatccagttcgtggactggtgcccgactggcttcaagtgcggaatcaactaccagcctcc

SEQ ID NO: 1714 - DNA, 230 bp, Zea mays
gcacgagctgcttttgaccaaggctaagcgataccttgaggatgttattgctcacaagcaggcaattcccttccggagatactgtggaggtgttggtcgcaccgcacaagcaaagtctcgccactccaatgggcagggtcgctggcctgttaagtcagctaggttcatattggatttgctgaagaatgctgagagtaacgctgatgtgaaaggcttggacgtggacaacc

SEQ ID NO: 1715 - DNA, 229 bp, Zea mays
gcacgagggtcacagtgctgtgttacaaggatgcacggttgaggatgaagcttttgttggcatgggggcaaccctattagatggtgtcgttgttggaaagcatgggatggtagctgcaggatcccttgtaagacagaatactaggatcccttgtggagaggtatggggagggaaccctgccaaatttctgaggaagctcacagatgacgagatcgcatttatcacggaa

SEQ ID NO: 1716 - DNA, 233 bp, Zea mays
gcacgagagactacggcgtcctcaaccgcgtgttccaccacatcacggacacgcacgtcgcgcaccacctcttctccaccatgccgcactaccacgccgtggaggccaccagggcgatcaggcccgtcctcggcgagtactaccagttcgacccgacccctgtcgccaaggccacctggcgcgaggccagggagtgcatctacgtcgagcctgagaaccgcaaccgcaagggc

SEQ ID NO: 1717 - DNA, 236 bp, Zea mays
cgccgccgcggagctgctccgcgcccccgacgccggtgattaggagcaggagcaagaggggttcggaatggccaagtctaagaaccacacggcgcataaccagtcgttcaaggcgcacaagaacggcatcaagaagcccaagcgccaccgccagacctccaccaaggggatggaccccaagtttctgaggaacttgaggtactcaaggaagggcaataagaagagttgtgaggctg

SEQ ID NO: 1718 - DNA, 224 bp, Zea mays
gcacgagcacgatccctaggaacgttctccagatcaccacccggaaatccccttgcggtgaacgaacaaacacatgggaccggtttgagttgcgcatccataagatggtgatcgacctgatcagctccccagacgtggtgaagcagatcacctctatcaccattgagccgggtgttgacgtcgacgtgaccgttgcagacgcgcaatcacgttctatatactcg

SEQ ID NO: 1719 - DNA, 228 bp, Zea mays
gcacgagcgccctctcgctccagccgcttcacagcgccgccgctcgcctctccgactgccgcgagaatgccgttcaagaggttcgtggagatcgggcgcgtggcccttgtgaactacggcaaagactacggccgcctcgtcgtcatcgtcgatgtggtcgaccagaacagggcacttgtggacgcccctgatatggtcaggtgccagattaacttcaaacggctctca

SEQ ID NO: 1720 - DNA, 234 bp, Zea mays
tgttaagttcgaaatctgggatactgccgggcaggagaggtatcatagcttggctcccatgtactataggggtgcagctgctgccattgttgtctatgacatcacaaatccggcctccttcacccgtgccaagaaatgggttcaagaacttcaagctcaaggaaatcagaataccatagtggctcttgctggaaacaaggctgatatgctagatgcgaggcaggtgccagcaga

SEQ ID NO: 1721 - DNA, 228 bp, Zea mays
gcacgagtgaagactcgtccatttgactccattctggctgaagtgcgtgccttcttcgatgtgcatgaccaagaaggaagccaccctgggggcgtccaccttgaaatgactgggcagaatgtgaccgagtgcatcggtggatcacggaccgtgaccttcgacgatctgagcgaccgctaccacacccactgcgacccaaggctgaatgcctcccagtccctggagctc

SEQ ID NO: 1722 - DNA, 227 bp, Zea mays
gcacgagccatcaacgacgagttcaagctgtaccgctgccacaccatcaagaactgcacgcacgcctgccccaaaggcctgaacccggcaaagcagatcgacacgatcaagaagctccagttgggtgccccaagtgcctgaaaccgagcgtgtcttcccttgaaaacggtcgtggaacagacctgtggaaaaaattgggatgaacttgccacttatttcgttgttgt

SEQ ID NO: 1723 - DNA, 222 bp, Zea mays
gcacgagtctacgtccgagtcgtcgcatcaggtcccctcgattcgccggcgggccaccaaccaagctcatacatctgaattgactagtcaaactcagtgatctctttggggactaatcaaactcaagaactaagtttcatgtctgatctcgacgtccagcttccatctgcttttgatccgtttgcagaggcaaatgctgaggactccagtgctggtgctgga

SEQ ID NO: 1724 - DNA, 226 bp, Zea mays
gcacgagtcgtcatcgatatccgcctgcccggtggatatccctttgagccgccgaagatgcagttcatcaccaaagtatggcaccctaacatcagcagccaaaatggagcaatttgcttggacattctgaaagatcagtggagcccagcccttaccttgaagactgcgctcctttcccttcaagctctgctttcttctcctgcacctgatgatcctcaggatgctg

SEQ ID NO: 1725 - DNA, 225 bp, Zea mays
gcacgagggctactcttccagatggcagataagctctcggtcctggtggagatcaatgagagggcatacgaggcaagaactggtggtgctctcgagggggtaccgcccaggcgcaggggcgagggtcaggataatatgggaaagtggcaggataactttgtctcgtcacaggggcggcagggtggtggcaacaggtttggatactcaagcagaggtgcagtatct

SEQ ID NO: 1726 - DNA, 236 bp, Zea mays
gcacgaggtgggcgagaatggcgaggagattgagaacccacttactctgttgaatgatccgtcctctgttgagccactgggcaactgtgggaagaaggtcctactgtggtggcttcgtgttgaagcacgggctgatagcaagtttcctgaagggtgggtaattgagccacctttggaagtcgttgtccctgcaaagcgcactccatggcctgaaacaaccaccgagctgccagccg

SEQ ID NO: 1727 - DNA, 234 bp, Zea mays
gcacgaggttgagtgtgcttgtgtcattgaattgccagaactgaagggccgagacaagcttggggacaggccagtttttgtccttgtggaagcagacgcctgagcggaacttgggacttctcagagagtttggcgccgtcgatgctccctctctggagacaacacagtttcccatgttaccatgttggctattttctggctgacgcgtaataaagttttattccaaattgtgat

SEQ ID NO: 1728 - DNA, 237 bp, Zea mays
gcacgagatatagagagagagagagagagagagagagggttgatggaaagtccactgggttttgtgccggtggctgtgcagccatcgcagattctggaacttccttgcttgctggccccacagccataattactgaaatcaatgaaaagattggtgctgctggtgtagtcagccaagagtgcaagactgttgtttctcaatatggatagcagatcctagatcttttgctagctgaga

SEQ ID NO: 1729 - DNA, 236 bp, Zea mays
gcacgaggctacgaagaggtagttcctagagagggcatgccaatacccaaggacccctctaagaagggaaatctgcggattaagttcaacataatgttcccttctaggctgacgtctgatcagaaggctggtctcaaaaggatattgggttcttaggccgcctcaaatgacattttatagtgaaaggtattgtgaatatcgccagtaattggctaggtagattatttatttattta

SEQ ID NO: 1730 - DNA, 231 bp, Zea mays
gcacgaggtgacttacctcattgagcagaacaaggctcagctcgttgtcatcgctcatgatgtggatccgattgaactggttgtttggcttccagccctgtgcaggaagatggaggtcccatactgcattgttaaaggaaaggctcgccttggatcgatcgttcacaagaagactgcatcagtcttgtgtctgaccactgtcaagaacgaggacaagcttgagttcagcaa

SEQ ID NO: 1731 - DNA, 231 bp, Zea mays
gcacgaggtggtgtggatgtatttactgctctttctggtggtgttggagctctatatggtcctctgcatggcggcgcaaacgaggcagtacttaaaatgttaaatgagattggaagcatggaaaatattccagatttcattgtaggagtgaagaacaggaagaggaagatgtccggttttgggcaccgtgtgtataaaaactatgaccctcgtgctaaagtcataaggaaa

SEQ ID NO: 1732 - DNA, 232 bp, Zea mays
gcacgagggaggccaggcagaaactcctccactggtgggagctgcactacaagtggccgtacccttcagagacggagaagattgcgctcgcagaatcaacgggcctagaccagaagcagatcaacaactggttcatcaaccagaggaaacggcactggaagccatcggaggacatgcctttcgtgatgatggaaggcttccacccgcagaacgccgctgctctgtacatgga

SEQ ID NO: 1733 - DNA, 157 bp, Zea mays
ttggagtcatcaagagcgtggagaagaaggacccaactggtgccaaggtgaccaaggctgcaataaagaagaaatgatgcgtcctcccatgtgccctcgtttattttgtacttgtgcccgtatacttcgatctgttaaaatctattggttgtgtgcc

SEQ ID NO: 1734 - DNA, 232 bp, Zea mays
gcacgagccaagaagagcgtggagacctacaagatctacatcttcaaggtgctgaagcaggtgcaccccgacatcggcatatcctccaaggccatgtccatcatgaactccttcatcaacgacatctttgagaagctggccggcgaggccgccaagctggcgcggtacaacaagaagcccaccatcacgtcccgcgagatccagacctccgtgcgcctagtcctccccggag

SEQ ID NO: 1735 - DNA, 228 bp, Zea mays
gcacgaggagagtgctaataaggagattgccctgtggttccccgagggccctgctgattggcagagcagccagcacccctggatctacgagaagtaaacatggaaagtttcacatcaaaccttgagagccagaggaagcatgtcaccatttgtgctttagcaatgttttcgaaaagattatgatctgtatcttggaaccttatttcaatggaccaaatttctttcaaa

SEQ ID NO: 1736 - DNA, 203 bp, Zea mays
gcacgaggtttgtgccgcacgcatgagctgtaaggaggccatgcttaattattctgttgccgttgctactctatctatatgcgcctatgcctccgtgcatgaactatgctttaggtggttgctgctccacactgtcgtggtgtgcttttgcttttgtgtggtcgtattgtatgcgtaacctgacagatggatccctgattgct

SEQ ID NO: 1737 - DNA, 162 bp, Zea mays
gcacgagggctacctgacctggagggccgtacccaaatctttaagatccatacacgcaccatgaactgcgagcgagatattcgtttcgagcttctggcacggctctgccccaactctactggagcggatataaggagcgtctgcacagaagccgggatgtat

SEQ ID NO: 1738 - DNA, 230 bp, Zea mays
gcacgagggcatctcctccaaggccatgtccatcatgaactccttcatcaacgacatcttcgagaagctcgccggcgaggcggccaagctcgcccgttacaacaagaagcccaccatcacctcccgggagatccagacctccgtccgcctcgttctacccggcgagctcgccaagcacgccgtctcggagggcaccaaggccgtcaccaagttcacctcgtcctaagctc

SEQ ID NO: 1739 - DNA, 282 bp, Zea mays
ggcgctggcgcccctgcgggaggaaggcaccctcatcatcggctccggcagcgccacgcacaacctgcgcaagattagcccgtccgacgcgcccgtgccgcagtgggccgccgagttcgacacctggctcaaggactcgcttctcaacggaaggtacgaggacgtgaagcggtacgaggagaaggcgccgcacgcgagggtggcgcacccgtggccggaccacttctacccgctgcacgtcgcgctcggcgccgccggggacggcgcgaaacggagcagatc

SEQ ID NO: 1740 - DNA, 279 bp, Zea mays
gtgatagcatttccaaccagatcactgcccctactgaatcatccaatgtatataaggatgttcctgaaaccccaagcgccgaagggtcacggcatctgagccagcgtgaggctgcactgaacaagttccggctaaagaggaaggataggtgctttgagaagaaggttcgataccagagccggaaattactcgcagagcagcgtccacgggtcaagggccagtttgttcgtcaagatcatagcatccaaggaagctagggtccagttactgagctggaac

SEQ ID NO: 1741 - DNA, 280 bp, Zea mays
gtttccgcaccgcacctctagtcctccacccaccccaccccactaccggcgatggccaccgcggcggcacagggcggtagcgacaagccggcgctccggaagcccgtcttcaccaaggtcgaccagctcaagccgggcactaacgggcacaccctcaccgtcaaggtcgtcagcgccacccccgtgccgggccgcgcgcgcccgggcgcacccgtcgccgcctcgtcccgcgcgcctggcatcgccgagtgcctcgtcggggacgagatcggcgtcatcg

SEQ ID NO: 1742 - DNA, 276 bp, Zea mays
gtcgcgtgccatcctagggtttctttccccgtcggcgcctccccagatttggccgccgccgccgctgacccaggttgtcttgatggcgcccgctgtagaagccgtgaaggagacaggcaccttccagaaggttcctgccttgaacgaaaggatactgtcatccatgtccaggaggtctgttgctgcacacccttggcatgatctggagataggtcctggtgctccaaccatattcaactgcgtcattgagataccaaggggcagcaaggttaaata

SEQ ID NO: 1743 - DNA, 276 bp, Zea mays
cggctcgagggcgcccgcgcgccggccgctacatctgcgccgacgccgtgctccaccgcgaggacgtcgtccgcaccctccgcaagtccttcccgggctaccccgtcccggagaggtgctctgacgaggtgaacccgaggaagcagccgtacaagatctccaaccagcggctgagggagctgggcctggagttcaccccggcggcgcaggcgctgtacgacaccgtcgtgtgcttccaggagaagggcatcctccctctccctgtccccgccccaa

SEQ ID NO: 1744 - DNA, 277 bp, Zea mays
ggatcagcctggaaacctcacgcgcgaggagtacgtgcacgacgccgtgaggatcgacttctacaagaactacctgacggagctaaagagagggatcgacggcggcgcgaacgtgatcggctacttcgcgtggtctctcctggacaacttcgagtggctgtcgggctacacgtccaagttcggcatcgtctacgtcgacttcgcgacgctgaagcggtaccccaaggactcggcgtactggttcagagacatgctttcggggacgggctccaaggct

SEQ ID NO: 1745 - DNA, 276 bp, Zea mays
cggctcgagtggaggatctgattatcttggcaagggtgttcttaaggctgtcagcaatgtaaataacattattggaccagcaattgttggaaaggaccccactgagcatgttgagattgacaacttcatggtccaacagcttgatgggacctccaatgagtggggctggtgcaaacagaagcttggagcaaatgccatccttgcggtttcacttgcggtgtgcaaagctggagctatggtgaagcagattcctctttaccagcacatcgcaaatct

SEQ ID NO: 1746 - DNA, 277 bp, Zea mays
tgaagatgcccttaaggaaggaatgggcggtggaggatcccatgttgatccatttgacatcttctcatcattttttggaccctcttttggaggaggtggtggaagcagcaggggaagaaggcaaaggaggggagaagatgtagttcacccacttaaagtttctctggaagatctttacaatggcacctcaaagaagctctctctttcgcgcaatgtcatctgctccaagtgcaagggcaagggctcgaagtctggtgcctcaatgaggtgccctggt

SEQ ID NO: 1747 - DNA, 278 bp, Zea mays
tgctgcggctgcgctggcgtgccgtcctccccccactcccactccctccgctgcctggcttgcttcgccgcctgcctccgcaccggcgcgccctctcgtcctcttccggctctatcccgcttccaccgccggtgatggaggcttcctacaagtttgggccctacaaaatcgacgccagggaggtcttccacgccacgcccctctcctacgccatggtgaatctccgcccgctgctcccgggtcatgttcttgtgtgccccaagcgtgaagtgaaaaga

SEQ ID NO: 1748 - DNA, 280 bp, Zea mays
tgcgaggcaaccggagccaatgtctctgaggtggcttacgccgtgggcaaggacacgagaattggccccaagttcctgaacgccatgttgggttcggtggctcatgcttccagaaggacatcctgaacctggtgtacatctgcgagtgcaacgtcctgcccgaggtggccaactactggaagcaggtgatcaggatcaacgactaccagaagagccggttcgtgaaccgcgtcgtggcctccatgttcaacaccgtcgccggcaagaagatcgccgtcct

SEQ ID NO: 1749 - DNA, 284 bp, Zea mays
tgcgtacctcgaggccaagctccaggagctggacggcccggacgctcggatcgccgactacttcgacgtgattgccgggacgagcaccggcgccctgctcgcgtcgatgctggcggcgccggacgagaacaaccggccgctgttcgccgccaaggacctcaccacgttctacctcgagaacggcccaaagatcttcccacagaaaaaggctgggttgctgacgccgctgaggaacctgctgggcctggtgcggggccccaagtacgacggcgtgttcctgcacg

SEQ ID NO: 1750 - DNA, 288 bp, Zea mays
ttcggttcgtcattggccacagtgctatatcaggtggaattgttgatagagcaatcgaagcagaggacaggaagcatggggatttcatgaggatagatcatgttgaagggtaccttgcattgtcaggaaaaaccaagacctactttgctacagctgtttcactatgggacgccgacttttatgttaaggttgacgatgatgtccatgtgaacatagcaacgctcggacagattctgtcgaaacatgcattgaagccgagagtgtacatcggatgcatgaaatctggac

SEQ ID NO: 1751 - DNA, 275 bp, Zea mays
caatcaaccagcaacactcttctcgtataacataatacagcgaaggtaactcacatggcaacttccatgggttgtctcgtcttgctctgccttgtttcttctctccttcccagtgccgtccttggccacccatggggtggcttgttcccacagttctatgaccattcgtgccccaaggcgaaggagattgtgcagtccattgtggcacaggctgtggccaaggagaccaggatggcggcatctttggtcagactgcatttccatgactgctttgt

SEQ ID NO: 1752 - DNA, 276 bp, Zea mays
cctagctctatagctcgagtattgcttgctctccacaagagacaaggcatagcaccaacaatggccgccgcgtcctcggtcctcctgctgctcctggccgccgccttggctggcatgagcgccaacgccgctaccttcaccatcaccaacaactgcgggttcaccgtgtggcccgcggccacccctgttggcggtggcacgcagctgaacccgggcgggacgtggaccgtcaacgtgccggccgtcactagctccggccgcgtgtggggccgcacc

SEQ ID NO: 1753 - DNA, 278 bp, Zea mays
ccgtggtgaaggtctggaccttgtagggaagatgttgaaaagcatgtctgaggaattcaggatacctttggagtttacccctctgcccggtatttatgcaactcaagttacaaaagaaatgctggacattaggtcaggcgaacacttgctgtcaacttcactctgcagctgcaccacaccccggatgagagcgtggacgtgaacaacccacgggacgggctactccggatggtgaaaggcctgtctccgaagtgaccacgcttgtggagcaggagtcg

SEQ ID NO: 1754 - DNA, 281 bp, Zea mays
tcaaacacaagggcatatagggtctttaacaagtccactggactagttgaagtctcatgtgacgttgtgtttgatgaaactaacggctctcaagtagagcaagttgatcttgatgagataggtgatgaagaggctccatgcatagcgctaaggaacatgtccattggggatgtgtgtcctaaggaatccgaagagcctccaagaacacaagatcaaccatcctcctccacgcaagcatctccaccaactcagaatgaggatgaagctccagttgatgaagt

SEQ ID NO: 1755 - DNA, 272 bp, Zea mays
ctggtatattggagctcagatggagtggtgttggcattgaagattggtggagaaatgagcagttttgggttattggtggcacctctgcccatctcttcgcggtgttccagggtctgctgaaagtgttggctgggattgataccaacttcacagttacctcaaaggcatctgatgaggatggcgactttgctgagctatatgtgttcaagtggaccagtttgctcatccctccgaccactgttcttgtcattaacctggtcggaatggtggca

SEQ ID NO: 1756 - DNA, 282 bp, Zea mays
cgccgccgaagccccgccgcgcgccccaaggccgacccatcccccaacctcttcgtctccggcttaagcaagcgtaccacaagtgaaggacttagagaagcctttgcggagtttggtgaagttttgcatgctcgagttgtgaccgatcgtgtcagtgggttttctaagggatttggctttgtaaggtatgctacgaccgaagaggcagccaagggaatagaaggaaaggatggaaagttccttgatggatgggttatttttgcggaatacgctaaacccaga

SEQ ID NO: 1757 - DNA, 271 bp, Zea mays
gttggtggagattccagacacagagcagattcagatatgacacatgttgcattagcttttgaagtgccagggggctggcttcaagagagagacgctacaattatgactgtcatacagactttaatgggtggtggtggttcattctcatctggcggtcctggaaaaggaatgcattcacggctttatcgacgtgtcctaaataaatatcacttggttgattctttttctgcatttaacaatgtatatgacagcagtggcctctttggtatct

SEQ ID NO: 1758 - DNA, 275 bp, Zea mays
cttgaagctagagaacaccctgttggacggcagcaccgcgcctcgcgtcaagatatgtgatttcggctactcaaagtcatcagttctacactctcagcccaaatctaccgtgggaactccagcatacattgctcctgaggttcttctgaagaaggaatatgatgggaaggttgccgacgtgtggtcgtgtggggtaaccctctacgtgatgctggtcggcgcgtatccattcgaggacccagacgagcctaagaatttcaggaagacgatccaga

SEQ ID NO: 1759 - DNA, 290 bp, Zea mays
ccaaattcccaattgtcaacctctcctcagagttcgagtgaccatgtcggggcgcggaaagggcgggaaggggctgggaaagggcggcgcgaacgtcaccgcaaggtcctccgcgacaacatccagggcattacgaagccggcgatccggaggctggcgagaaggggcggcgtgaagcgcatctcggggctcatctacgaggagacccgcggcgtgctcaagatcttcctcgagaacgtcattcgcgacgctgtcacctacacggagcacgcccgcagtaagaccgtcac

SEQ ID NO: 1760 - DNA, 282 bp, Zea mays
ctgggcagattggcaacggctatgccccagtgctggactgccacacctcgcacattgctgtcaagtttgcggagctcattaccaagattgataggcggtctggcaaagagcttgagaaggagcccaaattcctcaagaatggtgatgctggtatggtgaagatggttcccactaagcccatggtagtggagaccttttctgaatatcctcctcttggtcgctttgctgtccgtgacatgaggcaaacggtggctgtcggagtcatcaagagtgtggagaaga

SEQ ID NO: 1761 - DNA, 280 bp, Zea mays
agttgcggaaggagatcgtgggcaagaagaagggccggcgacgggatgccgcggttgggctgtttgtcttcccggcgcagtctcgcgtgaccggtgccaagtactcctaccagtggatggcgctggcgcacagaatgggtggcatgtgatgcttgatgctggtgcacttggccccaaggacatggattcactgggtctctcgctattccggccggacttcattataacttcgttctacagggtctttggtgcagacccaactgggttgggttgccttctg

SEQ ID NO: 1762 - DNA, 293 bp, Zea mays
gctcatctgtcagcgccacaggtgaccggaaaaccacggccggcgttcctgcttctctacccggtccgaattgctgaccggatcaacccgagaccttgcaggattatcgatctgattgcggcatgatccgcttcatcctgctgcagaaccggcaggggaagactcgactggccaagtattacgtcccgctcgaggactcggaaaagcacaaggttgaatacgaggtacaccggctcgtggtcaatcgggaccctaagttcaccaacttcgtcgagtttcgcacacacaaagtt

SEQ ID NO: 1763 - DNA, 230 bp, Zea mays
gtctcctcgcccccatggcccacgagaagaagctgtccaacccgatgcgggagatcaaggtgcagaagctcgtcctcaatatctccgtcggggagagcggcgaccgtctcacccgcgccgcaaaggtgctcgagcagctcagcggccagacccccgtcttctccaaggcgaggtacacggtgcggtcgttcggcatccggcgtaacgagaagatcgcctgctacgtcacg

SEQ ID NO: 1764 - DNA, 295 bp, Zea mays
  unsure (1)..(295): unsure at all n locations
cccagacccagcagctattgtggtcgtccctcagccgcgtcgcaccgcatcgcattctacgattcgaagctctctctgctcgcagccatggcgaagaattacccaaccgtgagcgccgagtacagcgaggccgtcgagaaggccaggcgcaagctccgcgccctcatcgccgagaagagctgcgcgcccctcatgctccgcctcgcgtggcactccgcggggacgttcgacgtgtcgtcgaggaccggcggtcncttcggtactatgaagtgcccggcggaactggctcacggcg

SEQ ID NO: 1765 - DNA, 273 bp, Zea mays
cgcacttctgcctgtctatctaaaggcctattaccgggacaatggtttgatgcagtatgctcgctctgtgcttgtgatacacaacattgctcatcagggtcgtggccctgtagacgacttcgtcaattttgacttgcctgaacactacatcgaccacttcaaactgtatgacaacattggtggggatcacagcaacgtttttgctgcggggctgaagacggcagaccgcgtggtgaccgttagcaatggctacatgtgggagctgaagacttc

SEQ ID NO: 1766 - DNA, 293 bp, Zea mays
tgaagatgtcatcgattttgatctattggaagacttgatatgctatattgatgagaactgtcctcagggtgctattcttgtttttcttcctggagttgcagagattgacttgttgattgatagattatctgctttagttagatttggaggggcatcatctgattggatccttcctttacattcactgcttggaccctctgatcaaaggaaagtgttccagtctccaccagataacttccgcaaggttattattgccacagacatagcagagaccagcattacaattgatgatg

SEQ ID NO: 1767 - DNA, 273 bp, Zea mays
ccgctcgagagctagcctcacgagccctatctatccttttctcggcacctcgcgggtctcccgtccgccacgtcccgcattcgtaccctctcctcactctcgccgccgccgcttcccctgcgcaccgagccaagatgaatgtcgagaagctcaagaagatggcacgtgctgtgcgcactgggaggaagggtagcatgcgcaggaagatgaaggcagtccacaagactacgaccacagatgataagaggcttcagagcaccctgagaagaatag

SEQ ID NO: 1768 - DNA, 296 bp, Zea mays
cttacttcaaggaacttctgagtggtgataaggagggccttcttcagctcccaagtgacaaagccctgctgagcgaccctgttttccgccctcttgtcgagaaatatgctgcggatgagaaggctttctttgatgactacaaagaggcccacctcaagctctccgaactggggtttgctgatgcttaaatagaccctatcttggagtgatacattctgctgcctgtatggaatcatgtggtcttttgcatctggagtcaatgtgaacaagcagattgtcgtattgtctttctcgta

SEQ ID NO: 1769 - DNA, 274 bp, Zea mays
tgaagaagttacttttggatggcctaggcaaaaggcagacctcctattaaaagaacagctcgctttaaatcttcaaaatgcttttaactcggttcaaactcctgatctgttgctgcttgatgagccacttgctggtctagattggaaggctcgagctgatgttgtgaatctcctaaaggacctgaagaaacatcatactatactggttgtaagtcacgatctaagggaactatatccactagtggatcgctcatggcgaatggaaatgggggga

SEQ ID NO: 1770 - DNA, 284 bp, Zea mays
catcaacctcgacctcaagaagggcggcaacaggttcatcaagaccgccgcatacggccactttggccgtgacgacgccgacttcacctgggaggtggtcaagcccctaaagaaggcatccgcttaagaatgtattgggaagttcactggacatgaggttcatcttcgtctggctctgctgatacctgcaaggattgctgctgctgctgccgcccctggatgtgtgtttgatcagtgactggctgctctgctccatagaagatgaatgaagagagagatggtga

SEQ ID NO: 1771 - DNA, 286 bp, Zea mays
ggcaattgttaccattttctttgccgcatttggcttcatgtctcctgcatcgagaggaatgttgttgacagggatgatagtcttttatatgttacttggaattgtgtctgggtatgctgctgtcaggctctggaggactttaaaaggaacgtccgagggatggaggtctgtctcctggtcaactgcttgtttcttccctggcattgtcttcattgtcctcactgtgttaaacttcatgctgtggacaagaaatagtactggagcccttcccatctcacttttcttt

SEQ ID NO: 1772 - DNA, 274 bp, Zea mays
gtcgctgaggctgacattatctttgtctcggtgaacacccccaccaagacccgtgggcttggagctggcaaggctgccgacctcacctactgggagagcgctgcccgcatgattgccgatgtctccaagtctgacaagattgttgttgagaagtccactgtccctgtcaagaccgctgaggctattgagaagatcttgaccaacaacagcaagggcatcaactaccagatcctttcaaacccagagttccttgcggaggggtactgccattgag

SEQ ID NO: 1773 - DNA, 223 bp, Zea mays
cggcgaccctgggccctgcgcaccgacccggtttccccgacgtggcactcgacccgcggcgttagcgaggacggcgtcgccgaggtggtggccgcgctgcgagccgacgtggccggcctcgcgtccaccgcgataaccaccacctcgtcctacttctacgggaaggcgatcgcgcgggcggcgcggctggcgctgatcgcggaggaggtcgggtgccccgacg

SEQ ID NO: 1774 - DNA, 225 bp, Zea mays
tgacgcttcaggcaaccggtggccgaactacatcgctgttgatttttacatgagaagtgacggtggaggacgtcccttggctacggacattgcgaacggtcatatggtgtgcggatgcgacaacatcgcgtattgcaaggcgaattcgacattcgggacctgcgtgatacccccaccgccgccgccgtcaccgcccaaggcatccacccccggcagcagaggctc

SEQ ID NO: 1775 - DNA, 291 bp, Zea mays
cttcacaacctcagccgagcgagaaattgtaagggacatcaaggagaagctagcatatatagcccttgactatgagcaagagttggaaactgccaagaacagctcttcagttgaaaagagctatgagctacctgatggacaagtaatcaccattggtgcagagagattcaggtgccctgaggtcctcttccagccgtcgatgattggtatggaggctgctggaatccatgagacaacatacaattcaatcatgaagtgtgacgtggatatcaggaaggacctctatggtaa

SEQ ID NO: 1776 - DNA, 281 bp, Zea mays
ccgaggccaactcctccgcggcccacgcgggaggcccgcacgccgtgcgcgtcttctgcaaggccggcggcgaggactacagcctcacggtgcgcaacggcacggcgtgcctgggcgcccaccaacccgcgggacgagtaccagcactgggtcaaggacatgcgccacagcacccgggtgcgggacgaggagggctacccggccttcgcgctcgtcaacaaggtcaccggcgaggcgctcaagcactccacggggcagggccaccccgtcaagctcgtgcc

SEQ ID NO: 1777 - DNA, 276 bp, Zea mays
gttccccgaccacaccgttcctccgagcccaggagcagccccgcgccaggaggaagtttgttcttttaacaatatgtcgagggaggagaatgtttacatggccaagttggctgagcaggctgaaaggtatgaggagatggttgagtatatggagaaggtggctaagactgtagatgtggaagagctcactgttgaggagcgtaaccttctgtctgttgcatacaagaatgtgattggggctcgccgcgcttcatggcgcattgtttcttccattga

SEQ ID NO: 1778 - DNA, 212 bp, Zea mays
cggcggacacggaggcgaaggaggagcagcagcagcaggcggcgccgaggagcggcatcccactcagtgcttgcaaccatggctaggggattgaagaagcacttgaagaggctcaatgcgcccaagcattggatgctcgacaagcttggcggagcttttgctcccaagccatcttctggacctcacaagtccagggagtgccttcctctgat

SEQ ID NO: 1779 - DNA, 282 bp, Zea mays
ccgcctgatagctccagcgccctcgccgtcggctgcccggctgccgtcctcccgctacgagctaggcatctccttcgccgatccagcatgggtaagacacgtggtatgggagctgggcgcaagctcaagacccacaggaggaaccagaggtgggctgacaaagcctacaagaagagccatcttggcaacgagtggaagaaaccctttgctggatcatctcacgcaaaggggatcgtcctcgaaaagatcggcatcgaggccaagcagcctaactctgctatt

SEQ ID NO: 1780 - DNA, 280 bp, Zea mays
ctcggcagccacaagaaaccacccccttccggcacacgggctcgaccacctgactccatcaccgtgcctgtctgtgttctagggacaagaagagcagagagatccaggagcgagcagaggcggggagaagaggatgagcaccacaacggcgtcgtcgctgaaccccaacgcgccgctcttcatcccggcggcgtaccggcaggtggaggacttctcgcccgagtggtgggagctcgtcaacaccaccgcctggttccgggaccactgcttccggcagcgc

SEQ ID NO: 1781 - DNA, 282 bp, Zea mays
cttcggtattgctggcatacattggacaagctgcatatcttcgtatctacccagaaaatgttgcaaataccttctacaaatcaattccaggtccgttgtactggccaacatttgtggtggctgtagctgctgctataattgcaagccaagctatgatatctggtgcctttgcaattattgctcagtcccaagttctaggttgctttccacgagttcgtgtcacccacacatcaacgaagtttgaaggacaggtctacatcccagagatcaactatgtcttga

SEQ ID NO: 1782 - DNA, 285 bp, Zea mays
cctcccaggtgctgcccaggtaagtcggcggcggcgatgacaacgcgcttcaagaagaaccgcaagaagcgcggccacgtgtccgccgggcacggccgcatcggcaagcacaggaagcacccgggaggtcgcggtaacgccggtggcatgcaccaccaccgtatcctcttcgacaagtaccatccgggctacttcggcaaggttggcatgcgttacttccataagctccgcaacaagttctactgccccgcggtcaacatcgagcgcctctggtcgatggtgccc

SEQ ID NO: 1783 - DNA, 282 bp, Zea mays
aaaatggcttctcaggtccctcacgttccgcctcgtgctgctactgtcctctcggcgacagagctcatcggaaatactcctctcgttagacttaacaagatcccccagtcgctgggcatcgagtgcgatgtctacgtcaagccagagctgttcagcgctggaggcagtgttaaggacagaattgctctgcgcatgattgaagaggcagagaagagcggaagaatcaagcctggcgacactcttatcgagcctaccagtggaaacactggtatcggtcttgct

SEQ ID NO: 1784 - DNA, 220 bp, Zea mays
cgaggcaccatgaaatgatgtccatgatggatcacgagactgacgaggaagatgaagatgctgaaggtgatgagaatgtggaagaagatgatgcagaccacgcagttgacgatgccgatgttgagatggacgaaggtgatgatgaaattggtgatgacggagaggatggcggcgttggcggggagatgactccggatgaggatccagatgctacttcata

SEQ ID NO: 1785 - DNA, 270 bp, Zea mays
ggaatctgctgggatcagtggtttccagagtgtgcaagagcaatggcacttctgggggctgaaatactgttttatcccactgcaattggatccgaaccccaggattgtaacctggattcccgtgaacattggaagcgggttatgcaaggccatgctggtgccaacttggtccctcttgttgcttccaaccggattggcagagaaactgttgacactgagcatggcaagagctcgataaccttctatgggaattccttcattgcaggacca

SEQ ID NO: 1786 - DNA, 267 bp, Zea mays
cggctcgagttccttgttaaccttcttgggaagtggaaggagtctgaatactctggccattctattcctgttggtggtcttgcttactatgtaactgccccatcaagtttggctgatgtccttgcaaatccattccatgcactgttttatgtggtcttcatgctgtcagcctgtgctctgttctcaaagacatggattgaagtttccggttcatcagcaaaggatgttgctaagcagctcaaggaacaacaaatggtgatgccaggc

SEQ ID NO: 1787 - DNA, 268 bp, Zea mays
ttgacactgaggaatcttacccttaccaaggtgtcaatggaatctgcaagtttaagaatgagaatgttggagtcaaggttttggactcggttaacatcaccctgggtgctgaggatgaactgaaggatgctgttggtctggttcgcccagttagtgttgccttcgaggtgatcactggtttcaggctgtacaagagcggagtttacactagcgaccattgtggaactacaccgatggatgtgaaccacgctgttctggctgttggcta

SEQ ID NO: 1788 - DNA, 267 bp, Zea mays
acagcaatagccgttcaccctgaggatgaaaggtataaacatctgcatggaagatacgcagtccaccccttcaatggccgaagactcaaaataatctgtgatgctgagttagttgatcccacttttggtactggggctgtcaagattacccctgcccatgatccaaatgactttgaagttggaaagcggcataaccttgaattcatcaatatcttcacagacgatggaaaaataaatagcaatggaggtgcaaaatttgatggaatg

SEQ ID NO: 1789 - DNA, 265 bp, Zea mays
aaaaccctagccctcgcgccgccgccgccgtgcccagcgctcgagctcctcgcctgccgcgagctcgcgccgcaacgccaccatgaagttcaacatcgcgaacccgtctaccgggtgccagaagaagctggaaatcgatgacgaccagaaactacgtgccttttatgaccgaagatctcccaggaggtcagtggtgatgctctgggtgaggagtttaagggttatgtcttcaagatcatgggtggatgtgacaaacaaggcttcc

SEQ ID NO: 1790 - DNA, 265 bp, Zea mays
cccgcagcagccaaaacctacctagccgccgccgcagccccccatcgccgccaagatgcagatctttgtgaagactctgacggggaagaccatcactttggaggtggagtcctcggacaccattgacaatgtgaaggccaagatccaggacaaggagggcatccccccggaccagcagcggctcatcttcgccggcaagcagctcgaggacggtcgcaccctcgccgactacaacattcagaaggagtccaccctccacctggtg

SEQ ID NO: 1791 - DNA, 268 bp, Zea mays
aggccggcaaggaccccaacaagcctaagagggctcccagcgctttcttcgtgttcatggaggaatttcgcaaggagttcaaggagaagaaccctaagaacaagtctgtcgctgcggtggggaaagctgctggcgacaggtggaaatccctgagcgagtcggacaaggctccctatgtagccaaggctaacaagctcaagctcgagtacaacaaggccatcgctgcctacaacaagggcgagagcactgcagctaagaaggctcctgc

SEQ ID NO: 1792 - DNA, 268 bp, Zea mays
gccacctcaacccaggaacagagcgaggcgacgccgcggcacctcttctccggcgaagggaaatggcaaccgttccaggggatctgatctggcaggttgtgaggaagaacaactccttccttgtgaagcagttcggcaacggcaatgccaaggtgcagttcaccaaggagccgaacaacctctacaacatccactccttcaaacactcgggtttggcgaacaagaagactgtgacgatccagccagctgcaaaggactcggctgtggt

SEQ ID NO: 1793 - DNA, 260 bp, Zea mays
  unsure (1)..(260): unsure at all n locations
caagcttcaccgtgacatcaaagggtggagatgatgaggaattctcagagctgtacacatttaaatggactaccttattgatacctcctaccactttgctcctattgaacttcattggtgtggtcgctggtgtttccaatgcaatcaataatggatacgagtcatggggccccctcttcgggaagctcttctttgcattttgggtgattgtccatctgtatcncttcctcaaagggttggttgggaggcaaaacaggaca

SEQ ID NO: 1794 - DNA, 188 bp, Zea mays
cgtcgagctcagctcagcggcgtacggcgccacgtggcagttcgacacggaggcgctgcccaacgacctcgtcaagcgtgggctcgccgtgcgccgggacgacggcgagctggagctcaccatcaaggactacccctacgcgcacgacgggctcatggtctggaacaccataaggcagtgggcggccg

SEQ ID NO: 1795 - DNA, 252 bp, Zea mays
gcgaggaggacttggactgcagtgagccggggagcctgcgtaggtgcagctggatcaccaagaacagtgccggctgttcgagcttctgtcgctgtcagggatgctgatcgaccacaactggacggagatactgaagcggcgggacatgtacagggaggcgttcgccgacttcgaccccagcgcggtggcgcggatggaggaggaggacgtggcggagatcagcggcgacagggagctgaagatcgccgagtg

SEQ ID NO: 1796 - DNA, 258 bp, Zea mays
gtttgtaggatattgctcttgctgatctggccccaacccaccccatcaggctcgggcttgctctcaacttctcagtgttctactacgagatcctcaactcccctgaccgtgcttgcaaccttgcaaagcaggcctttgatgaggcaatctccgaactagacagcctgggagaggagtcctacaaggacagcactctgatcatgcagctcctgcgtgacaacttgaccctatggacttccgacaccaacgaggacgccg

SEQ ID NO: 1797 - DNA, 259 bp, Zea mays
tgggagacctgtttacattgaaaggcttggaaaggttgaccctagcaaacttatgaatgtcacaacgatggatcgatacgtgcgataccatgtgaaggagtttgagaggagcttcttgattaaatttccagcttgctctcttgctgcaaaaaggcacattgattccagcacgacaattctggatgtccacggagtggggttgaaaaatttcagcaaaactgcacgcgaattaattcaacgactgcagaaaattgacaat

SEQ ID NO: 1798 - DNA, 251 bp, Zea mays
cggctcgaggtccacggcggcgaggcggctgcgggagctgcaggcgcagacggggaacaagaccttgcgtggactgcgcgcaggaaacccgcagtgggcgagcgtctcctatggggtgttcatgtgcctcgagtgctcgggcaagcaccggggcctcggcgtgcacatcagcttcgtgcgctcggtcaccatggactcctggaacgaggcgcactccgcaagatggacgccggtggcaacgaccgactcaa

SEQ ID NO: 1799 - DNA, 255 bp, Zea mays
gcgcctcaggggaggcatgcagatcttcgtgaagaccctgaccggcaagactatcaccctcgaggtggagtcttcagacaccatcgacaatgtcaaggccaagatccaggacaaggagggcatcccaccggaccagcagcgtttgatcttcgctggcaagcagctggaggatggccgcacccttgcggattacaacatccagaaggagagcaccctccacctggtgctccgtctcaggggtggtatgcagatctt

SEQ ID NO: 1800 - DNA, 254 bp, Zea mays
ggaaagcggcgacacggaggcagcgttcctgaaggtgttcggcgagggcttgcggttcttctcggcttacatggactcgctggaagagagcttccccaagactagcaacgagaggctggcgctggagaggggagccggacgtgccattgtagacttggtctcgtgcccggcatcggagtccatggagcggcgggagacggcggcttcatgggcgcgccgcatgcggtcttccggcttctctccggtggcgttca

SEQ ID NO: 1801 - DNA, 291 bp, Zea mays
gccaggcctgcacccaaagcttccggagaattcctcccttgccccgccgtcgcatcctcttcgaagttcgaatcgaatcgcgccgcgatcacccacctcatggcggacaaggagcctgtcgtggagcggccagaggcgggtgaggaggaggaggacgcctcagccgccgccgccgcgggggaggaggaggacacgggcgcccaggtggctcccatcgtgcggcttgaggaggtagccgtcaccaccggcgaggaggacgaggacgtcctgctcgacatgaaggcgaactgt

SEQ ID NO: 1802 - DNA, 291 bp, Zea mays
  unsure (1)..(291): unsure at all n locations
cggatctgagacgagacgagacgaccccccctcncctcaaccggaacttgttttaccccatctcatcccactgaccgctcgccacccacccgcccgctgcctccgccggatctcgtcggactcggatccgcccgaccacgaccaccccgcgtcgccgccgcgcagcagcagcagatcagagaagatggccggactcgacaccttcctcttcacctcggagtccgtgaacgagggacaccctgacaagctctgcgaccaggtctcagatgctgttctggacgcttgccttgc

SEQ ID NO: 1803 - DNA, 287 bp, Zea mays
attggaaaagtcgtaatacaatgccaaagcgaaacttggtagaaattggtcgagttgccttaatcaactacggccccaatgctggcaaatcatgtgtcatcttagatgtccttgatcaatcacgagccttggttgatggtcctcaacaaaagactggtgttgcccgacaaaccatccccttccgacaattatcattaacaaaagtcaagctcgatattgctcgatccatcggtgtttccagcttagtcaaggcttatgatacccaaaagattggcgaactctctcca

SEQ ID NO: 1804 - DNA, 293 bp, Zea mays
cagagcctcattcatctccattcgaaacaccctcgcacccacactctcccttcgtccccagcctaaatccccgcaacgatggctcgcacgaagcagacggcgcgcaagtccacgggcggcaaggccccgaggaagcagctggcgaccaaggcggcgcgcaagtcggcccctgcgaccggcggcgtgaagaagccgcaccgcttccgcccgggcaccgtggcgctgcgcgagatccgcaagtaccagaagagcacggagcttctcatccgcaagctgcccttccagcgcctggt

SEQ ID NO: 1805 - DNA, 292 bp, Zea mays
gacgtgaaagacatgaagcctctgaacgaccgtgttctaatcaaggttgctgaagctgaagacaaaactccaggaggcctactgcttacggaaactgccaaggagaagccatctatcggaacggtcgtagcggttggcccaggccccctggacgaggatggcgagaggctcgcgctgtccgtctccgcggggagcactgtcctgtactccaagtacgccggcagcgagttcaagggcgccgacggcacgaactacatcgtgctgagggcgtcggatctgatggccgttctct

SEQ ID NO: 1806 - DNA, 293 bp, Zea mays
cagaaacttgccattggaaccctctctgttgacaagaacccacacatacaatttgatctgattttcgataaagagtttgagctgtcgcacatatcaaaaactaccagcgttttcttcactggctacaaggttgagcagccattcgaggaagatgaaatggatcttgattctgaagatgaagacgaggagctgaatgttccagtagtcaaggaaaatggcaaagctgatgagaagaaacagaaaagtcaagaaaaggcagttgctgcaccttcagaatcaagtccggattccaa

SEQ ID NO: 1807 - DNA, 292 bp, Zea mays
gtcacgattcacgacggaaacagtagtgctgtcacctgtcagtagagctctcccctgggccaagaactcgatccgagcaaaaaatgtcggaggccgccgtgcgagtgatcggcctatggcgagcccgttcgtgatccgcgtcctgatcgcgctgaagctgaagggtgtcgagtacgagttcgtggaggaggtggtgggcaggaagagcgagctgctgctcgcgtcgaacccggtgcacaagaagatccccgtcctgctccaccacggcaagcccatctccgagtccctaatc

SEQ ID NO: 1808 - DNA, 289 bp, Zea mays
gtgctttggcacctcagagttttccgttgccgtgaccatcttcggcgggcgtggccatgccgggacatggggaaaggcacttggtgcagaggtctatgactgcaacaacatggtggagcaggagctgcctggaggcgggctcctcgtgtaccagagcttctgtgctgctgaagacgctgttgctacctcgcccaaatctgttttccactgctttgacggcgagaacgtggagagtgctcctcctcctatgaagaaggactacaagctggctaatcttctctgctgggag

SEQ ID NO: 1809 - DNA, 293 bp, Zea mays
tgggagacctgtttacattgaaaggcttggaaaggttgaccctagcaaacttatgaatgtcacaacgatggatcgatacgtgcgataccatgtgaaggagtttgagaggagcttcttgattaaatttccagcttgctctcttgctgcaaaaaggcacattgattccagcacgacaattctggatgtccacggagtggggttgaaaaatttcagcaaaactgcacgcgaattaattcaacgactgcagaaaattgacaatgataactacccagagactctataccagatgttta

SEQ ID NO: 1810 - DNA, 290 bp, Zea mays
cctgactcctcgttgggctgatcttgatataaatcagcatgtcaataatgttaaatacattgcgtggattcttgagagtgcacccatctctattcttgagaatcatgagctggcgagcattgtgctggattacaaaagggagtgtggccgggatagtgtgctgcaatcacacacctctgtgcacacggattgcaacagtgagtctggagaaacaaccttgcactggcatcgtgctgagccttgaatcaggtccgaccatggtgaaggcccgaccatgtggaggctaagaa

SEQ ID NO: 1811 - DNA, 281 bp, Zea mays
attggaccaggaaacagaatcttagatatgattataggaccatacaagctgtctcggcggtgtgaagtgactgcaatccttatattatatggtctgccaagattacaaactggttccattcttgcccatgagatgatgcatgcatatcttcgtctcaaaggattccgaaaccttagtattgaggttgaagaaggcatctgccaagttctatcccacctgtggttagagtcggaaatcatcgctggttctagtagcaacgttgcatccagttcagaagcatc

SEQ ID NO: 1812 - DNA, 283 bp, Zea mays
cggatcttgaccaagaccttcacgtctgatttccctcatgtcgagaggtatttctggaccatggttaaccagcctaacttcaagaaggtcattggtgaggtcaagcaggcagagtctgcacctcctattccgaaaaaggctgctccttctaaggagccaaaggcaaaggatgtcaagaaggaggctccaaaggaggcccccaagccaaaggtggttgaggcaccagcagaagaggaagcaccaaagccaaagccaaagaatcctcttgacttgctgccaccaa

SEQ ID NO: 1813 - DNA, 277 bp, Zea mays
ccaaactcttgggcttgtcacgagtgctggtttccctgctggaaagtacctctttgctggtgttgtggatggacgcaacatctgggctgatgatcttgctacatctctcagcactctccagtctcttgaggctgttgttgggaaggacaagcttgtcgtatcaacttcctgctcgctcatgcacaccgctgtggatcttgtgaacgagactaagcttgacagcgagattaagtcttggcttgcttttgctgcccagaaggttgttgaggttgatgct

SEQ ID NO: 1814 - DNA, 285 bp, Zea mays
ctacctcggcatggggctgctcgtggtgtccgccggcggcacgagcccgactggcctgcccttcggcgcggaccagttcgacgagaggaaagagcagcacagtaagcagggaggcctcgcgcgcttctactgcgcgcagggcatcagcagctaccttgccacactcgtggtcaacatcgtcaacgccaggacgaggcgacacggtgggtctgcgggctgggtcaccgacgacatcaacgccgggaggatcgactacttctactatgccatggcggtgctctctgg

SEQ ID NO: 1815 - DNA, 281 bp, Zea mays
ggaagcgggggtatctcctgtacgggccgccgggcaccggcaagtccaccatggtcgccgcgatggccaaccacctcgggtacgacgtctacgacttcgagctcacgtcggtgaagaccaacaccgacctccggaagctgctcatagagaccaagagcaagtccatcatggtgttcgaggacatcgactgctcgctccaagtgaccggcaagcgcaaaagcaaggaggaggaggagggttcgaaagacgggaacggggacgacccttatgcggcgaaacag

SEQ ID NO: 1816 - DNA, 276 bp, Zea mays
acttaacgccgccgcggagctgctccgcgcccccgacgccggtgattaggagcaggagcaagaggggttcggaatggccaagtctaagaaccacacggcgcataaccagtcgttcaaggcgcacaagaacggcatcaagaagcccaagcgccaccgccagacctccaccaaggggatggaccccaagtttctgaggaacttgaggtactcaaggaagggcaataagaagagttgtgaggctgagtcagaggagtgagatgatgcctgagtttgtgg

SEQ ID NO: 1817 - DNA, 272 bp, Zea mays
cgagaagacgaagcaccgtctgcactcgcacgatgtgccctacggctcaggcagcggtcagcagtctgtcaccgggtttcctgaaggcgatgactcaaatagctactggatcataaggcccactccagattcatcgtctaagcaaggtgatgccatcgaaactggtggcatcatcaggttgcaacacatgaggacacggaggtggttgcacagtcacctgcacgcttcaccgttgtctggtaaccttgaggttagctgtttcggcggggatg

SEQ ID NO: 1818 - DNA, 276 bp, Zea mays
cgacgttgtcaccaagtacaaggctgccgccgaaatcctcaacaacgctctgaagattgttgtgtctcagtgcaagccaaaagtcaagattgttgacctttgcgagaagggcgactctttcataagagagcaaactgggaatgtttacaagaacgcaaagaggaagattgaaaggggtattgctttcccaacctgtgtatccgtcaatgacacagtttgccacttctcaccgcttgcaaccgatgatgccgttctggaagaaaatgacatggttaa

SEQ ID NO: 1819 - DNA, 276 bp, Zea mays
agaaggtgctagaggtgtacgaggcacgcctgaccaagtgcaagtaccttgctggagacttcctcagcctcgccgacctgaaccatgtgtctgtcactctctgcctgttcgctacgccctacgcatctgtgctcgacgcctacccgcatgtgaaggcctggtggtctggtctgatggagaggccgtctgtccagaaggtcgctgccctgatgaagccatctgcttgaaacggttgccctgtcaatcggtgaatggaataagccaagtctgttctgg

SEQ ID NO: 1820 - DNA, 277 bp, Zea mays
agagtggtaggagttctcttgttgtgacaataggtccatctgctaggcattagtcagaaacttcaagcacaatcatgtttgggcagagggcaatgaaagtagtgaacacaataaagctgaaggaagaggttgattatgaaattctttacaagaagatggagcgtgaggttgaccaactcacatccgagatggagagacaacagaaggttataagaagtgagaaaatgcagatggataagaggttgagagaatctgagaggtccttccatgatttaag

SEQ ID NO: 1821 - DNA, 278 bp, Zea mays
ctcccagctcgtgttccgcttcttgcagccgtcgccgcgaagcctccagagaacttccgtcaacatggggaagacacgtggtatgggagccgggcgcaagctcaagacccaccgcagaaccagcggtgggctgacaaggcatacaagaagagccatttgggcaatgagtggaagaaacccttcgctgggtcatcccatgccaagggcattgtcctggagaagattggtattgaggccaagcagcccaactccgctatccgtaagtgtgctcgtgttca

SEQ ID NO: 1822 - DNA, 278 bp, Zea mays
agagcggcggcgcgggcggacaaggagcaggcggaggaggagctgtgccaagccacaatgggtatctcacgcgactcgatgcacaagcgccgtgccaccggtggaaagcagaaggcctggaggaagaagcgaaagtatgagcttggtcgccagccggccaacaccaagttgtcaagcaataagacagtgaggagggtccgtgttcgtggaggtaacgtgaagtggagggctcttcgccttgatactggtaactactcatggggaagtgaagctgttac

SEQ ID NO: 1823 - DNA, 279 bp, Zea mays
gaggttttaggcctggtggtccttcagcacctgggtcttatggccaaccatcagcacctggatcttatggtcaacctaatacacttggtaactatgggcaggtacctccatcagtgaatcctggtggtaacagagttcctggtgtgaatcctagttatggtggggatggcagacagggggctggaccagcatatggtggagataactggcaaagaggttctggtcagtatcctagcccaggtgaaggacaaggaaactggcagggaaggcagtaagagc

SEQ ID NO: 1824 - DNA, 277 bp, Zea mays
aacagaacttaaaaaactaaagctgagttggttaagagaccaaacgggcttagtgagccaagaacctgtacttttcaacaacacaattcgcacaaacatagcatatggaaaacaaggagaagtaagagaggatgagatcgttgctgcggccaaggcagcaaatgctcatgagttcatatctagcttgcctcagggatatagcactattgtcggcgagacgggaacacagctctctggaggacaaaaacaacgggttgctattgcaagggccatcttg

SEQ ID NO: 1825 - DNA, 255 bp, Zea mays
agcttgtctcatagaggtcaagcacaggaacatagtccgatgtctagggtactcatccgagacgcaacatgtgagggcaccctacgaaggaagatttgtctgggcagacctgcgccaaaggttgttttgcttcgaatacctaagcaaagggagccttgccgattatctgaccggggcatcttttgcacttcagtggagtgtgcgctaccaaataatcaaggggatttgtgagggtgtgggttatcttcaccagca

SEQ ID NO: 1826 - DNA, 278 bp, Zea mays
tgcagctaacatccctcactctcggtacctgacctgaccacgagagctacatggtctgaggacacgacatgcacggtctgcactactgccacaacggctgcgtgaagggcttcgtgtccaacctcgtccactgcggctgcggccatggccatggaagcggctactgccatggccatggaaactgctacggccatgggaatggcggctacggctgctgccacgggtaccctcctccctctgccgccggtgcgctccctcatcctctcggctcgtaccct

SEQ ID NO: 1827 - DNA, 279 bp, Zea mays
tggcgggggcgccagggcatgggtcgaggatgttcgacggcgccgccgttgacaatttgatggattgcgtggagaccatcgctgggttcagggatgcgcagttcaggatggtgaagtccggggagaagggtcctggggaagtggtctcagtcaaccctgtgtacatgaaggccggcataccaagccccacgggtttcgtgatgaacatgcaaccttcagaagcggaggtcggctttgacctccgccttcctccaaccgaagacatcgagcagatcaagc

SEQ ID NO: 1828 - DNA, 281 bp, Zea mays
caccatcctcgacgctaaagtacccacgtcaggtagctgggtcgcacttcttcccaatccatcaatcgtgttctcgcgagccacatgccacagccatggacaacagccgggtgctggtggtgggcggcaccgggtacatcgggcggcggctcgtgcgggcgagcctggcgcaacggcacccgacgctggtcctgctgcggccggagatcggcctggacatcgacaagctccagatgttgctctccttcaaggctcacggcgcgcggctggtggacgcgtcg

SEQ ID NO: 1829 - DNA, 267 bp, Zea mays
ctcgaaggcttggtcctcctccttgtatcccgacctcccccgcgacagacccgtttccccgctaggctagagttatcgttcctctgcagcgatggcgatcaagcggaccaaggcggagaagaagatcgcgtacgacaagaagctgtgcagcctgctcgatgagtacaccaaggtgctcatcgccctcgccgacaacgtcggctccaagcagctccaagacatccgccggggcctcaggggcgactcggtggtgctcatgggcaagaa

SEQ ID NO: 1830 - DNA, 269 bp, Zea mays
cggctcgagagacgcaccagtgccctattcctgacaccaagacaccatggctctgttgcttggattgcaagaaccttacaaacacgaggtgggatgagccgccgtacaagatcaacgcctccgggcagactgcccgtctcggcttcaacaccatcgcaaccagcgctacacactacaacggcatcctggagtacaatgcgcacagtctgtatggcttctcgcaggccattgccacgcatacggcgctgcaagggctgcaggggaagagg

SEQ ID NO: 1831 - DNA, 269 bp, Zea mays
gccaacctggaagcaagcctaagaacttatgaaccttcagaggagccatttgacatatctttggtgtcaagagaagtcaggtcgctaccacctaaagagaaggcagcccctggcaagacgccacctgctggtgctgccgccgccgccgcccctgtttcaactgttgatgcttatcagaaaatgctttcgttcattcccgagttctctgggtttggaaggctcttcaagtcctctgaacccatggagctgacagacgcagaaactgaata

SEQ ID NO: 1832 - DNA, 268 bp, Zea mays
taagcttctgcaactatatttatatgaaaaatcaagatctcctgggaggttctttgacctagtttatcatgaaaatgcccgtgttctactccatgatgagagcatataccgatttgaatgttgctcgagtccgacaaggttgtctattcagctgatggaatatggtcacgaaaagccagaagtgactgcagtatcaattgaaccagatttttcttcgtatctttttagcgagtacttgtgtagtacgccagacaagaaattatctgaa

SEQ ID NO: 1833 - DNA, 269 bp, Zea mays
gcggtttctgctttgtactgtactactctagggaggatgctgaagatgctgtcaaatacattagtggaacgatgcttgacgatcgtccaatccgcgttgatttcgattggggctttgaagaaggcagacagtggggccgtggacgaagtggtggacaagtcagagatgagtaccgtacagattatgatcctggaagaggtggttacggtaagatggttctgagggaactagaagcacagcgagaattagttgactatggtggatctttt

SEQ ID NO: 1834 - DNA, 270 bp, Zea mays
ctcaagctcagagcctcagagcgccagccaagtgttacggccgcgaagagcaacgcaacaagatggtgaagctcgcattcggaagcgtcggtgactccttcagcgccacctccatcaaggcctacgtggccgagttcatcgccaccctcctcttcgtcttcgccggcgtgggttccgccatcgccttcgggcaactgacgaatggcggcgcgctggaccctgcgggtctggtggcgatcgcggtggcgcacgcgctggccctcttcgtgg

SEQ ID NO: 1835 - DNA, 274 bp, Zea mays
ctcagcccagaccacagcaggaaagtatcctattgcaggcacaacaacaggtgcagttgcagaaacttgtgtatcaagttggagcgcttcctacaaaggttgtatgcctcacacaggtggtaactgcagatgaattgaaagatgatgaagagtatgaggacattatggaagacatgaggctagaagcaggcaaatatggtaatttggtgaaagttatcatcccacgccctgaccccagcggacagccagttgtaggagttgggaaggtgttcct

SEQ ID NO: 1836 - DNA, 261 bp, Zea mays
gtcggcgtctctgaggagaccaccacgggtgtcaagaggctctaccagatgcaggagaccggcgccctcctcttccctgccattaacgtcaacgattccgtcaccaagagcaagtttgacaacctgtatggttgccgccactcgctccctgatggtctgatgagggccactgacgttatgatcgccggaaaggttgccgtggtctgcggatacggtgatgtcggcaagggttgtgctgctgcactcaagcaggctggtgcc

SEQ ID NO: 1837 - DNA, 263 bp, Zea mays
ccacggagaagcgaaaccgacctttccccctcccccgcattccacctcgcggagatccagtccagccctagggtttcgccagcggcgagccaaactccacgagcgggggaacaggggaaagcagggacgacgagggggcagccatggggcagcagtcgctgatctacgcgttcgtggcccgtggcacggtcatactggccgagtacacggagttcaccggcaacttcaccaccatcgcctcccagtgcctcatgaagctcccc

SEQ ID NO: 1838 - DNA, 266 bp, Zea mays
gagcacttggaccctatcaacgttaaaatcgcggagctgaaggaagcattagaatccgttaccgccgagcagaagtacctaaaagcacgcgaagctcgtcaccgacacaccaatgagagcaccagaaagcgtgtcatgttctatacgatggcggagtacctggctttcatggctgctagcgcgttgcaggtcctctacatccgccgcttgttcagtaaaaatgtgggatacaacagagtgtaggatagaaatctacttcaaaggcg

SEQ ID NO: 1839 - DNA, 265 bp, Zea mays
caaaagcccttgcccacgccatgacgctcagcaacaagcaaggcgcaggcactgatcagcaggccttgctggatgctcagctgcagctctggcaccacaccatcgcttttgtcaagtccatggcgctcaatgccgccgtagacctccgcatagcggacgccatccacctgcacggcggctcagccaccctctcgcagatagtcaccaaggtcacactccacccgtccaagataccatgcctgctacgcctcatgcgcgtgctcac

SEQ ID NO: 1840 - DNA, 265 bp, Zea mays
cctgagcactttctcctcgtccccgacaagccaatcgaagccgagatacggccatggactccaccggcaccggagcagggggtaatgggaagaagggagcggccgggcgcaaggtcggcgggccaaggaacaagtcggtgtcgaggtccgtgaaggccgggctccagttccccgtcggccgcatcgggcgctacttgaagaagggccgctacgcgcagctgtcggcaccggcgcccccgtctacctcgccgctgtcctcgaatac

SEQ ID NO: 1841 - DNA, 292 bp, Zea mays
  unsure (1)..(292): unsure at all n locations
cgaaagggaaattgcacaggacttcaaaactgatttgcgtttccagagccatgcggtgcttgccctccaggaggctgctgaggcataccttgttggcctgtttgaggacaccaacctgtgcgccatccatgctaagcgtgtgaccatcatgccaaaggacattcagctggcaaggaggatccgcggcgagagggcctaattcgcacctcaaacatcgtgaccaaaacatgaagtcctgggggttatgntaatctggtgcccatgtaagacatatgagtagggttgttttgtg

SEQ ID NO: 1842 - DNA, 281 bp, Zea mays
gcggcattggtatgaccaagtcagaccttgtgaacaaccttggtaccattgcgcggtcaggcacgaaggaattcatggaggcacttgctgctggtgctgatgtgtccatgattggccagtttggtgtcggtttctactctgcctaccttgttgcagagagggttgtcgtgaccactaagcacaatgatgatgagcagtacgtgtgggagtctcaggctggtggctcctactctgtcgaacgtgttagctctggggagcaacttggcaggggtacacttatg

SEQ ID NO: 1843 - DNA, 291 bp, Zea mays
cgctcccgtcgtccggaaagatggcgtcccacattgttggataccctcgcatgggccccaagagggagctcaagtttgcacttgagtctttctgggatgggaagagcaccgctgaggatctggagaaggttgctaccgacctcagggccagtatctggaagcagatggctgatgctgggatcaagtacatccccagcaacactttctcgtactatgaccaggtccttgacaccactgccatgctcggcgctgtccccgaacgttactcatggactggaggagagattggat

SEQ ID NO: 1844 - DNA, 288 bp, Zea mays
  unsure (1)..(288): unsure at all n locations
ctctngggtgaaccccgactgcggcctcaagacccgcaagtacacggaggtcaagcccgccctgaccaacatggtctccgccgctaagctcatccgcacccagctcgccagcgccaagtgagcaccttttttttgcctttttcgtttccgaggagggcgtcgtcgatgccaatttgtttccaataaacagggctgtgccgccgttctgttgtactccgtctgtggttaggttagtagttttcttgatctcgcccccacgcggtacctgttttactactctctgtttgg

SEQ ID NO: 1845 - DNA, 291 bp, Zea mays
catcccgtcgcatcccatcccactaccacccatctcgtcgtccgccgattcgatccggttcttccaacccaggggcagtgatggcgacgaagaggagcgtgggcaccctcggcgaggcggatctgaaggggaagaaggtgtacgtgcgcgccgacctcaacgtcccgctcgacgatgcccagaagatcaccgacgacacccgcatccgcgcctccgtccccaccatcaagttcctcctcgagaagggcgccaaggtcatcctcgccagccacctgggtcgtccaaaaggtg

SEQ ID NO: 1846 - DNA, 281 bp, Zea mays
gacctgtttatatctaagcaggaaatggtacaagaaaacgacatggatgtaccttgctgtccctgtgctcttgtatgtaagtgagcgcattcttcggctatttaggagccatgatgctgttaggattcagaaggttgcagtatatccagggaatgttttggctctctatatgtccaagccacctggattcaggtatcggagtgggcagtatatcttcataaaatgcagtgatggctctccatacgaggggcgctcattgtcgattacatcagcaccaggag

SEQ ID NO: 1847 - DNA, 296 bp, Zea mays
  unsure (1)..(296): unsure at all n locations
tcgaccgccaccaagatgaacaaggagaggctcatgaagatggccggcgccgtccgcaccggcggcaagggcaccatgcgcaggaagaagaaggctgtacacaagacggtcaccacggacgacaagaggctgcagggcactctcaagagagtaggggtcaacaccatccctgcaatcgaggaggtgaacatattcaaggacgatctcgtcatccagttcttgaaccccanagtgcaagcttccatcgcggcaaacacatgggtggtcagtggatctccacagacgataaagctaca

SEQ ID NO: 1848 - DNA, 283 bp, Zea mays
aaaagtactagaccttgatggcaaaatgtggcctgatgcttctgatactgatgcttcctcccactataaggttccgttctcaagaactgtctacattgagaaaactgattttcgcctaaaggactcaaaagactactatgggctagcccctggtaaatctgtcatgctaaggtatgcgttccccataaaatgcacagatgttatctctggtgatagtcctgatgatattgttgaaattcgagctgaatatgatcctttgaagacttctaaactgaagggtgtt

SEQ ID NO: 1849 - DNA, 287 bp, Zea mays
gccttaattatccgggcatgtggaaggactgacttccagggaggaagttctgaacagttgtatcagtcagtgcattcacagattttcacattgccaaaggatacacactttatcctgctcatgactataaaggtttcacggtaagtactgttgaagaggaggctgcctataatgctcgactcacgaaagataaggaaactttcaagacgatcatgaataacttgaatttgtcatatccaaagatgatggatgtagctgtacctgccaatttggtctgcggtatccag

SEQ ID NO: 1850 - DNA, 286 bp, Zea mays
tgatccggtagtggcactggttctggttctagctatgctaacaggtattgggatggatcaagtgaaggaggtgcaaatgctaatggcaatggcggtggcatggggaatagtcaaaatggtgggggcggcggtggttcaggtgatgggtctggatatggcaatgcctacccatgaacttgatatcagttaatctaatgttgggcccaccatctttccttgtttgaagttgtaggattattattttccttgcctctttgttgtgcttttggtagaaccgaattaataa

SEQ ID NO: 1851 - DNA, 287 bp, Zea mays
ggaccaggtaagcagcagcaggaaccctagcaccgccgcatccgcagccatgggtatcgacctcgttgccggtgggaggaacaagaagaccaagcgcacagcgccgaagtccgacgatgtttatctcaagctccttgtcaagctctaccgtttcttggtcaggaggaccaagagcaacttcaatgctgtcattctcaagaggctcttcatgagcaaaaccaatcgcccaccaatctccatgcgccgccttgtcaagttcatggaaggaaaggagaagaacattgctg

SEQ ID NO: 1852 - DNA, 285 bp, Zea mays
tgctgagaaggcaaagaccttgcctgagaacacgagcaatgagaacaagctgatcctatacgggctctacaagcaagccacggttggagatgtgaataccgatcgtccgggcatattctaccaaaaggacagggccaagtgggatgcctggaaggctgttgaaggcaaatcgaaggatgaggcgatgaatgactacatcaccaaggtgaagcagctccaggaggaggctgccgcctcttaaaagtctcttaatagtgttgccaaacagctatttgtcagatgagc

SEQ ID NO: 1853 - DNA, 282 bp, Zea mays
tgcgtgggagtcgtttcgaaaaagtctgtttcgcgagcggtgaggactgaggagtgtggaggcctaaaaccatggcggcgagcatcgggatcatggacggcgcctacttcgtcggcaggggcgagatcctgcactggatcaatgcgaccctccagctctccctcgccaaggtcgaggaggcagcgtctggcgcagtgcagtgccagctcatggatatggttcaccctggagtggtgcccatgcataaggtcaatttcgatgcgaagacagaatatgacatga

SEQ ID NO: 1854 - DNA, 277 bp, Zea mays
gttttcaggaacacaagacaagtgtgcgacttgtggtaaaactgcgtatcctcttgagaaggtaacagttgaagagaagtcctaccataagtcatgcttcaaatgctcccacgggggctgcgcgattacaccttccaactatgcagccttggagggcatcctctactgcaaacaccatttctcccaacttttcaaggagaagggaagctacaaccacttgatcaagtgcgcgtccgtcaagcgcgctgctgaagcacagccagaacaaccggcctct

SEQ ID NO: 1855 - DNA, 286 bp, Zea mays
agatatgtagggcattggcttacattcatggcactattggtgtctgccacagagatattaagccacaaaaccttctggtgaacccacacacccaccagcttaaactatgtgactttggcagtgcaaaagttctggtcaagggggaaccaaacatatcgtacatctgctcccgatactatagggctccagagctcatatttggtgccactgagtataccacagcgattgacatttggtctgctggatgtgttcttgctgagcttatgctagggcagcctttgtttcc

SEQ ID NO: 1856 - DNA, 283 bp, Zea mays
tcttcgtcgagttgtcttacagctttgttctattttctttcttgtgttcaaatgatgcatacttgctggtcatttgtgcaggctatggtcaaactggtcatcgagaggtacacgagagaagctggtgtgcgcaatcttgagcggaacctagctgcattggctcgtgcagctgctgttaaggtcgcagagcaagttaaaactcttagacttggcaaggaaatacaaccaattactacaacccttcttgattcaaggcttgctgatggcggtgaagttgaaatgg

SEQ ID NO: 1857 - DNA, 282 bp, Zea mays
gccgccgccgcgtccgcctcgccaagcgcacagaccgccgcagcacatcgctctcttgatctcagccatggcggaggtggagcagcaacaggacacgccgaagctcttcaaccgctggaccttcgatgatgtccaggtgaacgacatctcgctgaacgactacctcgctgtgaacgcgacgaagcacgcgatgtacctgccgcacaccgcggggcgctactccaagaagcggttccgcaaggcgcagtgcccgatcgttgagcgccttacaaactccctcat

SEQ ID NO: 1858 - DNA, 277 bp, Zea mays
cttgtattggagcatccaaccatttctcgattccatgctgttttgcagttcagaaatgatgggaaggttttcctttttgatcttggaagcacacatggatcctttatcaataaaaatctgatcaagaagaagctgtacacagagattcatgttggagatgtaattcgatttgggcagtaaatcatcacggctgtacatttttcaaggaccatctgagctaatgcctccagaaaaagacttgcagaagcttcgggatgctagaattcagcaagacatg

SEQ ID NO: 1859 - DNA, 279 bp, Zea mays
ctgcgctccaggggcgcgcactccctctcgctggcggacaccgtcgacaacgtgatgggcatcgtcatcggagcgcacggcaccacctcgacgctcatcaccttcatggtgcgccacctcgccaacgagccagacgtcctcgccaagatcacccaagaacaagatgagatcgctggcagaaacggaagagacggtgctctaacatgggaagacgtttcgagcatgaagtacacatggagggcggcgctggagacgctgcgcacggtgccgccggtgttc

SEQ ID NO: 1860 - DNA, 248 bp, Zea mays
  unsure (1)..(248): unsure at all n locations
cccacaccccccgagctgagctcagctccactccagctccaatcacagtcgtgaccagagcgcgcgagccagctagacggccgtgaaaatcccgatccataggatcgccctggggagccaccaggaggtgtaccacccgcgcgcccccaaggcggcgttcgctgagttcatctgcaccctcatcttcgtcttcgccggccagcgctncggcatggccttcagcaacgcgaccggcggcggntcgacga

SEQ ID NO: 1861 - DNA, 266 bp, Zea mays
ggttgataaaggcatggtttcgggagcttccttcaggtgtattggatgcactgacaccagaacaagtaatgcactgcaacacggaaggggggtgcgctctccttgcttctatgctaccaccagtggaagcagcattacttgactgggccattaatctgatggccgatgttgtagagcaagaaaactacaacaagatgaacgcccggaacatcgcgatggtttttgcgcccaatatgactcagatggccgatccgttaactgctctg

SEQ ID NO: 1862 - DNA, 265 bp, Zea mays
cccatccacatcctggagaagattccagtccttccattgcagctgtggttgcttcgcaagactggcctgaggtcaccaaatatgctggactagtgagtgcccaagcccatcgccaggagctgatacaggatcttttcaaagtatggcaagatccacagagaaggacagtaactggtggcatgataaaggaacttctcatttctttcaagagagcaactggacagaagccccagcggatcatattctacagggatggtgtcagtga

SEQ ID NO: 1863 - DNA, 269 bp, Zea mays
tgcgtcttcgagcgcaccgtgttccctgcaaagtacgcgctggggatgtcggcagacgtgtacaagacctggaatttcaacgaccaggctctcccagcagatctcgtcaagagaggtgtggctgtgccggaccagtcaagcccatatggtgtccgactgctgatcaaggactacccctatgccgttgacgggctcgtcatctggtgggcgatcgagcggtgggtcaaggagtacctggacatctactaccctaacgacggcgagctcca

SEQ ID NO: 1864 - DNA, 267 bp, Zea mays
cctcactcccgttccatttccccatctcccagatccaattcgcgagttctccctcctctgccgccatggcgctctctgtggagaagacctcgtctggacgggagtacaaggtcaaggatctctcgcaggcggacttcggccgcctcgagattgagctggccgaggtcgaaatgcccggcctcatggcgtgccgcgccgagttcggcccgtccaagcccttcgccggcgctaggatctcggggtctctccacatgaccatccagaccg

SEQ ID NO: 1865 - DNA, 272 bp, Zea mays
gccgccgacgccgcagaggagacgcatcgaggagagcaagcgaggaagcgaccatgagggccaagtggaagaagaagcgcatgaggaggctcaagaggaagcgtagaaagatgaggcagagatccaagtaggcagcagatcgagatggattgtggacgtgatgacatgcgtgggtacatacatttcttcggatgcgttggtgtgcctgtggagagatgtcaacctgccatggtgtcacggtccgccatcagttgaacgtcttgcctgcactt

SEQ ID NO: 1866 - DNA, 263 bp, Zea mays
ctcgagccgggcctccgcgcctcgctccgccgcctcgacatggactacgtcgacgtcgtctactgccaccgccccgacgcctccacgcccgtcgaggagacggtgcgcgccatcaactgggtcatcgaccagggctgggccttctactggggcacctccgagtggtccgcgcacagtatcaccgaggcctgggccgtcgccaaccgcctcgacctcgtgggacccatcgtcgagcagccggagtacaaccttttctccagaca

SEQ ID NO: 1867 - DNA, 261 bp, Zea mays
  unsure (1)..(261): unsure at all n locations
ctagtcncctgctccattctcagccgccgccaatcccttcccgtgctccgcaaccgctgagtgagaagaagagatggccggcaagggcgatggcccggctatcggcatcgatctcggcacgacgtactcttgcgtcggcgtgtggcagcacgaccgcgtcgagatcattgccaacgaccagggtaaccgcaccacgccctcgtacgtcgccttcaccgactccgagcgcctcatcggagatgcggccaagaaccaggtcgc

SEQ ID NO: 1868 - DNA, 263 bp, Zea mays
tgaaggagcttctgaaggcaaggggcgtggtaggcaggttattgctgttgcaaagtcatcagatcttgtgctgatggttctggatgcctcaaagagtgaaggacatcgtcaaatattaactagagaactggaagctgttggactccgtcttaacaaaaggcctccccagatatacttcaagaggaagaagacgggtgggatttctttcaataccactgttcctttgactcatattgatgagaagctgtgctatcagattctgc

SEQ ID NO: 1869 - DNA, 262 bp, Zea mays
agacgacgaaggaatcgtggacatcgagaacgtggcatctgtttccagcgcgtcaaagcttgcagttgcaaagctgatcgatggatatcttgccgagatcgccaaagatcccaaccttcctcttccaaagttgatcgcactcgcggaaatggtgtcttctctaccccggccaacgcatgacgggctctatcgtgccattgacatgtatctgaaggagcaccccagcctatcaaagagcgagaagaagaaactgtgcgggctg

SEQ ID NO: 1870 - DNA, 260 bp, Zea mays
cagggactcccatgttcctatccttgccccactgccaattgggttcgcggtgttcctggtccaccttgccaccatccccattactggcactggcatcaacccagctaggagccttggcgctgccatcatctacaacagggatcacgcctggaacgaccattggatcttctgggtcggccccttcattggcgctgccctggctgccatctaccaccaggtgatcatcagagccatcccgttcaagagcaggtcttaagctg

SEQ ID NO: 1871 - DNA, 261 bp, Zea mays
tggggagcggtttactgtttatgttgtggtgccaatgtggcctgagggtgttccagaaagcgcttctgttcaggcaatccttgactggcaaaggagaacgatggagatgatgtacactgacatcgcacaagctctcgaagccaacgggattgaagcaaaccccaaggactatctcactttcttctgcttaggtaaccgtgaggtaaagcaggagggagaatatgaaccagaggagcacccagaacctgacactgattacat

SEQ ID NO: 1872 - DNA, 264 bp, Zea mays
acgaaaccctcgccagtccccaactcgaacctcagtcaggcagcgtgaggagggagagttcaaggaccgaggcggcgtcgggcgagatgaagcttaacgtcaagaccctcaagggcaccaacttcgagatcgaggcgagccccgatgcatcggttgctgatgtgaagaggatcattgagaccactcaaggtcagagtacctaccgggcggaccagcaaatgctcatataccaagggaaaattctcaaggatgaaaccactttgg

SEQ ID NO: 1873 - DNA, 265 bp, Zea mays
gacaagttctcgaaacatctgcgaagatgagagccaaatggagaaagaagcgcgttcgccgtctcaagcgtaagagaagaaaggtcagggccagatccaaataaacgctcggcccctccatctcagttctttcatgatgaagccttccgttgaataaccaaacacgacatgatgagttttattcgaaacatcatttctttctcaatcgggattgtccaagagctcgcctagcgatttgatcttctttatcgccagtcgaaaaatc

SEQ ID NO: 1874 - DNA, 257 bp, Zea mays
cgacaaaatggctcgccgtcctgctcgttgctaccgatactgcaagaacaagccgtatcccaagtctcggttcaaccgtggtgtccccgaccccaagatccgcatcttcgatctgggccgaaagcgcgccaacgtcgacgacttccctctctgcatccacctcgtctccaacgagtatgagcagctgagttccgaggccctcgaggccgcccgtatttgcgccaacaagtacctcgtcaagcacaccggtaaggagg

SEQ ID NO: 1875 - DNA, 255 bp, Zea mays
cgcatgtgaaggcctggtggtctggtctgatggagaggccgtctgtccagaaggtcgctgccctgatgaagccatctgcttgaaacggttgccctgtcaatcggtgaatggaataagccaagtctgttctgggttgtttgcttgttcagtgatgtgtcttctatgacgaaagttgagtgcctatgtgtgagcatgcttgcttgtaacgagacattgaattgttcggaaatgagcattcctgtgctcttcttgaaa

SEQ ID NO: 1876 - DNA, 257 bp, Zea mays
ctcaacttcgacgccctccacggcgacaagtggcacggcggcgtccgtgacggcaccgacgtcgtgctctggaagtggtgcgagggcgacaaccagcgctggaagatccagccctactactgaaccaacggatgatatgaccatcgcgcccatcgatcgtgcacatgcatgcatacgtactagcagaataacaggggtcttatctcccgaggcgtcttttgcatgcatgccagcagttgcatagataaagcaggagc

SEQ ID NO: 1877 - DNA, 261 bp, Zea mays
cccagctggggcgagaaggggtacatccgcatgaggaggggcaccggcaagcgccagggcctctgcggcatcaacaagatggcctcctacccaaccaagaactgaactcagatcatcgattcatcgtcaagcagcagctggctgattactcccactgctggcgctccacgcttcactagttcttcgtcgttctccttcacttccattgttttcaagattggacgatctttcgttgtttgaaatgaaataataatgatgatg

SEQ ID NO: 1878 - DNA, 260 bp, Zea mays
cagcagccaattcgctcgagttcagatcgagcgcgcgccaagcaagtcttccggccggccgcgaagagcgcaatcaagcaagacaagatggtgaagctcgccttcggaagcgtcggcgactccttcagcgccacctccatcaaggcctacgtggccgagtgcatcgccaccctcctcttcgtcttcgccggcgtcggttccgccatcgcctacgggcaactgacgaatggcggcgcgctggacccggcgggcctggtggc

SEQ ID NO: 1879 - DNA, 262 bp, Zea mays
aggctcgagtgccgctattagtcactgactcattatgcacaagatcttcacaacacaaggtgctgaaggcgagcaccgaggaagatggggctcgtgttcgggaagctcttcagccggctcttcgccaagaaggagatgcgaatcctcatggtcggtctcaacgccaccggtaaaaccaccatcctctaggggagatcatcacaaccatccccaccatcggtgagccccagccttgccttttcaacattgtttgatcattttg

SEQ ID NO: 1880 - DNA, 237 bp, Zea mays
tggtggccctcgtcggatcccacacgatcggattcgctaggtgcgagaatttccgggacagaatctacggcgacttcgagatgacgtccaagtacaacccgtcgtccgaggcctacctgagcaagctgaaggaggtgtgcccgcgggacggcggcgacgacaacatcagcgccatggacagccacacctccgacgtgttcgacaacgcctacttcgagaccctcatcaagggcgagg

SEQ ID NO: 1881 - DNA, 288 bp, Zea mays
gcgactcgcgctgcgtgagcttccggcagcggctgtacgggcagaacaacaacgggcaggtggaccggacgctgaacccggcgtacgcagcggagctgcggggcggtgcccgccgtcgggcggcgaccagaacctgttcgcgctggacccggcgagccagttccggttcgacaaccagtactaccacaacatcctggccatggacgggctgctcagctccgacgagatcctgctcacgcagagccgccagaccatgggcctcgtccaccgctacgccgccgaccaggg

SEQ ID NO: 1882 - DNA, 288 bp, Zea mays
aagaaagcttttgttgagaagagaaagctcaatgctgagacaagcaagggccaaaaccgtgacagggagaagcttttcctagcaaaccaggaaaagttccatgctggtgcagataagcaatactggaaggcgatatctgaacttatcccacatgagattgctaacatcgagaagagaggggcaaggaaagacaaggagaagaagcctgggatcgtggtgatccagggaccgaagcctgggaagccaacggacatggcacggatgcggcagatattgctgaagctgaag

SEQ ID NO: 1883 - DNA, 286 bp, Zea mays
tgaattttcactggcatttgcaacgattgaaaaccactactttgtgaataagggatttttaccctcggactcattcctattggacaatgttgataagatccgtcatattagaggttttattgtacagggacgttatgatgtttgttgccctatgatgtctgcttgggatcttcataatgcttggcctgaagcagaattcaaggtggtagcagatgcagggcactcggccaatgaagttggcatcgctgccgaactgacgtcagccactgataaactgagagacttg

SEQ ID NO: 1884 - DNA, 288 bp, Zea mays
gccaaccaacctccaacccccagccgatcgcgtcggagatgctgggcgtcgcgcggaggcggctcggatccggatgcgtgctcgcccagctggcgcaggccctccgccccgccgccgctcccgccaggacctactccgccgcggccaaggagataactgtacgggaagcattgaataccgcattagatgaagaaatgtcagcagacccttctgttttcttgatgggagaagaggttggcgaataccaaggtgcatacaagatatccaagggtttgcttgacaagtatg

SEQ ID NO: 1885 - DNA, 287 bp, Zea mays
ccccagtcccgatccgaagctgtgcctcgtaccatttcgatccaatggcgccgacgtcgaagctgtcgacgggcatcaagcgcgcttcgcggtcgcacgcgtaccatcgccgtgggctgtgggccatcaaggccaagaacggcggcgccttccccaaggccgacaaggccgccgccgccgtggaacccaagttctaccctgccgacgacgtcaagccccgcgttcccagcacccgcaagcctaagcctaccaagctcaggtcgagcatcacgcctgggacggtgctg

SEQ ID NO: 1886 - DNA, 281 bp, Zea mays
atcctttacggtgtcatagtgtactctatgatagggttcgagtggacggctgctaagttcttctggtacctcttctttgggtacttcacgctgctctacttcacattctacggcatgatggccgtggggctgacacctaactaccacatcgccgcgatcgtctcctcggcattctacgccatctggaacctcttctccgggttcatcatcccccgaccgaaagtgccgatctggtggaggtggtactgctggatatgccccgtggcgtggacgctgtacgg

SEQ ID NO: 1887 - DNA, 276 bp, Zea mays
gaacatgtcgattcttcttggagttgcacaaatgaaccttgggattgtgattagttacttcaatgcaaaatttttcaggaacagtattaatgtgtggtaccagttcattccccagctgatcttcttgaacagcttatttggctacctgtccttgctcattattattaagtggtgcacggggtcgaaagcagatctataccacgttatgatctacatgttccttagcccaacagatgatcttagtgagaacagttgtttagtggccagagacagtgc

SEQ ID NO: 1888 - DNA, 269 bp, Zea mays
ccggggctgtgcagcgcgtgcccctcatcgtccagcggctccctgtcgcccttctcgctgcgccggtgggactcgaagaagctgctggtgtggctggtcgtcctcctcaccctgctggtcctggtggtcctgtgctcgcggaaggtccacgaggcgtggcgcgaggcgtcgcggcggcggtcgggggcctggaagagtacggcgtgccagaagctggacttctcggctgacgatgtggtgtagtgtctcaaggatgacaacatcatcgg

SEQ ID NO: 1889 - DNA, 279 bp, Zea mays
gcacgcagtagtgcagcagcactgaagcactacttcctgcactcactgtgctagctgctcaaaccgtagtagtaacagtccatcaccatcaccatcaccaccaatggctcccaaggttgcgctcttccttgccctaagcctcctgttcgctgccaccgcgcatggctgcgaaccctactgttccggcccagtcgtcccaacaccaccagtcgtgccgactccgtcgtcgcatagccacgggcgctgcccgatcgacgcgctcaagctcaaggtgtgcgc

SEQ ID NO: 1890 - DNA, 274 bp, Zea mays
agctagcagtcgttgtagaaacaaagaaataaagagagacgatgggcggagaagaaggcggcgacgggctgaagctgatcgggcagtacgggagcgcgttcgtgacgagggtgaagcttgctctcagcctcaaggggctgagctacgagtacgtcgaggaggatctcagaaacaagagcgcgctcctcctcagctccaacccggtgcacaaggcggttccagtgctgatccacagaggcaagcctatctgcgagtcgcaggtcatcgtgcagta

SEQ ID NO: 1891 - DNA, 275 bp, Zea mays
cggctcgagcacctaccgcgcctgcaccatcccctaccgtttcccctccgacaacccgcgcaaggacacccctgtcgagatccaatggattgacctctttctcaactctgtcccgtccttcaaacagcgggcggagaacgaccccaccgtacccgatgcgcccgcgaaagcggagaagttcgcgcagaggtacacgtcaatgcttgaagagttgaagaagaatccggagagccatggaggaccaccagattgcatacttctttgtaggcttcgtg

SEQ ID NO: 1892 - DNA, 274 bp, Zea mays
ccagcagtacaagctgcagctcaactggatgtcgctcaaggacgccgtcaaagagaagctcacggtgctcgagaacgtccagtggttcgagctcctcgaggggaaggacggcagcaggtcgggcccagccatcgagctcatgggcctcggcaggctcatgaacgagaaggccaggatgctctccatggggcagaggaagcgtctgcagctcgccaggctgctcgctatcgaccgacccatctggctgctggacgagccctcagtcgcgctggac

SEQ ID NO: 1893 - DNA, 272 bp, Zea mays
cgcgctggaccagatccccgcgcccaccatgaacttcacccaactcctccagtccttccagaacaagagcctcaacctcgccgacctcgtctggctctcaggggctcacacgatcggcatctcccaatgcaactccttcagcgagcgcctgtacaacttcacggggcgcggcgggcccgacgacgcggacccgtcgctggacccgctgtacgccgcgaagttgcggctcaagtgcaagacgctgacggacaacacgacgatcgtggagatgg

SEQ ID NO: 1894 - DNA, 267 bp, Zea mays
cggctcgagtccatttcggcatttccaacgccttcgccctaccagccacgtcgcttcgaggccgatcgaccgagcagctggtggcaatggcggcggcggcggaggtcgtgctgctggacttctgggtgagccccttcgggcagcgctgccggatcgcgctggcggagaagggcgtggcctacgagtaccgcgagcaggacctcctggacaagggcgagctgctcctccgctccaaccccatccacaagaagatccccgtcctgctcc

SEQ ID NO: 1895 - DNA, 268 bp, Zea mays
  unsure (1)..(268): unsure at all n locations
gatatggctcccgcagtgggtgtgtccgccggtacaacacattctcctgggtgcacaatgcacatctcaaggccatgcttaagaagctccgggctaagcaccccaatgtgaggatcatatatggcgattactacactccagttgtccagttcatgcttcagccggagaagtttggttttgccaaacaactgcctagggcatgttgtggggctccatcgactcncgagaaagcagcttacaacttcaatgtcacggccagatgcggtga

SEQ ID NO: 1896 - DNA, 268 bp, Zea mays
ggctccgtcgtcgcgtgccatcctagggtttctttccccgtcggcgcctccccagatttggccgccgccgccgctgacccaggttgtcttgatggcgcccgctgtagaagccgtgaaggagacaggcaccttccagaaggttcctgccttgaacgaaaggatactgtcatccatgtccaggaggtctgttgctgcacacccttggcatgatctggagataggtcctggtgctccaaccatattcaactgcgtcattgagataccaagg

SEQ ID NO: 1897 - DNA, 273 bp, Zea mays
cgagtctccagccaaccgcatccagtccacccccatccccctcgaccccgacaaacccgacccgatggcgcccaaggccgagaagaagccagcggagaagaagccggcggccgaggagaaggcggagaagacgaccgcagtaagaagcccaagtccgagaagcgcctgccggcctcgaagtcctccggcaaggagggcggcgagaagaaggggaagaagaaggccaagaagagcgtggagacctacaaaatctacatcttcaaggtcctgaag

SEQ ID NO: 1898 - DNA, 197 bp, Zea mays
cagcattctcattgataatgaagataagcaaactggcagcatctacgagcactgggatattcttccccctaagaaaatcaaggacccagaggctaagaagcctgaggactgggatgacaaggagtacattcctgaccctgaggacaagaagccagagggctatgatgatattcccaaggaaattcctgaccctgatg

SEQ ID NO: 1899 - DNA, 196 bp, Zea mays
ggacgctgccggcgctacgagggacggcgtgggcgaacggtggaaggggttcgtgtacgcgctggaggggatctacgacagggaggcagcgctgaccaagacccgcgccctcaaggggcatgatgatggcaactcgctgaccaacctgctgtggtggctccacagccgaggcagcgtcgtctgtgacgcgaagctg

SEQ ID NO: 1900 - DNA, 188 bp, Zea mays
gagaagtagtgtaggctatgaaccagtttgggctattggaactggtaaagttgccaccccagctcaggctcaggaagtgcacgcctccctgagggattggctaaagaccaacgtcagccctgaggttgctgaatctactaggatcatttacggaggctctgtaactgccgcgaactgcaaagagctag

SEQ ID NO: 1901 - DNA, 187 bp, Zea mays
atctgattttggaatggcaagtatgatcagcgttgtggacacccacctgatcgtgtccactctcgccggcactccaggttacgtgccaccggagtattaccagagcttcagatgcactaccaagggcgatgtgtatagctacggtgttgtattgctcgagctgctcactgggaaaccgcctacagat

SEQ ID NO: 1902 - DNA, 190 bp, Zea mays
gacatgctgaataggtatttcaagggcgaggacttccccgtgcagaactacatcgtcaaggaaggccagcttgccagtcagtaccagtgaccgcgcgagatgttgctgtgccgtgtaggcttttctggtgagaagctgcgaggaagaaactcctgttgcgtacttgcgttactgtatgagtagctctgag

SEQ ID NO: 1903 - DNA, 186 bp, Zea mays
actcttcctaagtccagggtacccttacgaagaaatactgaggacattccacaaccaaaccgacaacgtcatgtgctcgtatttacctgtattcaattcattcaacttcaccaaaggaggattaatacagctcaaccatggaaggcctcaaccgcttcagtacgctgtcaacgcagctttccttgc

SEQ ID NO: 1904 - DNA, 186 bp, Zea mays
tagccaagatcaggtacaggatgtcataagtgccggtatcatcgctcctttgttgcaactgcttcaaacagcagagtttgatatcaagaaggaggctgcttgggccatctcaaatgctacctctggtggttctcatgagcaaatcaagtacttggtgtctgagggctgcatcaagccattgtgcga

SEQ ID NO: 1905 - DNA, 186 bp, Zea mays
acgcgcgcagctcggcgccgcaatcgtcttaaacaggtcccacgcatggaacgaccactggatcttctgggttggccccttcatcggtgctgctcttgccgccatctaccacgtggtcatcatcagggccctccccttcaagagccgtgactgattatacgtacattgtttattaacaacagcaac

SEQ ID NO: 1906 - DNA, 290 bp, Zea mays
  unsure (1)..(290): unsure at all n locations
gaggatggctctgaagagtccatttttggaaccggggatgcagatgatgtcaagcccaagagctttcctgtgtgtgatgaccggcactctgaactgatcccctgcttggataggaacttgatatatcaaatgaggctgaagctggatttaaacctgatggagcactatgagaggcattgccctccacctgaaaggcgttttaattgcttgattcctccaccacatggctataaggttcctataaaatggccanaaagtcgtgatgtagtgtggaaagcaaacattccaca

SEQ ID NO: 1907 - DNA, 212 bp, Zea mays
attttggacacgttgtctttttgtgtttaacttatctgctaccgtcctgtaacgaattcactaagttctagttcttttgtgctttgttaagaatataaacaatgaggtttcaattttggtggcgccatccggtctgattgcgtactagtatcatgcatatctgagctggtctttccggagtaacagtttttttttgtttcgtgtcaatgatt

SEQ ID NO: 1908 - DNA, 287 bp, Zea mays
  unsure (1)..(287): unsure at all n locations
gtcncctgctccattctcagccgccgccaatcccttcccgtgctccgcaaccgctgagtgagaagaagagatggccggcaagggcgatggcccggctatcggcatcgatctcggcacgacgtactcttgcgtcggcgtgtggcagcacgaccgcgtcgagatcattgccaacgaccagggtaaccgcaccacgccctcgtacgtcgccttcacggactccgagcgcctcatcggagatgcggcaaagaaccaggtcgccatgaaccccatcaacaccgtctttgatg

SEQ ID NO: 1909 - DNA, 287 bp, Zea mays
atcaaattggataaagataaatagcacaaaaaaggccatcagataccacacccctgaaatactgaagaacctggacaagctattactggctaaggaggaattggctgttatatgcaggtctatgtggcataaattcctcacagatttcggcaagtactatgcacagtttcaagcagttgttgaatctcttgcagctctggactgcctctactcacttgcagttcttgcaaagcagaataattatatacgtcctatttctgtccatgataatgaaccaagtcagattc

SEQ ID NO: 1910 - DNA, 285 bp, Zea mays
atcgaagtggcaggatcgacatgtcagaactgcgcgatgctcttctcagtctcggatattctgtgtctccaactgtccttgatctgcttgtgtctaaatttgacaagactgggggcaagagcaaagcaatcgaatatgacaacttcattgaatgctgcctcactgttaaggggctgacagagaagttcaaggagaaggacaccgcctactctgggtcggcgactttcacctacgaggccttcatgctgaccgtgctgcctttcctcattgcgtagtggcagtcca

SEQ ID NO: 1911 - DNA, 284 bp, Zea mays
gccgcccgcgtcgccgtcgccgagggcaccgcccccgtggccaaccggatcgcggacagccgctcgttcccgctgtaccgcttcgtgcgcgaggagctcggctgcgtgttcctcaccggcgagaagctcaagtcccccggcgaggagtgcaacaaggtgttcctcggcatcagccagggcaagctcgtcgaccccatgctcgagtgcctcaaggagtgggacggcaagccgctgcccatcaacatcatctaaaagacgccaggcgccgccatccatgctgccgc

SEQ ID NO: 1912 - DNA, 272 bp, Zea mays
acgagttgggctgggatctttcggagaagtgtatagaggtgaatggcatgaaacagaagtcgcagtcaagaaattcttgcaacaagatatttcaagtgatgctctggaagaatttagaactgaggtgggaataatgagaagactgcgtcatcctaatgttgttctttttatgggtgctgtcactcgtgttcctcatctttctatcgtgactgaatttctgccaaggggtagtttatttcggttaatccataggcccaataaccagttggatc

SEQ ID NO: 1913 - DNA, 284 bp, Zea mays
ctcccatatccgctcccctacctctccagcatcctcccgtctccgtcgtctcgtctccgctcctcacctcgccagccatgggcaagatcaagatcggaatcaacggtttcggaaggatcggcaggctcgtggccagggtcgccctgcagagcgaggatgtcgagctcgtcgccgtcaacgaccccttcatcaccacggattacatgacgtacatgttcaagtacgacaccgtgcacggccaatggaagcacagcgacatcgccctcaaggactccaagacgctt

SEQ ID NO: 1914 - DNA, 284 bp, Zea mays
ctcgtctggtatcgtctctcccacacccctctgccccaacccagaaaaaccctcgaaaagcggcggcggcgcgacatggcggaggtcgaggctccagctgctgcggttgcggcggcgacccctgaggtggcgacggtgaccgagggcggaccgctacggaggcgaagggtccgcataagctgcaccgccagtggaccttctggtacgacatccagtccaagcccaagcccggcgctgcgtggggcacctccctcaaaaaggcgtacaccttcgacaccgtcgag

SEQ ID NO: 1915 - DNA, 285 bp, Zea mays
cacgagcgcctcaagaagccggactggatccgcgtaaaagccgcgagcccgtcgtcgcgcttctacgagatcaaggacatcctgcgcgccaacaacctcgtcaccgtgtgcgaggaagcgagctgcccgaacatcggcgaatgcttcggcaagggcaccgcgaccttcatgatcatgggcgacaagtgcacgcgccgctgcccgttctgcgacgtcggccacggccgcccggacccgctggacgtcaacgagccggggaatctcgccaagaccatcgccgacctg

SEQ ID NO: 1916 - DNA, 280 bp, Zea mays
gtgctgaaaacttaggcgagcttctgatgggtgatcaaatagataattctccgtaccgtttccgtgtaaatgtcaacgaatctctgtatctgtgtactacaaccccacttgacgaggctaatgtaaagcttctcaagcagcgtaccatgatctataccaggtgaacatgattcttgacaatcttcctgtgaggaggttcacagagcagaatggaataaccatccagtggacaggctatccagttggttatattccagaaggcacttctgatgtctacatc

SEQ ID NO: 1917 - DNA, 282 bp, Zea mays
gacaaaggtgtgtcttctgccgccaaggtggtgaggaaggcttacccgcaagagaatgtcggggtgtttgttcaacgaggccgcggtggacctctctccgtggttgagtacagcgaaatggacgcggcgatgactactgagatcaatcagtcgacaggacgactccgttactgctggagcaacatctgcctgcacatgttcactctggacttcttgaaccaagtggcgaacagcctcgagaaggacagtgtataccatctagctgagaagaagatcccttcc

SEQ ID NO: 1918 - DNA, 283 bp, Zea mays
ccagcagggaagaagcagatcgtggagaggagcctgaggatgatgttacggatggggaggcacaaagcagcatagggatcttcttgacgccaagatctctgtacggcaagctgaggctttcgaaaatgatgatcaatgaccattacatgcctatatacagaagaaacattgagcagctgatcgcggagcttgagaaggattcctcggatcaaatagggtgcgtcaggtgtagttgaccgttgtaagagctgatcaaatagggtgttataggtccgacatgtgt

SEQ ID NO: 1919 - DNA, 275 bp, Zea mays
cgacgacgcacgcggagatccggcgtactgcaaattttgaaaactgaactgtaagatggcatcagcagagctttcccgtgaggaaaatgtgtacatggcgaactcgctgagcaggcggagaggtacgaggagatggttgagttcatggagaaggtagccaagactgttgactcggaggagctcactgtggaggagcgaaacctcttgtctgttgcatacaagaacgtcattggagcccgccgcgcctcatggcgcatcatctcctccatcgagca

SEQ ID NO: 1920 - DNA, 271 bp, Zea mays
gtcagggacattgggcgcaaagtgcaatacacaaatggtcattcctcaccttactgaaaattatggagcttcaagagacccacctgagaagcaggcacccatgtgcacagtccattcttttccacacaacattgaccattgcttgacatgggcccgttcagagtttgagggtttgctagagaaaacaccaaatgaagtaaactcttttctgtctaatcctgctcaatatgctgctgtcatgaggaaggcaggtgatgcccaagcaagggaa

SEQ ID NO: 1921 - DNA, 225 bp, Zea mays
agagagttgggcgcagagaatccccaagcaaacaaacagggtagatggagaggagacgagaggagaggagaggttgggtctgggacaccatggctccgatgaagctgtacggggcggtgatgtcgtggaacgtgacgaggtgcgcaacggcgctggaggaggctggctccgactacgagatcgtgcccatcaacttcgccaccgccgagcacaagagccccgagc

SEQ ID NO: 1922 - DNA, 275 bp, Zea mays
gcaggacgctggaagaggaacccgacacttcgctgcctctctgctggaaagggcaggaaccattcaagtctgtgcttgatgtgaggaaggagttcaagtctttggtgctcaactttgccagtggcaagaagacgctcatggagatccctcctgagaactacctcattgtcacagaaaacgggaatgcctgtctgggcatcctcaacggatccgaaatcggtctcaaggacctgagcattattggagacattacgatgcaggatcacatggtgata

SEQ ID NO: 1923 - DNA, 272 bp, Zea mays
gtcgtcgtaggcagcgagcgtctctcctctcccacgcatcgcgccaaggaagagagagagatcgccgctccccgtctcggcgtcggtggcgggtgccctccctcctcgagcgagatctgtctggtcacagatctatctgacaaaatggtgaagatctgctgcatcggtgctggctatgtcggtggcccaaccatggccgtcattgccctcaagtgcccagacattgaggtcgtcgtcgtcgacatctccaagccccgcattgaggcctggaa

SEQ ID NO: 1924 - DNA, 270 bp, Zea mays
gcctggacacaagtactgcctcctcggcgagctctctaaggaggtcgggtggaactaccatgacaccatcagggaacttgaggagaagaggaaggagaaggccaaggttgcctacgagaggaagaagcaattggccaagctgcgtgtcaaggccgagaaggcagccgaggagaagttggggtctcagttggagattcttgcccctatcaagtactgaggagctgtgctttgtcatcagttttggggaacatctagtcttggttttaagtg

SEQ ID NO: 1925 - DNA, 277 bp, Zea mays
cccgatcgtgctggatatgagcacaatgggcaagggcttgatgttcgtcaacggccagggcatcggccgctactggatctcctacaagcacgccctcggccggccatcgcagcagctgtaccatattccacggtccttcttgcggcagaaggacaacgtgctggtgctgttcgaggaggagttcgggcggccggatgcgatcatgatcctgacggtgaagcgcgacaacatctgcactttcatctcggagaggaacccggcgcacatcaagtcgtgg

SEQ ID NO: 1926 - DNA, 266 bp, Zea mays
gcacgccaccttatctctagccggagatcaaagaagtagccgttaacgatggcttccgacgagctcgcaaaggccgtcgagcccaggaagaagggcaacgtcaagtatgcctccatatgtgccatcctggcctccatggcctctgtcatccttggctatgacattggggtgatgagtggagcggccatgtacatcaagaaggacctgaatatcacggacgtgcagcttgagatcctgatcgggatcctcagtctctactcgctgtt

SEQ ID NO: 1927 - DNA, 263 bp, Zea mays
cgcctgcgatcttcgtagcctccgtcgcgtcgagcatcgatcatgtcggcctactgcggaaagtacaaggatgagctcatcaagaatgctgcctacattggcacccccggcaagggtatccttgctgctgatgagtccactggcaccattggcaagcgcctttccagcatcaatgtcgagaacgttgaggagaaccgccgtgccctccgtgagctcctattctgctgccctggtgctctccagtacatcagcggtgtgatcct

SEQ ID NO: 1928 - DNA, 264 bp, Zea mays
aggcacacagccgccgtttcttttacttgcgctcggcacgcaggcgacggctgcggcgctcaggttggggttctcatcgacggcgtcacggcttcccctcccgcctctcgccagtcgcttcgcgccctcgcctccggtcctccgcacactggccggtgaccctgcatagtattatctgattttcctggaggccacattttaaggactgaggttacaatggcagatgccagccctagaacagaaacatcaacagatgatactgac

SEQ ID NO: 1929 - DNA, 263 bp, Zea mays
gtcctcgagtccaagattatcctcgatcgggagacgcagaggtcccgcggcttcggcttcgtcaccttctccacggaggaggcgatgcggaacgccatcgaggagatgaacggcaaggagctggacggccgcaacatcaccgtcaacgaggcccagtcccgaggcggccgtgcaggcggcggcggcggctacggtggtggccgtggaggctgcggctacggcagtggcggtaaggcgatggcaaccgtggcggcggttacgga

SEQ ID NO: 1930 - DNA, 257 bp, Zea mays
atcctcctccctcgaccgtccccgtccccgtccccttccggcgcgcgactcgcccgagatggcaaacgctagatcgggtgtcgctgtgaatgacgagtgcatgctcaagttcggcgagctgcagtcgaagaggctgcaccgcttcctaactttcaagatggacgataagctcaaggagatcgttgtggaccaggtcggggatcgcgctaccagctacgaggacttcacaaacagcctccccgagaatgactgctgat

SEQ ID NO: 1931 - DNA, 265 bp, Zea mays
atcaaaccaactctttcccaaatccaccgccggctcggctcgcccatcttcgcgccaagcaccgaatctccgatggcccgcacgaagcagacggcgcgcaagtcgacgggcggcaaggcgccccgcaagcagctggccaccaaggcggcgcgcaagtcggcgccggcaaccggtggcgtgaagaagcctcaccgcttccgccccggcaccgtcgcgctccgggagattcgcaagtaccagaagagcacggagctgctcatccgca

SEQ ID NO: 1932 - DNA, 262 bp, Zea mays
cccgtctttaaaaagtacaccctcgactcgtcctccgcattccccgtttgccttgtttaccattcctccccaaaacacatcctgcgatcctcgaagcctccgccgagcatcgatcatgtcggcctactgcggcaagtacgcggatgagctcatcaagaatgctgcctacatcggcacccctggcaagggtatccttgctgctgatgagtcaactggcaccattggcaagcgcctttccagcatcaatgtcgagaacgtggag

SEQ ID NO: 1933 - DNA, 262 bp, Zea mays
acagaaaagagtaacaaatttttcatcagatataaaagatagtgaagcctatgcttgtctattgaatgtcctagcacctgaatgcagtgcaaaaccatctgcgatgtctgtaaaagatctacttcatagagcaaggttaattcttgagcatgcagataggatgggctgcaaaaggtacctgactccaaaagacatagttgatggtttacccaatctaaatcttgccttcgtggctcatattttccaaaaaagaaatgggttg

SEQ ID NO: 1934 - DNA, 266 bp, Zea mays
agaccatgttaacgacattgacttcgactacaaggagtatgcgaggcagagattcgagcagtactggcacaagtctgcgatcttaacatcttgaacatgtgtataaacacccgtacgtggtctcaggaactccctgagggcctgtggctgcacacacgaaattgtgcagtgccactgacacatagataagctgtgaaagaagaaatactgacgacgacgacgaataatcccgttttgggctcgggaggttatttctccgcaactcg

SEQ ID NO: 1935 - DNA, 264 bp, Zea mays
gcattattcccaagtggtttgttaccttcttcgcccttcatgtggcttgcggggatgacttttggatatctttatggttttttaataatcacagtgggtatgagcataggcatgtcattgccgtattttataggttctgcattccactgtaggatacatagatggctggagaagtggccaaagaaagcagcttttgtaaggcttgctggcgagggagattggcaccatcaatttaaggctgtagctttactcaggatttctcca

SEQ ID NO: 1936 - DNA, 259 bp, Zea mays
cagattcttgtgaaaatgtggtgataaaaaactgctacatttctgttggtgatgatgggatagccataaagagtggttgggaccaatatggaattgcttatggccgtccatcagactaatattactatccagaatgtcgtaatccgctctatggtcagtgctggagtatcgattggaagcgagatgtctggtggtgtctcggatgttttggtagagaatgttcatgtctgggattcacggcgaggcgtgaggataaaga

SEQ ID NO: 1937 - DNA, 260 bp, Zea mays
attttggatgtttcagctaacaagctaacgactatagaaaatatcgaaaccttaaccaggctggaggacctgtggttgaatgacaaccaaataccatctctagagggtatagagacagctttggctggttcgcgggagaagttgacgacaatctatctcgaacgaaatccctgtgcaaaaactccagattactcgtcgacgttgaggaaaatatttccaaatctcgaacaaattgattcagatatcatagcatgataact

SEQ ID NO: 1938 - DNA, 172 bp, Zea mays
gaactttataagaataacattcaaggaacaatcccttctgagcttggcaatttgaagaatctaataagcttcgacttgtacaagaacaacatttcggggacaatacctcctgcccttggaaagttgaagtcccttgtattcttgcgtctcaatggcaatcatttgactgggc

SEQ ID NO: 1939 - DNA, 255 bp, Zea mays
cggtactctcatctcttacgaaggaagagttcagcttttggagattgcccaagtacctgatgagcatgtgaatgagtttaaatcaatcgagaagtttaagatattcaacactaacaacttgtgggtgaaccttaaagctgtcaagagactagtagaggctgaggcacttaagatggaaattattccaaaccccaaggaagttgatggtgtgaaagtccttcaacttgaaactgcagctggtgcagctattcgttt

SEQ ID NO: 1940 - DNA, 257 bp, Zea mays
atggcattcttgcctgttcttaattattgccaggacaggagaaacaatcaaagatgaggcctcagctgatactcgtcggcactctggctgttctcgccatcctcgcagctctcggcgaaggctcgtcgtcgtggccgtgctgcaacaactgcggtgcttgcaacaagaagcagccgccggagtgccagtgcaatgacgtgtcggtcaacgggtgccatccggagtgcatgaactgcgtcaaggtcggtgcaggaatt

SEQ ID NO: 1941 - DNA, 259 bp, Zea mays
ctctcccagcctctcttactctccgccgtcgccctgctcgcccgaagcagccgccggcaaaatggccccgaagagaggcggtagggcgccggtccccgccaagaagaaggcggtggtgacgaacccgctcttcgagaagaggccgaagcagtttgggatcggcggcgcccttccgcccaagaaggacctccaccgcttcgtcaagtggcccaaggtcgtgcgcatccagcgccagcgccgcatcctcaagcagcgcctc

SEQ ID NO: 1942 - DNA, 311 bp, Zea mays
caagaaaactagaaaaggctcctcccgaccgcaacgcccctcatctccctcgaccccgacatccccgacccgatggcgcccaaggcggagaagaagccagcggagaagaagccggcggccgaggagaaggcggagaagacgaccgcagggaagaagcccaaggccgagaagcggctgcccgcgtccaagtcctccggcaaggagggcggcgagaagaaggggaagaagaaggccaagaagagcgtggagacctacaagatctacatcttcaaggtgctgaagcaggtgcaccccgacatcggcatatcctc

SEQ ID NO: 1943 - DNA, 312 bp, Zea mays
gacaaatcaaaggtaccagcaggtaagtatctaatggagctcgtagcagttgactggtttaaggacgccaagcgcatggatcatgtcgctaggcggaaaggatctgcggttcaggttgccgctgagaagggaatgttcactttcctggtaaacatacaaattcctggaccaagtcattacagcttggtcctttattttgtctcaaactccttgaagaaaggatcgctgttgcagcgttttgccgatggtgatgatgattttagaaacagcagactgaagcttatcccatctgttccaaaggggtcttggata

SEQ ID NO: 1944 - DNA, 304 bp, Zea mays
cgggaatggagtgcgtattgggcgtggttggccgcgacttcgtgctggtggcggccgacacctccgccgtgcagagtattctcgtccacaagaccgacgaggacaaggtgatggtgctcgactcgcaaaagctgatgggcgcttcaggggagcctggtgatcgggtgcaatttacggagttcatacagaagaacctccacctgtaccagttccggaacaccatcccgctctcaaccgccgccgccgccaacttcacacgcggcgaactcgccacagcccttcgcaagaatccatatatggtcaa

SEQ ID NO: 1945 - DNA, 302 bp, Zea mays
cgccgaggcacctcatctccggcgaagggaaatggcgaccgttccaggggatctgatctggcagattgtgaggaagaacaactccttcctggtgaagcagtttggcaacggcaatgccaaggtgcagttcaccaaggagcccaacaacctctacaatgtacactcctacaagtactctggcttagcaaacaagaaaactgtaacgatccagccagctgctggaaaggactcggctgtggtcctctctactaccaagaccaagaagcagaacacacccgcgaactcagccacaagtctgtgat

SEQ ID NO: 1946 - DNA, 303 bp, Zea mays
ctccgacgcccactttgctacctcggaaccctagccgccgcccatggatatcgccggagaccggcgccggtagcgatacgcaaaaggagtggtacgttctttgaccttgtttattgctgcgcccgaggcgtgtggcgcggggggagcaggaaggagaggggaagaacagaaggggaaggcgggcggggccgcgatgtcggtgcggatcaaggcggttgtagaccggttcgtgaaggagctgcaggaggcgctggacgcggacatccaagaccgcgtcatgaaggagcgcgagatgcagagcta

SEQ ID NO: 1947 - DNA, 287 bp, Zea mays
cttgagttctctcgtccagaggcctggccagctagctagcactgacactgaccgagaccctgcagctagcagctgatcgatccatatccatccatggccatgggctgctgctacggtgatttcttcgacaaggccaagccttacctcgccatgatctccctgcagttcggctatgccggcatgaacgtcatcaccaaggtctccctcaaccacggcatgagccactacgtgctcgtcgtctaccgccacgccattcgcaccgtctctaatgcacccgttgctctcat

SEQ ID NO: 1948 - DNA, 297 bp, Zea mays
cgattgtcagcggaaggtcgcgtaagaaggtgtttgaatttgtaaaactgacggaactgtactacgctggtagtcacgggatggacatagtgacatctgcagcagcacatgctactgaaaagtgcaaagaagccaatctcttccaacctgcttgcgagtttctccctatgattaatgaggtttccaagtgcctcgtggaggtcacgagttcaattgaaggtgcaagagttgagaacaacaagttctgtgtatctgtacattaccgcaacgtagcagataatgactggctagtggtcg

SEQ ID NO: 1949 - DNA, 294 bp, Zea mays
  unsure (1)..(294): unsure at all n locations
ctccacactcncgctctcctgctactctgctccgtgatctggtctggtgagatcggggatcggaccgtcgactcgacaaacatggcggactggggccccgtggtggtgggcgtggtgctgttcgtgctgctctcgccgggcctgctctgcgagctgccgggcacccaccgccacgtcgacttcggcggcttccacaccaacggcaaggccatcttcgtccacaccctcgtcttcttcgccgccttcaccatcctcacgctcgcgctccacatccacatctacaccggctagcta

SEQ ID NO: 1950 - DNA, 293 bp, Zea mays
cggctcgagccggtatccttaaaaggccaaagatttctggtgcccagctttttgctatccatcctctagctatcgttcataccatgggcaatcttttcacaaacatgagccttggaaaggttgcggtgtcatttacacatactatcaaggccatggaacctttcttctcagttctcctttcagcaattttccttggtgagttgcctacgccttgggttgtgttgtctcttcttccgatcgttggtggtgtggcattggcatcccttactgaggcctcctttaactgggctgga

SEQ ID NO: 1951 - DNA, 252 bp, Zea mays
cgctaggtatctccccaaaccctcccccaaaaccccagagcggagaagagcgcaagatgttcggcttcgggcaccacggccaccacggccagaacccgccggcgcacggcggcgtgcaccagcccaccttcaagatcttctgcaaggccgacgaggggtactgcctcaccgtccgcgacggcaacgtggtgctggtccccgccaacccgcgcgacgagcaccagcactggtacaatgacatgcgcttcagca

SEQ ID NO: 1952 - DNA, 296 bp, Zea mays
aagcaacctcgtccccaaacaagcaaccaccgcctccccgatctcgtcgagaggaagcccaatcccgaaaccgccgccctattccaatggcgcccaaggccgagaagaagcccgccgccaagaagcctgcggaggaggagccggcggcggagaaggccacggcggggaagaagcccaaggctgagaagcggctccccgcgggcaagtccgcaggcaaggagggtggcgagaagaaggggaagaagaaggcaaagaagtcggtggagacgtacaagatctacatcttcaaggtgctg

SEQ ID NO: 1953 - DNA, 291 bp, Zea mays
tctcaaggggcgacaaggaatctgtcttcccagctgcaatctcgaaagatggcagagcatacaacgatcagttgtttgctagtgcagctaatattctgtggaagattgggggtgatcccaaaatcatacaggagtttatgcagcttgctggtagggcaaaagctgctgcttctgaagctatggatgctgaggcaatccttggggacattccagacgaattcctggatccaattcagtacactctgatgaaagatcctgtgacactgccatcatcgaaggtcacagtggatc

SEQ ID NO: 1954 - DNA, 291 bp, Zea mays
cttctctggctggtcctacaacaattgctgctcgacaaaacggccaggggatatcatggctttttccttttactgatggccatccacctcttggctggtcagatactttggcatacattgtgttaccagttcttcttgtcatttcacagtacatatctactcaagtaatgcagccaccacagagcaatgatcctaaccaacaaggtgctcaggctgtaacaaagttcttaccattgctaattggttattttgctctttccgtgccttcaggactaaggctgtactggctta

SEQ ID NO: 1955 - DNA, 293 bp, Zea mays
  unsure (1)..(293): unsure at all n locations
cggcgtcggggcncgacgcggcgtgcagcggcgtgggcatcctgggcatcgcgtgggcgttcggcggcatgatcttcatcctcgtctactgcaccgccggcatctcgcgcggccacatcaacccggccgtcacgttcggcctcttcctggcgcgcaaggtctccctggtgcgcgctctgctgtacatggccgcgcagagcctcggtgctatctgcggcgtcgcgctcgtcaagggcttccagagcgggttctacgcgcgctacggcgagcggcgcaatgaggtcagcgccggg

SEQ ID NO: 1956 - DNA, 289 bp, Zea mays
ctcgaaggcttggtcctcctccttgtatcccgacctcccccgcgacagacccgtttccccgctaggctagagttatcgttcctctgcagcgatggcgatcaagcggaccaaggcggagaagaagatcgcgtacgacaagaagctgtgcagcctgctcgatgagtacaccaaggtgctcatcgccctcgccgacaacgtcggctccaagcagctccaagacatccgccggggcctcaggggcgactcggtggtgctcatgggcaagaacacgctcatcaggcgctgcatc

SEQ ID NO: 1957 - DNA, 293 bp, Zea mays
taagaacaagagggtgcttatggagagtatccacaagtccaaggctgagaaggccagagagaagacactttctgatcagtttgaggccaagcgtgcaaagagcaaggcaagccgtgagaggaagattgctaggagggaggagaggctggcccagggcccaagagaaccaacagcacctgtcgcagccccagctccatctactggggtgccaaagaaagcaaagaagtgaagtatggaaacaaagctgtagctttttggtactatataagcatgactttggagcacctgaagta

SEQ ID NO: 1958 - DNA, 291 bp, Zea mays
  unsure (1)..(291): unsure at all n locations
accggcaattgatccagtgcttggaaattattacacatacactgcaacaaacacttctttgcagaggtttgttgttttgccaaatggcacagacatctgctacatggttagaaaatcttcacaagattgggagcttgtctggtaccaaccatcaaatgagtgtgaatactatgctacatgtggtccaaatgcaaaatgcactgcatcgcaagatagcaaggcaaaatgcacctgcctanaaggttttcatccgaagttgcacgagcagtggaatgcaggaaattggagtca

SEQ ID NO: 1959 - DNA, 288 bp, Zea mays
ggatgatgaagagggtagtgaggaggatgaagatgatgacgagtgatggagctcctcgagacaatggaccgtgcttcatccaacaatggagcggctacacaaggccccgtggcgatcacaaaaaaggagcctatatccatgtactagaattattcagtttcactccacatcgtgatgttttatttttacttttgtcgtgctataacggatagcgctcctcgttggcgccactggcgggtggttctgcctctggtctggtgtgtttgtgtgtggtcacacttgccagcc

SEQ ID NO: 1960 - DNA, 288 bp, Zea mays
gccgaataaatccctacaggatgattatcgttatccggttggtggtgttgggtttcttcttccattaccgagtgatgcatccagcgaaagatgcatttgcgttatggctcatatctgtaatctgtgaaatttggtttgccatgtcctggattcttgatcagttcccaaagtggcttccaattgagagagagacttacctggaccgtttgtcgctaaggtttgacaaggaaggtcaaccctctcagcttgctccaattgacttctttgtcagtacggttgatcccacaa

SEQ ID NO: 1961 - DNA, 177 bp, Zea mays
gttggcttctcgtcccgctccggttcgggttcgggttcgtgaggttctccggggttcggtttcgtgggctgacggatagatatcgcgacgtaggatcttgaatacagctgctatcgtcggctgactcggatgggctacaggcgaccagtccatccacaacgccttcagcacctaggg

SEQ ID NO: 1962 - DNA, 264 bp, Zea mays
actgccagtcaacttacatcatatatcactcacatacgactggatgagatcaacaaaaagttaagaagtggagagatctatccaacttacagggatcgttcaccgtccccggaacccatttataactcttctggtaaaaggatcaacagccgtgagcaaagatacaaaaaaaagcttgaagatgagagatctaagcttatcgagcagactatcaagaacaatcccgaacttaataaggatattgaccatcagacttacttggac

SEQ ID NO: 1963 - DNA, 316 bp, Zea mays
  unsure (1)..(316): unsure at all n locations
actccgcctccgcctgatccatccaagacagggatcgccatgtcggactcggaggagcaccacttcgaatcgaaggccgacgctggggcgtccaagacctacccgcagcaggctggcaccgtccgtaagaacggcttcatcgtcatcaagaaccgtccctgcaaggttgtggaggtttctacctccaagactggtaagcatggccacgccaaatgccactttgtcgccatagacatattcaatgggaanaagcttgaagatattgttccttcatcacacaactgtgacattccgcatgtgaaccgtactgagtatc

SEQ ID NO: 1964 - DNA, 308 bp, Zea mays
tgggcgcagagaatccccaagcaaacaaacagggtagagggagaggagaggagaggagaggagaggttgggtctgggacaccatggctccgatgaagctgtacggggcggtgatgtcgtggaacgtgacgaggtgcgcaacggcgctggaggaggctggctccgactacgagatcgtgcccatcaacttcgccaccgccgagcacaagagccccgagcacctcgtccgcaacccgtttggtcaggttcgagctctgcaggatggtgacttgtacctcttcgaatcacgagcaatctgcaagtacgctg

SEQ ID NO: 1965 - DNA, 314 bp, Zea mays
gcctaaagcacctcattaagttccaccagtacagcctcaagttcaagttgcacgccaagttggggaagctgccaaattatgtggtgattgaacaaaggtactttgattgcgagatgttcccagcaaacgatgatcatccctcgcatgatgtggcaaggggacagaggttcgtcaaagaggtgtatgaaacactgagagccagtccgcagtggaacgagacggccctgattatcacatatgatgagcatggtggattctatgaccatgtacctacgccggtcgttggagtgccccagcctgatggaatagttggg

SEQ ID NO: 1966 - DNA, 205 bp, Zea mays
  unsure (1)..(205): unsure at all n locations
cggtccggcagcagagagcgggggtgcagagagatcgagatccggaggccgcgagtgggagcgccaccaccagcgtctgcggcaatggcgggcacggtgacggtcccggggtcgtcgaccccctcgcacgccgctgctcaaggacgagctcgacatcgtgatcccgacgatccggaacctcgacttnnncctggagatgtggcgg

SEQ ID NO: 1967 - DNA, 292 bp, Zea mays
cagcagagagcgggggtgcagagagatcgagatccggaggccgcgagtgggagcgccaccaccagcgtctgcggcaatggcgggcacggtgacggtcccggggtcgtcgaccccctccacgccgctgctcaaggacgagctcgacatcgtgatcccgacgatccgcaacctcgacttcctggagatgtggcggcccttcttccagccctaccacctcatcatcgtgcaggacggcgacccgaccaagaccatcaaggtgcccgagggcttcgactacgagctctacaaccgc

SEQ ID NO: 1968 - DNA, 317 bp, Zea mays
cgagatcgaccccatctgtgccctccaggctctgatggagggtcttcaggtccttcccttggaggacgttgtctctgaagctgacatcttcgtgaccaccactggcaacaaggatatcatcatggttgaccacatgaggaagatgaagaacaatgccattgtctgcaacattggccactttgacaatgaaattgatatgctcggccttgagacctaccctggcgtcaagcgcatcaccatcaagccccagactgaccgctgggtgttccccgagaccaacactggcatcattgtccttgctgagggtcgcctgatga

SEQ ID NO: 1969 - DNA, 318 bp, Zea mays
ctcatggtgaaggcaaggagtcagttcaaggaaagaagcacagcaacaaatgttgaaattgaagtgcctgttccttcagatgccacaaacccaaatataagaacttcaatgggttctgctgcatatgctcctgagagagatgcaatggtctggaaagtaaaatcattccctggtggcaaggaatacatgtgcagagcagaatttagtcttcctagcataacagcggaagaaggggccccagaaaagaaggcaccaatacgagtgaaatttgagataccatatttcaccgtatcaggtattcaggtccgttatctgaag

SEQ ID NO: 1970 - DNA, 300 bp, Zea mays
cagaagcaaacataattaagcagttggtggtcattagcgtactgcacagagtgcctacagaaaagctagagaagtaaacaaaatggctgcgtcctcgtacttccttcttgctgcttttctagcggtggttgcttcccatgccaccgcttccgatcctagcccgctccaggatttctgtgttgcggacatgcactctcctgtgaaggtgaatggatttgtttgcaaggactccatggccgtgaccgcagatgacttcttcaaagcagccaatcttgataaggctagagacaccatgaagag

SEQ ID NO: 1971 - DNA, 263 bp, Zea mays
gagaagaagagtggcaaacatgcactcaggcattggacttcggatggatgcaaatggcgaacagtgcatgaatttatatacagaagcaactgatggatcctacattgaggccaaggaaagtgccttggtgtggcaccatcaggatgctgacctaggctttggatcctcacaggcaaaggagatgcttgatcacctgggaagtgtactagcaaatgaaccagtctctgtcaagagtggccagttcattgttgaagtcaaaccac

SEQ ID NO: 1972 - DNA, 237 bp, Zea mays
gctgcctgctcgctcgctcgctcgcttccttgctcactcaagctgctatgctgtgctctgccctgctgtatactgacggcggcatcgtttctgtttcttggccatggcagcaacaacatcctgtaccccaaggaggaccgggagcagaaggtgctcctctacgcctgccggaactgcgaccaccaggaggtcgcggacaacaactgcgtgtaccggaactggtgcacaaagcgccgg

SEQ ID NO: 1973 - DNA, 288 bp, Zea mays
  unsure (1)..(288): unsure at all n locations
gcgagagttgtcctttccggtgtaagccttaagtatggaattgatttgttggaaagtatccanagtggccctaagaagaagagcacaaagaagtcactcaaggatgttgtcacagagaatgaatttgaaaaacgtcttcttccagatgtcatccctccagatgagattggtgttacctttgaggatattggagcattagaaaatgtcaaggaaactttgcaggagttagttatgcttcctttgcaaaggcctgagttgttctccagaggacaacttatgaagccatgt

SEQ ID NO: 1974 - DNA, 303 bp, Zea mays
gaagatgtgcagggcaggaatgtgctcacaaacttttggggtatgaattttaccactgataaactgagatccctagtgaagaagtggcagacattaatcgaagcccatgttgatgtcaagacaaccgacaactacatgttgcgtttgttctgcatcggcttcacgaagaggcgcccaaaccaggtcaagagaacctgctatgctcaggcatcccagatccgtcagatccgccgtaagatggttgagattatgatcaaccaggcttctacatgtgacctgaaagaacttgtttcgaagttcatt

SEQ ID NO: 1975 - DNA, 310 bp, Zea mays
cagcaagctccctcagctcggtcttctcggcaggacccggcaagcagagccaaagccaaagccccgctcttttctcgacgacgtggacgtgaatcgatcgggagatcgagacatggggcgcgctccgtgctgcgagaagatggggctcaagaggggcccgtggacgcccgaggaggacaggatcctggtggcgcacatcgagcgccacggccacagcaactggcgcgcgctgcccaagcaggcgggccttccccgctgcggcaagagctgccgcctccgctggatcaactacctgcgccccgacataaag

SEQ ID NO: 1976 - DNA, 291 bp, Zea mays
cggctcgaggtcatcaagaaccgtccctgcaaggatgtggaggtttctacctccaagactggtaagcatggccacgccaaatgccactttgtcgccatagacatattcaatgggaaaaagcttgaagatattgttccttcatcacacaactgtgacattccgcatgtgaaccgtactgagtatcagctgattgatatttctgaggatggatttgtgagccttcttacttcagatggcaacactaaggatgatcttagactcccaactgatgagactcttgtggcccagatt

SEQ ID NO: 1977 - DNA, 243 bp, Zea mays
cggctcgaaggtgctcgtgacaatggtgcctttgcattggagaataatccggttcaagttcctgttggtagaggaaaacccccaacattaattgagagagatgaaagcctggataagtttgacccagtaaaactaaagaaacttcgcccaagtttcaaggagaatggtggtacagttacagctggaaatgcttctagtataagtgatggagctgctgcattagttttagtgagtgggcagaag

SEQ ID NO: 1978 - DNA, 302 bp, Zea mays
gactcgctggacggtagtagctcgaatcgctcaagcgtcattccagaaggtcgaccaggcgcgcgcagccaagtcgggcctcttcgttggcatcacaaaggtcatgtcgtcaacaagcgcgaactgcctccccgcccgtgccaccgaagggaaatcaacgaagagggtgtctatggtcaggggcctgatcagagaggttgctgggtttgctccttatgagaagcgtatcactgagcttctgaaggttggcaaggacaagcgtgccctgaagcttgctaagagaaagcttggaactcacaaga

SEQ ID NO: 1979 - DNA, 317 bp, Zea mays
cggctcgaggcagttccccgaccacaccgttcctccgagcccaggagcagccccgcgccaggaggaagtttgttcttttaacaatatgtcgagggaggagaatgtttacatggccaagttggctgagcaggctgaaaggtatgaggagatggttgagtatatggagaaggtggctaagactgtagatgtggaagagctcactgttgaggagcgtaaccttctgtctgttgcatacaagaatgtgattggggctcgccgcgcttcatggcgcattgtttcttccattgaacaaaaggaggagtcccgtaagaacgaag

SEQ ID NO: 1980 - DNA, 272 bp, Zea mays
ggtcacatgatggaacaccaccagcctcccaccataccacgcaaggaaggcccaaatggcgaaagaaaggccggtgaaccccacagcgagacccttggcgatgccctgcttgatccccagcttgatcgtcttgtcgaggatcgccgtgtacctctggatgatcctcttctcggccgtgaaggagtagacggtcttgatggagcccagagcctggtcgaccagggagttcgccttggcgtactcgtggcgcgaccggcgggacaggtagagga

SEQ ID NO: 1981 - DNA, 297 bp, Zea mays
ggaaatttcaatgtgcaaccttacagctggattttcagctgcccattcggttcaagctgacttattctgctgaggatgaagcaaaaattgaaaggcctgtgatgatacacagggcaatcctaggttctgttgaaaggatgtttgccattcttttggagcattacaatggcaaatggcccttatggctaagccctcgccaggccattgtttgttcagtatcttctggttcagtggaatatgcgaaacaggttcttgccatgctacatgaagctgatttccatgttgatattgatgtga

SEQ ID NO: 1982 - DNA, 300 bp, Zea mays
gtttgagaaggacttggatcgacaagctgaaatggaggcacgaacaacggaggaagaggcagctgcagccaaagaaataatggaagaggaaagtgctgtgctaaaaggtgtagatgacaggcagtccttcacaccagatagcttggagaggcagcaattctacccccctggtagaatcatgcacatggttgcaatgcctcccacagacgctgacccagatgatccggttgctgctgacgagtgctgtgttggaatatatgagacccctagagatctttacagcaagattcgactctcaaa

SEQ ID NO: 1983 - DNA, 302 bp, Zea mays
gagacacgcgtccaaacatacagctagatagcctctgcatgcctacgtacagcatggccaaggccgagctgctcctcgccctcgtggcttcgctcgtcgtgctgccattctcctccctcgccgtgtaccaggacttctgcatcgccgacctatccgccgccgccacgccgggcggctacccgtgcaagcccccgaaggacgtgaccgccgacgacttccactatggcggcctcgccacccccggcacggcgctgaaacccttcaagatctccctgggctcggccgtcgtcaccacgttcccc

SEQ ID NO: 1984 - DNA, 301 bp, Zea mays
ctcgttcctgtcgcgcaccacgacctccacttcacatctcccccggcggcggcgcggtcagttgaacaatggcggactccaaggccacctcggcggtcaccctccgcacccgcaagttcatgaccaaccgcctcctggcccgcaagcaattcgtgcttgaggtgatccaccccggccgcgccaacgtctccaaggcggagttgaaggagaggcttgccaaggcgtacgaggtgaaggacccaaacaccatctttgtcttcaagttccgcacccacttcggaggaggaaagtccactggttt

SEQ ID NO: 1985 - DNA, 286 bp, Zea mays
aggccccacagtggttgtgtccgccggtacaacacattctcctgggtgcacaatgcacatcttaaggccatgcttgagaagctccgggctaagcaccccaatgtgaggatcatatatggcgattactacactccagtcgtccagttcatgcttcagcctgagaagtttggttttgccagacaactgcccagggcatgttgtggggcgccatcgactcctgagagagcagcttacaacttcaatgtcacggccaaatgcggtgagcctggtgcaactgcctgtgctg

SEQ ID NO: 1986 - DNA, 287 bp, Zea mays
  unsure (1)..(287): unsure at all n locations
gcncgcgtggccttcgagaccggcgccgcgccgatcgccaacaggatcaaggagagccggtcgtacccgctgtaccgcttcatccgccaggacctcggcgccgtgtacctgaccggcgagaagctcaagtcccccggcgaggagtgcaacaaggtgttcctggccctcagcgagggcaagctcatcgaccccatgctcgactgcctcaaggagtgggacggcaagcccctgctcatctgctgaggagtgaggaggagggcgccaccggtgccaagaggcaagaccgc

SEQ ID NO: 1987 - DNA, 294 bp, Zea mays
gagataagcttgtcactgttgaagatattgtccgtcagcactgggccacatatggtcgccattactacacacgctatgactatgagaatgttgatgcaggggctgctaaggagcttatggcaaacctagtaagcatgcagtcatcactttctgatgttaacaagttggtcaaggagatccggtctgatgtttctgaagtagttgcagctgacgagtttgagtacaaggatcctgttgatggctctgtgtccaagcaccagggcatccgatacctctttggagatggttcacgac

SEQ ID NO: 1988 - DNA, 294 bp, Zea mays
cacacacagcaacgctcgctcggcactgtcactagctagttgctctactagagggcgggtatagagctgcctgcaatccgccgctgagaagggaggatcggaagcgacgatgaggtcgtttgctcctgtctttctgtcggcggtcgtggcctggctggagctggcgggcaccgcgcagggcggcaacttctaccaggacacagagatgacctggggcgatggccgcggcaaggtagtggacggcgggcgcgggctggacctgacgctggaccgcacgtccggctccgggttcca

SEQ ID NO: 1989 - DNA, 296 bp, Zea mays
atcgccccctcgttcgccgcctctcctgctcctaccgcagctctccctcaggtttagtgttcgcaatggcggccttcaacaagcttggtggccttctaaggcacagtgctctggtgagcggtatcactggtggctcttctcctgcagtgttcaatgctgcacggctcatgtctaccaagctatttattggtggtcttgactggggtgttgatgacgtgaaactaagagaagcatttagcagctttggagaggttactgaagcgagggtgatcacagacagggagactgggaggtca

SEQ ID NO: 1990 - DNA, 295 bp, Zea mays
atttgtcagaagctcaaatactgatgtcactgatccagtatggctatggcaaaggcaggcgcgccgagggtctcggcggcccagctggtggctctcgggctagcgctcctctgcgctgtcgccggcccggccgccgcgcagaactgcggctgccagccaaacgtctgctgcagcaagttcggctactgcggcacgaccgacgagtactgtggcgacgggtgccagtcgggcccgttccgctcgggcggcggcggcggcggcagtggtggcggtggtgcgaacgtggctagcgtcg

SEQ ID NO: 1991 - DNA, 284 bp, Zea mays
ctcgagccgcacttcagcacctggagatgactacctcagtgtccacatccggacaaacggtgactggacacaggagctcaagcgcatatttgtggagaactacttctcgccgcatctcaacagaagagcttcgtttagcgagctaggtgcggcagaaccaagaagcttgccaaaattactcgtagatggtccctatggtgcccctgcgcaggattttagaaactacgacgttctacttctcgtcggcctcggaatcggggcaacaccgttcataagcattctac

SEQ ID NO: 1992 - DNA, 258 bp, Zea mays
tagggagttggtttggatcctgggcaccggagaggatgatatgggataccattatttataaaccaatacgggcaatgcttggaggacgtgtaagatttgttctttgtggtggtgcacctttatcaggtgacacacaaagattcatgaatatatgtctaggtgtcccagtgggtcaaggctatggtttgactgaaacctgtgctggagcagctttcactgaatgggatgacacaagtgtgggtcgtgttggtccaccat

SEQ ID NO: 1993 - DNA, 302 bp, Zea mays
caggcttttaactgggaatccaataagcacaactggtggagtattttggaggaaaaagtaaccgatcttgcggaatctgggtttacgtcagtgtggcttcctcctccaacacagtcattatctcgagaaggctatctaccacagaatctgtactgccttgactcatgttatggttccctccatgagctaaaattgttgcttcataaaatgagcgaacataatgtaagggctatggcagatgttgttatcaaccatcgaattggaactactcaaggatccaatggcatgtataatcgttatga

SEQ ID NO: 1994 - DNA, 285 bp, Zea mays
cggctcgagctaaggtggtccaggacaccatcgacccagaggcgcacatcgagttccgtccgaacaccgcagatgatccgcacaagcgcaagcctgacatcagccgcgcgaaagagctcttcggctgggagcccaaggttcccctccgtgagggccttccccgcatggtcactgacttccgcaaacgtatcttcggggaccaggaagggtccaccgaggcagctggtggcctttcttaagtgctcaaaaacttgttgaagtgacacgtttgtatggtatatgact

SEQ ID NO: 1995 - DNA, 284 bp, Zea mays
cttgaagatgaggattcccaaacatatgaaagcgcgagtgccttgtccttggctacatttgcatcactcctgattgagtttgttgccagactacagaatgttgttaacgcatttgaagagttgagtgagaaggctaactttaaggatcctgtggtggagcctactgcagttagcacaagtaatgttaggtttctcgataaactgtgcaaatttgtaggtttctagagttgacacggatcctgtgaaggctaactctaaggatcctgttttggcatccagtttcc

SEQ ID NO: 1996 - DNA, 290 bp, Zea mays
tgtggtacttcaatgacaaaattccactgcatgttttctttggtgaagatggaaaaatggaacgagctagttttcttgaggcctggaaatctttacctgatgacaatgaatttacaaaagaattcccgggctctgtaatcagcagtatagatgctacagttgagcgccttgcagcatcaaatgtgttctttatagccaagcggaaaaatgcaaacatggatgttctgtatctgtccgcgaagatgccccgcggaatcccctttcttatagaggttacagctgcggttggt

SEQ ID NO: 1997 - DNA, 290 bp, Zea mays
gttcgcggtgttccagggcctgctgaaggtgttcgccggcatcgacacgagcttcaccgtgacgtcgaaggccggggacgacgaggagttctcggagctgtacacgttcaagtggaccaccctgctgatacccccgaccacgctcctcctgctgaacttcatcggggtggtggccgggatctcgaacgcgatcaacaacgggtacgagtccgtggggcccctgttcgggaaagtccttctcggcttctgtgtgatcgtccacctgtacccgttcctcaagggtctggtgg

SEQ ID NO: 1998 - DNA, 288 bp, Zea mays
tggtgtgatatagaggtctaggaggagatatgaggtactacttgcgtcaggtccagcgtttggttggagatatggaaggaggagctctcttgtttatagacgacctcaactccaagtgacaaagcgaacagctgttgaacgtttcccttctatttctgtttctttttgccggatttggagatggagatgaattcctctggcgaggaaactgtggtaaaggtaagaaagccgtacacaataacgaagcagcgggagcggtggacagaggctgaacacaaacggttcctt

SEQ ID NO: 1999 - DNA, 291 bp, Zea mays
aagacatgcagcgctccgtgttctgcctctgcccgttgggctgggcaccgtggagtcccaggctggtggaggccgtggtcttcggctgcatcccggtgatcatcgcagacgacatcgtccttcccttcgcggacgccatcccgtgggaggagatcggcgtctttgtcgccgaggaggatgtcccgcggctggacagcatcctgacgtccattcccacggacgtcgtgctgaggaagcaacggctcctcgagaacccgtctatgaagcaggccatgctgttccccacagctg

SEQ ID NO: 2000 - DNA, 303 bp, Zea mays
cggtgaccaaccacgtccagagcgcggacagcacaaccaggacgtgaactccctgggcctcatctcgtccaggaagaccgccgaggcagtggacatcctgaagctgatgacgtccacgttcctgatcgcgctgtgccaggccatcgacctgcggcacctcgaggagaacgtgaaggccgcggtgaagaactgcgtgacgcaggtggccaagaagtcgctgagcctgaacgcccggggcgggctccacaacgcgcgcttctgcgagaaggacctgcagacggcgatcgaccgcaagacgtgttc

SEQ ID NO: 2001 - DNA, 308 bp, Zea mays
gaccagctcagcgagcccgggtcgcccgagaacatcctctactaccacatgatccccgagtaccagaccgaggagtccatgtacaacgccgtgcgccgcttcggcaaggtgcgctacgacaccctgcgcctgccgcacaaggtcgtcgcgcgggaggccgacggctccgtcaagttcggccagggcgagggctccgcctacctcttcgacccggacatctacaccgacggcaggatctccgtgcagggcatcgacgccgtgctcttcgcgccggacgacgccaaggccacgcagaccgccgaccccaa

SEQ ID NO: 2002 - DNA, 313 bp, Zea mays
cgcagggatcgagtagcccaccaccccaccccgcgacgctaaccgacgcaatggcgacgctcaccgttccttcctccgtcccggccgtcgccgaggactgcgagcagctccacaaggctttcgaaggttggggcaccaacgagaagctgatcatctccatcctggcccaccgcaacgccgcgcagcccgcgcgatccgccgcggctacgccgaggcgtacgggaaggagctgctccgcgctctcggcgacgagatccacggcaagttcgagagggcggtgatcctgtggacgctggaccccgcggagagggac

SEQ ID NO: 2003 - DNA, 273 bp, Zea mays
cgccacgctgtgggacggcagctactgggccacgcagcaggggaaggtgaaggtggactggtccgccgcgcccgtcgccgtctcctaccgcggctactccgccgacgcctgcgtgcccgacggcgacggccgcccgctctcctggcccgccggcaccggccgctggatgggccgcgagctcgacgccgccgagtggggcaccgtcgcctgggccaggcagaactacatgcactacaactactgcgacgacggctggctcttcccgcaggcttc

SEQ ID NO: 2004 - DNA, 298 bp, Zea mays
  unsure (1)..(298): unsure at all n locations
aaaaaaacagagtccaaaagaaggaacacccaggtgggggagaagcgcagggacagagagaggaaagggacgcccgtctcgtcacgtcctccacccccgccgccatggctgccctgggcctgctcctcctcgccgtcgtcggtgccaccaacgccgcggcgccgggcggtagaatgtccatcatctcctacaacgaggagcacgccgcgcgcgngctggagcggacggagccggagcccggacgctgtacgagctctggctcgccgagcacggccgcgcctacaacgcgctcggcgag

SEQ ID NO: 2005 - DNA, 297 bp, Zea mays
gtggatgtacctggccgtgcccatggtgctgtacgcgtgcgagcgcctcaccagggcgctgcgctccagcgtcaggcccgtcaggatcctcaaggtggccgtgtacccgggcaacgtcctctcgctccacttctccaagccgcagggcttccgctacaagagcgggcagtacatcttcgtcaactgcgccgccgtgtcgccgttccagtggcacccgttctccatcacgtcggccccgcaggacgactacgtgagcgtccacatcaggacgctgggcgactggacccgcgagctcaa

SEQ ID NO: 2006 - DNA, 297 bp, Zea mays
cgcactggccggaatcttcttgtggtgtcagaaaaggagaaagctattgttagagctagaagaattgtataccatagttggaaggccaaatgtcttcagttacagtgagcttaggtcagctacagagaacttttgttctagtaacctacttggtgaaggaggatatggatcagtttacaagggtaagttgagtgatggaaaagtggtggcagtgaagcagctctctcagtcctctaaccagggaaagatgcagtttgcggcagaaatcgaaaccatttcccgagtgcagcaccgtaa

SEQ ID NO: 2007 - DNA, 299 bp, Zea mays
ggcaaaatggttggaagcaagcccctttatgtagctcttgcgcacgtagaagaagacagaaaggcaaagctacaggcacaattttcacaaatgcgtcctgttgcaatggcgccttcagtaggtcctcgcatgcccatgtttccacctggtgtccctggagttggtcagcagctgttctatggtcagccaccaccagccttcatcaaccctcaggctggatttgctttccagcaacctctgatgcctggtatgaggcctggtggtccaatgccgaactttatgatgcctatggttcagca

SEQ ID NO: 2008 - DNA, 306 bp, Zea mays
gagtagcccaccaccccaccccgcgacgctaaccgacgcaatggcgacgctcaccgttccttcctccgtcccggccgtcgccgaggactgcgagcagctccacaaggctttcgaaggttggggcaccaacgagaagctgatcatctccatcctggcccaccgcaacgccgcgcagcccgcgcgatccgccgcggctacgccgaggcgtacgggaaggagctgctccgcgctctcggcgacgagatccacggcaagttcgagagggcggtgatcctgtggacgctggaccccgcggagagggacgcg

SEQ ID NO: 2009 - DNA, 295 bp, Zea mays
ctccgggtacgtggagtacatcgggtcgggccagaagcagggcgacatgctgctgccggtgccggagggcgcctacgccgtgcggctcggaaacgaggcatccatccagcagcgcctcgccgtgacgccgggcgcgcgctactccatcaccttcagcgcggcgcgcacctgcgcccaggccgagcagctcaacgtgacggtcgcccccgagtcggacgtactcccgatccagacggtctacaccagcagcggctgggactcctactcctgggccttccaggccgcgggcagcgtg

SEQ ID NO: 2010 - DNA, 293 bp, Zea mays
ggtccttcaggcgaaccaggttggtcatggccttcaacaagatcaaggtctccaaccccgtcgtcgagatggacggcgatgagatgaccagggtgttctggaaatctatcaaggacaagcttatattccctttcgtagacctcgacatcaaatattttgacctcgggcttccacaccgtgatgctaccgacgacaaagtcacagtggaggctgcggaggccacactcaagtacaatgtggctatcaagtgtgccaccattacaccagatgaagcaagggtaaatgagtttggc

SEQ ID NO: 2011 - DNA, 295 bp, Zea mays
gtcctacggttctcgatgcgtccgacctcccatcattgtcggtgacatctctcgacctcagcccatgaccgtcaaggagtccaagtacgccgtctcggtctccaagaagcccatgaagggtatgcttactggacccgtcacctgccttcgatggtctttcccccgtgacgacgtccaccagtccgtccaggctgagcagcttgcccttgccctccgtgacgaggtcgtcgacctcgagaaggccggcatcgacgtcatccaggtcgacgagcccgctctccgtgagggtcttccc

SEQ ID NO: 2012 - DNA, 296 bp, Zea mays
ctggctgtttgcaatgtattataggaagcagaaaatgagaaaagccataccactcacatgtctagaagattctgtccaacttagcaaggtttcacaagatgagggcataaaggttgacagatccatagagttctcatatgaagaactttctgatgctacaaacaactttagtatggaccataagattgggcaagggggttttggttctgtttattatgctgagcttagaggcgagaaagctgccataaagaaaatggatacaaaggcatctcaagaattcctcaatgaattgaaga

SEQ ID NO: 2013 - DNA, 300 bp, Zea mays
  unsure (1)..(300): unsure at all n locations
tgccaccaccattccttccccaactctgcaggctgctcgtcgccctccctccacgccggacgcgccccgatccagatccaggggcgtaacatggcatcaaaacgtatcctcaaggaattaaaggacctgcaaaaggaccctccaacgtcatgcagtgctggtcctgctggtgaggatatgttccactggcaggcaaccatcatgggtcctcctgatagtccatatgctggaggtgttttcttagtgaacattcatttccccccggactaccctttcaagcctccanaggtatcttttaag

SEQ ID NO: 2014 - DNA, 297 bp, Zea mays
gaattgagtacttgcatggctatgcttgccctcctgtaattcaccgggacatcaagtcgtcaaacatattgattgatgaggatcacaatgcccgtgttgctgactttggtctgtctatattgggtcctgcagatagtggtaccccactgtccgagctgccagcagggactcttggctaccttgaccctgagtactaccgtctccactacttgactacaaaatctgatgtctacagcttcggggttgttctcctggagatactaagcggcaggaaagcgatcgacatgcagttcgagg

SEQ ID NO: 2015 - DNA, 280 bp, Zea mays
gcgctgctcccggttccatcgcgcggtgcgggatttaacatggccgtgccggaggtggtggtcgacggcgtcgtcttcccgccggtagcccgcccgccgggctccgccggctcgcacttcctcggcggcgcaggcgtgcgaggcctcgagatcggaggcaacttcatcaagttcacggccatcggcgtgtacctggaggacgcggccgtgcccgcgctggccaagaagtggggcggcaagacggccgacgagctcgcctccgacgccgccttcttccgcg

SEQ ID NO: 2016 - DNA, 291 bp, Zea mays
gcggacgggcagagcctcgagatcccgcccgccatttgccctccggccgacgcggaccgatcggttcaccggcagcgaggacgatgggttccgtcgcggaggactccaccgcggcagggcagcagcggcgtcggtagtgttccgctccaagctacccgacatcgagatcccgcggcacctctcgctgcaggcctactgcttcgagcggctccccgaggtgtcctcccgcccctgcctcatcgacgggcagacgggcgccgtgcacacctacgccgatgtggaccgcctgtc

SEQ ID NO: 2017 - DNA, 256 bp, Zea mays
aggcttgtcgttcctgatgcaacggtgcatcctgttaattcaacatccgatgttattgagttaatgagaataggacatgcaaacagagcagtgggttcgacaatgttgaatgaaagaagcagcagatctcacagtattgttaccatacacattcgaggtgtagatttgaaaacaggagctactctgtgtggtgcactacatcttgttgatcttgctgggagtgagagagtggaccgatcttctgttacaggcaata

SEQ ID NO: 2018 - DNA, 272 bp, Zea mays
ggtgaacctgtgctggaggatctggcacgtcgcgaggaagaagaagcaggtgcaacgggagtacgcgcggcagtaggcgcacggcgcctggagcaggagctgggcagccgggaggccgccgaggagctctccgatggcgagaaggacggcgcccccgacgccgcccagcagcctgtgtcggtggcggcgcccgacggccggatcgccaggatcgggtccgaggcccggatcgtgtcggacgacgagggcggggacggcagctacgtcgacac

SEQ ID NO: 2019 - DNA, 287 bp, Zea mays
tgcctcagcgcgtcgcccgccgccacatcctacagcgacctcatcgatcaccttcaactttcaatcatggcggacgtcgatgtcgaaccggaggttgccgccggcgctcccaagaagaggacgttccgcaagtacagctaccgcggcgtcgacctagatgcgcttctcgacatgtccacggacgacctcgtccagctcttccccgcgcgcgccaggagaaggttccagaggggtctgaagaggaagcccatggcactcatcaagaagctgcgcaaggcgaaaaagga

SEQ ID NO: 2020 - DNA, 285 bp, Zea mays
gcttgtggtgacaaacctatagctgatggaagtcttcttgatttcttgcgtcaagtatcaacttttgggcttgcccttgtgaagctcgacatcaggcaggaatctgatcgacacactgatgtccttgattcgataacgacacatcttggaattggctcctatgctgaatggtctgaggagaaacgccaggattggctgttgtctgaactgaggggcaaacgtccattgtttggttcagatcttcctcagactgaagagactgctgatgttttaggcacatttcat

SEQ ID NO: 2021 - DNA, 229 bp, Zea mays
cgtccatctttacccgttcctcaagggtctggttgggaggcagaacaggacgccaacgattgtcattgtctggtccatcctcctggcttcgatcttctcgctgctttgggtccggatcgacctttcctgctaaggagatggtccctgttgaggagtgtggctggatgcactaggagtcagcacgtggacttcccgcagtgtgtggtcgagagtatttgcagatgttgtg

SEQ ID NO: 2022 - DNA, 268 bp, Zea mays
gtgctgttggttttgtgttgtcaacggctagagcaatatcagagttacatactttgcttatatctggagggatagaagctagtgactttgatgccttcatatgcaacagtggcagtgatctttgttatccatcttcaagctctgaggacatgcttaaccctgctgagctcccattcatgattgatcttgattatcactcccaaattgaatatcgctggggaggagaaggtttaaggaagacattaattcgttgggcagctgagaaaaa

SEQ ID NO: 2023 - DNA, 271 bp, Zea mays
caccggttgcgatccgccgccatcgcttcaagcagcgaaccctagccgccctcagcgacggattgcagatctcccagccatgacgttcaagcggaggaacggcggacgcaacaagcacgggcgcggccacgtcaagtacatacgctgctccaactgcgccaagtgctgtccaaaggataaggctatcaagcggttcttggtgaggaacattgttgagcaggctgctgtgagggacgtgcaggaggcctgtgtgcatgatggatatgttctt

SEQ ID NO: 2024 - DNA, 273 bp, Zea mays
gcccttggctgatagagtgcttgtaaagattaactcttccgaggagaagacaactggtggaatcttgctccctacgactgctcagtccagacctcaaggtggcgaggtagttgctgttggagaaggaaggataattggggataagaaagttgatgtcagcattcaggttggagctcaggttgtgtattctaagtacgctggaaccgaggtcgcgttgaacgatcacagccatctggttctcaaagaggatgacgttataggtatcttagaaac

SEQ ID NO: 2025 - DNA, 276 bp, Zea mays
agatcctgataattcgtctgcgcaacaatatgatgagaaaaatatccgaagaagagtttatgatgcgctgaatgtcctaatggctatggaaattatatctaaagataaaaaggaaatacagtggagaggtctgcccaagacaagtatgaatgatattgaagaactgaagacagaggtcaatggactgaaaggtcggattgacaagaaaaatgcatatctgcaggatttacaagatcaatatgcatgtctgcaaaacttggttcggcgaaatgagca

SEQ ID NO: 2026 - DNA, 265 bp, Zea mays
atagcttgccgcgctgctttatacgtttgcttcttgattgatgccatttgcttgaattagcattctttagaattcacacatcttcctttctacaagacgtttcgttttaatttcatcggtattcttaccaactttttatctttttactaggatgtcagtatgaaggtcatatctttctcccaacaaggtccaagggctatttgcattctatctgccaatggagttatcgcaaatgttacactgcgtcaacaagactcattaggtg

SEQ ID NO: 2027 - DNA, 265 bp, Zea mays
ggccaacggcaagatcgccaaggacgctaaggagaccctgcaggagtgcgtctccgagttcatatcattcgtgaccagcgaggccagcgacaaatgccagaaggagaaacgaaagacaatcaacggggacgatttgctctgggcgatggccactttaggattcgaggagtacgtcgagcctctcaagatttacctacaaaagtacaaagagatggagggtgatagcaagctgtctacaaaggctggcgagggctctgtaaagaag

SEQ ID NO: 2028 - DNA, 264 bp, Zea mays
gcggtgtacactaacatgttcgacgcgatcgtggacgcgacgcacgcggcggtggagaaggccggggtgcaggggctggagctggtggtgtcggagaccggctggccgtcggccggcggcgagggcgccagcgtggagaacgcggcggcgtacaacaacaacgtggtgcggcacgtcgacggcggcacccctcggcggcccgggaaggccctggagacctacctgttcgccatgttcaacgagaacggcaaggccgagggcgtg

SEQ ID NO: 2029 - DNA, 263 bp, Zea mays
gacagtgaaacccacaatctaaagaaggaaaccatcaaggatcagtatgaagtggtgaaaacaagaacctcaaactcaaataagtacaaagagggttctcatgttatggagtatggtgataagaccttcaaggatgagaagctttccttttatcaaggttttgatcctgctaatgccaacattgcaaacatgctgctttggccaggcccaaagggtgcagtcaatcaaagagatgctgatcttctcttcatgtggaagaggta

SEQ ID NO: 2030 - DNA, 267 bp, Zea mays
gtcaaggagtgcggcgacgtgttccgaggggtcggctccctcgtcgacgtcgccggcgggctcggtggtgccacccagaccatcgcgaaggctttcccggacgtggcgtgcagcgtgctggaccttccacacgtcgtcgccaatgctcccaccgacaccaccgtgaagtacatcgccggcgacatgttcgagagcattccgtcggcaaacgttgtcttcctcaagtggattctgcatgactggggtgatgccgaatgcgtgaagata

SEQ ID NO: 2031 - DNA, 313 bp, Zea mays
tttcagtgttcgcaactcaggcacctgtaaattttgtatgccttcacgccgtgaagccacatttgccgccattggcaatggccgtatccactgtttcaatccatatatttggcgatgtgccttcttcacctcttgttgggcttcttcaggacaaaatcaataattggagggccacagctcttattttgacatccatccttttcgctgctgttgtgttctggttcattggcatatttatccctagcgtcgatcgtttcaatgaagagagcgagcatggccttactgtcgccgagagatcaaatctcaggccgct

SEQ ID NO: 2032 - DNA, 316 bp, Zea mays
cctctgctctcccccacctcccggtccggcagcagagagcgggggtgcagagagatcgagatccggaggccgcgagtgggagcgccaccaccagcgtctgcggcaatggcgggcacggtgacggtcccggggtcgtcgaccccctccacgccgctgctcaaggacgagctcgacatcgtgatcccgacgatccgcaacctcgacttcctggagatgtggcggcccttcttccagccctaccacctcatcatcgtgcaggacggcgacccgaccaagaccatcaaggtgcccgagggcttcgactacgagctctaca

SEQ ID NO: 2033 - DNA, 315 bp, Zea mays
agcctgccgagcacatcccactggagaagcatcaaacagcatgtgctatctcatggttcttcaaggcctttctcccgaaagcattcctcggacacctccttgagtgattctacaagtgtgcctgcagagggcgggccaatgttggtgaacatccctagaacaacgaaacagggtgtcgaatatgggagaccgccgtctgtgtcgtcatccactctggttgaactaacaaccaggctagatttcttcaaagaacggcggtcacaattgatggaacagctccacagcctcgatttagggcatggatccacgtcccag

SEQ ID NO: 2034 - DNA, 248 bp, Zea mays
tgcctttaccggtggctgcacatccatgcacattcgccagactgcccagtgtgcaaggctcttgtggaggaagacaagcttgttcccctttatggacgcggcaaggatcgtgttgacccaaggtcaaagaacatgcccgacggtgagattcctcaccgcccaactggtcagaggcctgccccagccccccaggccgatgctaacaacaactttgccaatgccaatccaaatgcgaatccatggttcat

SEQ ID NO: 2035 - DNA, 311 bp, Zea mays
ctctgaggtgtcttcttcagagcaaatgaaccttattaagcaactcagacaaagaacgagtgctccaatcaaagatgtcaaggcctctctagttacctgcaactgggatattgaggctgcacagaaggacctaaggaagagaggtgttgctcttgctgccaaaaagtcttcacgcactgctgctgaaggtttgctagctatcgcacaagatgacaaaagggctgctgtagttgagcttaactgtgaaactgatttcgtagcaagaaatgatgttttccagtacctggcttcatcattggcaaagatggctt

SEQ ID NO: 2036 - DNA, 307 bp, Zea mays
cttccctcccgacccactatcccaaaaccgtagcgccctcgcctgctcgccgccgccgtcgttgcgagctccccatcttcctccgtcaaccatggcgacccagatcagcaagaagaagaagttcgtcagcgacggcgtgttctacgccgagctcaatgagatgctgacgcgggagctcgcggaggacggctactccggcgtggaggtgcgcgtcacaccgatgcgcacggagatcatcatccgcgccacgcgcacgcagaacgtgctcggcgagaagggccgcagatcagggagctcagtctgtcgt

SEQ ID NO: 2037 - DNA, 308 bp, Zea mays
gttctaacaaaaacccagatgctgcctggtacgacaagatggaggcttgcataactccactaccagacgtcagtgacttaaaggaggttgctggcggctcgttgaagaaatggccggagcggctcactgcagtgccgcccaggattgccagtggcagcatcgagggggtcacggaagacatgtttgtggaagatactgagttatggaagaagagagttgggcactacaagtccgtgattgctcaactcggccagaaaggccggtaccgcaacttactggatatgaatgcaaagtttggcggattcgct

SEQ ID NO: 2038 - DNA, 296 bp, Zea mays
gcagagaataccacggttccgtcgccagggcgtccatccgatccgcgacgatccacaggccacagccatggcgatggcttacaagatggcgacggaggggatggacgtgaaggaggagtgccagcgctggttcatggagatgaagtggaagaaggtgcaccgcttcgtggtgtacaggatcgacgagcggtcgcgcgccgtgctggtggacagggtgggcggccccggggaggggtacgaggagctcgtggccgcgctgccaggtgacgactgccgctacgccgtcttcgacttcg

SEQ ID NO: 2039 - DNA, 310 bp, Zea mays
caaatccgatgacatggcagctctgtacgagtcgttggcggcggacggcgtactggagacggacgcggcgctgctggccgagatgcgcgccaggatcgacgaggagatccggaagctcgacgagaagattgctgatgcagaggagaacttgggtgagagtgaagtgcgtgaggcccatctcgccaaatccttatatttcataagggttggggagaaggagaaagcactggagcagcttaaagttactgaaggaaaaactgtagctgttgggcaaaagatggaccttgttttctacacactacaaattgga

SEQ ID NO: 2040 - DNA, 310 bp, Zea mays
cagatttggagtatgattatatcaacccatatgattcatcgtctcgcatcaacgctgtggtgctgatagaatactcactccaaggggccctgtgtgcttctttcctcttgacattgcattggttcccgtttctagtcatgacaccagtaacatactaccatgtcaaactgtatttggctcggaaacatcttgtagatgtcactgaaatttttagacaattaagtgacgagaagaagtacaggatgatcaagcttgccttctacttctgcctatttattataactatttacaggcttgtaatgacagctgg

SEQ ID NO: 2041 - DNA, 265 bp, Zea mays
ctagatcgcgagccgccgcccttttttttttttttttgtgcgaagaaattttattggctcttatttattccatctggtcacctcatccatctttcaatgggacaacacaacgcgtgtgaattaagccgtaggttattcatcagccttccaggacgacaggggaggtgtctcggaatccttccaagtgttgagggagtcatggtagcgatcgccctggacgcccgccgacgcgtaagactcgagctcagccatgtccggaggcgtg

SEQ ID NO: 2042 - DNA, 301 bp, Zea mays
cagcatcggtggcattcgggtccaatgcagctattcaggctttgtttaccggacatcatcaaatgcaagattgcattttggaagaaggcgaacctgatattccttttcttcctgctccggaagctcatactgcctttctactccttcacgctgttctgcatcatcctcccgatgacgatgttcgtgccggaggcgagctccccgactgggtggtgtgctacgtcccggccctgatgtccctgctgaacatcctgccgtcccccaagtcgttccccttcatcatcccgtacctgctcttcga

SEQ ID NO: 2043 - DNA, 301 bp, Zea mays
agacgctgttgagcttcccttgactcatcctgagttgtatgaagacattgggatcaggccacccaagggagtcatattatatggcgaacctggaactggaaaaactctactcgccaaggctgttgccaattcaacatctgcgactttcttgcgtgttgtcggtagtgaacttattcaaaagtaccttggggatggtcccaagctagtcagagaattgtttagggtggctgatgaactttctccctcaatagtcttcattgatgagattgacgcagttggaacgaagaggtatgatgctcat

SEQ ID NO: 2044 - DNA, 236 bp, Zea mays
ctccaggtaaggcaagggttcgtactcatggcgccgccgcagccaaagtcgggccttttcgttggcatcaacaagggtcatgtcgtcaccaagcgcgagctgcctccccgcccgtgccaccgcaaggggaaatcaacgaagagggtgtctatggtcaggggcctgatcagagaggttgctgggtttgctccttatgagaagcgtatcactgagcttctgaaggttggcaaggacaa

SEQ ID NO: 2045 - DNA, 239 bp, Zea mays
cttctagagctcaccaacgatctccccatgctccctttagtcatcgcttgttcttctcatatccaagaccatagcagatagctttaacaagggagtttatgatcagatagtggtgatgaaaggcttgccgtacatggaggctcatgctgaaccatacatgaggcacttggttgctggtgatgtggtgtctggcccactaatcaccttttctggggttgagaaggtggggaacattgttc

SEQ ID NO: 2046 - DNA, 300 bp, Zea mays
ccgtccttcacctccgccgccgaatccgagactctgatctcgggttcaccgcagcgcacagagcacccccgactcccgtcccgatccgcgctctcctctacgacgcttcagtcatggcaggaatggcacccgagggttctcagtttgatgctaagcactatgattctaaaatgcaggagctgctgagcactggtgagactgaggagttcttcacttcatatgatgaagttttttgaaagttttgatgacatgggccttcaagagaatcttttgagaggcatttatgcatatggttttgag

SEQ ID NO: 2047 - DNA, 252 bp, Zea mays
ccgctcgaggagggccccttcgagctcaacgacgtgttcgccatcgtcaacgccgcgccggccatctccctcctcgcctacggcttcttccaccgcggcatcgtgcccggcctctgcttcggcgcgggcctggggattacgctgttcggcatggcctacatgttcgtccacgacggcctggtccaccgccgctttccggtcggccccatcgccgacgtgccctacttccgccgattggctgcttcgaacaag

SEQ ID NO: 2048 - DNA, 298 bp, Zea mays
ccattcctccccaaaacacatcctgcgatcctcgaagcctccgccgagcatcgatcatgtcggcctactgcggcaagtacgcgggtacgttccatcgtctcctccttcgttgctgatctgcttgtgatgtcgtttggcctcgtgtgtcgtagatctacgatctactagttgttcgttgttgatgccctcagatctacctgcgtttgacgagtatgttaacgattcgtctagctctgagagacccaagggatttgcggatccttttttagatccgtacaggctcttgcggtcgtgccta

SEQ ID NO: 2049 - DNA, 285 bp, Zea mays
cacctaccgcgcctgcaccatcccctaccgtttcccctccgacaacccgcgcaaggccacccctgtcgagatccaatggattgacctctttctcaactctgtcccgtccttcaaacagcgggcggagaacgaccccaccgtacccgatgcgcccgcgaaagcgcagaagttcgcgcagaggtacacgtcaatgcttgaagagttgaagaagaatccggagagccatggaggaccaccagattgcatacttctttgtaggcttcgtgagctagtactcagagagct

SEQ ID NO: 2050 - DNA, 300 bp, Zea mays
agaagatcaaggacaagatcaccggcgagcacggcgacaagtccggcgaccacaaggaaaagaaggacaagaaaaagaagaagcacggcgagggccacgaccacgacggcggccacagtagcagcagcagcgacagcgactgagatctggtgtcgcagcacaggtgcaacacatgtatgcttgctggatggaggattcataccagctgatgctgatgtagtgtttcactggtgtcatgcatgtatcgtgctattataatcaaaaagaaaaaagaaataacagtcagggatggtttgtttg

SEQ ID NO: 2051 - DNA, 279 bp, Zea mays
cgcatctgtcacgcgccgccgagcacgtccggcgccggtgcggcaggcgaaatccgagagcactcctcccccgctacgccgcaccgcccatggccgcagctagccgcagatagagagaggcgcaggcgagggcgtgcagatccagatccggtgggcgggaaggacttgatcgcccccaccaccatggccggcgcggtgtcggcgctcttcctgctggacatgaagggccgcgttctcgtctggcgcgactaccgcggcgatgtctccgcgctccaggcc

SEQ ID NO: 2052 - DNA, 278 bp, Zea mays
gtcacgggtgagtgagaggttctcgcgcgtgagtgatggtcaacagtcaacactgctgatggtgttgtgtcattgtgtgcccgtgcgtgtgtgtgcgcgtcaggcgacttcgagaagttcacgagggtgacgatgatcctcccgctgacgggcgagcagtacgcggagaaagtgacggagaactgcgtggcgttcttgaaggccgccggcctgtacacggacgccgagggcgtcgccgtggagaagttcagggaggtgttcaagccagatactttcgc

SEQ ID NO: 2053 - DNA, 280 bp, Zea mays
  unsure (1)..(280): unsure at all n locations
cgaaccccaaaattaaggtcctctgggactcggaagttgtcgaggcctatggcggcgcaaacggcggcccattggctggcgtaaaggttaagaacctactgaatggtgaggtctcggatcttcaggtgtctggcctcttcttcgccatcgggcatgagccggcgaccaaattcctgggcggacagcttgaactcgattcagatggttatgtggaaaccaagccaggttccactcacaccagtgtanagggtgtatttgctgctggcgacgtgcaggacaa

SEQ ID NO: 2054 - DNA, 280 bp, Zea mays
tgcacttctaatgggactgaacatgtcctggactgcaatcactgcagctcttgttcttctggcactcgattttacggacgcacaagcttgtcttgagaaggtgtcatattcactgctgatctttttctgcgggatgtttatcactgttgatggcttcaacaaaacgggcataccgaacacactatgggagttagtggaaccatattcacgaatcgatagtgcgaaaggtgttgcacttcttgccgtggtgattcttatcctttcaaacgtggcctctaat

SEQ ID NO: 2055 - DNA, 280 bp, Zea mays
cgcgccatgggatacctccgggttggccgccgacttcgactggaagaagaccgcggaccggtgatgcagctgtacacggaggcaacagatggctcctacatcgagcacaaggagagcgccatcgtgtggcaccaccacgaggcggatccggacttcggttcctgccaggccaaggaactgctcgaccatctcgagaacgtgctggccaacgagcccgtggtggtgaagagaggccagcacatcgtcgaggttaacccccaggtgagcggcgagccggatg

SEQ ID NO: 2056 - DNA, 238 bp, Zea mays
cgatctcagccatggcggaggtggagcagcaacaggacacgccgaagctgttcaaccgctggaccttcgatgatgtccaggtgaacgacatctcgctgaacgactacctcgctgtgaacgcgacgaagcacgcgatgtacctgccgcacaccgcggggcgttactccaagaagcggttccgcaaggcgcagtgcccgatcgtcgagcgcctcacaaactccctcatgatgcacgggcg

SEQ ID NO: 2057 - DNA, 282 bp, Zea mays
  unsure (1)..(282): unsure at all n locations
caagctaagcaagtgccaaccaacgagtagcaggaaacatgtctccgcccgtcaagatcctcggccactacgcgagcccgtactcgcaccgcgtcgaggccgctctgcggtcaagggcgtgccgtacgagctggtccaggaagacctgggcaacaagagcgagctgctgctcgccaagaaccctgtccacaagaaggtgcccgtgctcctccatggcgacagggccgtctgcgagtcnctcctcatcgtcgagtacgtcgacgaggccttcgacgggccgtc

SEQ ID NO: 2058 - DNA, 272 bp, Zea mays
catggattatcagcggacaacatggggcaaggttacaactgtgctgcagactggtagtccaggcattggtggactcccagctaaggcaatgctgcagaaaatgcgaatgtttagtacgtactttgaggagatatacgcagcgcagtcggaatgggtgatagcagatgaccagctaagggtggacattagggcagcagtggaggagacagtgatgccagtttacgcctctttaattgccaagttgaagtcttctcctgaaactgggcgggatt

SEQ ID NO: 2059 - DNA, 274 bp, Zea mays
cggccttgattactacactggtgtcatatatgaagccgttttcaagggtgcagctcaggttggctccatagcggctggtggtcggtacgacaaccttgtgggtatgtttagtgggaagcaaatccctgctgttggtgtgagccttggaattgagagagtctttgcaatcatggagcagcaggagaaagaaagaaatgagaagatccggcctacagagacagaggtgctggtgtcaattctgggaaaggaccttaccctagctgccgagctcgtg

SEQ ID NO: 2060 - DNA, 254 bp, Zea mays
gtttcagcttgtatacccactctgtcgcacagcgtcgcccgtcgccgctgagatcctaggaagaaatggagctctctcgcaagctcttcacggccgtcctcctcgtcatgctgctgctgctgtccgcagaggtcgggccggtggcggtggcggaggcgcggacgtgccagtcgcagagccacaggttccggggcccctgcctccgccggtccaacttcgccaacgtctgcacgaccgaggggttccccgacggc

SEQ ID NO: 2061 - DNA, 275 bp, Zea mays
ccggcgtacgcggcggagctgcgcgggccggtgcccgcggtcagccggcgaccacaacctgctcgcgctggacctggtgtcccagttccggttcgacaaccagtactaccacaacatcctggccatgaacgggctgctcagctccgacgagatcctgctcacgcagagccgcgagaccatggacctcgtccaccgctacgacgccgaccagggcctcttcttcgaccacttcgccaagtccatggtcaagatgggcaacatctcgccgctcaccg

SEQ ID NO: 2062 - DNA, 274 bp, Zea mays
attgatgaagtggacagtacagttcacgtatcatgggtccagcctagagtgcttggaattccacaggttaaggctttgcgcgaccgcctggatgcctgggttggaaaggtgcataccacattgctttcagttgaggcggaaacacctgatcttgttgctgtgtaatttcacagctgttacacttccgcgagacgcttggtcagcaaggtcccatttgcaaaatgtgagatgctttgtgtgacacgtagtcattttctggataatgagatctgct

SEQ ID NO: 2063 - DNA, 266 bp, Zea mays
tccgtgaagtacatcgccggcgacatgttcgagagcattccgtcggcaaacgttgtcttcctcaagtggattctgcatgactggggtgatgccgaatgcgtgaagatactgaagaactgcaagaaggctatagcgtctcaagaagaagggaagtaatgatactggatatggttgttggagcagggtcatccgacgagaagcatgtggagacgcaaatcgtattcgatctctttatgatgtttatcaatggcactgagcgagatgag

SEQ ID NO: 2064 - DNA, 238 bp, Zea mays
gaaaattccattccaacgacatcgaaggagcctgcgaagcgagcgagagtctataatggcggacggaggcgagctgcagctgctgggctcatggtacagcccctacgtgatccgcgccaaggtggcgctggggctgaaggggctcagctacgagttcgtcgaggaggacctctcccgcaagagcgacctgctgctgaagctcaacccggtgcacaggaaggtgcccgtgctggtccac

SEQ ID NO: 2065 - DNA, 270 bp, Zea mays
ctggcaacatctcaagatcaaaaagaacctacattggaaaaataaggtctaacttccttggcacaagatttttaatttatgatacacaaccgccctataatggggctgtagttcctcctgccggaaggacaagcaggaggttcaactccacaaaagtctctccaaagctgccttcagtcagttacaacatcgcacaggtatcgtatgagttaaatgtccttggcacgagaggtcctaggcggatgcgttgcatcatgcactccatacctg

SEQ ID NO: 2066 - DNA, 268 bp, Zea mays
atcggcgacaacgggctgcacggcgagatcccgccgcacctgggcaactgctcggagctggagacgctcggcctggcctactgccatctgaatggcaccattcctgctgagctcggcaacctgaagctgttgcagaagctggcccttgacaacaacgccctcaccggtggcatcccggagcagatcgcgggctgcgtaactatgcgctttctgtcagtgtctgataacatgctgcaaggcaacattccttcgtttgttggaagcttca

SEQ ID NO: 2067 - DNA, 267 bp, Zea mays
aagggtttcgttgcacaagttgctgatgttatgtcaggtcgaaccgcccctatgaatgaggagcagaaaaaagaagcggagaaaacaattgttggtgaatttagtagtgtcaagcatgtcaggggaatcctctccatgggaaggcactctgatccagacagtgctggctcttccttttctattcttctgggcaattcaccgcatcttgatggccagtatgctgtatttgggagggtcactaaaggtgacgatacattgactaaacta

SEQ ID NO: 2068 - DNA, 268 bp, Zea mays
gaagcattgtgtctccactgttcagtgttacatgaagcagcatgaactaacaatggatgaagcatgtgagcagataaaagaacttacagaagattcatggaagttcatgattgaacaaggccttgcactaaaagaatacccgataattgtgccacgaaccgtactagagtttgcacgaactgtagactacatgtacaaggaagctgataagtacactgtctcccatacaatcaaagacatgttaacatcgctttatgtgaagccggta

SEQ ID NO: 2069 - DNA, 318 bp, Zea mays
tgccagaggattgagctatctgcactccagaaagattgtacatcgggatgtgaaaagcgaaaacatgctgcttactccacagagaaaccttaagattgccgatttcggtgttgctcgtgttgaggctcagaatccaaaggacatgactggtgcaacaggcacacttggttatatggctccagaggttcttgatggtaagccatacaacaggaagtgtgatgtttatagttttggcatttgtttatgggaaatctattgctgtgacatgccttacccagacctaagttttgccgatgtctcatctgccgttgttcacca

SEQ ID NO: 2070 - DNA, 310 bp, Zea mays
ggacaagcttgacactgtcttttcctgcgcattctgcaaccacgggagtagtgttgagtgccgaattgacatgaagaatctgattggcgaacatcttgtagaatctgtcaggaaaacttcagcacaactgttaatgcactcactgagcctattgatatatatagtgaatggattgatgagtgtgagcgtgtcaacactgttgaaggcgacgatgatgcgtgacttgcaccatgtgatgaaactgatacctacaatcgtaatgtaatgtgctggtattctcgaatgccatagcccatagtcagcaatggct

SEQ ID NO: 2071 - DNA, 309 bp, Zea mays
gaaggatggtgcacaatggttggttgataatacagacatcaaactagttggagttgactacttgtcagtgggcgcatttgatgaatgcattccagctcatctagtatttcttgaaaaaagggaggtcatacttgtcgaagccttgaatctggagcatgttagccctggaatatacatcttgcattgcttgccactaagattgcggggtgctgaaggttctcctgcaagatgcatcctcatcaagtgacatgggatggtgtgaggacccaataatatggagctgggctagtactgatccaatcgacacta

SEQ ID NO: 2072 - DNA, 217 bp, Zea mays
ataaaaccctaaaacctccggctgatcggttggtgttgaggcgagtggaagcttcgagttttttttttcttccttttggcttactgcgcaagaagaagggtaacaagaggacggcggcgatggcgaagaggctgctcccatctctgaaccgggtgctggttgagaagctggtgcagcccaagaagaccgccggcggtatcctcctcccggaaaaatc

SEQ ID NO: 2073 - DNA, 246 bp, Zea mays
tgtgcatggaccttgcctaccagtatactttgctagtagatggctttggtgtggagaggaccaaggagatcacagtggtggacaaggtgaagcacggagagtactacgtcgaagctgcatggcctctaggctctgctattgaggctgtgtcgtcaaccaaagaatggcgtcaagataaatgatctgttggtccaatctcatatgctagtattgtatctgacatgtacagtactggcacaacttatg

SEQ ID NO: 2074 - DNA, 276 bp, Zea mays
caccacctcgcctgcgatcttcgtagcctccgtcgcgtcgagcatcgatcatgtcggcctactgcggaaagtacaaggatgagctcatcaagaatgctgcctacattggcacccccggcaagggtatccttgctgctgatgagtccactggcaccattggcaagcgcctttccagcatcaatgtcgagaacgttgaggagaaccgccgtgccctccgtgagctcctattctgctgccctggtgctctccagtacatcagcggtgtgatcctcttcg

SEQ ID NO: 2075 - DNA, 216 bp, Zea mays
tgccgtccgcgcaaaaccctccctgctcagactcgtctgctgcagctcctcctccgccgccgtatcaaacgcactctcctccgccgccgcccgaggcaagatggttctccagaacgacatcgaccttctgaacccgccggcagagctcgagaaactcaagcacaagaagaagcgcctcgtccaatcccccaactccttcttcatggatgtcaagtg

SEQ ID NO: 2076 - DNA, 299 bp, Zea mays
cggctcgacgttggcttcaatgttaagaatgttgctgtgaaggatctgaagcgtgggtatgtggcctccgactccaatgatgaccctgccaatgaggctgctagcttcacgtcccaggtcatcatcatgaagcaccctgggcagattggcaacggctatgccccagtgctggactggcacacctcgcacattgctgtcaagtttgcggagctcattaccaagattgataggcggcttgtcaagagcttgacaaggagctcaattcctcaagaatggtgatgctggtatggtgaagatgg

SEQ ID NO: 2077 - DNA, 299 bp, Zea mays
agcaccagccatggcgaacgcagcttcttctctgtttcctactcgccgcctccgcgccgctaatcgtcgccacggccaagaaatccggggacgtgtcggagctccagatcggcgtcaagtacaagccggaatcatgcagcattcaagctcacaaaggtgacaaggttaaagttcactaccgtggaaaacttactaatggaccggttttgaatccagcctatgaaagaggtgacccgattgaatttgaattgggcactggacaagtgatcaaaggatgggatcagggtctcctgggaatg

SEQ ID NO: 2078 - DNA, 302 bp, Zea mays
  unsure (1)..(302): unsure at all n locations
cagcagccaaaccctacataggcgncgccgcatgctcccacccgcatcgtcgccaaagatgcagatctttgtgaagactctgacggggaagaccatcactttggaggtggagtcctcggacaccatcgacaatgtgaaggccaagatccaggacaaggagggcatcccccctgaccagcagcggctcatcttcgccggcaagcagctcgaggacggtcgcaccctcgccgactacaacatccagaaggagtccacactccacctggtgctccgcctccgcggcggcgccaagaagcgtaaga

SEQ ID NO: 2079 - DNA, 303 bp, Zea mays
gacggataaagtgacgaaccctctgttcgagaaaaggccgaagcagttcggcatcggcggcgcgttgcctcccaagaaggacctgcaccgattcgtcaagtggcccaaggtcgtgcgcatccagcgccagcgtgcgcatcctcaagcagcgcctcaaggtgcctccggcgctcaaccagttcacccgcaccctcgacaagaacctcgctaccaacctgttcaagatgcttcttaagtaccggcccgaagacaaggctgccaagaaggagaggcttctgaagagggcccaggctgagaatgaag

SEQ ID NO: 2080 - DNA, 274 bp, Zea mays
  unsure (1)..(274): unsure at all n locations
gtttactcttgcagatattgatcaggcaatatgtgtctcacatacaagcaaagagaacactgtcttgaggtctgggatatctccagagaaggttttcatggttcctaatgcagttgacactgcaatgtttactccctctcccaagcgcttanactgtgatgaaatagttattgttgtggtcagtagattagtataccgaaaaggcgccgaccttcttgttgaagtcattccagaagtgtgtgggctatttccaaaggttcgcttaattgtgggt

SEQ ID NO: 2081 - DNA, 292 bp, Zea mays
gtcgacggaggcgtgccagcagtaccaggacgccgggtgcgccctccccgcgggcctctgggccgagatcgtcgacggcctgcagtgggtggacgagtacatgggcgccaccctgggcgatccgcagcgcccgctcctgctctccgtccgctccggcgccgccgtgtccatgcccggcatgatggacacggtgctcaacctggggctcaacgacgaagtggccgccgggctggcggccaagagcggggagcgcttcgcctacgactccttccgccgcttcctcgacatgttc

SEQ ID NO: 2082 - DNA, 226 bp, Zea mays
gcaactacaactttgagaaacctttcctgtacctcgcaaggaagctggctggtgatccgaaccttcactttgttgaagctgttgctcttaagcctccggaagttaccatcgacatggctatgcagcagcagcatgaagctgagcttgctgcagcagctgcacaacctcttcctgatgacgatgatgatctgattgagtagaaaggatcatgagtcttgaacttgag

SEQ ID NO: 2083 - DNA, 204 bp, Zea mays
aagttgcaaacagtggcaaagactgctggtttgaatcatgaagaatggcttgctaatgcggatcgctgggttgctggtttcctagagaagtttgagcaacactgccacaatatggaaactgcgatcaaggatcggatacaggagaggctagggaaacagttgagcaaaggaataatcgctggtcttgtgcaggaaccggtgaca

SEQ ID NO: 2084 - DNA, 291 bp, Zea mays
agatgagcaccaaggaggtggacgagcagatgatcaacgtgcagaacaagaactcctcctacttcgtggagtggatccctaacaacgtcaagtccagcgtgtgcgacatcccacccgtcgggctgtccatgtcctccaccttcgtgggcaactccacctccatccagaaattgtccgccgcgttaagcagcaattcacggctatgttccggcgcaaggccttcctgcattggtacaccagcgagggcatggacgagatggagttcaccgaagccgagagcaacatgaacga

SEQ ID NO: 2085 - DNA, 294 bp, Zea mays
gcgctgccgatctgagatcgagcgaactaaagctttttcatcgagatggtgcttgtactgcatgctaacagtggtaacaaaaatgcattcaaaacactaattgccgcagaatacagcggtgtcaaggttgagttggtgaaggactttcaaatgggtgtctccaacaaaactccagagttcctcaagatgaaccctattgggaagattcctgtcctggagactcctgatggtcctgtttttgagagcaatgcaattgcaagatatgttactcgcttgaaggctgataacccactt

SEQ ID NO: 2086 - DNA, 233 bp, Zea mays
gtttcgtcatctactactggaagcgccacgcctacatccccaaagatgccatccccacaaacgaagctatgaagaagcaaatagctgtagcatccaaggctatgcctttttactgtgctcttccaactttatctgagtatatgatcgagagcggatggacccggtgttactttaatatcagcgaaatggggttttctgcgtacctttgttatatggctatgtatctcattttt

SEQ ID NO: 2087 - DNA, 292 bp, Zea mays
ggaggcggacaaggtaagcagcaatcgcaggaaccctagcgccgccgcacccgcaggaatgggtatcgacctcgtcgccggtgggaggaataagaagaccaagcgcactgcgcccaagtctgacgatgtctacctcaagctcctcgtcaagctctaccgtttcttggtcaggaggaccaagagcaatttcaacgctgtcattctcaagaggcttttcatgagtaaaaccaaccgaccaccaatctccatgcgccgccttgtcaagtttatggaaggaaaggagaagaacatt

SEQ ID NO: 2088 - DNA, 294 bp, Zea mays
ccgcccccgcccccgcccacgcccactcctcgctgccaccactcctgtcacatcttcccgcgccgacgcagccgccatggaccccgtcgccacatgggggctaaccccgctcgcgggcgccgacccggagatctacgacctcctggagcgcgagaagcggcgccagcgtcgcggcatcgagctcatcgcctccgagaacttcacctccttcgccgtcatggaggcgctcggctccgcgctcactaacaagtactccgagggcatgcccggcgcccgctactacggcggcaacga

SEQ ID NO: 2089 - DNA, 250 bp, Zea mays
ctcgatcgtcgtcatcacgctcgaccgcacaactgcaccaatgggggaggagacctaaaaactactacatcttttagctacacatctagctaaatatcgagaggggtaaataaggacgagcgggcgcgagctataagagcagctgcaggtactaccatcatcgtcgtcgtcgtcgccaggatgaccgtcgtcgacgccgtcgtctcctccaccgatgccggctccccttctgccgccgccaccgcggtat

SEQ ID NO: 2090 - DNA, 295 bp, Zea mays
gccgccaccaggtgcagagtctttcgtcatctcttctccggcgaagaacccccagtcgcccaccagatcacttgttaaactttgttgaggggtgatggcggtttctttcgcaaacctcaactccgaggcagggcttaaaaagcttgatgagtaccttctcactcgcagctacatcactggctaccaagcttccaaggatgacttggctgtctacacttcgttttcggctgctccctcgtccaagtatatcaacgtagcaaggtggtttaaccacattgatgcgctcgtgaggctg

SEQ ID NO: 2091 - DNA, 305 bp, Zea mays
cagcaaacgcgccattgacgcgcactcgtagtcttgactcttgcgtgcttccctcgtcttctcggacgttccgttccatcgccatggcggaccagcttagcgaggagcagattgccgagttcaaggaagctttcagcctcttcgacaaggacggcgacggttgcatcacaaccaaggagctcggaaccgtgatgcggtctctcgggcagaaccccaccgaggcggagctgcaggacatgatcgccgaggtggacagcaacggcagcggcaccatcgacgagcaggagttcctgggcctgatggcg

SEQ ID NO: 2092 - DNA, 302 bp, Zea mays
acggagagatggagcggctgatgcgtgacaagagcatcctgctggcggaggtggtgaagctgcggcaggagcagcagagcacgcgggcgggcatgcgggccatggaggagcggctgcggcaccggagcacaagcaggtgcagatgatggggttcctggcgcgggcggtgcagagcccagacttgttccagctgctggcacagcagcaagcccggctgatggagctggagggcgcggcgctgctctccgccgcctcccggaagcggaggcggcccatcggcgccgcgccggccaacggcggct

SEQ ID NO: 2093 - DNA, 287 bp, Zea mays
ggatataatcctgcaacatgggcgctggaagttagctctcctctatccgaggctcgattgaacatgaattttgctgaaatttatgctaactctgtgctttataggaaaaatcaagagctcatcaaggagttgagtgttccctcaccagactaccaggacctgtcattccctacaaaatattcgcagaatttctacaaccaatgcgccgcgaacttttggaagcaataccgttcctattggaagaatccgccctacaatgctatgcgctacctgatgacatttctctt

SEQ ID NO: 2094 - DNA, 285 bp, Zea mays
tatggatcggcccgtaattatcaggcatctgctgagtgattctacggatccatttaaccgctcccacctcactcaagacatgctgataccaaacacggagctcaagttgcagatcgaggaatttgtccagtcccagcagttgagaaagcgaactgctgcggtgtcagagattggccaagcggatggtgctgatgatatggcagaatgaattgtgcgagcagcagggatggacattttcttttgtggtggggaaagacggatgctaatttacgcgaaatttaccag

SEQ ID NO: 2095 - DNA, 288 bp, Zea mays
tgaggagatggttgagtatatggagaaggtggctaagactgtagatgtggaagagctcactgttgaggagcgtaaccttctgtctgttgcatacaagaatgtgattggggctcgccgcgcttcatggcgcattgtttcttccattgaacaaaaggaggagtcccgtaagaacgaagagcatgtgaaccttatcaaggaatatcgtggcaagatcgaggctgaactgagcaatatctgtgatggaatcttgaagctgcttgactcccacctagtgccttcttctactgc

SEQ ID NO: 2096 - DNA, 287 bp, Zea mays
gatgacgcaaggaagtacttccagcagctgatcaacgctgtcgattactgccatagccgaggcgtctaccaccgcgatctcaagcctgaaaatctcctgcttgatgctagcggcacgctcaaggtttcggattttggactgagcgcactatctcaacaagtccgagaggatggtctgctgcacacaacctgtggaactcccaactatgttgctcccgaggttataaacaataagggctatgatggagctaaggctgatctgtggtcatgtggagtgattctctttgt

SEQ ID NO: 2097 - DNA, 290 bp, Zea mays
gagaggtatacgaagatgagcaacgctatgaagacgtatgggaagggcatcttcttctcgctgtgcgaatgggggaggcaaaaccctgctacctgggcaggcggcatggggaacagctggagaacgaccgatgatatcgccgacaactggggcagcatgacgtctcgtgcagaccagaacgacaggtgggcttcctacgccggacctggcgggtggaacgatcctgacatgcttgaggtgggcaacggcggcatgtccgaggcggagtaccgctctcacttcagcatctg

SEQ ID NO: 2098 - DNA, 300 bp, Zea mays
gggcaccatctttttcacccaagagggagatggccctaccgctgtcaccggaagtgtctctggcctcaagcctggcctccatgggttccatgtacatgcacttggtgacaccaccaatggatgcatgtcaactggaccacactacaatcctgcgagcaaggagcatggggcaccagaagatgagaaccgccatgctggtgatcttggaaacgtgacagctggagcagatggtgttgctaatatcaatgtcaccgacagccagatcccactgactgggccaaactcaatcattggcagagc

SEQ ID NO: 2099 - DNA, 277 bp, Zea mays
ctttaccggggtacatattgcagtcaagatgttgctattaaagtgctgaacctgagagaataaatgcagacatgcaacgtgaatttgctcaggaagtatatattatgaggaaggtccgtcacaagaatgttgtgcaatttattggggcttgcactaaacccccaaacctatgtatagtcacagaatttatgtccggtggaagtgtgtatgattacctccataaacataaaggtgttttcaaacttcctgctttagttggagttgcgacggatgtgtc

SEQ ID NO: 2100 - DNA, 277 bp, Zea mays
ttggcttctcctccccctccggttcgggttcgggttcgtgaggttctccggggttcgggttcgtgggtgatcggatcgagatggcggcgtcggatgttgagtaccgctgcttcgtcggctgcctcgcctgggccacggacgaccactccctccacaacgccttcagcacctacggcgaggtcctcgagtccaagatcatcctcgatcgggagacgcagaggtcccgctgcttcggcttcgtcaccttctccacggatgaggcgatgctgaacgccat

SEQ ID NO: 2101 - DNA, 284 bp, Zea mays
gtcctgaagaagaagcatgctgccgggacctacaaaagcctggtcttttaccttgaagcatgcgaatctgggagcatctttgagggcctcctgccgaatgacataaatgtgtatgcgaccaccgcgtcaaatgcagaggagagtagctgggggacgtactgccctggcgagttcccgagccctccaccggagtatgacacttgcttgggagacctgtatagtgttgcttggatggaagacagtgatttccacaatctgcgaactgaatctctcaagcagcaata

SEQ ID NO: 2102 - DNA, 291 bp, Zea mays
gatcctcccaactggtacctcctcgttcaaggaggccatgaagatgggagttgaggtgtaccacaacctgaagagcatcatcaagaagaagtacggtcaggatgcgacaaatgttggggatgaaggtggttttgcacctaacattcaggaaaacaaagaaggccttgaactattgaaggcagccatagaaaaggctggctacactggaaaggtggtcattggaatggatgttgctgcttctgagttcttcggtgagaaagacaagacttatgatcttaatttcaaggagga

SEQ ID NO: 2103 - DNA, 298 bp, Zea mays
tgacaagagaagaaagcatggcaaagattcctcaaaagcaactgattctctttctggtgcccccaaggctcatccagttagttctgaatcacgtcgagtccaagctgacatagagcaaactctagctctcgtgcgtaagcttgatgctgagaagggcattgatggcaatgtactgtcaagtggtgatcatgacaagtcagatgtagacaaatcacacataggatctatggggcctatagttataatcagaggtttaacgactgtcaaaggcctggaaggcgttgagctcctagacact

SEQ ID NO: 2104 - DNA, 304 bp, Zea mays
tgcgggaaagatgtggaccttagcacctataaggggaaggttctgctcatagtcaatgttgcatctcagtgtggcttaaccaattccaactacacagagctgagccagttgtatgagaagtacaaggaccagggttttgagatccttgcattcccatgcaaccagttcggtgggcaggagcctggcactaatgaggagattgtccagtttgcttgtactcgcttcaaggctgagtatccaattttcgacaaggttgatgtcaatggtgacaatactgcacccatttacaagttcctgaagtcca

SEQ ID NO: 2105 - DNA, 304 bp, Zea mays
cgctctctaccgtccgagaccccaagcaccagcgcggcggcgggggcggcggcgaccatggctgtcggaaagaacaagaggatctccaagggaaagaagggtggcaagaaaaagaccgtcgaccctttctctaagaaggattggtatgacatcaaggcaccgtcggtgttcagtgtgcgcaacatcgggaagactctcgtatccaggacacagggtaccaggattgcttctgagggtctgaagcacagagtctttgaggtttgcctagctgatcttcagggcgacgaggatcaagcttacagga

SEQ ID NO: 2106 - DNA, 306 bp, Zea mays
tagagcctgcgcctcggcttgtccccaccaacccgcagctcgctcccaccaaacccacacccgaacaatggcgtcggcgtccaaggaggaggtgatcgggaagctcaacatccgcgtggtgcggggcaacaacctggccatcgccgacccgctcacccacaccagcgacccctacgtcgtcctccagtacggcgctcagaaggtgaagactagtgtccagaagaagaaccccaatccagtgtggaacgaagtactgcagctctcagtaacaaatcctacgaagccagtgcaccttgaagtttttga

SEQ ID NO: 2107 - DNA, 304 bp, Zea mays
tgcggtattcattgttgccctacttctacacgctgttcagagaggctagtgtaaatggcattcctgtcatgcgtcctttatggttagaatttcctgacgataaagaaacttataacaatggcgaggcatttatggtggggcccagccttttagctcaaggaatatacgaagagggccagaaatcagtgtcggtctaccttcctgggaaggagtcatggtatgacttgagaaatggatctccatacaagggaagcgcgacacacaagctacaggttttagaagatagcattcccagcttccaaag

SEQ ID NO: 2108 - DNA, 301 bp, Zea mays
tccgtgcttctccgccgtcgaggccgcgtcccagtgcgaagagaccacgactcagatggccagccgctgggtccggcccgaggtgtacccgctgttcgcggcaacgggcgtggccgtcggcatctgcggatttcagctcttccggaacatcaccggcaacccggaagtcagggtaaacaaggcagggagggcagctggtgtgcttgagaaccatgaggaggggagacgttacgccatgcatggcctaagaagctttgtgcacgacaagactcctgagatcatgcctgcagttaacaagttc

SEQ ID NO: 2109 - DNA, 303 bp, Zea mays
gctgcctccgcctctcgagtctcgtccacccgtcgtcctcctagctcctctactcgccagtcgccatgggcaagattaagatcggaatcaacggcttcggaaggatcggcaggctcgtggccagggtcgccctccagagcgaggatgtcgagctcgtcgccgtcaacgaccccttcatcaccacggactacatgacctacatgttcaagtacgacaccgtccacggccactggaagcacagcgacatcacactcaaggactccaagacccttctcttcggtgacaagccggtcaccgtctttg

SEQ ID NO: 2110 - DNA, 298 bp, Zea mays
gggcgacggcggcgacgatgtgcccgcgtccgtggactggcggaataagggcgccgtgacggaggtcaagaaccaggggcagtgcggcagtgctgggccttctccacggtggcggccgtcgaagggatcaaccagatcgtgacgggcaacctcacgtcgctgtcggagcagcagctggtcgactgcagcaccgacgggaacaacgggtgcagcggcggcgtcatggacaacgccttctcgttcatcgccaccggcgccgggctccgctccgaggaggcgtacccgtacctcatggagg

SEQ ID NO: 2111 - DNA, 297 bp, Zea mays
ctggattttctgggtgggcccgctcctgggcgctgccatcgcggccttctaccaccagtacatcctccgggcgggcgccatcaaggctctcggctccttcaggagcaacgcgtgatgagcagagctaaagaaaggccttcgctggactgcgtgctggagcaacggcgatcgatcgatctagcgtggggagaggcggataggcgggcgcgcgagggaggagaataagtttgtgccggtggcccggtctcgtcggtcgcttttgttccagcatgcagctgcgtcgcgttcgtgtgcgtg

SEQ ID NO: 2112 - DNA, 295 bp, Zea mays
cggctcgagagggcttctaaaagttcgtcatgttctgttttggtcatttgggcaccaaagtttgcgcctcatttggttctgtaatccgtgagctcgtgcatgtacttggcgtattgcatgcagtgaataatttagcttgggtttgtttgttgggggcagtgttggggacggatttggattggggtttatgcttggcatcgcgtcgtatcgaaactcagctgctgtttcgctgagtaatgtacatttccctggtaatggtacttgtggactctgatgcttttatgggaacgagtgc

SEQ ID NO: 2113 - DNA, 298 bp, Zea mays
aactccttacaagcgaggaaaatgtggaacgtgatgctgttcataaagcactcatgtcccttatacgagaagatgttaaaaattctttacaacctttatttaagcatgtggagcaaggatcagagattcgtgagaagattatttgttttcttcgagacaaggtttttcctcttaaagcagagctactgaaacctcaagcagaaatggagagatttataacggatttggtaaagaaaagtgtgcaagatgtaactggttcagaatttgaactattcatggggtttctgcgaagcttgag

SEQ ID NO: 2114 - DNA, 296 bp, Zea mays
cttaatgaggaatttcagaacagcaaggactatgttcccaacaagagggactggctttcagcttactggactgggttcaagtcaccagagcagatttcgcgtatccgaaacactggagtcaagccagagattctaaaacgcgttggggaagccatgactactctgccagaaaatttcaatcctcacagggctgtgaagaagatttttgatcagaggcgtcagatgatcaagactggagaaggcattgattgggcagttggtgaagcacttgcttttgctactcttatcattgaggg

SEQ ID NO: 2115 - DNA, 299 bp, Zea mays
cccaaaagcagccagcgcaccgcatgtcctcgtcttcggcgcaccagaaggcgtcgccgccgatagaggaggaagcgacggagcacggacccttccccatcgaacagctacaggcatctggaatagctgcacttgatgtgaaaaaactcaaagatgctggtctctgcacagtggaatctgtagcatactctccaaggaaagaccttttgcaaattaaagggattagtgaagccaaagtcgacaagataattgaagcagcttccaagttggttccactcggatttactagtgctagccaa

SEQ ID NO: 2116 - DNA, 290 bp, Zea mays
gttggcactggcgtccaattctttggcatgctcctagttacaatgatcttcgctgtgttgggtttcctttctccatcaaaccggggaggactgatgactgcaatgcttcttgtctgggtcttgatggggctgcttgctggctattcttcttcacgcctctacaagatgttgaaaggttcagagtggaagaagatcaccctgcaaacggctttcctgtttccaggggttgcatttgttattttcttcatcttgaatgctcttatatggggggagaagtcatctggtgctgt

SEQ ID NO: 2117 - DNA, 297 bp, Zea mays
ggaacggcggcggcggcgcggccaggccgacctctacgtggcgtcctacttctacgacagggcctcgcaggtcgggatcatcggcggcgacgcgcccaacgggaggagcaccccggccgcgttcgccgacgccgcgctcaaggtctgctcgctgagcgttgccgatgccgaggccgcgttccccgatgcctgggacgccgagtacctctgcatggaccttgtgtacgagtacacgctgctcgtcgatggcttcggtttggagccgaccaaggagttcacgctggtgacaaaggtgaa

SEQ ID NO: 2118 - DNA, 289 bp, Zea mays
cggctcgaggcaaagcaggcttttgacgaggccatctcggaactggacaccctgagcgaggagtcctacaaggacagcactttgatcatgcagctccttcgtgataacttgaccctatggacttctgacatctcggaggaccctgcggaagagatcagggaggcgcccaagcacgactcgagcgaggggcagtaaagccggctttacgtgcctagaagctagtacctagtgtttgctgctgtctaatgacactatgcaatgtgatctggaccctggtttcttgggtgcg

SEQ ID NO: 2119 - DNA, 290 bp, Zea mays
cggctcgagcagttccacaatgcattgtatcttggggatgccaagaagcgggttgagatcctggagaatgctggacagctacctcttgcttatgttactgctgtcactcatgggctcacagaaattgctgagaggattgcttctgaattaggcgagaatgttccttctctgcctgaaggaaaatcccactcactactgatcccccctgcacctctcacagcgtgtggtgattggccattgcttagggtagtgcgcggtatttttgaaggtggactggatgctactggaag

SEQ ID NO: 2120 - DNA, 291 bp, Zea mays
aggaggcaaagcgaccaagaaaagcacctgcaaagggttcaaagaagggctgtatgaagggaaaaggggggcctgacaatactcaatgtggataccgtggagtgaggcagcgtacttgggggaagtgggttgctgaaataagagagccaaatcgtgtcgacagactctggctgggtaccttcccaaccgcggaggatgcagctagggcctatgatgaggcagccagagcgatgtatggagacttggcacggactaacttccccggacaggatgcaacaacctctgcccaag

SEQ ID NO: 2121 - DNA, 291 bp, Zea mays
tgatgagagagcttttgagctatttcagatgatggaaagctgtggagtaaaaagggacacggcttcatggaatgcactcattgctggttcggtgcataatggtcattctgatagagccctgagaatattctggcagatgcaatcactcttggtgagaccagacttcattacaatattaagtatcattccagcttttgcgaacctagctggattttggaaagtacgggagatccacgcctgcatttatcacaacaatttagaaatggatggcaaaatagcaaatgcactcat

SEQ ID NO: 2122 - DNA, 289 bp, Zea mays
aaaggcatggccgcggacagccgcttcctcatgccaattgtgctgagggagtgcggcgagacgtttcgtgggatcgactcgttggttgacgtcggtggtggccatggtggcgccgccgccaccatcgccgccgccttcccccacctcaagtgcagcgtgcttgacctcccgcacgttgtcgccggtgctccgtctgatggcaacgtgcagttcgtcgcaggcaatatgtttgagagtattccacctgcaaccgctgttttcctcaagaacactctacatgactggggtg

SEQ ID NO: 2123 - DNA, 291 bp, Zea mays
gtgttccgtgtccgcgtccagtgtgtccgctccccctcagtcctagcggtagcgtgcgcgcgggagacgtagatggcggcttcggcggcggcggcggcgacaccggtggcgccgacagaggggacggtgatcgcgatccacagcctggaggagtggagcatccagatcgaggaggccaacagcgccaagaagctggtggtgattgacttcactgcaacatggtgtcctccgtgccgcgccatggctccaatttttgctgatatggccaagaagtccccaaatgttgttttc

SEQ ID NO: 2124 - DNA, 295 bp, Zea mays
tgtgaacccgccgccgacgcagcagcaggagacgcgccaaggagtgcccgcaaggaggcgactatgagggccaagtggaagaagaagcgcatgaggaggctgaagaggaagcgccgaaagatgaggcagagatccaagtaggctgatggggattgtggatggtggtgtcggcatagttgtgttacgtttcttcgatgcgtgagttcatggagagatgtcacatcctagttcgtcgtcaccgtttgccatgggtccaatggctcgtcttggaaacctgcacttcagtaggccatct

SEQ ID NO: 2125 - DNA, 289 bp, Zea mays
cggctcgaggggtttttgattttacccgccgccgctgctcatctcacatccctcgagaagacgcctgctcctcgccgatcgatacgatggccgtcttctccgacctccacaccgccgacggcctcaagtccctcgaggctcacctcgccggcaaaacctatgtgtctggtgactccattactaaggatgacattaaggtcttcgccgcggtgccgtcgaagcctggcgctgagtttcctaatgccgcccgctggtacgagaccgtctctgcggctgtagcctcaagatt

SEQ ID NO: 2126 - DNA, 289 bp, Zea mays
acacggccgactcgtgcagtcctgttgagtgggataataatggttccccaattgttccctgcggcttgattgcctggagcttattcaatgatacatatggttttactcgtgggtccaaggaaataaaggtcaacaggaaaaacatttcatggaagagcgaccgggagcataagtttggcaaacatgtgtttccttccaactttcagaacggaaccttgattggaggggggaaactcgaccctactgtcccactgagtgaacaggaagaccttattgtgtggatgaggac

SEQ ID NO: 2127 - DNA, 293 bp, Zea mays
ctaacatcaaccagagatccatggaaggaactagagatacagagattgcaatggctgcataccaaccccagcatacattggcaaatatgctttctgctcctcgtggatagattttcgggtacaggaaaatacagtgtacgtgttgaaactgttatcctgccccaggttgggatagacggtggtacattcgtgttggtagaactgtgagaagaaaagatgggaaaactttgctttcttggctgtgatgattatctgctcaaacaagacatgcaaattgcaaaactcttaaagga

SEQ ID NO: 2128 - DNA, 288 bp, Zea mays
caacagtttcagaaataaatcggcttcgggatagacagttattcccaaagttaatggaccttgttgatggaatggccaagatgtggagttctatgtaccgccatcatagaagtcagttcctgatcatttctggaataagaggtttcgagattcctcctattccaagggagacaactgattctcattacatccagacttgtgagctacgtgacattgttagggagtggcatacgcagtttgagaaattgatggacaatcagaaagcatacatcagagcactcaatgcat

SEQ ID NO: 2129 - DNA, 204 bp, Zea mays
cggctcgagtctagaagcgcccctctccctctctctctctctcttcgccgtccgaagctccgcaccccaatctaatcgacacctcgccgagatgggccgcaagttcttcgtcggtggcaactggaaatgcaatggaaccacagatcaggtcgagaagattgtcaaaaccctgaatgaaggacaggttcccccttcagatgttgt

SEQ ID NO: 2130 - DNA, 286 bp, Zea mays
atcgtctccggcagcaagattcgaacacattttgcaagaccaaactggaggaaggtattctgtgatttggccagcgcacacaagaactctcgcataggagttttctattgtggatctccgacgctcacaaaacaactgaaggatctttcgaaagaattcagccagacaaccacaacccggttccatttccacaaggaaaacttctgagacgacgtgtacccgaagatccgatggactggaaacataattgtatagggaaaaaatacgatagcattggcatagcaga

SEQ ID NO: 2131 - DNA, 280 bp, Zea mays
tcttggcttgcttttgctgcccagaaggttgttgaggttgatgctcttgctaaggcattggctggtcaaaaggatgaggcttacttcgcagcaaatgctgctgctcaggcctcgaggaaatcctcaccccgtgtgaccaatgaagaagtccagaaggctgctgctgctctcaagggctctgaccaccgccgtgggaccaacgttagtgctagattggatgcccagcagaagaagcttaacctccccatccttcccaccactacaatcggttcgatcccac

SEQ ID NO: 2132 - DNA, 279 bp, Zea mays
cggctcgagatcctctttcccctcctcgcttcgcttcctcggcggattcctcctccctcggccgtccccgtcccctttttcggcgcgcgagctcgcccgagatggcaaacgcgagatcgggtgtcgctgtgaatgacgagtgcatgctcaagttcggcgagctgcagtcgaagaggctgcaccgcttcctaactttcaagatggacgacaagttcaaggagatcgttgtggaccaggtcggggatcgcgctaccagctacgaggacttcacaaacagcc

SEQ ID NO: 2133 - DNA, 279 bp, Zea mays
ccaaagcctccgtgctgcctccgatgctcaatgcgctggagatctacgttcgcgtcccttatgagagtccgacgacactccctcaagaccttgacgccatcatggctatcaaaaccgagtatggagtcaggaaaaactggatgggtgatccatgttttccaatcaaatatgcttgggacggtgtgaaatgcagcaatgcaagtggtaacacatcgaggataacatcactagacctctccaacagctctttgcatggcacaatatctaatgattttacac

SEQ ID NO: 2134 - DNA, 322 bp, Zea mays
cgacgcctacgcccggtacgccaagcccggcggctggaacgaccctgacatgctggaggtcgggaacggaggcatggcgtacaacgagtacgtcgtgcacttcagcctctgggccatcgccaaggctcccctggtcatcggctgcgacgtgacgagagtctccaatgagacgctcggaatcctctccaacgcggaggtcatcgcgatcagccaagatcggctgggtgtccaatgacagaaagtgagcaagtacggcaacgatctcgaggtatgggacaggcagctctcggggcacaggaaggcggtgctgctgctcaaccgg

SEQ ID NO: 2135 - DNA, 134 bp, Zea mays
agacagtttcctgtacttgtggggtgaatttgtacgtgtgatacggtaacttggtccgtgtactgtttatgctgctacgttttccttcctaaaagtacgtatatatatacagcacttgcgagtggctttacttg

SEQ ID NO: 2136 - DNA, 318 bp, Zea mays
ccccttaaccctcgttcctctagccgtctcgcgcaccacagcctccatttctcctccgacggcggtgcggctagctcaaccatggcggactccaaggccacctcggcggtcaccctccgcactcgcaagttcatgaccaaccgcctgctggcccgcaaacaatttgtgcttgaggttatccaccccggccgcgccaacgtctccaaggcggagttgaaggagaggcttgccaagatgtacgaggtgaaggaccccaacaccatcttcgtcttcaagttccgcacccacttcggtggaggcaagtccactggcttcggc

SEQ ID NO: 2137 - DNA, 317 bp, Zea mays
  unsure (1)..(317): unsure at all n locations
ctgggaggagcccaggtgctgagtttggaggatctcagcgtgcccaccaccccttgccatggattcgaacccctcctaacgccgcnctcgcccaagaaccggagcatctcgccggaccggaaggtgaacgaggagattcttcggcagctgggggagctcgcagagtctgatggcggtatgcaggcatcagcaggtcgtgaggaggcagagcaagctggtggagaccagttcccttcctgggcgtcaccacagtatgccactggacatggcaattttggaacagaggacaaccatgagaatggcagatggaacaacag

SEQ ID NO: 2138 - DNA, 314 bp, Zea mays
gtcaacaacctcggtaccatcgccaggtccgggacgaaggagttcatggaagctcttgctgccggcgctgatgtgtccatgattggccagttcggcgtcggtttctactctgcctacctcgtcgccgatagagttgtcgtgaccaccaagcacaacgatgacgagcagtacgtgtgggagtcccaagcgggcgggtcgttcactgttactcgtgacacgtcaggggagcagcttggcaggggcactaagatcacactgttccttaaggacgatcagctggagtaccttgaggagcgtcgcctcaaggatctggt

SEQ ID NO: 2139 - DNA, 311 bp, Zea mays
ttaggagcagaccggagacttgggggcttcacctgctgtatctcattaccatctgcatctggttgcccgttgattgagaaggaggagctgagggccatggcgaccgagaagcccatcctgtacaacgcctggatcagctcctgctcccaccgtgttcgcatcgcactcaacctcaaaggtgtggattacgagtacaagtcggtaaaccctaggacagatccagattatggaaaaatcaatccaattaaatatattccagcattagtagatgggggcatagtcgtttctgattctcttgccatctcactgta

SEQ ID NO: 2140 - DNA, 236 bp, Zea mays
tgccgccactgatctgctctgttgctggtgactaggagcagtagcgagagggattctggatggccaagtcgaagaaccacacggcgcataaccagtcgttcaaggcgcacaagaacggcatcaagaagcccaagcgccaccgccagacctccaccaaggggatggacccgaagtttctgaggaacttgaggtactcaaggaagggcaacaagaagagtggcgatgctgagtccgag

SEQ ID NO: 2141 - DNA, 306 bp, Zea mays
cgaccatcatggggccatcggacagcccatttgcaggtggggtattcttggtgaacattcacttcccaccggattaccctttcaagccaccaaaggtgtctttccgcaccaaggttttccacccgaacatcaacagcaacggcagcatttgccttgacattcttaaggaacagtggagccctgctttaactatctcaaaggttctcctgtcaatctgctcactgctcacggacccaaaccctgatgatcctcttgtccctgagattgctcacatgtacaagaccgacagggccaagtatgagtcca

SEQ ID NO: 2142 - DNA, 301 bp, Zea mays
  unsure (1)..(301): unsure at all n locations
ggaccagcgcacgtntctcgcncgncgacgcgctgccgcggccatatacggcgaaagcctattcgtgcccgcggccgtggatagataggtcagtgacgattgagaaacccgtagtcggagcagaggaggggtagaggatggtgttcggtcaggtggtgatcggcccgccgggctccggcaagaccacctactgcaacggcatgtcgcagttcctctccctcctcggcaggaaagttgcggttgtcaatttggaccctgcaaatgacgcattgccatatgagtgtgccataaacatcgagga

SEQ ID NO: 2143 - DNA, 306 bp, Zea mays
caaggactacaaggagcccccgccggcgccgctcttcgagcccggggagctcaagtcctggtccttctaccgcgccggcatcgccgagttcgtcgccaccttcctcttcctctacatctccatcctcaccgtcatgggcgtctccaagtccacctccaagtgcgccaccgtcggcatccagggcatcgcctggtccttcggcggcatgatcttcgccctcgtctactgcaccgccggcatctccggcgggcacatcaacccggcggtgaccttcgggctgttcctggcgaggaagttgtccctcac

SEQ ID NO: 2144 - DNA, 306 bp, Zea mays
cgccatccttccggtgggtcaccgacattcagtagtggaagcccttctgcacactgggataatgcatgccctccaaccggtgttctccaaccctctccacggatgcgagatgtgccgaagctctcacctctcgttgcacaccgggtacatgtagatcccctatctggcttggaattcaccagtgaatcaattgtcactatatgccgtgaggggctaatcaaaatttgggcacgacccatccatagtgaaaacaaccagcagccagattcttctgaacaggttataggcagtgccactgctaaggat

SEQ ID NO: 2145 - DNA, 302 bp, Zea mays
attttattttggattggaactggcgcaaggataagttactgtttgagttcggtctgtggtctccagacattctatgtcttcaggaggttgacaaatttacagaccttgaacaagaaatggcaagccaaggatataacggtacatggaagatacggactggagatgcagctgatggatgtgctattttttggagaacaactaggttccagttgcgttatgaagaagacattgagttcaccaagcttggacttcgtgataatgttgcccagctctgtgttttagagtcggtgggccctcagtat

SEQ ID NO: 2146 - DNA, 307 bp, Zea mays
cacaagagagcacgctactactcatcactcgccaacgtgcagagatcagggaagcggcactccatccactgactgaccgctcatggcgaaggtccacctctacgtcgccgcggcctgcgccgtcgtcctcgcgctcgccaccccggccctcgccggtgaccccgacatgctgcaggacgtctgcccggctgactacgcctccccggtgaagctgaacgggttcgcgtgcaaggcgaacttttcggcggacgacttcttcttcgacgggctgaggaacccgggcaacaccaacaacccggcgggctcc

SEQ ID NO: 2147 - DNA, 305 bp, Zea mays
atcaaacaatgagcttgtgaggacacaaacccttgtgaagagtgccattgtgcaagttgatgctgccccattcaagcagtggtacctcactcactatggagttgacattggtaggaagaagaaaacccctgctgcaaagaaggataatgctgagggacaagaggttgaggcagcagctgaggaaacgaaaaagagcaaccatgtcacgaggaagcttgagaagcgcaaggagggacgtacccttgacccacacattgaggagcaatttggcagtggacggttgctggcatgcatttcttcccgcc

SEQ ID NO: 2148 - DNA, 298 bp, Zea mays
cagctcttccatcctgagcagctcatcagtggcaaggaggatgcagccaacaacttcgctcgtggtcactacaccattggcaaggagattgttgacctgtgccttgaccgcatcaggaagcttgcagataattgcactggtctccagggcttcctcgtcttcaacgctgttggtggaggaacgggctctgggcttggttctctcctcctggagcgcctgtctgttgactatggcaagaagtccaagctcggtttcaccgtgtacccatccccccaggtgtccacatccgtggttgagc

SEQ ID NO: 2149 - DNA, 295 bp, Zea mays
atactttgctatggacccagacacccctatttcatctgcctttgccaaacatgggatgcactgggcaatgtatcttgtaacaactggtgctgttcttgctctctgctcaaccttgatgggatctatattgccacagccaagaatattgatggccatggcacgagatggcctgctaccatcattcttctctgatgtccataagacgacacaagttccagtcaaaagcacagtagtgactggcatctgtgcagctgctcttgctttcttcatggatgtctctcaactggctggaatg

SEQ ID NO: 2150 - DNA, 294 bp, Zea mays
aggggaggtgtcatgcactgggcagattccatcggcgcaaagtacatccatggaaagttggaggagtggacaaagcggtatgggggcttcttcaagccctgctcttacctcgctgaaagagctgcaaaagggattcctctgagtgcaccaacaaagaaagttcaggctcggctataagatgatttccttgtggacggaggagactacgttgaataatggattccggtgaagcatttggaatgcgtagagctgtaggctaccactatcacatgcatgtaacgcaatatactactg

SEQ ID NO: 2151 - DNA, 242 bp, Zea mays
ggcggcggccagcggcgagagcgcgagaggaagagcaggaggaggggtcggccatgacggggaaggcgaagcgatagaagcacacggcgaaggagatcgcggcgaagatcgacgcggcgacgacgaaccggggctgcggcaacgccgggcaggctgaccggctggggcaggacaagggcgggcatgcgaactgagcgtgcccgctctgccgcaccgcggcgtccggcatcaagtccatgcag

SEQ ID NO: 2152 - DNA, 289 bp, Zea mays
tgcccgttttgacgaattagctctttagtgtctctgtattgaccttgtgaccttgtgtgtttgggtgcccttctctttgtctgtaaatcaacagttaactacttcaaaatgaccaaaagggttgaactttctttagaagccactttgaaaggccataccggatgggtaactcaagttgccggtttccaagataaaattatttcttcatcacgtgataattccattattatttgggatttgaaaaataaagacaatatttatcctcttcgtcgtttgaccggccactcac

SEQ ID NO: 2153 - DNA, 296 bp, Zea mays
gtgaagtacaaagttgacgttgtgtttgcaggacatgtccacgcctacgaacgcacacacaggatatcgaatgtcgcatacaatgttgtgaatgcgctgtgcactccaatccctgatcaatcggccccagtttacatcaccatcggtgatggagggaaccaggaaggattggctaccaacatgtcgcagccgcagccgagctactcggccttcagggaggcgagcttcgggcacgccatcctggacatcaagaaccggacacacgcgtactacacgtggcaccgcaaccaggacgg

SEQ ID NO: 2154 - DNA, 292 bp, Zea mays
cagaaacgcttgcgaacttcttagatttgagagtaccaagtcggatggcaaacttgcctcccttgacgagtacatctcacggatgaagtcagggcagaaagacatcttctacatcacgggaagcagcaaagagcagctggagaagtctccattcctcgagaggctaaccaagaagaactacgaggtcatcttcttcaccgaccccgtggacgagtacctgatgcagtacctgatggactacgaggacaagaagttccagaacgtgtccaaggacggactgttgctgggcaag

SEQ ID NO: 2155 - DNA, 278 bp, Zea mays
ctggtgggtcatccttgcaaatcatgcagaagacatcatagtgagatggtctgagtcactcaagcaacatggggccaaatgagttgcaggtccaactgagtccatgaaggagaagcatggtggccaagtgagtcgaaggtccattcgagtccatgaaggtgaagcatgggagatccaagcgagtctggaaagattgtcgatgttagtaggctgtccttattttgtttagagacttgtggctatgtgattgatgtagcgaaacaaggctgtgatgtgtt

SEQ ID NO: 2156 - DNA, 294 bp, Zea mays
tccgctgcagccatgagtaagttgcagtctgagtctgtcaaggatgccatctcccagattgttggggatgccaaggagaagaataggaagttcactgagactgtggaacttcagattggtctgaagaattatgatccacagaaggacaagcgtttcagtggctctgttaagttgccccatatccctcgtcccaagatgaaggtgtgcatgcttggtgatgcccagcatgttgaggaggccgagaagatgggacttgactacatggatgttgaggctctcaagaaaatgaacaag

SEQ ID NO: 2157 - DNA, 195 bp, Zea mays
cgagaagccgaagaaaattcgaagacgaggagcagctacactgcggacggacttcgggcatggagggccagttccaggttggcaaggaggaggtcatccaagcatggtacatggacgacagtgaagaggaccagaggcttcctcatcatcgcgagcccaaagaattcatccctctcgacaaactttccgaactag

SEQ ID NO: 2158 - DNA, 286 bp, Zea mays
gtcgagcaggtgaggcacgcggccgggacggtgggcttcttctggctggtgaaccacggcgtggcggaggagctgatgggcggcatgctccgcggggtgcgccagttcaacgagggccccgtggaggcgaacaggcgctctactccagggacctggctcgcaacctgcgcttcgcctccaacttcgacctcttcaaggccgctgcggccgactggcgcgacacgctcttctgcgaggtggctccgaacccgccgccgcgggaggagctgccggagccactgaggaa

SEQ ID NO: 2159 - DNA, 289 bp, Zea mays
ggacagtgaactatttgaagagtgccagcagcagtacatggagaaacaagcgaaagccaaagagatacaggaacaacgagaatcagcatggagacaattggaagctgttgttgctgccaaggctgctggagatgacatggttttggtcaactagatgatagctgctcacttatttcatgagcgtcatgtgcgcttatcgaggcaacaaggtatcggtgctagttgcggtgctcttatatcaacattgttgacttgggactatcagatccatgttccttgcatcagtgca

SEQ ID NO: 2160 - DNA, 289 bp, Zea mays
ccgccaccaggtgcagagtctttcgtcatctcttctccggcgaagaacccccagtcgcccaccagatcacttgttaaactttgttgaggggtgatggcggtttctttcgcaaacctcaactccgaggcagggcttaaaaagcttgatgagtaccttctcactcgcagctacatcactggctaccaagcttccaaggatgacttggctgtctacacttcgttttcggctgctccctcgtccaagtatatcaacgtagcaaggtggtttaaccacattgatgcgctcgtga

SEQ ID NO: 2161 - DNA, 288 bp, Zea mays
ctgatgctattgagaatgagaaggaagtttccaaggcatttcaaatctataatgttgacagagctgtctgtggtcgggtagcaggtgtgattgccaagaagtatggagacacaggttttgctggccagctcaacatcacgttcaatggaagtgcagggcagtcctttggttgtttcctgactcctggaatgaacattcggctagttggggaggccaatgattatgttggaaagggtatggctggtggagaactggtggtagttcctgtagacaaaacaggatttgttc

SEQ ID NO: 2162 - DNA, 124 bp, Zea mays
tcggcgcccgttcaggatccacatcttcccgagcgagttcttggttggcctcttcctcttcggaccacctccaaggctcttggtgtagcttgccactctcaccaatcaagttttcatgtctgat

SEQ ID NO: 2163 - DNA, 283 bp, Zea mays
tgccgttgttcaccagaatttgcggccagacattcctcgctgctgcccaagcgcatttgcgaatgttatgcggaaatgctgggatgcaaaccctgataaacgccctgatatggatgaagtggtgcagcttttagaggctctggacacgagcaaaggcggtggcatgatacctgatggccaatcatcaggatgcttatgcttcacaaaggctcgtggtccatagatacttttcatggtactcccttcccttggcaacactttccccgtgtaaatgactgggcca

SEQ ID NO: 2164 - DNA, 280 bp, Zea mays
taaggttctccacatcaccactcgcaagtccccttgcggtgaaggaacaaacacatgggatcggtttgagttccgcattcacaagagggtgattgacctaatcagctcccctgatgtggtgaagcagatcacctccatcacaattgagcccggtgttgaggttgaggtgaccattgccgacgtgtaaggacgtgaagttcagcaatgtcatcgacaatctttttctttgtgctccctgtgtgctcgcaagagagattttgagttattattagcatacaag

SEQ ID NO: 2165 - DNA, 114 bp, Zea mays
tgtcggcgcacacgcggcgctcaacttcgggcagtacccgctgggcgggtacgtcacgaaccgcccgccgctgatgcgccggctgctaccggacccggagcgcgacgccgccga

SEQ ID NO: 2166 - DNA, 285 bp, Zea mays
ggagggcaccgtgatcgtccctacgggcactgcctcgtcgcgggcctcgccaagtaccccaagaaggtgatccgcaaggactccgccaagaagacggccaagaagtcccgcgtcaagtgcttcatcaagctcgtcaacttcacgcacctcatgcccacccgctacaccctcgacgtcgacttcaaggacgtcgcatcgggcgggcccgacgcgctctccacccgggacaagaaggtcgaagcctgcatagccgccaaggcgcgcctcgaggagaggttcaagacc

SEQ ID NO: 2167 - DNA, 283 bp, Zea mays
gcggagatcagcggcgacagggagctgaggatcgccgagtgcagggtccggtgcatcgtggagaacgccaggtgcatccagagggtggccagggagttcggctccttcagcggctacatgtggggccacgtgaaccaccggccggtggtgggcaagtaccgccaccacaagtacatcccgttccggacgcccaagtcggaggcggtgagcaaggacctcgtccgccggggcttccgcctcgtcggccccgtcatcgtctactctttcatgcaggccgccggca

SEQ ID NO: 2168 - DNA, 211 bp, Zea mays
ggcgcagagaatccccaagcaaacaaacagggtagagggagaggagaggagaggagaggagaggttgggtctgggacaccatggctccgatgaagctgtacggggcggtgatgtcgtggaacgtgacgaggtgcgcaacggcgctggaggaggctggctccgactacgagatcgtgcccatcaacttcgccaccgccgagcacaagagccc

SEQ ID NO: 2169 - DNA, 342 bp, Zea mays
atgaagtatatgggggagcttggattgaacttcgaagtataccgcaatgatgaactgaccatagaagatgtgagaaggaagaacccaaggggaatacttatttctccaggacctggtgaaccacaagattcgggaatatcattgcagactgttcttgaattaggcccaaccatcccaatttttggagtttgcatgggtctgcaatgcattggagaggcatttggaggaaagattatccgtgctccttctggagtgatgcatgggaaaagctctccagtttattacgatgaggaattaggaaaggcattgttcaatggcttgccaaacccttttactgccgcg

SEQ ID NO: 2170 - DNA, 336 bp, Zea mays
gattattcaactggagttcagtcattatgatgtcaaatcgtctaaaacaataccagcaaaggattttgcattgtccatggttgcttctgctgacatgaaccatatcaacaagctgcttgatagagttgatagtttggtcaaggagccagatctgaaggacatacgcatcacctttgaggagtttaaggcatttgctgatttgcgacgaagattggagccactgtcgatggctatctttgcttacggtaaattgaatgggttattgacgaaggaggatctaaaacgtgcagcgcaacatgtttgcggggtcgacttaacagatagagtagtagacat

SEQ ID NO: 2171 - DNA, 347 bp, Zea mays
gcgggcttgccacagagctacaactcaagtgaagtgaataatggtgctgataggttggcagagcagcgcacacagcttctagaatctagaaggcaggagttggtcttcttggataatgaaatcgtgttcaatgaggccatcattgaggagagggatcagggaatacaagagattcagcaccaaatcactgaagtaaatgaaatcttcaaagatctcgctgtgctagtccatgaccaaggagcaatgatagatgacattgattcccatatagagaacgccgttgtagcgacttcgcaggctaaaggccagctttcaaaggctgctaaaactcagaagtcgaactcttc

SEQ ID NO: 2172 - DNA, 326 bp, Zea mays
catctacctcaacttcgacgccttccacggcgacaaggaccacggcggcgtgcgcgacggcaccaacatcgtgctctggaagtggtgcgagggcgacaaccagcgctggaagatcgtcccctggtaaatgtgctgttctgtggctgcactggtcatcaccatgatctggagctttgaaggcatagccacctgtggtcagcagctgctgccgtgttgctagaataaagttggtggcgatcgatcgatcgatctgtggtgattggtgtccctctctgtgtgtttgtgtttagttcccagtcgtttgtgaggaagtcagttatgtttga

SEQ ID NO: 2173 - DNA, 337 bp, Zea mays
cgctaccgtctcacagccgtaaacgcccctcccggatcccgctagttcgccaccgccgcccgcccgcccgccgttcgcctcatcatggccgcctcgtcgaccgccacctccgtccacgacttcatcgtcaaggatgcgagcggcaaagacgttgacctcagcacctacaaggggaaggttcttctcattgttaacgtcgcatcccagtgtggcttaaccaactccaactacactgagctggcccagctctatgagaagtacaaggaccaaggctttgaaatcctggctttcccatgcaaccagtttggtgggccagagctggtaccaatgagagatg

SEQ ID NO: 2174 - DNA, 341 bp, Zea mays
ggataggtagcaccggagcaggtagaacgctgcacaatccccttcgccgccgccaagatggtgaacgttcctaagaccaagaagacgtactgcaagagcaaagagtgcaagaagcacacactctacaaggtgactcagtataagaagggcaaggatagcctgtctgcccagggaaagcgccgttatgaccgcaagcagtcaggatatggtggtcagaccaagcctgtcttccacaagaaggccaagaccaccaagaagattgttctgaagctgcagtgccagagctgcaagcactactcacagcacgccatcccgagatgcaagcattttgagattggtgg

SEQ ID NO: 2175 - DNA, 337 bp, Zea mays
gtgcgccgcgtctctcgcgtccgcagccgccgacgacgggttgacgaccttcaaggtgtacttccacgacgtcgtggcggggacgaacccgacggcggtgcgcatcgccaggcggcgtcctccaacacgtcgtccaccaacttcggcgcggtggtggccatcgacgacccgctgacgacgggtcccacgcgcgccgcgggcacggaggtgggccgcgcccagggcacctacacgttcgcggaccagcagacgttcggcctcctcatggtcatgaacttcgtgttcacggccggcgagcacaacggcagcacgctctgcatccttggccgcaacgagg

SEQ ID NO: 2176 - DNA, 334 bp, Zea mays
catttatgcttatggttttgagaagccatctgcaattcagcagagaggaattgttcccttctgcaagggtcttgatgtcattcagcaagcacaatctggtacaggaaagacagcaaccttctgttctgggatcttgcagcagctggactatggcctggctgaatgccaggccctggtccttgctcccacccgtgagcttgcacagcaaatcgagaaagtcatgcgcgcgcttggtgattaccttggtgttaaggtccatgcatgtgtgggaggaacatccgtccgtgaggaccaaaggattcttggcagtggtgtgcatgttgttgttggtaca

SEQ ID NO: 2177 - DNA, 342 bp, Zea mays
ggactgcatcccagcaaggttcaggcaaagtcgggaggtggaaaattaattttttgtcaacccaaaagtgggagaacccgttgatgggatggacatctactggggatccatatgctaatgtcggtgaagcaggacttacgtttgacagtgcagagtcagcaaaggcgtttgccgaaaaacatggatggaattatgtggttcggaaacgccatgcacctcttctgaggcctaaggcctacgctgagaacttcaagtggagaggccctccaaaagcggagcaagcatgagctcgagacatctgtgatgctgacattggcacgatgtcgttttcctcctggctcg

SEQ ID NO: 2178 - DNA, 337 bp, Zea mays
ctagcccatctgctatcagcgaggacgaaggcacaaacccctcacctccctcaaaccctagccctcgctctcccgcttgttcccgtcaccgccatcatgggctcagatgcggacatggaggactacgggttcgagtactctgacgaagagccggaggagcaggatgtcgacattgagaaccagtattacaactccaaaggtttggtcgagacagacccagagggtgcacttgctggttttgatcaagtggtcagtatggagcctgaaaaggctgaatggggatttaaagctcttaaacaaactgtcaagctttactataagctggggaaatacaaag

SEQ ID NO: 2179 - DNA, 328 bp, Zea mays
  unsure (1)..(328): unsure at all n locations
tttactttctcttcagagaaaaataattctgtctcatcccttttgcataaggatttttagaaaattatatttatttaatttttctaatctttgagatctagtatttttataaaatagttgaatttaataatactaaagttagaagcttaggatcaaagcaatatatagatctaaatatttcttttcttaaggaaaataagtttttgaattattaatttaataatatttttagaagtgatttttaagtttaattactttaaataaaatataaaaagctttttaaatgatcttatttataaataattataattanagaattagtagatat

SEQ ID NO: 2180 - DNA, 331 bp, Zea mays
cagaagagcggcggcgcggacggacaaggagcaggcggaagaggagttgtgccaaggcacaatgggtatctcgcgtgactcgatgcacaagcgccgagccaccggtggaaagcagaaggcctggaggaagaagcgaaagtatgagcttggtcgccagccagccaacaccaagttgtcaagcaataagacagttaggagggtccgtgttcgtggaggtaatgtgaaatggagggctcttcgccttgatactggtaactactcatggggaagtgaagctgttacccgcaagacccgtatcctcgacgtggtctacaatgcatcaaacaatgag

SEQ ID NO: 2181 - DNA, 332 bp, Zea mays
gaaaccttggtgaagccgagacgagcaatcatccaagcagctagtgcttagcatctatggcgacctccgttcgtggtttcagtagcgccctcagggatgtgccgggcagctacggccttccgctggtgggcgccgtccgcgaccgcctcgacttctactacttccagggccaggacaagtacttcgagtcccgcgtcgagcgctacggctccaccgtggtgcgcatgaacgtcccgccgggccccttcatggcgcgcgacccgcgggtggtggcggtcctggacgccaagagcttccccgtcctcttcgacatggacaaggtggagaagttt

SEQ ID NO: 2182 - DNA, 333 bp, Zea mays
tgggacgagacctgcatgcagatggatgaagtgctggcagcagtagctgagaccataaagaactttgcggtcatctaccttgttgacatcacagaggtccctgatttcaacaccatgtatgagctgtacgacccttcgacagtgatgttcttcttccggaacaagcacatcatgattgatctcgggactggaaacaacaacaagatcaactgggccctgaaggacaagcaagagttcatcgacattgtggagaccgtatacaggggcgcccggaaaggccgtggtctggtgattgctccaaaggactactccaccaagtaccgttactaagaa

SEQ ID NO: 2183 - DNA, 334 bp, Zea mays
tgtgaacttatcggcacatgcatactggaccccagatccaactttcagaagctatttaaactacggagctggcattagtgaggtggaaattgatgtgctgacaggagcaacaacaattctaaggagtgaccttgtctacgattgcgggcaaagcttgaaccctgctgtcgacttgggccaggtggaaggcgcattcatccaaggagtaggcttctttacaaacgaggagtacacaacaaactctgaggggttggtcatccacgatggcacatggacgtacaagatccccacagtcgacaccatcccaaagcagttgaacgttgagctgatcaac

SEQ ID NO: 2184 - DNA, 337 bp, Zea mays
aagttgcgctcccctcacgacctcctggcagagacacgcgcctccatcgagaaagtcgcagcccggatactcgccatcaagaaagacggcgcccccaagtcggagctccgcgagcttgtcactcagatgtctctgcacctcgtcacgctacgccaagtgaacagagagatactgatggaggaggacaaggtcaaggcggagacggaggccgcgaaggcgccggtggactccacgacgctgcagctgcataacctgttgtacgagaagaaccactacgtgaaggccataagagcgtgtcttgactttcagacgaagtatccggggatagagcttgtgc

SEQ ID NO: 2185 - DNA, 333 bp, Zea mays
gtgcgctctcgtcgtcttcgcgaggtcgaaatccccaaggcgaggcgttgaaacccttaaccctcttccacctcgaagcggcgcgaggagggagagtgtgagtggactcaggaggcggcgggcgaaatgaagcttaacgtcaagaccctcaagggcaccaacttcgagatcgaggcgagccccgatgcgtcggttgctgaggtgaagaggatcatcgaaactactcagggtcagagtacctacccagcagaccagcaaatgctcatataccaagggaaaattctgaaggatgagaccactttggaaagcaacggagttctgatgaacagcttc

SEQ ID NO: 2186 - DNA, 265 bp, Zea mays
ctcactgcaccgagctcactggcaatggctaccagcaccaagctcgtggcccttggctttgccgtcctcctgagcatcggcttctccgatgcagcgagggtagttaggcttggtagccatgcgtctgcgggaggtggaggtggcggcgggggaggcggctccgggtcgactgggggtggctttggcggtgggtcgggcggtggcggtggttacggcataggtaagggtggcggggactggtggaacaatttcgtctctagtatag

SEQ ID NO: 2187 - DNA, 331 bp, Zea mays
gtgctgtattaaatgcagcaagacagcaagcaatgaaggttgcaccaaacatgccacagcaccaggcctgccttgatgtaatggaagaaggcatattatatggaggtcaagctggtgttttgaaggaagccagggttttcaaggaactggtggtagcaccaacatcaaaggctcttgtccatgttttctttgcacaacgttccacgacaaaggtgccaggtgtaactgatgttcaactgaaaccaaggccaattagaaaagttgctgttattggtggtggtctgatgggctctggaattgctacatcacttcttgttagcaatatttctgt

SEQ ID NO: 2188 - DNA, 330 bp, Zea mays
cactccagcactgaacacttgattgattcagtgggtagctagctagctgaatcacaatggatcctaccaagttccgtccgtccagcagccacgacacgacggtgacgacgacgaacgcgggcgctcctgtgtggaacgacaacgaggcgctgactgtggggcctcgcggtcccatcctgctggaggactaccacctgatcgagaaggtggcgcacttcgcgcgcgagcgcatcccggagcgcgtggtgcacgcgcgcggggcctccgccaagggcttcttcgagtgcacccacgacgtgacgtcgctgacgtgcgccgacttcctgcgcg

SEQ ID NO: 2189 - DNA, 324 bp, Zea mays
cggctcgaggcacaccatactggccacactctgtcgtgtggttcttgatctccattcttcccgagtcccttatcgacagcgtgcgcctgggcatgtgcattaagatccgcaagaaggggctggccaaggacgccaagaagaaggcgctgtgattgatgtttcagaatgcatgttcagattcgcacatttcctcatcacctgtagtagacacgtgccttgctgtagtcactttattagctaccattacctcctgagtctgttaagaatcgagaatgtcattgttccatccgcggttatgatgatgaaaaatacgattcttcaatt

SEQ ID NO: 2190 - DNA, 330 bp, Zea mays
  unsure (1)..(330): unsure at all n locations
acncgatgtaccccaaggggagcaacgccaacgccaatgtcaacgcgttcaagatgaatgtcggggtgaacaagtactccagcagcacgaacgggaaagactccggcgggaaaagcggtggcggcagcaacaacaacagcggcggcggaggcaacggcaatgggaccgccaacggcagttccgcagttgacaagcgcttcaagacgttgccgacgagcgagatgctgccgaagaacgaagtccttggtgggtacatctttgtctgcaacaacgataccatgcaggaggacctcaagaggcagctttttggattgccagcacgatatcgtg

SEQ ID NO: 2191 - DNA, 333 bp, Zea mays
gcttcacgtccgctacagaccggcgaggagacgaaaggagggagttttgagaagctcaaatggctcctaaagccgctcctgccaagaagggtgatgccaaggcccaggccttgaaggtggccaaggctgtgaagtctggggcaggcaagaagaagaccaagaagattcgcacatctgtaacatttcaccagcccaagaccctgaagaaggccagggacccgaagtacccaagaatcagcactactggaagaaacaagcttgatcagtaccaaattctcaagtaccccctcaccacagaatctgcaatgaagaagattgaagataacaacactc

SEQ ID NO: 2192 - DNA, 329 bp, Zea mays
ctccttgttcatcttcatgaacgtcgtcctgagaagctccattatcttggtgtatcttttggactgacccaagagcttttccgcttttggcggaagcacaacttctacccgttctatgtcggccagattccaagtgctgttactggtgagcatacctgtatggtgttgagacccttaaacagtgatgacatcgaagttagtgagtcaaacaaacatggattttgtggatccgttttaccaagatttcagacaaagattcaggcggcttttgggaacttctttccggcatcttaattttaagcttgcaatgagtgtcttggcttcgaaga

SEQ ID NO: 2193 - DNA, 332 bp, Zea mays
ctccgccgacgagggccagttcctcaacatgctcatcaagctcatcggcgccaagaagaccatggagatcggcgtctacaccggctactcgctcctcgccaccgcgctcgcactcccggaggacggcacgatcttggccatggacatcaaccgcgagaactacgagctaggccttccctgcatcaacaaggccggcgtgggccacaagatcgacttccgcgagggccccgcgctccccgtcctggacgacctcgtggcggacaaggagcagcacgggtcgttcgacttcgccttcgtggacgccgacaaggacaactacctcaactaccacg

SEQ ID NO: 2194 - DNA, 289 bp, Zea mays
tgggctccaccgccggcgacgtggccgcggtggtggacgaggaggcgtgcatgtacgcgatgcagctggcgtcgtcgtccatcctgcccatgacgctgaagaacgccatcgagctgggcctgctggaggtgctgcagaaggaggccggctgcggcaaggcggcgctggcgcccgaggaggtggtggcgcggatgcccgcggcgcccggcgactccgccgccgcggcggccatggtggaccgcatgctccgcctgctcgtctcctacgacgtcgtccggctgcagatgga

SEQ ID NO: 2195 - DNA, 322 bp, Zea mays
ccgatccatttcagccgccgccgcgcgtacaagcaggagcagcaaggatgccggctggccacgggctgcgctcgcggacgcgcgacctgttcgcgcgccccttccgcaagaagggctacatcccgctcaccacctacctccgcacctacaagatcggcgactacgtcgacgtcaaggtgaacggcgccgtccacaaggggatgccgcacaagttctaccacggccgcaccggtcgcgtctggaacgtcaccaagcgcgccatcggcgtcgagataaacaagcaggtgaatggtcgcatcatcaggaagcgtatccatgtccg

SEQ ID NO: 2196 - DNA, 316 bp, Zea mays
ggtggaggagagtacagtgcaagcccgacttcttgtattttatataaaaaagatgtgtggttccgatgataagtatcggtttgaaattaaggatattcttgaaatggaaatgaagctcctggaagctctcgactattatttggttgttttccatccatatcgtcctctcttacagttgttgcaggatgctggcataacagacctgacacaatttgcctggggccttgttaatgatacatacaagatggaccttatcctcatataccctccctacatgattgcactggcctgcatatacatagcgagtgttttgaaa

SEQ ID NO: 2197 - DNA, 231 bp, Zea mays
ggcatgactacagttgggaagatactatccgaagtgttaggttattcgttcttcgacagtgataagttggtagagaaggctttggtatttcatctgttgctgagatctttcagctccatagcgaaacattcttcagagataatgagagtgaggtcctgacggatctgtcatcaatgcatcggttggttgttgcaaccggaggtggtgcagtgatccgaccaatcattggag

SEQ ID NO: 2198 - DNA, 323 bp, Zea mays
agccaccgccgctagaagaagagctcggcgattcccaggtcccgcgagaagatgccgaagcagatccatgagattaaggacttcctcctcaccgcgaggaggaaggatgcccgctcagtgaagatcaagaggagcaaggatgttgtcaagttcaaggtgcgctgctccaagtacttgtacacgctctgcgtcttcgatgctgagaaggcaaacaagttgaagcaatctcttccccgaggtttgaccgtcgaggaggtctgattggatacatggcaacgccgggttgaactacccaagcttctttatcagtagcagagcatgct

SEQ ID NO: 2199 - DNA, 317 bp, Zea mays
  unsure (1)..(317): unsure at all n locations
gggctcccggcggttcctgaacgagcgggagatggcgcgcgcngggcgggagcgggttcgaggtgcgcgtggcggagccgaccagcacacggacacggccgcgttcgcggcgctggtgaactcggcggacgtgatggtgggcgtgcacggcgccgggctgaccaacatggtgttcctgccccgcggcgccgtgctcgtccaggttgtgccgttcggcgggctggagtggctcacgggcgtcactttcaaggaccccgccgcggacatggaggtgagctacatgggctacgacgtgacgctggaggagagctcgctga

SEQ ID NO: 2200 - DNA, 323 bp, Zea mays
caaggacgtcgccgtcctctccggcgcacacacaatcgggaaggcgcggtgctccacggtgtcgccgcggctgtacaacttcggcgggcagaacggcgcgtccgaccccacgctggacgccaactacacggccacccttcgcggccagtgcaagcccggcgacaacgccaccctcgtctacctcgaccctcccacgcccaccaccttcgacgccgactactacaccctcgtcgccggcaacaagggcctgctctccacagacgccgccctcctcctcgacaccaccactagcgcctacgtcgcgagccaggccaacgccaccg

SEQ ID NO: 2201 - DNA, 321 bp, Zea mays
gcgctgcattctctccctccccacttctctctcgtggcgacagcgacgagccgacgactgtgcggccgtcgctgccactctactcgccagttgcccgggtcttcttcgtccccttggaaatcgacggccacaaccagggcaaacaggaagtttcgcaaggatgccctggtgcacgattgatgagtctgaccctggtgttttcaccgagctgattcagcaaatgcaagtggaaggtgtacagaccagtatatgggctaatttttctctccaagtggatatctggggagaaggatgaacggcatgttgtcagagatcctaatc

SEQ ID NO: 2202 - DNA, 323 bp, Zea mays
cccgcaaagaaagaaggcaagagttctcggcttctcgcgagtcgcgacagagaaagaggtcgagaaagaggcggagttgcggagaagatgcagagcaacagcatgaagagggagatcagcgaggcccacgacaccattcgctttggcatcaacgccggcgtcaaagccgacctcgccccgccgcacccgctccagtctaccatccaatcggagaccaagttctgggcggacaagaagaagttcgggacagatgccatatacggatccgccctcaatatccgcaaggatctcgatgcccaaatcctctccaggttccaaaggcc

SEQ ID NO: 2203 - DNA, 320 bp, Zea mays
ataagctatagccatcttcttctctgaattccagtccaagggccggaataccgtcagagggagtgggagagggggggaaaaaagatggtgaagctcgcatttggaagctttcgcgactctttgagcgccgcgtcgctcaaggcctatgtggccgagttcattgccacgctgctcttcgtgttcgccggcgtcgggtccgccattgcctactcgcaattgacgaagggcggcgctctggaccccgccggcctggtggccatcgccatcgcccatgcgttcgcgctcttcgtcggcgtctccatggccgccaacatctccgg

SEQ ID NO: 2204 - DNA, 313 bp, Zea mays
gccgccgccgccgccgtttcgcgcaccgtaccctagccctcgtcagcggcggcttcgagctcatccagccatgacgttcaagcggaggaatggcggacgcaacaagcacgggcgcggccacgtcaagtacatccgctgctccaactgcgccaagtgctgccccaaggataaggctatcaagcggttcttggtgaggaacattgttgagcaggctgccgtgagagatgtgcaggaggcctgtgtacatgatggatatgttctacccaaattgtatgcaaaggttcatcactgtgtctcatgtgcaatccatgcg

SEQ ID NO: 2205 - DNA, 312 bp, Zea mays
cccacccacctccactactgaccgattcccagaaagctcgatctagcgcgcgcggctgcagagtgcagacgacgacgtacaccatggcgcggcggtccctggccctgctgctcgcgtcgtcgctcgccctcatgtcggccgccgtcgcatcggcggactcgtggctctacgacaagttcaacacggacggcaccgtccgcacccagtacgacgcgtcggggcaggaggtggcgatgctcagcctggaccgcagctccggcgccggcttcaactccaaggagcagtacctgtacggcgagttcagcgtccaga

SEQ ID NO: 2206 - DNA, 313 bp, Zea mays
  unsure (1)..(313): unsure at all n locations
ccattcncgagtctccagccaaccgcatccagtccacccccatccccctcgaccccgacaaacccgacccgatggcgcccaaggccgagaagaagccagcggagaagaagccggcggccgaggagaaggcggagaagacgaccgcagtaagaagcccaagtccgagaagcgcctgccggcctcgaagtcctccggcaaggagggcggcgagaagaaggggaagaagaaggccaagaagagcgtggagacctacaaaatctacatcttcaaggtcctgaagcaggtgcaccccgacatcggcatctcctccaag

SEQ ID NO: 2207 - DNA, 313 bp, Zea mays
  unsure (1)..(313): unsure at all n locations
gctaaaccagcggaaacctaaccagctagcagcattagcttttcaacaagcctcgctcgcncgccgtgaccgatagatggccatcacccacgacgactacgtctccctgtgcctcatggcgctcgcagccgcngnangnggaggagggcacgctgcggctgccagtgnnnnnnnnnnnnnnnnnnnnnnncaagagtgcgagctccgcttccggtgctccgtctgcggcaaggccttcgcgtcgcaccaggcgctgggcgggcacaaggccagcnaccggaagcngccgccgacgctcgtncaggcggngtcg

SEQ ID NO: 2208 - DNA, 311 bp, Zea mays
gagaaatttaacatggttatagcgcctactctgaatttggatggcaccccagatactggctactatactcaggctggcagaaaaactctggcagacaattatgagtacgtcatgcaagggaagctttacaaaatctcagaagacacatcatccagccaaaacgctaaagtggagatgtatgcatcgttcggcgggcttcttatgctgctcaggggtgacccttccactgccgctagctttgagcttgatcagaggctctttctgctcatccgcaaggtgtaaaactgtggttgctgaccacttaggtgttt

SEQ ID NO: 2209 - DNA, 324 bp, Zea mays
cgggagtagtcgacgcgccgtcactgaatcctcagatcacggctagccgtaatcacgccactctgctgactcccggcgagcagtgtaacattttccttcagccatgggcaaggagaagactcacatcaacattgtggtcattggacatgtcgactctggcaagtcgaccaccactggccacctgatctacaagctcggcggtattgacaagcgtgtgattgagaggttcgagaaagaggccgcggagatgaacaagcggtcattcaagtatgcctgggtgcttgacaagctcaaggccgagcgtgagagaggtatcacaattga

SEQ ID NO: 2210 - DNA, 319 bp, Zea mays
ctagggttttgctgctctccgaccccgagctccgaacgccgcagcatcaggcgcggcccccctcgcgtgtgaccgagatggcgctgccgaatcaggggaccgttgattaccccagcttcaagctcgtcatcgtcggcgatggtggaactggtaaaactacatttgtgaagaggcatctcactggagagtttgagaagaaatatgaaccaaccattggtgtggaagttcatccgttggatttcaccactaactgtggtaagatcaggttctactgctgggataccgcaggcaagagaagtttggtggcttcaggatggat

SEQ ID NO: 2211 - DNA, 324 bp, Zea mays
ggaggtgacgcaggagcgcctggacgagctcatccgaggatacgccgcgctcgtcggcgtggtcccctccatgaaggcgttccactggggaactgatgtgagcatagaaaacatgcatcaagggttcatgcacgtcttcgagtccacgtttgaaagcacggaaggaatcaaggagtacattgagcaccctgcacacgtcgaattcgcaagtgtgttcttgcctgtgctggagaaggtcctcataatcgactacaaaccgacgtcggccaattagcggtagaacatgctgtgtacttgttcctcggaggatccagtttgattcta

SEQ ID NO: 2212 - DNA, 326 bp, Zea mays
cccttctcaaactcctgctctagaattcatgaaaggtggctccgagtcagagaagccaaaacaggagggagatggtaaagaaggtgttgatactgtggccacaagagttgaatctctgactataaatgaagatgtaaaagaaaacgagccagaagatgacgagggccttccgatttacctgtatgaacgtctgaagaccacagctgctgatcctgttactgaaattgatgtcacgaggcgagagacctacttatcttcaactgagttcaaagagaagtttgggatgacaaaggaagcatttagcaagcttccgaagtggaagcaga

SEQ ID NO: 2213 - DNA, 332 bp, Zea mays
cccaccaacagcaagcgaaaatctcccgatcccctctggtctccgcggcgaagatgtcggggcgcggcaagggcgggaagggcctgggcaagggcggcgcgaagcatcacggaaggtgctccgcgataacatccaggggatcacgaagccggcgatccggcggctggcgcgcaggggcggcgtgaagcgcatctccgggctcatctacgaggagagccgcggcgtcctcaagatcttcctggagaacgtgatccgcgacgccgtcacttaacaccgagcaaccggcgccgaaagaacgtcacagccatggacgtcgtctacgcggtcaagcg

SEQ ID NO: 2214 - DNA, 243 bp, Zea mays
ctttcgtcatctcttctccggcgaagaacccccagtcgctcatcagatcacttgttaaactttgttgaggggtgatggcggtttctttcgcaaacctcagctccgaggcagggcttaaaaagcttgatgagtaccttctcactcgcagctacatcactggctaccaagcttccaaggatgacttggctgtctacacttcgttttcggctgctccctcgtccaagtatatcaacgtagcaaggt

SEQ ID NO: 2215 - DNA, 314 bp, Zea mays
gcctcgggtcaaaccctaagcagggagttgatttatccgctgcagccatgagtaagttgcagtctgagtctgtcaaggatgccatctcccagattgttggggatgccaaggagaagaataggaagttcactgagactgtggaacttcagattggtctgaagaattatgatccacagaaggacaagcgtttcagtggctctgttaagttgccccatatccctcgtcccaagatgaaggtgtgcatgcttggtgatgcccgcatgttgaggaggacgagaagatgggacttgactacatggatgttgaggctctca

SEQ ID NO: 2216 - DNA, 316 bp, Zea mays
  unsure (1)..(316): unsure at all n locations
ccgagctgccctgctacacggtcccctgccaagatccatcttcccggttacgccgcctgatcgaagtgaacaagcaaggaagagccatggcgagcgagcacgcggcggggggcgaggctaagcatgaccagaagcagagcctgatggacaaggcgaaggggttcgtcgcggagaagatcgcgcacatccccaagcccgaggcgacgctggacggcgtgacgttcaagggcctgagccgggagtgcatcacgctgcacagcagctganacgtgtgcaacccctacgaccaccgcctcccatctgcgtagtgacctac

SEQ ID NO: 2217 - DNA, 287 bp, Zea mays
ggaaagcaacacaggagatgatgtgcatggtatgcctaaagattcaacctgttggttcgttctgccaaaccccatcttgcaacagactatcgatggcaaagtactactgtaacatctgtaaattttttgatgatgaaaggactgtgtaccactgtccgttttgtaatttgtgtcgtcttgggaaaggtcttggtgttgatttcttccattgcatgaaatgcaactgctgccttggaatgaaattaactgagcacaaatgtcgggaaaaagggctagagacaaattgt

SEQ ID NO: 2218 - DNA, 306 bp, Zea mays
  unsure (1)..(306): unsure at all n locations
cccagggccgcaagtgctggaggtccgccccatgatccgctgggacaagggcaaggcgctggagttcctgctccacgccctcggcttcgccgccgacgccgaccgcgacgacgtcttccccatctacgtcggcgacgaccgcaccgacgaggacgccttcagggtgctgcgcgcgcgcgggcacggcgccgggatcctcgtgtccaggttccccaaggacaccagcgcgtccttcacgctacgcgacnccgccgaggtcaaggagttcctgcgcaagctcgtcgagcgcaacgacgacagctgatg

SEQ ID NO: 2219 - DNA, 296 bp, Zea mays
ggcctggggtcggcaagactactgttatgcgtgagattgcgcgtgttttagcagatgaatttcagaaaagagtgggcaggtaattgtggacacaagtaatgagattggtggggatggggatgttcctcatgctgcgattggtggagcaagaaggatgcaagtacctgaaccatcaatgcagcatagggtgatgattgaagcagttgaaaaccatatgcctgaggtggttattgtagatgagatcggaactgaagcagaagcacaagcttgtcgatcaattgcagaaaggggtgtta

SEQ ID NO: 2220 - DNA, 312 bp, Zea mays
cgtcgtccgctgcgaggagatctgcatgtcgggcggcctcgtccgtcagaagatgaagtacctccgcttcctccgcaagcggatgaacaccaagccgtcccacgggcccatccacttccgcgcccccgccaagatcctgtggcgcaccatccgcgggatgattccgcacaagaccaagaggggggaggcggctctggcgaggctcaagacgtacgagggcgtcccgccgccgtacgacaagaccaagcgtatggtcatccctgacgctcttaaggttctgaggctacagcctggacacaagtactgcctcct

SEQ ID NO: 2221 - DNA, 310 bp, Zea mays
gcacggaggcgaaggaggaggagcagcagcagcaggcggcgccgaggagcggcatcccactcagtgcttgcaaccatggctaggggattgaagaagcacttgaagaggctcaatgcgcccaagcattggatgctcgacaagcttggcggagcttttgctcccaagccatcttctggacctcacaagtccagggagtgccttcctctgatcctcatcatcaggaacaggctcaagtatgctctgaactaacgggaggccattacaaccctgatgaacgccatgtactggttgatggcaaggtcaggactga

SEQ ID NO: 2222 - DNA, 277 bp, Zea mays
tggagattccggtgatcgatctcggcggcctcaacggcggcggcgaggagaggtcgcggaccttggcggagctccacgacgcctgcatagactggggcttcttctgggtggagaaccacggcgtggacgcgccgctgatggacgaggtcaagcgcttcgtctacggccactacgaggagcacctggaggccaagttctacgcctccgccctcgccatggacctcgaggccgccaccagaggtgacactgatgaggaaccctccgacgaggtggactg

SEQ ID NO: 2223 - DNA, 236 bp, Zea mays
cccgattcgaatcgagccagagtcccaggcagcggcggcggcggcgcccgcctccaagaccacctccacccggaccccagccccaaccccaagttaacagatgggggacgttgcgaaggacttgacggctgggaccgtgggaggggctgccaacctcatcgtcgggcacccgttcgacaccatcaaggtcaagctccagagccagcccacccctgctcccggacagctccccaagt

SEQ ID NO: 2224 - DNA, 283 bp, Zea mays
gcacgccaccttatctctagccggagatcaaagaagtagccgttaacgatggcttccgacgagctcgcaaaggccgtcgagcccaggaagaagggcaacgtcaagtatgcctccatatgtgccatcctggcctccatggcctctgtcatccttggctatgacattggggtgatgagtggagcggccatgtacatcaagaaggacctgaatatcacggacgtgcagctggagatcctgatcgggatcctcagtctctactcgctgttcggatccttcgctggcg

SEQ ID NO: 2225 - DNA, 285 bp, Zea mays
tggctgcttagccggccatgtctagggtgttggagcctctagtcgtcggcaaggtgatcggcgaagtcatcgacaacttcaaccccacggtgaagatgacggtcacctacggctccgacaagcaggtgttcaacggccatgagttctttccgtcggcggttctgtccaagccgcgagtgcaggttcagggcgacgacatgaggtccttcttcacactggtcatgacggacccagatgtgccagggcctagtgatccatacctgagagagcacctccattggatgg

SEQ ID NO: 2226 - DNA, 284 bp, Zea mays
ctccatcaagctccagcctgttggggtcagtcgcaggattagaaagctcatgcaaaacaatcaagtgcctgatctaggagaatttgaagatgttagtgagtttgtgaaaaaagctgggtatggatcagaaagtgaagcagacgatgaagcagcaatggtaagcttgccaagtgacattgacaaattaaaccgggcatccagaaaaagcgctgtcagactccaggagattggaccaaggatgactatgcgcctagttaaagttgaagctgggctatgttcaggag

SEQ ID NO: 2227 - DNA, 285 bp, Zea mays
gcaaagggcaaagcagaagttgcggttggcctcgtcctcctcttctccgtcgcggctcagatctctgcgtgcgtcgatggcgtcgttctcggaggctccccccgggaacccgaaagccggcgagaagatctttaagaccaagtgcgcgcagtgccacacggtcgacaagggcgccggccacaagcaaggtccaaacttgaacggtctttttgggagacagtcgggtaccactgcaggctactcctactctgcgggaaacaaaaacaaggctgtagtctgggaaga

SEQ ID NO: 2228 - DNA, 284 bp, Zea mays
  unsure (1)..(284): unsure at all n locations
gcacaaccacttactctcgtgcgctctccgtgggagcgaggactcgcggccggcggcagcggcaggttctcctagatctccggcatcatcagtaacaaatggctgacggtgaggacattcagccccttgtttgtgacaatggaactggcatggtcaaggctggttttgctggtgacgatgcgccaagggctgttttcccaagcattgttggacgcccccgtcacactggtgtgatggttggcatggggcagaaggatgcgtatgttggtgacgaggcncagtcc

SEQ ID NO: 2229 - DNA, 281 bp, Zea mays
ctgacggttgctctagatccgttcatcctggtggttttgtgaggtcgaaagcggcgagcgaattagaagatgctggacaagctgtgggacgacgtggtggccgggcctcgcccggagacgggcctcgagaagctccgcaaggccaccaccgcccgcccgctcgtcatcaacaaagacgcggacggcggcagctacaagcgggcgcagtcgatgccgtcgaccccgacgacgccggtgacgccgtcgtcgtcgtcgtcgtcgacgagccgcgcgcgccggca

SEQ ID NO: 2230 - DNA, 285 bp, Zea mays
gaaagcttatgtggaagaaagaatttgatacaagttatgttggcttcatgaaggatggtgcacaatggttggttgataatacagacatcaaactagttggagttgactacttgtcagtgggcgcatttgatgaatgcattccagctcatctagtatttcttgaaaaaagggaggtcatacttgtcgaagccttgaatctggagcatgttagccctggaatatacatcttgcattgcttgccactaagattgcggggtgctgaaggttctcctgcaagatgcatcc

SEQ ID NO: 2231 - DNA, 287 bp, Zea mays
gccgctcagcttcaacaccaccgtcgaggtggtgctgcaggacaccagcgtcctgggcgccgagagccacccgctgcacctgcacggctacgacttcttcgtcgtcggcacgggcttcggcaactacgacgccaccaacgacaccgccaggtacaacctcgtcgacccggtgcagcggaacaccgtcagcgtccccaccgccggctgggtcgccatccgcttcgtcgccgacaaccccggcgtgtggatcatgcattgccacctggacgtgcacctgacctggggtc

SEQ ID NO: 2232 - DNA, 285 bp, Zea mays
gatagatgcgttttttaaacgttaatcagacttggaagctgcctgtgtatttttacagggcttcacgatctcggattgggagggcatcgacaggatcaccagccctccaggggcgaactactcctactctgtgcaggcttcgattcttgctggcattgacatgatcatggtgcccaacaactaccaaaacttcatcaccatcctgacgggtcacgtcaacagcggcctgatcccgatgagcaggatcgacgacgccgtgactcggattctgcgcgtcaagttcac

SEQ ID NO: 2233 - DNA, 288 bp, Zea mays
caacatatctcctcgcattttccttgcaaccgattgcctatccccctcccaacccaagaccgatggcgcccaaggccgagaagaagctcgcggcgaagaagccggcggaggaggagcccgcggcggagaagacgaccgccgggaagaagcccaaggcggagaagcgggtccccgcgggcaagtccgccggcaaggacggcggcgatggcaagcgtggcaagaagaagggcaagaagagcgtggagacgtacaagatctacatcttcaaggtgctgaagcaggtgcacc

SEQ ID NO: 2234 - DNA, 288 bp, Zea mays
cgcgtgggcgccgccgacctcgcctccatccgcatggtcatgtccggcgccgcgcccatggggaaggacctccaggacgcgttcatggccaagatccccaacgccgtgctcggccaggggtacgggatgaccgaggcggggcccgtgctggccatgtgcctggccttcgccaaggagccgttcgaggtgaagtccggctcctgtggcaccgtcgtcaggaacgcggagctgaagatcgtcgacccagacaccagcgcgtcgctgggacggaaccagccaggcgagata

SEQ ID NO: 2235 - DNA, 275 bp, Zea mays
gaaattcactggccagtttggtgaccttattgctgaccttgctattgatgctactacaacagcaggtgttgaccttggtcagggtatgcgtgaagttgatatcaagaaatacattaaagttgaaaaggttcctggtggtcagttggaggattctagagtccttaaaggagttatgatcaataaggatgtcgtggctcctgggaaaatgaggagaaagatagtaaacccccgtatcatcctgttggactgccctgttgagtataagaaaggagaaa

SEQ ID NO: 2236 - DNA, 278 bp, Zea mays
cggctcgaggggaaagagcttacgctgctggggttatgggcgagcccgttcgtgctccgggcgcgcatcgcgctcagcctcaaaggcctcacctacgcttactccgaggagaacctcgacgacaagagcgagcttctcctcagctccaaccccgtgctcaagaaggtgcccgtgctcatccaccacggcaagcccgtctgcgagtcccagatcatcgtgcagtacgtcgacgaggctttccccgccgccgcacctaatttccttccatccgaccccta

SEQ ID NO: 2237 - DNA, 278 bp, Zea mays
cggctcgaggtcggtgttcagtgtgcgcaacatcgggaagactctcgtatccaggacacagggtaccaggattgcttctgagggtctgaagcacagagtctttgaggtttgcctagctgatcttcagggcgacgaggatcaagcttacaggaaaatcaggctccgtgctgaagatgtgcagggcaggaatgtgctcacaaacttttggggtatgaattttaccactgataaattgaggtccctagtgaagaagtggcagacattaatcgaagcccatg

SEQ ID NO: 2238 - DNA, 278 bp, Zea mays
gctgcttcaagtgctccgcctacaaggaggaggccgctgtgaacagtggcgctggcggctttgatggcgacatgtcacgctcacggggctacggcttcggcagcggtgctgctgctgctgctggtgctggcgctgcccgtactaccaaccgccccggttggaagtccggagactggatctgcaccagatccggatgcaacgagcacaacttcgccagcaggatggagtgcttcaggtgcaacgcaccgcgggactctggtagcgctgccatgacctac

SEQ ID NO: 2239 - DNA, 275 bp, Zea mays
ccaagctcgtgctcctctccgcgtccccaaggtacctcaatgatgtggactactatggcgggtttgagcaagatgagcttgatgagctgtttgaggcgatgcgatcaaactacaaggcctggtgctcaggttttgcgcccctgtgtgttggcggagacatggaatcagtggcagttcaggagtttagcaggacgctcttcaatatacgtccggacattgcgcttagtgttgcccagacgatcttccagagcgacgtgcgcagctcctcccgcacg

SEQ ID NO: 2240 - DNA, 280 bp, Zea mays
ctttctgtggattatccggttgagaaggtctcctgctatgtttctgatgatggtgctgcaatgcttacgtttgaagcattgtctgaaacatctgaatttgcaaagaaatgggttcctttcagcaaaaagtttaatatcgagcctcgtgctcctgagtcgtacttccaaatgaagcagcaaccttgtctttcaggtagtctatcttctgttggaagtaccactcaggagcacgaggttgctgcttcatttggaagtaccactcaggagcacgatgaagaga

SEQ ID NO: 2241 - DNA, 279 bp, Zea mays
gtagttctgttcctcttcctccccactcactcctgcgcttcctcgccgcgcggttccttctccctgatcctcctttggcttcgcggttcatggcgatgtggagggccgccgctaggagctggtcgaccgggcgctcggctcaagggccgcgcacacgtctacaggcagcaagaagatagtcggggtgttctacaaggccggggagtatgccgacaagaaccccaacttcgtcggctgcgtcgagggtgcactcggcatccgcggctggctcgagtcgca

SEQ ID NO: 2242 - DNA, 268 bp, Zea mays
tccatcctgacgggcgtcttctactgggtggcccagctgctgggcgccaccgtggcgtgcctgctcctcgggttcgtcacccacggcaaggccatccccacgcacgccgtcgccgcgggcatcagcgagctggaggtcgtcgtgttcgaggtcgtcatcaccttcgcgctcgtctacaccgtgtacgccaccgctgccgatcctaagaagggctcgctcgtcaccatcgcgcccatcgccatcggcttcatcgtcggcgccaacatcc

SEQ ID NO: 2243 - DNA, 267 bp, Zea mays
gttcctcacctagcggtagcgtgcgcgcgggagacgtagatggcggcttcggaggcggcagcggcggcggcaacaccggtgacgccgacagaggggacggtgatcgcgatccacagcctggaggagtggagcatccagatcgaggaggccaacagcgccaagaagctggtggtgattgacttcactgcaacatggtgtcctccgtgccgcgccatggctccaatttttgctgatatggccaagaagtccccaaatgttgttttcctg

SEQ ID NO: 2244 - DNA, 270 bp, Zea mays
ctgctgccttatacgaaacatagctactcctactactcaaatccatccttattgagcttagtgtttgatccatggactcggaaggagtagcagcaaaggtggcagatgagactactaaaccggcaagccaagaagacggcgagagcaaggccgggatgactgatctgctgatgctgaccgacaagtcgcagctgcaggcgctagcgatgctgctgcggaacaacgaggagctcatgatgagccaagcgatcaagtcggagacggagcgcg

SEQ ID NO: 2245 - DNA, 298 bp, Zea mays
  unsure (1)..(298): unsure at all n locations
gccagagatcaaacaaaccagagggagcgaggcatggcggcaggcttgcaggtgtttggccagccggcgtctactgatgtctccagggttctgacatgcctgtttgagaagaaactggagttcgatcttgtccgcatcgatacattcaagacgcatcataagcttcccgagttcattaggcttcgggatcctaatgggcaagtgaccttgaagcacggcgacaaaactctcgttgattcgagggacatctgccggtacgtctgcacccagtttccanacgatgggaaacaagagcctt

SEQ ID NO: 2246 - DNA, 308 bp, Zea mays
cggctcgaggggcgagatgctgttcggctaccagccgtgcgccaccaaggacccccgcgtgttcggcgacaccgccggggacttcgtgcccgaccgcttcctcggcgaggagggcagcaagctgctgcagtacgtgtactggtccaacggccgtgagaccgagaaccccagcgtcgacaacaagcagtgccccgggaagaacttcgtggtgctggtcggcaggctcctcctcgtcgagctcttcctccgctacgacacattcaccgccgaggtcggcaaggagctgctcggcaccagcgtcatcttca

SEQ ID NO: 2247 - DNA, 298 bp, Zea mays
ccgttcaggatccacatcttcccgagcgagttcttggttggcctcttcctcttcggaccacctccaaggctcttggtgtagcttgccactctcaccaatcaagttttcatgtctgatctcgacattcagatcccaactgccttcgatcccttcgctgaggccaatgctggggactctggtgcagcagcagggtcaaaggactacgttcacgtgcgcatccagcagcgtaatggtcgcaagagcctgaccaccgtccagggattgaagaaggagttcagctacagcaagatcctcaaag

SEQ ID NO: 2248 - DNA, 308 bp, Zea mays
tgcaacagttgttctgtgctactcagtcattgcgcctttgattattccgttcggtgttgcatactttgccctcggttggcttatagcaagaaatcagatcctgagagtttacgttcctagctacgagagctacggacgaatgtggccacacatgcacacgaggatcatcgcggctctgatggtttaccagaccaccatgatcggcttcatctccctgaagaagttcgcctacgcgtccgttctcgtgcccctgcttccagccagcataatcttcgcctacgtctgccacatgcgcttctacccggcgt

SEQ ID NO: 2249 - DNA, 306 bp, Zea mays
gcaactcgccagctgcatgacattgacgccttggaccagatggttgatccggcgctcaagggtccttaccccgccaaatccctttcccgttttgcggatgttattgctctgtgtgtccagcctgagccagagttcagacctccaatgtctgaggtggtgcaagcgctggtgcggctcgttcagagggtcaacatgaccaggagcatgctagatggcgcggaggcttctcggcggccggatgaccaggcccaggaattcgtctaacaagctactgagacaatatacacatcatgtgctgtacctgca

SEQ ID NO: 2250 - DNA, 308 bp, Zea mays
cggctcgaggcggcgaggtcggcgcacgtcttcgctggcccccaagatcggcccgctcggtctttcccccaagaagatcggagaggacatcgccaaggagacggccaaggactggaagggcctccgcgtcaccgtcaagctcaccgtccagaaccggcaggccaaggtctccgtcgtcccctccgccgcggcgctcgtcatcaaggcgctcaaggagccagagagggaccgcaagaaggtcaagaacatcaagcacagcggcaacatcagcctcgacgacgtcatcgagatcgccaggtacatgaggc

SEQ ID NO: 2251 - DNA, 305 bp, Zea mays
gcaggagactgagatggggggttttgtcaagacccacaagagcaatgcatacttcaagcgtttccaggtgaagttcaagagaaggcgcgctggcaagacagactacagggccaggataaggctgattaaccaagacaaaaacaagtacaatacacccaaatacagatttgttgtgcgatttaccaacaaggacatcacagcacaaatcatctctgctagtatagcaggtgatatggttcttgcttctgcttactcgcatgagttgccacgatatggtcttgaagttggtctgaccaactatgcag

SEQ ID NO: 2252 - DNA, 304 bp, Zea mays
cggctcgaggaaaaagacagaatcgagacccgtggtttgtcaaagcatgcaaagacttacaaggaggacgatgataagatgcgaactacagctgcaaatgttgctgcacgagttgcagcggggggagatgacatgctgtcaaagtggcaattactagctgaacggaataagcagagaagtgagggaggtgatggttcttctggctctgtaccaggtaacatgttgcaacacaggccatcactgaaatctgggaaagacttaagggaagaacatgaagttgaaaagagaggatactccacaatgc

SEQ ID NO: 2253 - DNA, 311 bp, Zea mays
tgtcatctcatccctgactgcttccctgaggttcgatggtgctctgaacgttgatgtgaacgagttccagaccaacctggtgccctaccctaggatccacttcatgctttcgtcctacgctccagtcatttctgctgagaaggcctaccacgagcagctgtccgtggccgaaatcaccaacagcgccttcgagccatcctccatgatggccaagtgcgacccccgccatggcaagtacatggcatgctgcctcatgtaccgtggtgatgtggttcccaaggacgtgaacgctagctgtggcacaatcaaga

SEQ ID NO: 2254 - DNA, 303 bp, Zea mays
aggcgaagaggagcagcagcagcaggcggcgccgaggagcggcatcccactcagtgcttgcaaccatggctaggggattgaagaagcacttgaagaggctcaatgcgcccaagcattggatgctcgacaagcttggcggagcttttgctcccaagccatcttctggacctcacaagtccagggagtgccttcctctgatcctcatcatcaggaacaggctcaagtatgctctgaactaccgtgaggtcatttctatcctgatgcaacgccatgtacttgttgatggcaaggtcaggactgaca

SEQ ID NO: 2255 - DNA, 301 bp, Zea mays
  unsure (1)..(301): unsure at all n locations
ccctcatctaaggactggagncgtggaagggctgctagtttcaacatcattcccagcagcactggagctgctaaggctgttggcaaagtgcttcctgtccttaacggaaagttgactggaatgtctttccgtgtcccaaccgtcgatgtttctgttgttgatttgactgttaggcttgaaaagtcagcaacctatgatgagatcaaggctgcggtcaaggccgaggcagaaggtagcctcaagggcatcctgggttacgttgaggaggaccttgtttccaccgatttccagggtgacagca

SEQ ID NO: 2256 - DNA, 304 bp, Zea mays
agacggaggagccatgtctgaggagaagcaccaccaccacctgttccaccaccgcaaggcagaggaggaggaaggcgcctccggcgaggtcgactacgagaagaaggagaagcaccacaagcacatggagcagctcggccagctcggcgccatcgccgccggcgcgtacgctctggtgagaccgaaaaaacccaacctccatccctttggtcgcctgatcgatgcatgccatggtccagctcttgatctgtgtgtgtctgtgcgtgtgcatcgacgtgtggctgcagcacgagaagcacaaggc

SEQ ID NO: 2257 - DNA, 300 bp, Zea mays
tccagttcgtggactggtgcccgactggcttcaagtgcggaatcaactaccagcctcccagcgtcgtccccggcggtgacctggccaaggtgcagcgtgccgtgtgcatgatctccaactccaccagtgttgtggaggtcttctcccgcattgaccacaagttcgacctcatgtacgccaagcgcgccttcgtgcactggtacgtcggtgagggtatggaggagggcgagttctccgaggctcgtgaggatctggctgcgctcgagaaggactacgaggaggtcggtgctgagtttgacg

SEQ ID NO: 2258 - DNA, 297 bp, Zea mays
ccgtcgcatcccatcccactaccacccatctcgtcgtccgccgattcgatccggttcttccaacccaggggcagtgatggcgacgaagaggagcgtgggcaccctcggcgaggcagatctgaaggggaagaaggtgttcgtgcgcgccgacctcaacgtcccgctcgacgatgcccagaagatcaccgacgacacccgcatccgcgcctccgtccccaccatcaagttcctcctcgagaagggcgccaaggtcatcctcgccagccacctgggtcgtccaaaaggtgtcaccccaaa

SEQ ID NO: 2259 - DNA, 266 bp, Zea mays
  unsure (1)..(266): unsure at all n locations
gtacgagtacgttgagtaggacctcggcaacaagagcgcgctcctgctcagctccaacccggtgcacaagaccgtgcccgtgctgctccacgcgggtcgccccgtaaacgagtcccagatcatcctgcagtacatcgacgaggtctgggcggggaccgggccggccgtgctgccgcgcgacccctacgagcgcgcggctgcgcggttctgggcggcctacatctacgacaangtgaagtccgcgtggctgagcatgctgttcgagt

SEQ ID NO: 2260 - DNA, 294 bp, Zea mays
ggcggtctttgctggcctcgtgtcgtatccacggagacatggagagaggccaacttgtggcggacaagataatggatctggagcccacttcctcagcatcctacgtaattctctacaacatgtatctggatgctggcgagctgtcctcggcttcaaagactcgagatctgatgaaagagcgaggcgtgaagaaagagcctggtcttagttggatcgagctgagctctggagttcactcttttgttgccggtgacaagtcccatccagagagcaaagcaatatacagaaaagtgg

SEQ ID NO: 2261 - DNA, 293 bp, Zea mays
gttgcagcagcatgtacgtgttcatgcaatggaagcagtgatgggttgctgggagcttgaacaatctttacaaagcctaacaggggcatctccgggtgaaggcactggaggaaccatgtctgacgatgaagataaccaggtggatagtgaagccaacatgttcgatggaaatgatggatcagacggtatgggctttggccccctaatactgacagagggtgaacggtccttagttgagcgtgtacggaaggagctgaagaacgagcttaagcagggttacaaggaaaagcttg

SEQ ID NO: 2262 - DNA, 295 bp, Zea mays
atttcttctctctctgctcctccgcctccgcctgatccatccaagacagggatcgccatgtcggactcggaggagcaccacttcgaatcgaaggccgacgctggggcgtccaagacctacccgcagcaggctggcaccgtccgtaagaacggcttcatcgtcatcaagaaccgtccctgcaaggttgtggaggtttctacctccaagactggtaagcatggccacgccaaatgccactttgtcgccatagacatattcaatgggaaaaagcttgaagatattgttccttcatcac

SEQ ID NO: 2263 - DNA, 278 bp, Zea mays
gtcccgagcgacacaacagacagatgaggaaggagaaggatatgggaggcgaggcgggaatggggctccgcgtccgcgcctcctccctcctgctgtcactggtcctcgagctcgccgtcgcgctcgtctcagtgtcggcgcacacaagttcgggatcaactacgggcagatcgcgaacgacctcccggacccggcgcaggtggcgacgctcctgcagtcgatgggcgtgaacaaggtgaagctgtacgacgcggacccccgggtgctgacggcgttcg

SEQ ID NO: 2264 - DNA, 276 bp, Zea mays
gtcgccgcgccggggatcgccgctcgccgccccgggcgccgacgcggcggcgctggtggccgccgacgggcacggaagccgcgaaggcgggggggtgtccatagggcaacgtcggaatgaggaggtggagtccaagatcgccgcgtggcatgtcgccgaggtggccaaggtcaacaaccgcttcaagcgcgaggaggtcgtcatcaacggctgggagggcgaccaggtcgagaaggccagcgcgtggctcaagaagtacgagaggaagcttgagga

SEQ ID NO: 2265 - DNA, 279 bp, Zea mays
ctagtcagcactgagtcgtttgaggtgctcgtggtgatgttaggtactagatgggtgtcattacttatgaatgcgatgttgctgtgacagaactgcatttccttttgtactatggttgtccaagttgtcattaccatgatgtgaggtagcttaactggttgttgctataccttatgcagcattttgctgaagttatcaccatgaggtgaggtagtttgagtgatttatgtggtattagagaattcaactgtgtcaagttcgtgcaacgtcatttgttca

SEQ ID NO: 2266 - DNA, 285 bp, Zea mays
gtcagccacggtgctcctgctgctggtccggaggcagccacgcttgcaagatggatctgccagagttacaggttccatttcggggctgagcttatcaaatccgcagacggtagcggctgtggtgaagcagtgctgaaaactctctggcaccatgccggcgctatactctgctgctctctcaaggccttgccagtgttcacgttcgcgaaccagtccgggctcgacatgctggagacgacgctggtggcgctgcaggacatcgcgctggagagagtgttcgacgac

SEQ ID NO: 2267 - DNA, 273 bp, Zea mays
gcaggggcaggggcaggggcggcgcagaaagagagccacacaccccacacctatacgctacgcgcgtgctgggcgagtgatggacctcgccctcctggagaaggccctgctggggctgttcgctgcggcggtgctggccatcgccgtggcgaagctgacgggcaggcggtaccgcctgccaccgggcccccgtggcgcccccgtggtggggaactggctgcaggtgggggacgacctgaaccaccgcaacctgatggcgctggcgaggcggtt

SEQ ID NO: 2268 - DNA, 271 bp, Zea mays
cggcgacccagcacgatggcccgctacgaccgcgcgatcaccgtcttctcccccgacggccacctcttccaggtcgagtacgccctggaggccgtccgcaagggcaacgccgccgtcggcgtccgctgcacggacaccgtcgtcctcggtgtggagaagaagtcaacccccaagctccaggactccaggtccgtgcgcaagatcgcgtgcctggacacccacatcgctctggcatgcgcggggctgaaggcggacgcacgcgtgctcatca

SEQ ID NO: 2269 - DNA, 276 bp, Zea mays
ctggacttcgctcgcatactctctccatccttgtgaatgactgtcctggtgtcctcaacattgtaacaggagtctttgctcgcaggggctacaatatacagagccttgctgttggcccagctgagaaggaaggcatttcgcggattacaacagttgttcctggtactgttgaatccattgagaagttagttcagcagctttacaagcttattgatgtgcacgaagttcatgacattacccactcaccttttgctgaaagggaacttatgcttatta

SEQ ID NO: 2270 - DNA, 276 bp, Zea mays
gcaaaaccatcagatctagcagaactctctcgacctcatcggcgttggcggacgcgtgttgaccggagatggcgccgagcgggtggaggaggagcgcggcggcgcgggtcgcctggcgcccggccacggtttgcctgtggctcgcgctcgccgccgccgcactgacgctcgcccaggctaagaaggacctgacggaggttacccacaaggtctacttcgacatcgagatcgacggcaagcccgcaggccggattgtcatggggctttttgggaaga

SEQ ID NO: 2271 - DNA, 270 bp, Zea mays
ggtcggcatggctgccgcagtggtcgacgacgctggtatggacgccgtccagaagcgcctcatgttcgaagacgaatgcattttggtggacgagcaggacaatgttgttggccatgagtcaaagtacaactgccatttgatggaaaagattgattctgagaatctgctacatagggcattcagtgtgttccttttcaactcaaaatatgagctgctacttcagcaaaggtccgcgacaaaggttacctttcctttagtttggaccaatac

SEQ ID NO: 2272 - DNA, 270 bp, Zea mays
gacagtgtttaaaaaaatcctctcgtctatctcacactaaaatacatatctaaggtccagctcgagctatggtcattgtcacatggactacaatgctgctttgtattggtgggatagaggttcagttgttttgtcggccttcgtgagaaggtcgttttcttcttagatgcctgagagctgtcttacttctcgtaggtcgagttttttttaactagtgtgatttgtgccataccttaacatggacctagatgtgcatgttaggaatttagg

SEQ ID NO: 2273 - DNA, 272 bp, Zea mays
tccgactacaaggttgtcaagaagccagccttggtaaagatgtggcgccagtcgtcttcgccgcgctgcctgcccttggtgttcaccatcatgagcatgtccatcagcagctgggcctcgtacatgaccggccccatgtacgggcccaggagtatctcaatgatgatcaccttccctccttcttggcgggaagggatggccttcctgcacagctccaggatcttgacgcagtcgtcgtcgctccagaagtgcaggacgagcttgagcatgac

SEQ ID NO: 2274 - DNA, 273 bp, Zea mays
gaaacaatcaaccagcaacactcttctcttataacatagtacagcgaaggtaactcacatggcaacttccatgggttgtctcgtcttgctctgccttgtttcttctctccttcccagtgccgtccttggccacccatggggtggcttgttcccacagttctatgaccattcgtgccccaaggcgaaggagattgtgcagtccattgtggcacaggctgtggccaaggagaccaggatggcggcatctttagtcagactgcatttccatgactg

SEQ ID NO: 2275 - DNA, 274 bp, Zea mays
cggccatccagcacaagctccgggaggagctcgcctcggtgctgggcgccggcgtgcctgtgacggagccggacctcgagcgcctcccctaccttcaggccatcgtcaaggagacgctccgcctgcgcatggccatcccgctgctggtcccccacatgaacctcaacgacggcaagctcgccggctacgacatccccgccgagtccaagatcctcgtcaatgcctggttcctcgccaacgaccccaagaggtgggtgcggcccgacgagttccg

SEQ ID NO: 2276 - DNA, 272 bp, Zea mays
acattactgggctgacttttgccaacaagggtctcagtggtagtatctcaccggccattgggaagattagctcacttaaggtgctagatcttgctaacaataacatcactggtactgtgcctgaggaggttgccgtgttgcctttgctgacaaaaattgatttgtcaaacaacaatctctatgggaaacttcctacctttgcttccaagaatgtggcggtgaatactgctggtaaccctaacataggcaaggatgctcctgcaccaactgca

SEQ ID NO: 2277 - DNA, 270 bp, Zea mays
cctgccccgcaatgtccgattggagcacaagacattgaagcttctgaagtattggacctggcaatttgttattgttaggccagtatgttccattctgattattgcactccagcttcttgggctgtaccccagctgggtcagctggacgtttagtattatactgaacttttcagtctccatggccttatatgcattggttctcttctaccacttgtttgctaaagagctggcacctcacaagcctcttgcaaagttcttgtgcatcaaagg

SEQ ID NO: 2278 - DNA, 274 bp, Zea mays
gccgggtcggatctgagacgagacgagttaccatctcatcccaactccggaacgaacaagttaccatctcatcccaactccgcctcgaccggatctcgtcggactcggatccgcccgaccaccccgcgccgccgcagatcaaagaagatggcagctgtcgacacattcctcttcacctcggagtctcgtgaacgagggacaccctgacaagctctgtgaccaggtctcagatgccgttcttgacgcttgccttgctgaggaccctgacagcaag

SEQ ID NO: 2279 - DNA, 270 bp, Zea mays
atgctgggcagtacttacaagaaaaatatggaactgcattctttcccatcctctatatctgggctgttggtttgttagcatctgggcagagtagcacaattactggcacatatgcaggacagtttgttatgggaggtttccttaatcttcgattgaagaagtggctacgggcaatgattactcgaagttttgccattattccaactatgattgtggctttatttttcgatactgaagatcctactatggacattctgaatgaagcactca

SEQ ID NO: 2280 - DNA, 273 bp, Zea mays
ggcttaccttcatggttgcaaaatttgatggcattcttgggctaggctttcaagaaatctctgttgggaatgcaacaccagtgtggtataacatggtgaaacaaggtctcatcagcgaccctgttttctctttctggtttaaccgacatgctgatgaaggagaaggtggtgaaattgtgtttggtggaatggattctagccactacaagggtgatcacacgtttgtcgcagtcactcggaagggatactggcagttcaacatgggtgatgtcc

SEQ ID NO: 2281 - DNA, 269 bp, Zea mays
  unsure (1)..(269): unsure at all n locations
attaagtggtcataaagatgagggatatgcattgattggagtcacttgttactggaagacttgtttctggcgactgcaataagtgcattcacctatgggagccgacttcanacaactggaacgtagatgcaaacccatttgttggacactctgcaagtgttgaagatctacagtggagtcccacgaagccgacatatttgcctcatgttctgtggatggtacgatatcaatatgggatatacgtacaaggaagaaaccttgtatttctg

SEQ ID NO: 2282 - DNA, 291 bp, Zea mays
cgatcccagcatccgagagagctccacaggccaggtccccatcgccgcggcgcttgccccacctctcccccgcccggtagtagcctcgccgccgttgccgagatggggttcgtgtccttcgtcgggagggtgctcttcgtcgccgctttcctcctctccgcctaccaggagtttaatgaattcggtgctgatggtggaccagcagctaaggcccttcggcccaaattcaacgtgtttgtcaaaaatgtatctgctcatctgggagtagctgtgccacacattgagttgaag

SEQ ID NO: 2283 - DNA, 289 bp, Zea mays
tgtgaaaacactgagagcacagcccaatgctaatgaccaatacttgcccccatttgtgatagttgatgacagcggcaaagctgttgggcctgtattagatggtgatgcagttgtcactatcaacttccgggctgatcgcatggttatgcttgctaaagcactagagtatgcagattttaacaattttgaccgtgtacgtgtccccaaaattcgatatgctgggatgcttcagtatgatggtgagttgaagcttccaagtcgctaccttgtttccccaccagagatagat

SEQ ID NO: 2284 - DNA, 287 bp, Zea mays
cagcaacgtcaccgtcaccgtctcggacaaggacgtgctcctggaggtgcagtgccggtgggaggacgctcctgatgacgcgagtgttcgacgccatcaagagcctccatttggacgtcctctcggttcaggcttcagcgccagatggcttcatggggcttaagatacgagctcagtttgctggctccggtgccgtcgtgccctggatgatcagcgaggctcttcgcaaagctatagggaagcggtgaaggggcagctggaaatttggacatcgacgggcatggaag

SEQ ID NO: 2285 - DNA, 290 bp, Zea mays
tgtcgtcgttccagctgcagtccagagttggaacccaagcgcacgcagcaccgtcgtcgaactcttcccttttcggcggcattggagatggcggcgaatctagaggacgtgccgtctctggatctgatgcacgaactgctccgtcggatgaagtgcagctccaagcccgacaagcacctcatcctcatcggcccacctggctctggaaagggtactcagtctccccttattaaggatgaatattgcctgtgccatttagccactggtgatatgttgagggctgctgtggc

SEQ ID NO: 2286 - DNA, 265 bp, Zea mays
  unsure (1)..(265): unsure at all n locations
atattggacacggtctaagatacggacgntatcaagattctcaatggatggagataaaccaccatggagaatcttgataacgttcgcagtttagacgtgtcaagaggttncctcatgagggacctatgtgcgaccttctgtggtctgatccagacgatagatgtggctggggcatatctccacgtggtgctggatacacttttggccaagacatatcggagcagtttaatcacaccaacaatcttaaactcgtaactcgggctca

SEQ ID NO: 2287 - DNA, 287 bp, Zea mays
caggttacagaatggctctcgagtgtgccagagattctttgctaaaaaagaccatggacaacaaagaaaatacagataaattcagatctgatctcatgaatattgctatgactactcttagttcaaaaatactttcccaagacaaggagtacttcgctgaacttgcggttgatgctgtcttgaggcttaagggtagcaccaacttggaatctattcaaattctgaagaaacctggaggatctcttaaggattcctttttggacgaagggttcattcttgacaagaaa

SEQ ID NO: 2288 - DNA, 282 bp, Zea mays
  unsure (1)..(282): unsure at all n locations
tgattattgccaataggatacactaacagtaacagtaacagggttccacaatagcagtataacaacaaaacgaaaggtcgacgattgaaggaaaggacacacgaaaatggtccttgtacaagcatggcatggcatggcatgacgactactactgctcctcgtcaggcttgtttgcatcccgcatttcatcgccaccatcctcctgcatgtcggaagtccacaaggtgaggttgtcacgaagaagctgcatgatgnaggtgctatccttgtacgactcttccc

SEQ ID NO: 2289 - DNA, 283 bp, Zea mays
cgcgcttccaagaggtgaattcgcttcaaaagcacttagccacagcttcactgtgttcgcgaaagatatggttgaggcgatatcattctcaaatctgtatgcccctgagcatttgatcatcaacgtaaaggatgctgagcagtgggaggagttcatcgaaaacgcagggtcagttttcttgggccaatggaccccagagagcgtgggcgattatgcgagcgggacgaaccatgtccttccgacctatggttacgcaaggatgtacagcggtgtatcgctgaac

SEQ ID NO: 2290 - DNA, 281 bp, Zea mays
cggctcgagggactctgaagtatctgggaaacatgctcagataaactggaatgcaaagacattaaaatgggaacttgtggacatgggcagcttgaatggaactttcttgaactcccaggcagttcatcatccagatgctgagtctaggcattggggtgaacctgctgaacttgcacatggtgatattataactctagggacttcatctaaactatctgttcaaattacactgcaaaatcaacgagttcctgctggtgttggtatggcatccgatccaatgg

SEQ ID NO: 2291 - DNA, 276 bp, Zea mays
tggcgcgcagccgggtcgcgctaccatgcttgccgccgtgcaggcggcggcgcctccgccgtcatcaatcttgctcatgctcggcatgcagccacatgtaaggcagatgaggaaggcaggatgtcgcagcgtaagttcgagcagccgaggcacggctccctcggcttccttcccaggaagcgctcctcgcgttactgcggtaaggtgaagtcattccctagggatgatcccaagaagccttgccatctcactgacttccttggctacaatgctggc

SEQ ID NO: 2292 - DNA, 277 bp, Zea mays
gcggcgtcgagcacggcaccggcggcatgaggcacggcacgggaaccaccggcggcatgggccagctgggtgagcacggcggcgctggcatgggtggcgggcagttccagcctgcgagggaggagcacaagaccggcggcatcctgcatcgctccggcagctccagctccagctcgtcggaggacgacggcatgggcggaaggaggaagaagggaatcaaggagaagatcaaagagaagctgcccggtagccacaaggacgaccagcacgccacggc

SEQ ID NO: 2293 - DNA, 276 bp, Zea mays
ctatcttcaacgacaaagagcttgagcttctgattagtggtcttccagatattgacttggacgatttgaaaacaaatacagaatattctggctacagcatagcctctccagtcgtccagtggttctgggaaatcgttcaggggttcagcaaggaagacaaagctcggttcctccagttcgtcactggcacttcaaaggtaccgttggaaggttttagtgaacttcaagggatctctgggccacaaaggtttcagatacacaaggcatacggcagca

SEQ ID NO: 2294 - DNA, 276 bp, Zea mays
ctagggttttgctgctctccgaccccgagctccgatagccgcagcatcaggcgcggcccccctcgcgtgtgaccgagatggcgctgccgaatcaggggaccgttgattaccccagcttcaagctcgtcatcgtcggcgatggtggaactggtaaaactacatttgtgaagaggcatctcactggagagtttgagaagaaatatgaaccaaccattggtgtggaagttcatccgttggatttcaccactaactgtggtaagatcaggttctactgct

SEQ ID NO: 2295 - DNA, 277 bp, Zea mays
gcgcaacccatcagaaactattgagctctttttgtctgaaaatgttccagcagatttggtaaattcatatctgaagcagcatgccccaaatttgcagtcaacttacttagagctaatgctctcaatgaatgatactgggatcaaccctaatctgcaaaacgagctggtacaactgtacctttctgaagttctagactggtacaagattctgaaggaagagggaaactggacagagaagacatattccccaacacggaagaagttaatatctacgttg

SEQ ID NO: 2296 - DNA, 275 bp, Zea mays
agagaaggaagaaagcgatgatgatatgggcttcagcctcttcgactaggctgcacagtcatcacagtattgttttgggcagtgaaaccagaggaaaaccagagtcatgtttagattttaagcttgttttatgttggaaagtactggaaagactgctacttgtctttatatttggtaattcagccgtagattgctatgctggttgggatttactcgtgaaccagagtttttctgtcttatatatcctgaattggttatcccaaagtttcttggct

SEQ ID NO: 2297 - DNA, 278 bp, Zea mays
caggaatccctcgagtccaaggtgaacgagactaaggcaacagtcaagttccagctcaagaaggtcctttgcatgggtgtcgccgtcggcaacttggcgatggaggagaagcagatccagcagaacatccagatgagcgtcaacttccttgtttcccttctgaagaagaactggcagaatgtgagatgcctgtacgtcaagagcaccatggggaagccatacagggtgttctaagtctgctcttttgtgaagtctgctaggttctggcaccgaggttt

SEQ ID NO: 2298 - DNA, 267 bp, Zea mays
  unsure (1)..(267): unsure at all n locations
ccatggcgtccgagggcagcggcgtggtgacggtgtacggcaggaacggcgcggagctgctggagccgtccaggcagcccaagtcggcgactttctccgtcaaggtggggctggcgcagaggctccggggcgggggcagcatggacgtggtgaccccggagcaggcgcgcctctcggaggagnccggcgcatgcgccgtgatggcgcgggagcgggtccccgccgacatccgcgcgcaaggcggcggggcgccatttcggacccggg

SEQ ID NO: 2299 - DNA, 276 bp, Zea mays
tgattgacgcgattggtgggagcagaaatcccaaggatcaacaatacatgaagatgaccttgaatcagttgcttgttgaactagatggctttaagcagaatggcggggtcattgtcattgctgccactaacttccctcagtcacttgacaaggcgcttgttaggcctgggcgcttcgaccgtcatattgtggttcctaatccagatgttgagggccggcggcagatcctggaggctcatatgtcaaaggttttaagagctgatgatgtggatctga

SEQ ID NO: 2300 - DNA, 291 bp, Zea mays
gatcgcatgctacgcgattcggctcgagcgaggatccacttcatgctctcctcctacgcaccggtgatctcttctgcgaaggccttccacgagcagctgtctgtggcggagatcaccagcagcgcgttcgagccggcttccatgatggtcaagtgcgacccacggcacggcaagtacatggcttgctgcctgatgtaccgcggcgacgtggtgcccaaggacgtgaacgccgcggtggccaccatcaagacgaagcgcaccatccagttcgtggactggtgcccgacgggg

SEQ ID NO: 2301 - DNA, 296 bp, Zea mays
tgttcatgatggctggggtgttgccgtgctggtgggtgtgccgcataaggacgctgagttcaagacccacccgatgaacttcctgaacgaaaggaccctgaaggggaccttctttggcaactataagccacgcactgatctgccaaatgtggtggagctgtacatgaaaaaggagctggaggtggagaagttcatcacgcacagcgtcccgttcgccgagatcaacaaggcgttcgacctgatggccaagggggagggcatccgctgcatcatccgcatggagaactagatttcgc

SEQ ID NO: 2302 - DNA, 293 bp, Zea mays
  unsure (1)..(293): unsure at all n locations
cacgcctgccgcggcgaactatctgtcncccctccccccggcgtcgcgctctggtcgtcgtcggccgggaagatggctggcggcttcagggtactgcatctggtcaggccctttctggctttcttgccagaggtgcagagcgcggataggaagataccattcagagaaaaagttatctacactgttatttctctcttcatttttctggtgtgcagccagcttccactctatggcattcattcgacgactggagctgatcctttctactggatgcgtgttatccttgcatcaaa

SEQ ID NO: 2303 - DNA, 328 bp, Zea mays
gctccatccgaggtagtaactcggattcggctcgaggggaagcgacaagaatcgagtcgatcgagatggtgcagttcggcaagtggctgaggaggcagatcgagcggagctcccggagtggcaggaccagttcctgcgctacaaggagctgaagcggtgcgtcaaggcccgctccggcggctgcccgccgttgcccgcggaggaggccgagttcgtggccgagatcgacgcggagaccgagaagatcaacgccttcttcctcgaccaggaggaggagttcatcatccgccaccgggagctgcagaaccacatcgagcgcgcgctgggc

SEQ ID NO: 2304 - DNA, 294 bp, Zea mays
tgcaagcaggagtatagacatgtagcgttgcacttgcactgccctcccagctggtttggtttggtttcgttttggttttggttgggttttcacaggcaccgcgcgcgcgccggcgatcgagatggccgactggggccccgtggtggtggcggtggtgctgttcgtgctgctgtcgccgggcctgctgctgcagctgccggccaagggcgggcgcttcgtggagttcggcaacttccagaccagcggcgcctccatcttcgtccacgccatcatcttcttcgccctcgccgccgt

SEQ ID NO: 2305 - DNA, 283 bp, Zea mays
  unsure (1)..(283): unsure at all n locations
gttgggcgcagagaatccccaagcaaacaaacagggtagagggagaggagaggagaggagaggagaggttgggtctgggacaccatggctccgatgaagctgtacggggcggtgatgtcgtggaacgtgacgaggtgcgcaacggcgctggaggaggctggctccgactacgagatcgtgcccatcaacttcgccaccgccgagcacaagagccccgagcaccctcgtcgctactcgtttggtcangttccagctctgcaggatggtgacttgtacctcttcg

SEQ ID NO: 2306 - DNA, 283 bp, Zea mays
gcccaaagagcgtccatggtggaaccagcttctgtgttgcgcatggagggggcaaacgctgctctgttcccgggtgcaccaagagtgcccgcggtcgctctgattgctgtgtgaagcacggtggtggcaagcgttgcaggttcgatgggtgtgacaagagcgcacaggggagcactgacttctgcaaggctcatggagggggcaagcgatgcgcttggagcaccggctgcgacaagttcgctaggggaaggagtggcctatgcgcacgcatacgaccctgatg

SEQ ID NO: 2307 - DNA, 289 bp, Zea mays
ttgtgactgtcgcgcatgttcttcgtgtcactgtgacaactttcgtgacgaccatgtgcatgcatgcatgatcgaccggaccgcgacgcatgcagtacgagaggcacgaggcgaagaaggacccggagcacgcgcagcgcacaagatcgaggagggcgtggcggcggtggcggccctgggcagcggcggcttcgcgttccacgagcaccacgacaagaaggaggccaaagacgcggcggaggacgccggggaggacgaggaggagtccggccgccgcggcgaggggaag

SEQ ID NO: 2308 - DNA, 285 bp, Zea mays
  unsure (1)..(285): unsure at all n locations
tgcgaactcccccctccctgcctccttccccggcgccccgctcttcctccttccgctccggcgatgggcactggccgccgcggcgcggncggcggcggcgtgttccaccgcctcctcgccctctcgtcgctgctgctcctcgcttccggcgaggtcgtcttcgaggagcgcttcgaagatggttgggagactcggtgggtggaatccgactggaaaaggagtgaagggaaagcaggaaggttcaagcacacagcggggagatactctgcagatcctgatgacaaa

SEQ ID NO: 2309 - DNA, 283 bp, Zea mays
attgctgcaagaaagatccaacaattgtcgatttacttccaggcactccatacaacatgcaaattgccaattgctgcaaggcaggagttgtaaatacctttaaccaggacccagcaaatgctgcttcctccttccagatcagtgttggtcttgctggaactaccaataaaactgttaaggtgccaaggaacttcactcttaagactccaggccctgggtacacatgtgggcgtgccattgttggcaggcctacaaagtttttcaccgcggatgggcgcaaggc

SEQ ID NO: 2310 - DNA, 285 bp, Zea mays
gcacaccactgtcttcgtccaactcggcggcgatgtctgggcgcggcaagggcggcaaggggctgggcaagggcggcgcgaaacgccaccgtaaggttctccgcgacaacatccagggtatcacgaagccggcaatccggaggctggcgaggaggggcggcgtgaagcgtatctccgggcttatctacgaggaaacccgcggcgtgctcaagatcttcctcgagaatgtcatccgcgacgcggtcacctacaccgagcacgctcgccgcaagaccgtcaccgcca

SEQ ID NO: 2311 - DNA, 281 bp, Zea mays
tgggtggataaccaagcaagggaaagtgatacagtagatgatggttctgttccactgtatgaccgggagtttaccttgcactcgactcctctaggtggttcatcaaacactgaaagggtggataaggacgattcacgctgcttcaattgtggttcttatagccatgctatgaaggattgcccaaagcctcgggacaatgttgcaattagcaatgcacgaaaacagcataatttgaaaagaaaccaatctaatgttaaccgtgtacaaaaccgatactacca

SEQ ID NO: 2312 - DNA, 282 bp, Zea mays
cgccacaagagaattcttgtggctacagatttagttggcaggggcattgacattgagcgtgtcaacattgtgataaactatgacatgcgagactcagctgatacttatttgcacagggttggaagggctggacgttttggcacgaagggacttgcaattacctttgtttcctctgcttcggattctgatgttcttaaccaggtgcaagaaaggtttgaggtagacataaaggaactgcctgagcaaattgacacctcgacctacatgccatcataaatggga

SEQ ID NO: 2313 - DNA, 279 bp, Zea mays
aagccgtccgccttgcccttcacgaaggcttggtcctcctccttgtatctccactccccccttcacagatccgttcctccagctagggttagcgttcctctgcagcgatggcgatcaagcggaccaaggcggagaagaagatcgcgtacgacaagaagctgtgcagcctgctcgatgagtacaccaaggtgctcatcgccctcgccgacaacgtcggttccaagcagctccaggacatccgccggggcctcaggggcgactcggtggtgctcatgggga

SEQ ID NO: 2314 - DNA, 245 bp, Zea mays
tgaccagccgaggtttgagacttgctaccagatcgctcttgcgatcaagaaggaagtcgaggatcttgaggctggtggtattcaggttatccaaatcgacgaggctgcactgagagaagggctgccgctccgcaaggctgagcatgcattctacttggactgggctgtccactccttcagaattaccaactgcgagatccaggacaccacccagatccacacccacatgtgctactccaacttca

SEQ ID NO: 2315 - DNA, 283 bp, Zea mays
ctgaacctgatcatcatcgccgccatcaacctggcgctcgggatactcccgcacgttgacaacttcgcgcacatcggcgggttcgccacaggcttcctcctcggcttcgtgctgctgatccagccccagttcgggtggctggagcagcccttcggtgccaagaccaagtccaagtacaaggcatatcagatcatcctcctgcttgctgccctcgtcttgctggctgcagggttcgctgttggattggtaatggtgttcagaggagagaacggcaacgatcact

SEQ ID NO: 2316 - DNA, 286 bp, Zea mays
tgcaagatggtccttgatgactggaagaggctatactcaaacacaaagactaacttccgggaggttgccatcaaaggtttctgggacatgtacgacccagagggctactctttgtggttctgtgactacaagtacaatgatgagaacaccgtctcctttgtgaccctgaacaaggttggtggattcctgcagcggatggacctgtgccgcaagtacgcctttgggaagatgctcgtgataggctctgagccacccttcaagctgaagggcctttggctcttccgtg

SEQ ID NO: 2317 - DNA, 285 bp, Zea mays
ctcgcctcgggtcaaaccctaagcagggagttgatttatccgctgcagccatgagtaagttgcagtctgagtctgtcaaggatgccatctcccagattgttggggatgccaaggagaagaataggaagttcactgagactgtggaacttcagattggtctgaagaattatgatccacagaaggacaagcgtttcagtggctctgttaagttgccccatatccctcgtcccaagatgaaggtgtgcatgcttggtgatgcccagcatgttgaggaggccgagaaga

SEQ ID NO: 2318 - DNA, 284 bp, Zea mays
gtcggttccaagcagctccaggacatccgccggggcctcaggggcgactcggtggtgctcatggggaagaacacgctcatcaggcgttgcatcaaggtgtacgccgagaagaccggtaaccacacctttgacccgctcatggacctcctggtcggcaacgtaggcctcatcttcaccaagggagacctcaaggaggtgcgcgaggaggtcgccaagtacaaggtgggggctcctgctcgtgttggtctggttgctccagttgatgttgttgtgccccctggcaa

SEQ ID NO: 2319 - DNA, 244 bp, Zea mays
cttgggccttccatgatacagcagatgcagcagccttgcaacgagtgcaaggggactggggagagcatcaacgagaaggaccgctgcccagggtgcaagggtgagaaggtcgttcaggagaagaaggttcttgaggttcatgttgagaagggaatgcaacacagccagaagatcaccttccctggtgaagctgatgaagcgcctgataccgtcactggagacattgtattcgtcctccagcaga

SEQ ID NO: 2320 - DNA, 286 bp, Zea mays
catgacggccgagctttacggcatgttctttgtcgccgaagatgtatttggcggggagaattcaggtcgtcctttggagttgacgtgttatcgccgcaacctgtggcagtgctctggacagattactttgccgaggaccttgaacaatgtcatggacgatcaaggccagcacatcgccatcacagaactgtctgcatccattacaggcatagaatcgattgaaggaaaacccgccgaaatcatttcgattccatggaaaggcgcaaaccctcaactggaggagacg

SEQ ID NO: 2321 - DNA, 273 bp, Zea mays
ctgaacctgatcatcatcgccgccatcaacctggcgctcgggatactcccgcacgttgacaacttcgcgcacatcggcgggttcgccacaggcttcctcctcggcttcgtgctgctgatccagccccagttcgggtggctggagcagcccttcggtgccaagaccaagtccaagtacaaggcatatcagatcatcctcctgcttgctgccctcgtcttgctggctgcagggttcgctgttggattggtaatggtgttcagaggagagaacggc

SEQ ID NO: 2322 - DNA, 231 bp, Zea mays
cacaccccccgagctgagcttagctccactccagctccaatcacagtcgtgaccagagcgcgagagctagctagagggccgtgaaaatgccgatcaataggatcgccctggggagccaccaggaggtgtaccacccgggcgccctcaaggcggcgttcgctgagttcatctccaccctcatcttcgtcttcgccggccagggctccggcatggccttcagcaagctgaccg

SEQ ID NO: 2323 - DNA, 272 bp, Zea mays
accaccccaagcgcaacgcccgcgactcccacgtcccggttctggctcccctccccatcggcttcgcgtgttcatggtgcacctggccaccatccccgtcaccggcaccggcatcaacccggccaggagcctgggcgccgccgtcatctacaacaaggacaagccctgggacgaccactggatcttctgggtgggccctctcgtgggcgctgccatcgcggccttctaccaccagtacatcctccgggctggcgccatcaaggccctcggct

SEQ ID NO: 2324 - DNA, 274 bp, Zea mays
catcgtcgagtacgtcgacgaggccttcgacgggccgtccatcctgccggccgacccccacgaccgtgccgtcgcccgtttctgggcgaacttcttggacaccaagttctcccagccgttctggctggcgtactgggcggagggcgaggcgcagaaggccgtggtgaaggaggccaaggagaacctggcgctcctggaggcgcactcggcgggaagagcttcttcggcggcgacacgcccgggtacctcgacatagccgcgtgcgcgttgggtc

SEQ ID NO: 2325 - DNA, 276 bp, Zea mays
cggctcgagattcgttccaactcctgagcactttctcctcgtccccgacaagccaatcgaagccgagatacggccatggactccaccggcaccggagcagggggtaatgggaagaagggagcggccgggcgcaaggtcggcgggccaaggaagaagtcggtgtcgaggtccgtgaaggccgggctccagttccccgtcggccgcatcgggcgctacttgaagaagggccgctacgcgcaggtgtcggcaccggcgcccccgtctacctcgccgctg

SEQ ID NO: 2326 - DNA, 252 bp, Zea mays
aaagaaatgggtctgttccattccatgactgaatattacatgtccatcacacccgatggccatacggtaacaaaagaaagcaatctgatgcagtcatcttttattcgatgatgctcttaaagaaatgcatgggtcaaatctcaataagcttttgtctggacaaaatccctaggtgattaactaccacccgcttgatggccaaatgtctgttcataaacaaggatgccgtgcagtctggttcaagaaaaaaga

SEQ ID NO: 2327 - DNA, 239 bp, Zea mays
ccaagcccatgtaccagctcaagtacccggctccgggcgctccggacttggccctgcggaccgtagagctcctggagcaagccgggttcggccccgtgaagcaggaccacagccgcgggctcgaccacggcgcctgggtgccgctgatgctcatgtacccggacgccagcatccccgtgtgccagctctcggtgcagaccgaccgcgacggcacgtaccactacaacctcggcaaggcg

SEQ ID NO: 2328 - DNA, 278 bp, Zea mays
taaggagatgaaggttgtggtcaggacagttatttcactcaccaaggaggaggagaaagaactcaaggaaaccttgcaggatatccttggggaaaacaaaactattttggttgaacagaagattgactacagcatcatgggaggattagtgattgaactcgggcagaaggtgcttgatatctcaatcaggaacagggcgaacaaatggaggcgttcttgaggcaaccacttgacttctaacagccttttggataaaagaagcatcatcggaatgcaga

SEQ ID NO: 2329 - DNA, 237 bp, Zea mays
gcagtgcctggcccgccgtctgccgcgcggcgtcgtgaaggcgttcggcagcgcgctgtacgagtccgcgggcggcggcgccaacgccgtcagccccgggtacaccaagggcgacggcctcggcgccgaggtcgtgggcacgttcgtgctcgtgtacaccgtcttctccgccaccgacgccaagcgcaccgccagggactcccacgtccccgcgctggccccgctgcccatcggctt

SEQ ID NO: 2330 - DNA, 272 bp, Zea mays
agagaaggcacacaagctgatgatgcaaaccaaaatcaatgaaaccaaggatctcatgaagaagagggctaatgagcttgacaaaatgaggatggaaagaggcaaacttgacaaaggaggatactcatcaatatctggtccacgcgtgattgaaaaaactttcagtgacatgagcatcagtggttctggattaggtggactgagcactgacatggactcatttgctagcaagcccaaaggccgtccatctacagcagctactgcacctggta

SEQ ID NO: 2331 - DNA, 268 bp, Zea mays
ccaccccatccggcagcagccaaaccctacatacgcgccgcgagcccccccgcatcgtcgccaaagatgcagatctttgtgaagactctgacggggaagaccatcactttggaggtggagtcctcggacaccatcgacaatgtgaaggccaagatccaggacaaggagggcatccccccggaccagcagcggctcatcttcgccggcaagcagctcgaggacggtcgcaccctcgccgactacaacatccagaaggagtccacactcc

SEQ ID NO: 2332 - DNA, 269 bp, Zea mays
tgcgcaggatcaccgggagggagatggacgggctcccgctcgatgggttcgactacgcgtccatcctcggccagtgctgcgagctgccggtgggattcgtgcagcttcccgtgggcgtcgccggcccgctccttctcgacggccgccggctctacgtaccaatggccaccaccgagggctgcctcgtcgccagcaccaaccgcggatgcaaggccattgccgagtccggtggggcctccagcgtcgtgctcaaggacgggatgacgcga

SEQ ID NO: 2333 - DNA, 106 bp, Zea mays
caacctttcaaggagtttcttgaggccgttgtcaacatgaagtttgatgaagagccaaactattccaagttgatttcactgtttgacagtttaattggaccaatcc

SEQ ID NO: 2334 - DNA, 274 bp, Zea mays
cggagatccggcgtactgcaaattttgaaaactgaactgtaagatggcatcagcagagctttcccgtgaggaaaatgtgtacatggcgaactcgctgagcaggcggagaggtacgaggagatggttgagttcatggagaaggtagccaagactgttgactcggaggagctcactgtggaggagcgaaacctcttgtctgttgcatacaagaacgtcattggagcccgccgcgcctcatggcgcatcatctcctccatcgagcagaaggaggagg

SEQ ID NO: 2335 - DNA, 275 bp, Zea mays
aaatgatgctggcaagaaggaaattcagctgcagcttgagaagatgaagaaatatgcttctgttatccgtgtcattgctcatacccagattaggaagatgaagggtttgaaacagaagaaggctcacctgatggagattcaggtcaatggtggtaccattgctgacaaggtggactacggctacaaattttttgagaaagaggtccctgttgatgctgtcttccagaaggatgagatgattgacatcattggtgtgaccaaaggtaaaggttatg

SEQ ID NO: 2336 - DNA, 288 bp, Zea mays
cccaactgatgagactcttgtggcccagattaaggaagggttcgaaagcgggaaggatcttgttgtgactgtccagtctgcgatgagggaggagcagatctgcgcgctgaaggatgttggccccaagtaacttccttggctttggagacggaaccctactctatctcaacttaaatcggaaaagaagtgtatcaccaaaggattgctaccgagacattcacctggcttgagctggcttttgctatagcgtgcaaggggttgctgggtgtcgtacctacctgacttatc

SEQ ID NO: 2337 - DNA, 185 bp, Zea mays
cggctcgaggttggcttctcctccccctccggttcgggttcgggttcgtgaggttctccggggttcgggttcgtgggtgagcggatcgagatggcggcgtcggatgttgagtaccgctgcttcgtcggcggcctcgcctgggccacggacgaccactccctccacaacgccttcagcacctacgg

SEQ ID NO: 2338 - DNA, 286 bp, Zea mays
aaaagatttgcgctaaaacgtctacagaaatcaggcgcctcctattttgttctggatttgagggacaatcttggtggactagtgcaagctggaatcgagacagcaaagctctttctgaataaaggagacacggtcatttatactgctggccgggatcgcctagtccaaaaggcaattgttgctgaaagtggacctatgattgctactcccctcatgttgctggtgaataataggacagcaagcgccagtgaaatagttgcttcagcacttcatgacaattgcaaag

SEQ ID NO: 2339 - DNA, 283 bp, Zea mays
ccaagctgccacgttgcctccctccgctccagcggcccatggcctccatggcgttcgccctggcgggggccttcaagggcctctccctggcgcccaccaccaccacctcttccttcccgcgctgcgaccgcgcctcgctctccgtcggcggcgcagcgggcgtgccggcggtgccggtgccggcgcggcggctcaccatccagatggcgcacaagaagggggccgggagcaccaagaacggccgcgactccaagggacagcgcctcggggtcaagatatacgg

SEQ ID NO: 2340 - DNA, 281 bp, Zea mays
gttcttgagtacatggaccgtggatcgcttgcagacattgttaagcaagtgaagactattctggagccataccttgcagtactttgtaagcaggtcttggagggtttattgtatcttcatcatcaaaggcacgtgattcacagggacataaaaccatctaacttgttggtcaaccgtaaaggtgaagtcaagattaccgacttcggagtgagtgctgtgctagcaagctcaataggtcagcgagatacatttgttggaacctacaactatatggcgcctga

SEQ ID NO: 2341 - DNA, 282 bp, Zea mays
ctccgccgccgccgccgccgccatgcctcgccgcagctcaggcaggtctgccccacgcccagctccccgtgctgctccagtgaggaacccgccacagccagcacgccaggctcctcctccagctcctgttcgagatggtggtggctccatgtttggaggaattgggtccaccattgctcaaggtatggcgtttggcacgggtagtgccatggcacacagggctgttgatgctgtattaggtccccggaccattcagcatgagactgttgcctcagaagctgc

SEQ ID NO: 2342 - DNA, 272 bp, Zea mays
tgtcctagaagttctaaggaactggccacataggaacattcaagttatctgtgttactgatggtgagcgaatcttgggacttggagatttgggttctcagggaatgggaattcctgtaggcaaacttgctctatacactgctcttggaggagttcgtccatcagcttgtttgcctatcacaatcgatgttggcaccaataatgagaaactgcttaatgatgagttttacattggactccggcaaaaacgtgcaacatggcgagagtatcatg

SEQ ID NO: 2343 - DNA, 275 bp, Zea mays
tcgagctgcgactagggccgggccttgggcctgtttgtcatgggagtatgggacaaagtaggggatatttttaaccttagcctgaaatttactcccgtgaggagtcaaacacaggacctgtgtagtgctactcagaccccctatccattcgcctggtttgagcttatgctgtacgatttctgaacttgaaaatatgtatttgagatgaatatcccttgcggtaaaaactaggacaattatgcttgtaactttatttctgtaaatttgctttaagt

SEQ ID NO: 2344 - DNA, 279 bp, Zea mays
ccgcgacaggaaatgtgcttaaggttcagacacttcttggcatttgctcacagcatcttgagaaacgtgaaacacaccaagggccagctgtcctagggattgctcttattgctatggctgaagaattaggagctgaaatggctgtacgttcacttgagcgtcttctgcagtatggcgagcagaatataagacgggcagttcctcttgctcttggtatactctgcatatctaatcccaaggtaaacgttatggacacactaagcagattgagtcatgatg

SEQ ID NO: 2345 - DNA, 278 bp, Zea mays
atcatccactcgatcatcgacatggacgcggacgtgatcaccattgagaactcgcggtccgacgagaagctgctctccgtgttccgcgagggcgtcaagtacggcgcgggcatcggccccggtgtctacgacatccactcccccaggatcccgtcggctgaggagatcgccgaccgcatcgacaagatgctggcggtgctggacaccaacatcctctgggtgaaccccgactgcggcctcaagacccgcaagtacacggaggtcaagcccgccctgac

SEQ ID NO: 2346 - DNA, 276 bp, Zea mays
ctactactcatcactcgccaacgtgcagagatcagggaagcggcactccatccactgactgaccgctcatggcgaaggtccacctctacgtcgccgcggcctgcgccgtcgtcctcgcgctcgccaccccggccctcgccggtgaccccgacatgctgcaggacgtctgcccggctgactacgcctccccggtgaagctgaacgggttcgcgtgcaaggcgaacttttcggcggacgacttcttcttcgacgggctgaggaacccgggcaacacca

SEQ ID NO: 2347 - DNA, 276 bp, Zea mays
agcgcccagtggccgtgcgccgcggggaagaagtactacggccgcgggcccatccagatctcctacaactacaactacgggcccgccggccaggccatcggcgccggcatcctcgccaacccggatatggtggccaccgaccccaccgtgtcgttcgagaccgccgtctggttctggatgacgccgcagtcgcccaagccgtcgtgccacgacgtcatgacggggcagtggacgccctccgccgctgacacggccgccggcaggctgccgggctac

SEQ ID NO: 2348 - DNA, 175 bp, Zea mays
gttggcttctcctccccctccggttcgggttcgggttcgtgaggttctccggggttcggattcgtgggtgagcggatcgagatggcggcgtcggatgttgagtaccgctgcttcgtcggcggcctcgcctgggccacggacgaccactcgctccacaacgccttcagcacctacg

SEQ ID NO: 2349 - DNA, 235 bp, Zea mays
cttctcatcattttttggaccctcttttggaggaggtggtggaagcagcaggggcagaaggcaaaggaggggagaagatgtagttcacccacttaaagtttctctggaagatctttacaatggcacctcaaagaagctctctctttcgcgcaatgtcatctgctccaagtgcaagggcaagggctcgaagtctggtgcctcaatgaggtgccctggttgccatggctcaggcatg

SEQ ID NO: 2350 - DNA, 273 bp, Zea mays
taccgccgccgccgccgctcgtctccctgagaggtgccgggaccgaggaactggccgagtactaggtagagaatcggtttttcttgtctcagcccggggtctgctgcgtctggtggtggtgaaggggagaaattcgtgagatctgttccggatcaggcgtgcgagctcgggaatcaggggtttcacacatagcttcgtcgatttgaatttgatgtactaatggagtctaagggtggcaaaaagtctagcagtagtcgttctatgatgtatgaa

SEQ ID NO: 2351 - DNA, 238 bp, Zea mays
gtaaaagacaattcacaggtggagaacatctttttacagtccaaaagcactccaccgggtacgtgagttcgtgcgcagttgtgcagtttgccaacgcaacaagactcagcaccttcatccagctggtttgctgcaacccttgcccattccttctatggtttgggctgacatatcaatggacttcattgagggctttccaaaggttggtggcaagtcagtagtgctgacaattgtagac

SEQ ID NO: 2352 - DNA, 275 bp, Zea mays
  unsure (1)..(275): unsure at all n locations
catcgatccgccattgctcaccgcacaagtgcacgctcacctcacacacgcagctaagtagctaacgccgtaaganngaacaagaaaaggctcgacatggccgaggagaagaagcagggcctgcagctgctggacttctgggtgagcccattcgggcagcgctgccgcatcgcgctggacgagaagggcctggcctacgagtacctggagcaggacctgaggaacaagagcgagctgctcctccgcgccaacccggtgcacaagaagatccccgt

SEQ ID NO: 2353 - DNA, 272 bp, Zea mays
ctagagtccaggtctcactcgcgaccgagagccacagagaaatgggggcccctgctcgtccctggcgccggcacgtcttcctcgtcgtgtcgctgcagctgctccttgtggcgccatggcaggacgagacggccgctcgagctctcaatttcaccaggcaggatttccccagggccttcgtctttggtgccggcacgtcagcttatcagtacgaaggggcaaccgatgaagacggaaggagcccaagcatatgggacaactttactcatgca

SEQ ID NO: 2354 - DNA, 248 bp, Zea mays
agcggcgccgccgccccagctcgccttgcgtgactgagagctcgtcggcttccgtccacgcgtgaagcgagagcatggacacccaggtgaagcttgctgttgtggtgaaggtgatgggcaggaccggctccaggggtcaggtgacccaggtcagagtgaagtttttggatgaccagaaccggctcatcatgaggaatgtcaaggggcccgttcgcgagggtgacatcctcaccctgctcgagtccgag

SEQ ID NO: 2355 - DNA, 259 bp, Zea mays
aagactatgagttcgttgtcatcttcgatgctgatttccaaccacaggcggacttcctgaagcgcaccgtgccccatttcaagggaaaggatgacgtcgggttggttcaggcgagatggtcgttcgtaaacaaggatgagaacttgctgaccaggcttcagaacataaatctttgcttccacttcgaggtggagcagcaggtgaacggggcgtttctcaacttcttcgggttcaatggcaccgcgggagtctggagaat

SEQ ID NO: 2356 - DNA, 267 bp, Zea mays
ccgctcgacggcgtttccgcgcacctcttcgcggtgttccaaggccttctcaaggtcctcgctggcatcgacacgagcttcacggtcacatccaacggcggggacgacgaggagttctcggagctgtacacgttcaaatggacgaccctgttgataacaccgatcacgcttctcctgatgaacttcatcggggtggtggctgggatctcgaacgcgatcaacaacgggtacgagtcgtggggcccgctcttcgggaagctcttcttc

SEQ ID NO: 2357 - DNA, 265 bp, Zea mays
gtgacgcgagcacgagcatccatcgtttccccttcttccccatcgcgtgccctcgccgcagccatcttccatggcggaccagctcacggacgagcagatcgcggagttcaaggaggccttcagcctcttcgataaggatggcgacggctgcatcactaccaaggagcttggaactgtgatgcgctcccttggccagaaccccactgaagcagagctgcaggacatgatcaacgaggttgatgctgatggcaatgggaccattgac

SEQ ID NO: 2358 - DNA, 270 bp, Zea mays
gcaaagtatgacatcaagctgaacaatgccattctcgctgaggagaagcacttgcctatgtatgatgagttggctagcaacagcaatgttgaatatattgctggaggagccacccagaactctatcagggttgcccaatggatgcttcaaactcctggtgcaacaagttacatgggatgcattgggaaggacaagtttggtgaggagatgaagaaaaatgctcaagctgcaggagttactgctcattactatgaggatgagactgctcct

SEQ ID NO: 2359 - DNA, 269 bp, Zea mays
cggtgacaccatcggtgaccccctgaaggacacctccggcccgtccctcaacatcctcatcaagctcatggccgtggagtccctcgtgtttgcccccttctttgccacccagggtggcctgctcttcaagtacctgtaaaagggacaacaccaagcacacagcagaagtatacgatctcccgaccgaccgtggacaatatcgaataactcctgccaaatcgccagttcttttgtgtactgtgcgctagccgccgcctagctgcactgct

SEQ ID NO: 2360 - DNA, 268 bp, Zea mays
ctcgcattttccttgcaaccgattgcctatccccctcccaacccaagaccgatggcgcccaaggccgagaagaagcccgcggcgaagaagccggcggaggaggagcccgcggcggagaagacgaccgccgggaagaagcccaaggcggagaagcgggtccccgcgggcaagtccgccggcaaggagggcggcgagggcaagcgtggcaagaagaagggcaagaagagcgtggagacgtacaagatctacatcttcaaggtgctgaagc

SEQ ID NO: 2361 - DNA, 262 bp, Zea mays
  unsure (1)..(262): unsure at all n locations
ggcctacgccaacgtgaacgactactgctggcaccagctcatcagccactggctcaacacccacgccgtgatggagccgttcgtgatcgccaccaaccggcagctcagcgtgacgcaccccgtgcacaagctcctcctgccgcactaccgtgacaccatgaacatcaactccaacgcgcgccagatgctcgtcaacgccggcggcatcttcgagancatcgtcttcacgcgccagtacgcgttcgagatgtcctcgtcatct

SEQ ID NO: 2362 - DNA, 281 bp, Zea mays
ctgcttggtgttttgtgtcgcatgcaggcgctgcccgaggagtgccttccgggcgacatcacggagcccgggaagctagacgaggtgttcgacgagatggacgccaacggcgacggcaaggtgagcttcgaggagttcaaggcggccatgcagaaggacagcgccctccaggacgtcgtcctctcgtccctccggccgccgccgccgccatagctagaccgggagagagattccaactcgttcaacttcattcccacgagaacgcaccattgattacagta

SEQ ID NO: 2363 - DNA, 280 bp, Zea mays
agcgacgccgccgccgcaagccgtccgccttgcccctcgaaggcttggtcctcctccttgtatcccgacctcccccgcgacagacccgtttccccgctaggctagagttatcgttcctctgcagcgatggcgatcaagcggaccaaggcggagaagaagatcgcgtacgacaagaagctgtgcagcctgctcgatgagtacaccaaggtgctcatcgccctcgccgacaacgtcggtccaagcagctccaagacatccgccggggcctcaggggcgactc

SEQ ID NO: 2364 - DNA, 278 bp, Zea mays
cgaaggccagcacctcagcgccgccgccatcgtcggccacgaggcagcgtctgggcacagtccgagaacttccccgagttaaagcctgaggaggttgctgggatgataaaggactttgatgaacctggaactcttgcaccaactggtctttttgttggaggtacgaagtacatggtgatccaaggtgaacctggagttgtcatccgaggaaagaagggcactggaggcattactatcaagaaaactggcatgtccttgattatcggtatctatgatga

SEQ ID NO: 2365 - DNA, 270 bp, Zea mays
cggctcgagctagaacagatagaccgagatgtaaagcgaacacatcctgatatttcatttttctcatcaaagtctaaccaggaatccttgaggagaattttaattatattttcaaaattgaaccccagtataagatatgtgcaagcggatgaatgaagttttggcacctttattttatgtattcaagaatgaccctgacccaagcaactcagcgtcagtgacagcagacgcatacttttgctttgtcgaattgttgagtggctttagaga

SEQ ID NO: 2366 - DNA, 276 bp, Zea mays
tgtgaacccgccgccgacgcagcagcaggagacgcgccaaggagagcccgcaaggaggcgactatgagggccaagtggaagaagaagcgcatgaggaggctgaagaggaagcgccgaaagatgaggcagagatccaagtaggctgatggggattgtggatggtggtgtcggcatagttgtgttacgtttcttcgatgcgtgagttcatggagagatgtcacatcctagttcgtcgtcaccgtttgccatgggtccaatggctcgtcttggaaacct

SEQ ID NO: 2367 - DNA, 274 bp, Zea mays
caggagacggggattccagagagccccgttcgggtagggaagggaaggagaggcgaacggaggcgagatgggggcggccgaatccgtgccggagacctccatacacgaattcaccgtcaaggattgcaacggcaaggaagtgagcctggaaacctacaaggggaaggtcctccttgttgttaacgtcgcctccaaatgtgggttcacggagaccaattacacgcagctgacggagctttatcagaagtacagggacaaagacttcgagatattg

SEQ ID NO: 2368 - DNA, 274 bp, Zea mays
cgcacttcttcccaatccatcaatcgtgttctcgcgagccagaggccagagccatggagaagagccgggtgctggtggtgggcggcaccgggtacatcgggcggcggctcgtgcgggcgagcctggcgcaagggcacccgacgctggtcctgctgcggccggagatcggcctggacatcgacaagctccagatgttgctctccttcaaggcccagggcgcgcggctggtggaggcgtcgctggaggaccacgcgggcctcgtcgccgccgtggc

SEQ ID NO: 2369 - DNA, 273 bp, Zea mays
gttatgatgagattgtgaaggaagtctcatcctacctcaagaaagttgggtacaaccctgataagattgccttcgttcccatttctggttttgagggcgacaacatgattgagaggtccaccaaccttgactggtacaaaggcccaaccctgcttgaggctcttgaccagatcaccgagcccaagaggccttcggacaagcccctgcgtctgcccctccaggatgtgtacaagattggtggtattggaactgtaccggttggtcgtgtggaga

SEQ ID NO: 2370 - DNA, 266 bp, Zea mays
gggccagaacgacatcttctacatcactggtgagagcaagaaggctgtggagaactccccgttccttgagaagctgaagaagaggggctatgaggtgctgttcatggtggatgccattgacgagtattctattggacagctgaaggagtttgagggcaagaagctcgtctctgccaccaaggagggcctgaagctggacgagagtgaggatgagaagaagcgcaaggaggagctcaaggagaagtttgagggcctctgcaaggtca

SEQ ID NO: 2371 - DNA, 267 bp, Zea mays
ggcatggtgaaagaaccagtcccgatgggactagggccatggggtggggagggaggccgggcatgggacgacggggtctacactggcgtgaagcagatctacgtcatgagaggagcgtgcatcgggtcgatacagatcgagtatgacaggagcggccactccatctggtcttcaaggcacgggaacagcggccacatcacccacagggtgaagctggacttcccgcacgaggtgctgacgtgcgtgtacggctactacgacacgagc

SEQ ID NO: 2372 - DNA, 267 bp, Zea mays
ctcccagccgtcgtctgctgcggactccgcctccattttgctctgtttcttgcaagttgctcttgcggtagttcccccaactgccaccatgcagaacgaggagggtaagactgtggacctctatgtccccaggaagtgctcggccacaaacaggatcatcactgccaaggaccatgcctctgtccagatcaacattggccacttggatgcgaatggcctgtatgatggtcacttcacaacgtttgctctctctgggtttgtccgtgc

SEQ ID NO: 2373 - DNA, 267 bp, Zea mays
tgctgcgccacgataagcacttccgctacgtgagcacccacgacgtcgggtactgggctaacagcttcctcctggaccttgagaggacctgcaagtatcattctcagaagaggtgctggggcattggcttcggcctgcggttcagagtggtctcgcttgacctgaccttcaggaagctttccttggagaacatccttatggcataccggagagccaagacacgggcaattctgctggactacgatggcacgctgatgccacaggcga

SEQ ID NO: 2374 - DNA, 268 bp, Zea mays
agaaggagcacaagcacaaggagcacctcggcgagatgggcgccctcgccgccggcgccttcgccctgtacgagaggcacgaggcgaagaaggacccggagcacgcgcagcgcacaagatcgaggacggcgtggcggcggtggcggccctgggcagcggcggcttcgcgttccacgagcaccacgacaagaaggaggccaaagacgcggcggaggacgccgggtaggaggaggaggagtccggccgccgcggcgaggggaagaagaag

SEQ ID NO: 2375 - DNA, 139 bp, Zea mays
gcagcagcgacgacgacgaggccggcgccgccgacctccggaggggcccctggacggcggaggaggacatcctcctcgtcaactacatcgccgcccacggcgagggccggtggaactcgctcgccctctccgcgggcct

SEQ ID NO: 2376 - DNA, 288 bp, Zea mays
gaccggacgccggaggaaggagatcgcgagcagccggagccggagccgagaggatgaagacgttcgacccgtggccggtcttcttccgccgggagtggaagcgcaactggcccttcctcacggggttcgccatcaccggcttcatcatcaccaagatgacggccaacttcaccgaggaggacctcaagaactccaagttcgtccaggaacacaagaagcgctgaccaaccgggagtcgtccgaatcgcctgcggatgaaaaattagccccctatttatcttgtctttt

SEQ ID NO: 2377 - DNA, 280 bp, Zea mays
tcagctgcagcttgagaagatgaagaaatatgcttctgttatccgtgtcattgctcatacccagattaggaagatgaagggtttgaagcagaagaaggctcacctgatggagattcaggtcaatggtggtaccattgctgacaaggtggactatggctacaaattctttgagaaagaggtccctgttgatgctgtcttccagaaggatgagatgattgacatcattggtgtgaccaaggggaaaggttatgagggtgtggtcactcgttggggtgtcacc

SEQ ID NO: 2378 - DNA, 151 bp, Zea mays
  unsure (1)..(151): unsure at all n locations
tgcncaagcgcccgcgcgtccccgccctcgctagtgtcattgtggaagctctcaagatggacagtctgcagaaactctgttcatcgcttgagcccattctccgaagagttgtaagtgaagaagtagagcgtgctttagccaaactgggtcc

SEQ ID NO: 2379 - DNA, 290 bp, Zea mays
acgagatcctcaactcccctgaccgtgcttgcaaccttgcaaagcaggcctttgatgaggcaatctccgaactagacagcctgggagaggagtcctacaaggacagcactctgatcatgcagctcctgcgtgacaacttgaccctatggacttccgacaccaacgaggacgccggagatgagatcaaggaagcagctgctgcccccaaagaatccgcccccgagggccagtaagacggatccgatctcccgacctgatgcgtgtctgctgatgtcggggagtttaccagg

SEQ ID NO: 2380 - DNA, 291 bp, Zea mays
ctcctactactcaaatccatccttattgagcttagtgtttgatccatggactcggaaggagtagcagcaaaggtggcagatgagactactaaaccggcaagccaagaagacggcgagagcaaggccgggatgactgatctgctgatgctgaccgacaagtcgcagctgcaggcgctagcgatgctgctgcggaacaacgaggagctcatgatgagccaagcgatcaagtcggagacggagcgcgttgagtacctcaagacggtgagcgactgctacacgcggacaatgaag

SEQ ID NO: 2381 - DNA, 294 bp, Zea mays
gctagtagctccctgaaaagttcactagagaagcatttgagggaggagccatgtctgaggagaagcaccaccaccacctgttccaccaccgcaaggcagaggaggaggaaggcgcctccggcgaggtcgactacgagaagaaggagaagcaccacaagcacatggagcagctcggccagctcggcgccatcgccgccggcgcgtacgctctgcacgagaagcacaaggccaagaaggacccggagaacgagcacggccaccgggtcaaggaggaggtggccgccgtcgccgccg

SEQ ID NO: 2382 - DNA, 288 bp, Zea mays
cacgcaccccaccaacccatacccataccagaggctctctgattttacttctcagcggtagatcggctgagcgagcgagcgagcgaggcacacggagctagctaaacagagcacacggatagaaaagcaagatgtcggacggcacggcgacctgcatcgacatcatcctcgccattatcctgccgccgctcggggtcttcttcaagttcggctgcggggttgagttctggatctgccttatcctcaccttcttcggctacctccccggcatcatctacgccgtctggg

SEQ ID NO: 2383 - DNA, 287 bp, Zea mays
gggaagaaatattcttcccgtcgaaagacggagagaggaaaagggacaagggcaaggcaagagagaggcgtcgtcgtttgatctgctgccggagtgcgaagaggaagaggaagaggagcgccggagttgtaaagatgttcctggtggactggttctatggggtgctggcatcgcttgggctgtggcagaaggaggctaagatcctcttccttggcctcgacaacgccggcaagaccaccctcctccacatgctgaaggacgagcggctcgtacagcaccagccgacg

SEQ ID NO: 2384 - DNA, 285 bp, Zea mays
gctctcttcaaggataagaagccagtcaaggtcagcaagaagaactcggctgcagtcaccaagttcctcgatgagctggctaagattgacttccctggagccaaggtggtgagcgaggcggtggccaagtccggcacctcgcccctgcttccggcgatcaccttcatcttggacaaggtcgcaccgtttatccccaaggaggagcccaaggcggagcgggtggcggaggccacctcccgggaagtcgccgtggaggagaagaaggaggaggccgagccagctgca

SEQ ID NO: 2385 - DNA, 282 bp, Zea mays
caagaatttgggagtgttgctgcatggtgatggtagtttctcagggcagggcgttgtgtatgagacgctgcatctcagtgcccttgaaaactacaccactggtgggacaatacatatcgtggtcaataatcaggttgctttcactactgatccaaggtcagggagatcctcacaatattgcacagatgtagcaaaagcattggatgctcctattttccatgttaacggtgatgatttggaggctgttgttcatgtctgtgagctcgccgcagaatggcgtca

SEQ ID NO: 2386 - DNA, 284 bp, Zea mays
caagtttggtgaggaaatgaagaaaaacgctcaagctgcaggagttactgctcattactacgaggatgagactgctcctactggcacatgtgctgtatgtgttgttggtggtgaaaggtcattgattgcaaatctgtcagcggcaaactgttacaaatctgagcatctaaagagaccagagaactgggcactagttgaaaaggcaaaatacatctacattgctggatttttccttacagtgtcgcctgattctatccagctagtcgctgagcatgctgcagcaa

SEQ ID NO: 2387 - DNA, 239 bp, Zea mays
cggacgccgcgcgcgcgtcgctgcagcgcatccgcgggcggtccgctgacgtgggcgtggagctcagggacatcgtgcaggccgcggaggaggaccggcggcacgagtccggcgcgttccggcgcatcgtgcgccgcgagtaccggccgcacctggtgatggccgtcgccatcccgctcttcttcgagctgacgggcatgatcgtggtgacgctgttcacgccgctgctgttctacacc

SEQ ID NO: 2388 - DNA, 284 bp, Zea mays
gtcatacaaagctgctgttgaagaagggatcaccaatggttttggcatgggttctgttttctgcatttttttctcgagctacggtttggccatatggtatggcggaaagttggttcttagtaaaggttactctggaggagatgtcatcaacatcttgtttgctataatgaccggggcaatgtctttaggtaacgcaacaccctgcatggcagcctttgcagaaggacaatccgcggcatacagactgttcacaacgatcaagaggaaaccagagattgacccag

SEQ ID NO: 2389 - DNA, 269 bp, Zea mays
cttaaacctttgttatcttctggggaagagttattttgttgagctcctgttttttgctacttgagtcaatacggagtactgtcaggcctgtgccaaggggtgtgcgagctgttcactcgtacagggtcccgcaaaatctagggccccaaatatgagtgctgtatctgcctatgcccgtatgaagatggcgtggaactacgtgagctcccttgcaaccaccattttcactgcagctgtatagacaagtggcttcacataaatgctacatg

SEQ ID NO: 2390 - DNA, 275 bp, Zea mays
gttggtgtaaatctgcctgccggatcagctcctgcggcagctgctcctgcggatgaggctgaggacgatgatgaccttgatctttttggtgatgaaactgaggaggacaagaaggcagctgatgagcgtgccgccgctgccaaggcctcttctaaaaagaaagaaagtggtaaatcctccgtccttatggatgtcaaaccatgggacgatgagactgatatgaagaagctggaggaggctgtccgcagtgtccagatggagggtctgacttgggg

SEQ ID NO: 2391 - DNA, 274 bp, Zea mays
gtgatgggcagtgtgttgtgatgctccagacaaaatttgagaagttctttgaaaaaattgatctgactctgttgaacaggcttctgcggttagtcttggatcataacatagctgactatgtcactgcaaagaacaatgtagtgctgtcttacaaggacatgagtcacacaaattcttatggtctcattcgagggcttcaatttgcatcttttgttgttcagtattatggccttgtgctggatctcctgattcttggccttactcgtgcaagtga

SEQ ID NO: 2392 - DNA, 276 bp, Zea mays
cggctcgagcctcatactgggcaacaagattgacatcccatacgcggcttcagaggaggagctgacgtactacctcggcctgagcaacttcacaaccgggaagggcaacgtgaacttggccgactccaatgtccggcccctggagatcttcatgtgcagtgtggtgcgcaagatgggctatggcgaaggcttcaaatggatgtctcagtacatcaagtgagtcgctgctgtcctcttttgtccatggcgctgctgctttcgcaggagggttgaaat

SEQ ID NO: 2393 - DNA, 275 bp, Zea mays
cggctcgagcaaatcccctgtcccgctaggattccccccaaaccctcccccaaaaccccagagcggagaagagcgcaagatgttcggcttcgggcaccacggccaccacggccagaacccgccggcgcacggcggcgtgcaccagcccaccttcaagatcttctgcaaggccgacgaggggtactgcctcaccgtccgcgacggcaacgtggtgctggcccccgccaacccgcgcgacgagcaccagcactggtacaaggacatgcgcttcagca

SEQ ID NO: 2394 - DNA, 173 bp, Zea mays
gagagatcgccgctccccgtctcggcgtcggtggcgggtgccctccctcctcgagcgagatctgtctggtcacagatctatctgacaaaatggtgaagatctgctgcatcggtgctggctatgtcggtggcccaaccatggccgtcattgccctcaagtgcccagacattgag

SEQ ID NO: 2395 - DNA, 286 bp, Zea mays
tgtgatataaagcctgataattttcttatggggcttggtaggaaagccaatcaggtctatataatagactatggactcgcaaagaaatatagggatcttcaaactcataagcacatcccatacagagagaacaagaacctcactggaactgcacgatatgcgagtgtcaatacccaccttggcgttgagcaaagcaggagagatgatttagaatctcttggttacgttcttatgtacttccttaggggcaagctaccatggcaggggctgaaacagggaccagaag

SEQ ID NO: 2396 - DNA, 283 bp, Zea mays
ccaggacgtgcctcaacctcaccaacgccgtctcggggatcggggtgctgtccatgccgtacgcggtggcgcagggcggctggctcagcctggcgctcttcgccctcgtcggcgccgtctgctactacaccggcaccctcatcgagcgctgcatgcgcgccgacccgggcgccatcgccagctacccggacatcggcaagttcgccttcggctccgcggggacggaggccgtcgccttcttcatgtacgtcgagctctacctcgtggccatcagcttcctcgt

SEQ ID NO: 2397 - DNA, 289 bp, Zea mays
gggctcacctcccagatcgaggtggtcaagatggggtacgtgaacgaggcgctggagcggctggagcgcaacgacgtccgctaccgcttcgtcgtcgacgtcgccggtagcaacgtcgaggcggaggcggcggcggcggatgcggccagcaactgatggcaccgcgtcgtcgagtcgaaccacgtctgtgcgccgcgtgcaacgttcgttcgggtcgagtctgcgtgcaacgttctgcttcctttactagttgttgtctttccgccttcttgccgttctgttctgggct

SEQ ID NO: 2398 - DNA, 287 bp, Zea mays
cgcaattgctaatgatgatgtgtacaagttagctgagaatatcaaatccaagggtggtaagatcacccgcgaacctggtcctgtcaagggaggatccactgttattgccttcgcacaggatcctgatggctacatgtttgagcttatccagagggctgacacacctgagcctctttgccaggtcatgcttcgtgttggtgaccttgagcgttctatcaagttttatgagaaggccctagggatgaagctcctaaggaagaaggatgtacctgattacaagtatacca

SEQ ID NO: 2399 - DNA, 200 bp, Zea mays
tcggcatccgcggtgtcgacaccgtcgtcctcggcgtcgagaagaagtccacccccaagctccaggactccaggtccgtgcgcaagatcgcgagcctggacacccacatcgcgctggcgtgcgcggggctcaaggccgacgcgcgcgtgctcatcaaccgcgctcgcgtggagtgccagagccaccgcctcacagtcgag

SEQ ID NO: 2400 - DNA, 234 bp, Zea mays
cctccaacaagctaattaaggccggtcatccctcttctagctcgtttcattatccatggcggaggtggtgtccacgggcgagaacgagtacgacgagtaccagaaggaggagaaggagcacaagcacaagcagcacctcggcgaggccggcgccatcgccgccggcgccttcgcactctacgagaagcacgaggcgaagaaggacccggagcacgcgcaccgccacaagatcga

SEQ ID NO: 2401 - DNA, 152 bp, Zea mays
caaccatctcaggcggaatggcggcttctggtgagggcgcgtcgctgccgtctccggcgggcggggaagatgcgcaccgccgccgcgtcagtatttctacgagccgtcgatcggagactactactacgggcaaagtcacccgatgaagcccc

SEQ ID NO: 2402 - DNA, 257 bp, Zea mays
  unsure (1)..(257): unsure at all n locations
atcgaatcgaaggctgcggcggcgatgggcggtgaccatggcggtgggcacgccggcggcgacttccgccagaaggtatggagcatgacgggcggcccgtactgccgccccgtccactggcgccgtaacaccgccatcgccatgttcggcgtcttcctcatctgcatccccatcgctatgaagtccgcagagctcgagcaacgcccgcatcacccagtccggccaatcgcatctcaactgtggtgcanaaactttgg

SEQ ID NO: 2403 - DNA, 285 bp, Zea mays
  unsure (1)..(285): unsure at all n locations
agcttttcaacaagcctcgctcgcgcgccgtgaccgatagatggccatcacccacgacgactacgtctccctgtgcctcatggcgctcgcagccgcngnangnggangagggcacgctgcggctgccagtgnnnnnnnnnnnnnnnnnnnnnnncaagagtgcgagctccgcttccggtgctccgtctgcggcaaggccttcgcgtcgcaccaggcgctgggcgggcacaaggccagccaccggaagccgccgccgacgctcgtacaggcggcgtcgtcgtcgtc

SEQ ID NO: 2404 - DNA, 269 bp, Zea mays
tgttcgagcacatcccgtcggctgacgcactcatgctcaagtggatcctgcacgactgggatgaggacaagtgcatcaagataatggagcgctgcaaggaagcgatcggtggcaaggaagcaggggggaaggtgataataatagacacggtgctcggatctcgggcagacgacgacgacgacgacaagacgtgcagggagacgtatgtgttggatctccacatactgagcttcgtgaacggggcggacgggaggagcacgattggagga

SEQ ID NO: 2405 - DNA, 281 bp, Zea mays
gcgagatcgtgcgcacctccgagatctccacgaagctgtggtaacatggggctcaccttcacgaagctcttcagccggctcttctccaagaaagagatgaggatccttatggttggtctcgatgcagctggtaagaccaccatcctctacaagctcaagctcggagaaatcgtgaccaccatccctacaatcgggtttaatgtggagactgttgaatacaagaacattagcttcactgtctgggatgttggaggtcaggacaagatcagggcattgtggag

SEQ ID NO: 2406 - DNA, 280 bp, Zea mays
gtccgcaacccgtttggtcaggttccagctctgcaggatggtgacttgtacctcttcgaatcacgagcaatctgcaagtacgctgctcgcaaaaacaagccagagctgttgagggaaggaaacctcgaggaggcagcaatggtggatgtttggatcgaggtggaggctaaccagtacaccgctgcactgaatcccatcctcttccaggtcctcatcagtccgatgcttgggggaaccaccgaccagaaagttgtggatgagaaccttgagaagctgaaga

SEQ ID NO: 2407 - DNA, 278 bp, Zea mays
ggagccccgagccgcgccatcaacctggtgctcacggccgccgacgtggccgtggacgggttctgcgagtcccggtgcggcacgcacggtcgcgtccccgcggtcccgctccggccggttcgcgtacgcgtgggtcggcaacccggcgtcgcagtgccccgggcagtgcgcgtggccgttccaccagcccgtgtacggcccgctagctgcgccgctcaccccgcccaacggcgacgttggggtcgacggcatggtcatctcgctggcgtccatgctcg

SEQ ID NO: 2408 - DNA, 242 bp, Zea mays
gtgggcgctcgccagggacccgacgtgctgggacaaggccgaggagttcttcccggagcgcttcctggaacaaggccgcgacgccgaggtcgacatgtacggcaaggacatccggttcgtgccgttcggggctgggcgcaggatctgcgcgggggccacgttcgccatcgccaccgtcgagatcatgctcgcgaacctcatctaccatttcgactgggagatgcccgccgagatggagcgca

SEQ ID NO: 2409 - DNA, 260 bp, Zea mays
ggcgagcgaggtggtgagagagctagcgagacggacatggcagccacggtgtccttcccggcggtgaacatggagaagctggagaccgaggagacggacacggccatcgcggtcatccgcgacgcctgcgacaactggggcttcttcgagctgctgaaccatggcatctcgcacgagctgatggacgaggtggacctgctgaccagggcgcactacgcgacctaccgggaggccaagttccacgagttcgcggcgctcac

SEQ ID NO: 2410 - DNA, 277 bp, Zea mays
acctgctgtatctcattaccatctgcatctggttgcccgttgattgagaaggaggagctgagggccatggcgaccgagaagcccatcctgtacaacgcctggatcagctcctgctcccaccgtgttcgcatcgcactcaacctcaaagtctaagatgtttcgcaagaatcacatccaggctcgtctatttctggacaatttctgaagttcgctcagctagggattagcgatgactaccgatgctagcaattctgttgtatttcttggtctgttaact

SEQ ID NO: 2411 - DNA, 279 bp, Zea mays
gcacgactctttcccggctacccacaccgcgcgagatctccgatccccgcccaaatcccacgacgccggcggcggccatgggcggcaaggacctgacggaggaccagatcgcctcgatgcgggaggccttctcgctgttcgacacggacggggacggccgcatcgcgccctcggagctgggcgtcctcatgcgctccctcggcgggaaccccacgcaggcgcactaccgggacatcgcggcgcaggagaagctcaccgcacccttcgacttcccgcgct

SEQ ID NO: 2412 - DNA, 274 bp, Zea mays
gattaacccagatataacagtgacgatgaccgagaacactcctgatgatccccgccagaggaagccggacatcaccaaggcaaaggaagttctagggtgggagcccaagatcgtcctgaaggacggcttggtgctcatggaggatgatttccgggagcgcctggccgtgcccaagaaaaccaaggcctaaactgccctgcggtgggcgaagaatatccacgggggagcatactcatagttggcttgtcattattcgtgggcacatttcattacg

SEQ ID NO: 2413 - DNA, 276 bp, Zea mays
atcgcatgacagcgtacggaaggacacgagttcggctcgagcattaagaagggagttgaggctgatgaaatagaagcgctgtacaagaaggtccatgctgccatccgtgccgatccttccattgttaagtcaaccaagcagccaccaaaggagcataagaggtacaaccccaagaagctgacatatgagcagaggaacgccagcctcattgaaaggctcaaccaactcaaactcctcggtggtgctgatgacgacgatgaggacgacgagtaaatt

SEQ ID NO: 2414 - DNA, 279 bp, Zea mays
gccagagctgttgagggaaggaaacctcgaggaggcagcaatggtggatgtttggatcgaggtggaggctaaccagtacaccgctgcactgaatcccatcctcttccaggtcctcatcagtcctatgcttgggggaaccaccgaccagaaagttgtggatgagaaccttgagaagctgaagaaggtgctagaggtgtacgaggcacgcctgaccaagtgcaagtaccttgctggagacttcctcagcctcgccgacctgaaccatgtgtctgtcactct

SEQ ID NO: 2415 - DNA, 283 bp, Zea mays
atgagacgccagtgacacaaaacaaaaggctccgttcaagggtagatgcactgatgaaaacagtggagctgggccgtcggtacttcccgaactgctcgcaggtgctggacaagttcctggaggacgatctgccggaaggtctggaccagttctacctccagaggggcacagccgatgagcagaaggtgaagaggatgcgcttctgcgagctgaaagaggacgtgctgaaggcgtttagcaaggacaaggcggagggcagcgtgttctcgggcctgtcctcgtc

SEQ ID NO: 2416 - DNA, 258 bp, Zea mays
gcaggtgaaaaggatacatgaatataagcggcactgctaaatatccttggaattgtctaccgctacaagaagatgaaagaaatgagcacagaagaaagagcaaagagctttgttccaagggtatgcatattcggtgggaaagcatttgccacatatatacaggcaaaaaggatcgttaaatttattacagatgtggcagctaccgtgaaccatgattcagacattggagatcttgttgaggtcgtatttgttccagac

SEQ ID NO: 2417 - DNA, 285 bp, Zea mays
attcttcatggcgtcttaattactgtgtaggaggagaggtcacaactttgtttcacttggatcggccaatgtatttattaggatatcttgcaaaccaaagccgtgtctatcttattgataagcaatttaatgttgtggggtatactttactccttagtttgatcgaatataaaacacttgtaatgcgtggggatttcgatcgcgcgaatgatgttttatcatctataccaaaggaacaatatgacagtgtggcgcgtttcttggaatcacggggaatgttggagg

SEQ ID NO: 2418 - DNA, 273 bp, Zea mays
gagagagagaaaaaaaaaatagagaactgagagatcgaggacaaagggggagaggagatgtctcggggcggtaccacggggagccgggccagaggatcgattacgtcttcaaggtggtgctcatcggtgactccgctgtgggcaagtcgcagctgctcgcgcgcttcgcccgcaaccagttcaacctcgactccaaggccaccatcggagtcgagttccagacccgcaccctcaacatcgacgcccgcaacgtcaaggcacagatctgggaca

SEQ ID NO: 2419 - DNA, 272 bp, Zea mays
ttcaaatggactaccttattgatacctcctaccaccttgcttctattgaacttcattggtgtggtcgctggcgtttcaaatgcgatcaataacggatatgagtcatggggccccctctttgggaagctattctttgcattttgggtgattgtccatctttatccctttctcaaaggtttggttggaaggcaaaacaggacaccaacgattgtcatcgtctggtccattctgctggcttcaatcttctcgctcctttgggttcggattgatcc

SEQ ID NO: 2420 - DNA, 235 bp, Zea mays
agacgttggagatcacagatgatgtgctttcgtcatacaaaaatcaaggtggttttgatttgctgggcaggactgttgatcaaatccgcacgacagagcaagtagatgctgctaagtcagcatgctgtgatcttaacttggatggcctaatcatcattggaggggtgacctccattcagatgctgctcagcttgcagaattctttgcggagcatgactgccagacaaaagtcata

SEQ ID NO: 2421 - DNA, 251 bp, Zea mays
gacgagcttctgtgggcggcggcatggctgtacgaggcgacagatgaagggtgctacctcgagtacatggcccggaatggcgacgctctcggcggcacgggctggtccatcaaccagttcggctgggacgtcaagtaccccggcgtgcaggtcctggcagccaagttcctcctgcagggccgtgccggcgcgcacgccgcgacgctgcagcggtaccggcagaacgccgagttcttcgggtgctcgtgcgt

SEQ ID NO: 2422 - DNA, 224 bp, Zea mays
gcgagcgactgtgtcgagcaggagagagcgcgatggggaagatgcggcagccgatctgcctcgtggccgccgtcgccgccgcggccatcctcctgacagcgtcggccaagaagtccggcgacgtcaccgagcttcagatcggcgtcaagtacaagcctgagtcatgtacgctgcaacacacaaaggagacaagattaacgttcactatcgtgggacactcactg

SEQ ID NO: 2423 - DNA, 281 bp, Zea mays
ctgccatcgaggagggacgagggagggatccagcgagcggacggagcggacgccaccctcgcgcgcacacctacgcgcaggcgcatacaccaacgacgccgctcaactacgcgcgcaaccacctcgccgacctgctcccgcgctgcgtgccgcgcgcgatatacctcgactccgacgtgctcgccgtcgacgacgtgcggcgcctctgggagacgcgcctgcccgccgccgcggtcgtcgccgcgcccgagtactgccacgccaacttctcccgctacttc

SEQ ID NO: 2424 - DNA, 237 bp, Zea mays
gccaattcgctcgagttcagatcgagcgcgcgccaagcaagtcttccggccggccgcgaagagagcaatcaagcaagacaagatggtgaagctcgccttcggaagcgtcggcgactccttcagcgtcacctccatcaaggcctacgtggccgagttcatcgccaccctcctcttcgtcttcgccggcgtcggttccgccatcgcctacgggcaactgacgaatggcggcgcgctgga

SEQ ID NO: 2425 - DNA, 274 bp, Zea mays
gcacgcagtagtgcagcagcactgaagcactacttcctgcactcactgtgctagctgctcaaaccgtagtagtaacagtccatcaccatcaccatcaccaccaatggctcccaaggttgcgctcttccttgccctaagcctcctgttcgctgccaccgcgcatggctgcgaaccctactgttccggcccagtcgtcccaacaccaccagtcgtgccgactccgtcgtcgcatagccacgggcgctgcccgatcgacgcgctcaagctcaaggtg

SEQ ID NO: 2426 - DNA, 274 bp, Zea mays
gggacgacgtcgccggtgacgtaccaggtgctgggccacctcaagacgtgcctggtgctgtcgttcgggtacacgctgctgcacgatcctttcaccgtgcggaacatcctgggcatcctcgtcgccatcttcgggatggcgctctactccatcttctcggtgcgtgagggcaagaagaagtccgcaggcgacgccctcccggtgtcacagatgcctgacaaggagacggagccgctgttggcgaccaaggacaacagcgacaccaaagaggcga

SEQ ID NO: 2427 - DNA, 265 bp, Zea mays
ctgtctttctccttcggccgtgccctccaggcgagcaccctcaaggcctgggctggcaaggtggagaacctggagaaggctagagctgccttcctcgccaggtgcaaggccaactctgaggctaccctcggcacctacaagggtgatgctgccgccgacaccgagagcctccacgtcaaggactacaagtactgagttgcttctctttgcgtgcccgttttggaactcctgcctacgagctaggttgcggagtgtggtttgctcg

SEQ ID NO: 2428 - DNA, 266 bp, Zea mays
caggtgtttgacatgtcatccctccacatattttcacctcaagaacttgactatctaatatgtggccgacaagaaatttgggagtcggaatccctggtggataacataaaatttgatcatggatatactgctaaaagtcctgcgatcgtgaatctactcgagattttgtcagaattcacccctgagcagcagcatgcgttctgccagtttgtaaccggtgctcctgggttccacatgggggattggctggccttaagcccaagttt

SEQ ID NO: 2429 - DNA, 292 bp, Zea mays
cgcagacgagacgcgtgtagctagggttttggcctcgccgcgcacgcctcctgaagcttctagacgttcgaggaggaggagaggctcccgccgccgccgcagccatggcgtccaccaaggtgcagcgtatcatgacccagcccatcaacctcatcttccgtttcctccagagcaaagcgcgcatccagatctggctcttcgagcagaaggacctccggattgagggtcgcatcatcggattcgatgagtacatgaacttggtcctcgaagatgctgaggaaatcaacgtcaa

SEQ ID NO: 2430 - DNA, 284 bp, Zea mays
tgcaacagaagcacagcacacaacacctgcctgctcgtgctcgaccaggcggcgatcgatcgatttccctcatctctggcgtggcactgggttccgggtaaacatgtgcgagggtggaaggccggaagcagcatccatggcctcgcatcgccggccacagtcggcggggctaagcagcggcctcccggtcccggagcaagaggctgcgggcggtggcggaggaggagcggcggaggcgacacggaggcccagagggtggcgagccgtcgccttcatcatcgggt

SEQ ID NO: 2431 - DNA, 285 bp, Zea mays
  unsure (1)..(285): unsure at all n locations
ggagtaccggagacatcgtcaacgccatggccggaggaggtgcaacggtgtgcgtgaccggagccggcgggttcatcgcctcgtgggtagtgaagctcctgctctcccgcgggtacaccgtgcacggcaccgtccgccacctcagtgacgagaagacaggccacctgaagcgcctggagaatgctgccggaaaccttaggatcttcaaggctgacctgctggactacgacgccatggcagctgcggtcgtcgggttgcagngaggtttccatgtggccactcctg

SEQ ID NO: 2432 - DNA, 263 bp, Zea mays
cgggcacctgtctccaccaccgtgcccctccgactccttcttcatccagccaagccagcgatcgccatgtcggactcggaggaccatcacttcgaatcgaaggccgacgccggagcgtccaagacctacccgcagcaggctggcaacgtccgtaagaacggcttcatcgtcatcaagaaccgcccctgcaaggttgtggaggtttctacctcaaagactggtaagcatggtcatgccaaatgccaccttgtcgccatagacat

SEQ ID NO: 2433 - DNA, 290 bp, Zea mays
catggagcggatcatgaaagcccaggcgctgagggactccagcatgtctgggtacatgtcctccaagaagacgatggagatcaaccccgagaacgccatcatggaggagctccgcaagcgtgccgaggctgacaagaacgacaagtccgttaaggaccttgtcatgctgctgttcgagacggcgctgctcacttctggctttagcctcgacgatcccaacacctttggcagccgcatccaccgcatgctcaagctgggcctgagcatcgacgaggacgaggaggctccgg

SEQ ID NO: 2434 - DNA, 286 bp, Zea mays
tggaatgatgtcgcttgctgtgaagtctaaaacaaccgatacagtcaagtgtaaagtagttgatggtggggaattgaaatcacggcgccacctaaatgtccgtggaaagagtgctactttgccatctatcactgagaaggattgggaagacataaaatttggtgtcgaaaacggtgttgatttctatgcagtttcctttgtgaaggatgccaaagttatccatgaattaaaagactaccttaaaagtgctaatgccgatatacatgtcattccaaaaattgaaagt

SEQ ID NO: 2435 - DNA, 284 bp, Zea mays
tgcggaatttaagactggtgctgagaggaaggaatctgctgagagcacaatggtggcctataaggctgctcaggacattgctctggctgagctggcacctacccatccgataaggctgggacttgctcttaatttttcagtgttctattatgagattctgaactccccagacaaagcttgcaacctggcaaagcaggcgtttgatgaagctatctctgagttagacagccttggtgaggagtcatacaaggatagcactctgatcatgcaactcctgagggata

SEQ ID NO: 2436 - DNA, 124 bp, Zea mays
tgtgctgttcgcaatgctggattaattgtcacatggattactgatcctatgcatggaaacaccatcaaggccccttgtggcctgaagactcgtccattcgactcaattctggctgaagtgcgcg

SEQ ID NO: 2437 - DNA, 287 bp, Zea mays
agcaaataccccacaaggccactccaaagacctagtagtggaaccgaagatgttcgggaacatcggaaagatccccatcatcggcgacctgacgggcagcaacaagaatgcgcacctcaagggcaacgtggtgctcgtgcgcaagaccgtgctcggcttggacgtcaccagcatcgccggctccctcctcgacggcatcggcgagttcctcggccgcggcgtcacctgccagcttatcagctccaccgtcgtcgaccctaacaacggcaaccgcgggaagttgggcg

SEQ ID NO: 2438 - DNA, 279 bp, Zea mays
tgggagatagagagaggagagggagggtttcctcaaagagaacccgaacccaaacccaagcagaaaacactagcgtttcctcaccagggcgtccatcccagcagccatggcgatggcgtacaagatggcgacggaggggatgaacgtgaaggaggagtgccagcgctggttcatggagatgaagtggaagaaggtgcaccgcttcgtggtgtacaagatcgacgagcggtcgcgcgccgtgctggtggacaaggtgggcggccccggggaagggtacga

SEQ ID NO: 2439 - DNA, 193 bp, Zea mays
gcctcattcatctccattcgaaacaccctcgcacccacactctcccttcgtccccagcctaaatccccgcaacgatggctcgcacgaagcagacggcgcgcaagtccacgggcggcaaggccccgaggaagcagctggcgaccaaggcggcgcgcaagtcggcccctgcgaccggcggcgtgaagaagccgca

SEQ ID NO: 2440 - DNA, 278 bp, Zea mays
ctcccatccgcacctctctccatctccctgctcctccgcctccttcttgatccagccaagccagggatcgccatgtcggactcggaggacgcacacttcgaatcgaaggccgacgccggagcgtccaagacctacccgcagcaggctggcaccgtccgtaagaccggcttcatcgtcatcaagaaccgcccctgcacagttgtggaggtttctacctcaaagactggtaagcatggccatgccagatgccactttgtcgacatagacatattcaacgg

SEQ ID NO: 2441 - DNA, 274 bp, Zea mays
cctcagagcgccaccaagtgttacggccgcgaagagcaacgcaacaagatggtgaagctcgcattcggaagcgtcggtgactccttcagcgccacctccatcaaggcctacgtggccgagttcatcgccaccctcctcttcgtcttcgccggcgtgggttccgccatcgccttcgggcaactgacgaatggcggcgcgctggaccctgcgggtctggtggcgatcgctgtggcgcacgcgctggccctcttcgtgggcgtctccgtggccgcga

SEQ ID NO: 2442 - DNA, 271 bp, Zea mays
caaatggcgtggagattcagagaagcttgtcaaagttctgtttgagcttgctaggcatcatgcaccatccacaatattccttgatgaaatagatgctatcatcagccagcgtggtgaagctcgcagtgagcatgaagctagtcgtcgcttgaagactgagctacttattcagatggatggtttgacaaagacaaacgacttggtatttgtacttgcagctacaaatcttccctgggaattggatgcagccatgctccgccggcttgagaag

SEQ ID NO: 2443 - DNA, 245 bp, Zea mays
  unsure (1)..(245): unsure at all n locations
tgcctcttggctatgacctggtttggagaaattgtgctgaggattacaagagccctgtatcaatatggcttccaaggccaccggggggatacgtagctcttgggtgtgttgctgtcccttcattcaaggagcccactcttgactgtgctttctgtgtggatgagagactcgcggaggatgccgcgtatgangagcaaatcatatgggcctcatcggatgcttacccatggggatgctatatctac

SEQ ID NO: 2444 - DNA, 280 bp, Zea mays
ggaaaggagggcaaccgagagcgatcggcgatgggctccttcctctcgagcttagtcacgccccctccggccgccgacgaccccaactgcgccgtggtggccgcccactccaaggccacctacgacgagcagtgggcggcccacaagagcagcagcaagctgatggtgatcgacttctcggcctcctggtgcgggccctgccgcttcatcgagccggccttcaaggagctggcctcccgcttctccgacgccatcttcgtcaaggtcgacgtcgacgagc

SEQ ID NO: 2445 - DNA, 277 bp, Zea mays
ctattataatggggtccaatctgatcttcctgtgatgaaagatgctgagagggttttgaaagagttcgacataccttgtgaggtaactattgtttctgcacatcgtacaccagagcggatgtatgattatgcgaagtctgctaaagacaggggtttcgaggtcataattgcaggtgcaggcggagcagctcatttaccagggatggtggcttcattgactcctcttcctgtaatcggagttcccattaagacttcaacactatcaggatttgattcc

SEQ ID NO: 2446 - DNA, 287 bp, Zea mays
tgggcgatgggggcgaacgcgcggtgctggtgggcatcaattaccagggcaccaaagcggactcaagggctgccacaacgacgtcgctcgcatgcgccggtgcctcgtcgaccgcttcggattcgacgagtccggcatccgcgtcctcatagatgacggctccgcgccgcagcccacgggggccaacatccggcgggaactcgcgcgcctcgtcggggacgcgcggcccggggacctcctcttcttccactacagcgggcacggcatacggctgcccgccgagaccg

SEQ ID NO: 2447 - DNA, 275 bp, Zea mays
ccctgtcccgctaggattccccccaaaccctcccccaaaaccccagagcggagaagagcgcaagatgttcggcttcgggcaccacggccaccacggccagaacccgccggcgcacggcggcgtgcaccagcccaccttcaagatcttctgcaaggccgacgaggggtactgcctcaccgtccgcgacggcaacgtggtgctggcccccgccaacccgcgcgacgagcaccagcactggtacaaggacatgcgcttcagcacccaggtcaaggacg

SEQ ID NO: 2448 - DNA, 278 bp, Zea mays
cccaagcaccagcgcggcggcggcgaccatggctgtcggaaagaacaagaggatctccaagggaaagaagggtggcaagaaaaagaccgtcgaccctttctctaagaaggattggtatgacatcaaggcaccgtcggtgttcagtgtgcgcaacatcgggaagactctcgtatccaggacacagggtaccaggattgcttctgagggtctgaagcacagagtctttgaggtttgcctagctgatcttcagggcgacgaggatcaagcttacaggaaaa

SEQ ID NO: 2449 - DNA, 275 bp, Zea mays
tacacgggcttcgagggcgtgtcgacgctggtggacgtgggcggcggcgtgggcgccacgctgcacgccatcacgtcccgccacccgcacatctccggggtcaacttcgacctgccgcacgtcatctccgatgcgccgccgttccccggcgtgcgccacgtgggcggggacatgttcgcgtccgtgcccgccggcgacgccatcctcatgaagtggatcctccacgactggagcgacgcgcactgcgccacgctgctcaagaactgctacgacgc

SEQ ID NO: 2450 - DNA, 278 bp, Zea mays
ggggcaacaacatccttgtgatgtgcgattgctacaccccagccggcgagccaatccccaccaacaagaggtacaacgccgccaagatcttcagcagccctgaggtcgccgccgaggagccgtggtatggtattgagcaggagtacaccctcctccagaaggacaccaactggccccttgggtggcccatcggtggcttccccggccctcagggtccttactactgtggaatcggcgccgaaaagtcgttcggccgcgacatcgtggacgcccactac

SEQ ID NO: 2451 - DNA, 274 bp, Zea mays
gagaactatggttgtgaagtcgtttgtttcactgctgatgttggccagggtgccattgaattggaagggttggagaagaaggcaaaagccagtggtgcatgtcagcttgttgtgaaggacctcaaagaagaatttgttagtgaatatatatacccctgcctgcgtgcaggtgcagtttatgaaagaaagtatctgcttgggacttcgatggctagggctgttattgctaaggcaatggttgatgttgccaaggaagttggtgcggatgcagttg

SEQ ID NO: 2452 - DNA, 283 bp, Zea mays
aggagcaccccagcctatcaaagagcgagaagaagaaactgtgcgggctgatggactgcaagcagctgtcgcaggacgcgtgcatgcacgccgtgcagaacgagcgtctccccctacgcgtggtcgtgcaggttctcttcttcgagcaagtccgggcatcgtcgtcggttgcttctgcaaggagcgacgctaattcgacgtcggggctcccgtctgccgttcgctcgcttcttcccagagagaacggcaactccattggcagctcgaggtctttcgcgacgac

SEQ ID NO: 2453 - DNA, 272 bp, Zea mays
ggaaaagcgaaagaagccttgctttgtttgtgggttgtttgggcacaatgcaaagcagtgcacgcagggtcaagactgttttatctgtaaaaaaggaggccatatggcaaaggactgccctgataagcacagaaggaacgatcatcaatccacattatgtttaagatgtggagaaataggtcatgagatgtttggatgtaccaatgattacccaccagatgatatcgagaaaataagatgctacgtgtgtaaccagaagggccatctatgtg

SEQ ID NO: 2454 - DNA, 262 bp, Zea mays
aaccgctacgcagccgccgcgccagatttcgccgcgctggcggagctctacccgtcctttcgccccttcgtcttcatctccggcagcgggcgcgcgtccgttgacttcaccgacttctcctccaccagggagctcacgcgcgtgctcctcctccacgaccatggcgttaactggtggattccagatggacagctctgcccgactgttccaaacaggtccaactacattcactggatcgaggatcttctctcctcggatctga

SEQ ID NO: 2455 - DNA, 274 bp, Zea mays
cggctcgagcactacctccccaacaagtttaagaagtttgtcgtgcacaatgtttctgagctggagttgcttatgatgcacaacaggacatactgcgctgaaatcgcacacaacgtgtccactaagaagcgcaaggaaatcgtggagcgagctgctcagcttgacattgtggtcaccaataagcttgcccgtctccgcagccaggaagatgagtaaactgtttctagcagtagttttggaatggtgcggctttagaggacttgctgtgtatgat

SEQ ID NO: 2456 - DNA, 274 bp, Zea mays
taaaggaaacgtggcacgactgatcaatcattcttgcacaccaaactgctatgcaaggattatgagtgttggacatgatgaaagtcgtattgttctaatagcgaagaaaaaagtttgcgctggtgatgagctaacgtatgactacctgttcgatccagacgaggccgatgaacgcaaagtgccatgcctttgtcagactgctaactgccggaaattcatgaattagttcgcttagatgtcagaggatcactgatataatttcccccccttctta

SEQ ID NO: 2457 - DNA, 275 bp, Zea mays
acgcgatgtcgcacttcgggaggtcaggcccgccggacatccgcgacaccttctcgctcctcgtcctcaacatcagcttccgcaccacggccgacgacctcttcccgctcttcgagcgctacggcaaggtcgtcgacgtcttcatcccgagggaccggaggaccggggactcgaggggtttcgcgttcgtgcggtacaagtacgccgacgaggcgcagaaggctatagatcggctcgatggccgtgatgtggatgggagaaacatcatggtgcag

SEQ ID NO: 2458 - DNA, 263 bp, Zea mays
gtgctggcggacggcatccaggacgactccggcaacgtgacccgcttcgtgacgctggcccgggagcccatcgtgccgcgcacggaccgccccttcaagaccagcatcgtgttcgcgcacgacagggagggcacctccgtgctcttcaaggtgctctccgccttcgccttccgcggcatctcgctgaccaagatcgagagcaggccgcaccgccgcaggcccatccgcctcgtcgacgacggcaacatcggcaccgccaagca

SEQ ID NO: 2459 - DNA, 267 bp, Zea mays
ctgcaactgaacaaggctaatccgtctgcatcagtacagcagattaaccatatatctccgatggacattttccagattggaacagctaccgatatattcaggagtcttataacaagtttggatacagagggccgctaccttctgttgaatgcaatcgctaaccaactgcgctatccaaatagccatacacactactactccttcatcactctgtatctattttccgaggctacccaggaaattacccaggagcaaatcacaagggtt

SEQ ID NO: 2460 - DNA, 264 bp, Zea mays
gtccttccaggtcaccgccagcgacggccgcaccgtcaccagcaacggcgtcgctccggcgggctggcagttcggccagaccttcgagggcgcccagttctagctactactactccatcgacgagtgtgactgtgagcaagagagaaggagaaaccttcttcgctgtagtaaagaagaggctcccgccattccgaggctgcttattattagcacccgcttaggcatttccttctcttattattaccataggattgagctgttta

SEQ ID NO: 2461 - DNA, 266 bp, Zea mays
agcacatcctgtgcctgccaaatgtgaagtacgtggacctgcggttcaacgagctgcgcgggccggtgccgccggcgctcttcgacaagccgctggacgccgtcttcctcaacgacaacgccttcgacttcgagctgccggacagcctgggcaactcgccggcgtccgtgctcgtgatggccaacctgcgcctgcgtggatgcatcccgcgcagtgcggccgcatggcgggcacgctggccgagctggtggcgctcaactcgggcc

SEQ ID NO: 2462 - DNA, 251 bp, Zea mays
gggttcgtgaggttctccggggttcgggttcgtgggtgagcggatcgagatggcggcgtcggatgttgagtaccgctgcttcgtcggcggcctcgcctggggcacggacgaccactccctccacaacgccttcagcacctacggcgaggtcctcgagtccaagatcatcctcgatcgggagacgcagaggtcccgcggcttcggcttcgtcaccttctccacggaggaggcgatgcgtaaccctatcgagg

SEQ ID NO: 2463 - DNA, 271 bp, Zea mays
cggctcgaggagagttgggcgcagagaatccccaagcaaacaaacagggtagagggagaggagaggagaggagaggagatgttgggtctgggacaccatggctccgatgaagctgtacggggcggtgatgtcgtggaacgtgacgaggtgcgcaacggcgctggaggaggctggctccgactacgagatcgtgcccatcaacttcgccaccgccgagcacaagagccccgagcacctcgtccgcaacccgtttggtcaggttccagctctg

SEQ ID NO: 2464 - DNA, 269 bp, Zea mays
agccgtccttcacctccgccgccgaatccgagactctgatctcgggttcaccgcagcgcacagagcacccctgactcccggcccgatccgcgctctcctctccgacgcttcagtcatggcaggaatggcacacgagggttctcagtttgatgctaagcactatgattctaaaatgcaggagctgctgagcactggtgagactgaggagttcttcacttcatatgatgaagtttttgaaagttttgatgacatgggccttcaagagaatc

SEQ ID NO: 2465 - DNA, 203 bp, Zea mays
cggcattctacgccatctggaacctcttctccgggttcatcatcccccgaccgaaagtgccgatctggtggaggtggtactgctggatatgccccgtggcgtggacgctgtacgggctggtggtgtcacagttcggtgacgtcatgactccgatggacgacggaagggccgtgaaggtgttcgtcgaggactacttcgacttc

SEQ ID NO: 2466 - DNA, 213 bp, Zea mays
tctgcagccgacgagcccgacggccgtgaagcaggtgagctgcgtgtgggacgcgtacgaggccaccaagggcgcccacgggctgtgcatcctgaccgagtgggacgagttcaagaccctggactaccagaagatcttcgacaacatgcagaagcccgccttcgtcttcgacggccgcaacatcgtcgactccgagaagctgagggagatcgg

SEQ ID NO: 2467 - DNA, 252 bp, Zea mays
ctgaaacgagctggacacaccgaggcatctgttgaccttgccatgttggctggattacctcctgttgctgtcctttgtgaaattgtggatgatgcagatggttctatggctcgcctaccaaagttgcgtgtctttgctgaaaaggagaacttaaagattatatctattgctgacttgattaggtataggaggaaaagagacaggctaattgaacgcgcttctgttgcacgcttgcctttgaaatggggaatg

SEQ ID NO: 2468 - DNA, 283 bp, Zea mays
  unsure (1)..(283): unsure at all n locations
cgcgctcgaggctcaccatcatccgcgacgggctcaaggctgaccccaagaagtaccgcaagatgaaggagaggcttgtcggcgtctctgaggagaccaccacgggtgtcaagaggctctaccagatgcaggagaccggcgccctcctcttccctgccattaacgtcaacgattccgtcaccaagagcaagtttgacaacctgtatggttgccgcacatcgctccctgatggtctgatgagggccactgacgttatgatcgccgnagaggttgccgtggtctg

SEQ ID NO: 2469 - DNA, 267 bp, Zea mays
cgactggggcgaggcgggcggccccgacctcatcgtcgacgacggcggcgacgccacgctgctcatccacgagggtgtcaaggccgaggaggactacgagaagaccggcaagatccccgatccggagtccaccgacaacgctgagttcaagatcgtgctcaccatcatccgcgacgggctcaaggctgaccccaagaagtaccgcaagatgaaggagaggcttgtcggcgtctctgaggagaccaccacgggtgtcaagaggctcta

SEQ ID NO: 2470 - DNA, 282 bp, Zea mays
ccatgatttcgctttcttcttcccgtcgagacccaaccataccagcggcgccgcagtgacgaggaggcggagtagagtggccggactacctcgacacctccactgcaaccatgggtatctcacgtgattcgatgcacaagcgccgtgccaccggtggaaagcagaaggcgtggcgcaagaagcgaaagtatgagcttggccgtcagcctgctaacaccaaactgtctagcaataagacagtgaggagggtccgtgtccgtggaggcaacgtgaagtggaggg

SEQ ID NO: 2471 - DNA, 290 bp, Zea mays
tggacggcagagagatgaaaaagaatggagcgagctcttcaccaaagcagggttcagcgaatacaagatcctgaaggaatttggagctcgtgttgccttcgaagtctatccgtgagattgcacctggactatacatatatatttacatacatatatgtatgtgtgtgggtgccttgcgtggcttggcgtgatgatgtcataaataaagagggtgggtgtgcttgcggtattcatggatggccatggatctgagcacatgacgttggatgctttcttaaggctctcgtgga

SEQ ID NO: 2472 - DNA, 273 bp, Zea mays
cctcactcgccgccgccgccgctcgtccctcgccccatcgcgatggcccggatcaaggtgcacgagctgcgggggaagagcaaggcggatctgcaagcgcactaaggagtttaagtcggagctctccctgctacgcgtaccaaggtcaccggcggggctcccaacaagctctccaagatcaaggttgtgcgcacctccatcgcgcgcgtgctgaccgtcatctcgcagaagcagaagtcggcgctgcgtgaggcgtacaagaagaagaagctg

SEQ ID NO: 2473 - DNA, 185 bp, Zea mays
tgcgcgacgtggagctgcaggctggtggaaggaggtgcgcgaggaggcgcacggcgacctcaaggaccgagactggtggcccaggatggacgccgtccagcggctggccagggcgtgcaacgaccgtcatctgggtagcgtccgtctgcacgggccgtcaacttcgggcagtacccgtacgccgg

SEQ ID NO: 2474 - DNA, 203 bp, Zea mays
cggctcgagctgctgagcaaaaagaagagaaaggtgtaccagctttctggcttaatgcaatgaagaatcatgaaattttagctgaggagatccaggagagggatgaggaagctctcaagtacctcaaggacatcaagtggtacaggatcagcgagccgaagggttttaagcttgaatttcactttggtacgaatatgttcttc

SEQ ID NO: 2475 - DNA, 225 bp, Zea mays
tgccactcctccagttgagccggacatatgcacctataattcagtcatccgggcccttgttgttggtgggcgggtacctgatgctttggtgatctatgatgaaatgaaatcttctggaatcgagccagatgtattcacttatcgagcagtcatgaatgggtgctgaaagagttttcggatggatgatgcactgcgtgtgtttcatgagaggcggggcatcatggg

SEQ ID NO: 2476 - DNA, 286 bp, Zea mays
atcttatggggggaaagaatagcacttttcagacactcataaatcctgagaaagatgtgaaaaatacatatgttcatggtattaacaacagtatgctctgcaggcctgatgttccaagatttggagagattattcccattctgctacaatatgtgtggagtcgtcaaatggacggtaaaccagttctctgggttgctcataatgggcgttcctttgacgtaccctttctcatgtttgagtttcgacggtgtaaagtagaaatgcctggtgattggctctttgtgga

SEQ ID NO: 2477 - DNA, 285 bp, Zea mays
tgaagaaggacgaggcaaaggaggttggtcctcaggcgctggacttgaagcttccattcggtgagatggatgttctccgggagaacttggagctgatcaagaggcagctgggccttgagcaagtcgaggtgctctccgcttccgacgaagctgctcgcgctaaggctggtgaacatgcttcgctgctagagaagaacccaccatcacccggcgaccccatcgccatcttcctcagcaaacagagctgaaaactgaacttgcatatggcccttttgttatttactt

SEQ ID NO: 2478 - DNA, 265 bp, Zea mays
cgcgggacgacctcctggcctccttcctggacgaccgcgaggcgctcaccgacgcccagatcgccgacaacgtgatcggcgtcatcttcgccgcccgcgacaccaccgccagcgtgctcacctggatggtcaagttcctcggcgaccaccccgccgtcctcaaggccgtcatcgaggagcagcaggagatcgcgcggtccaaaggctcctccggcgagcccctgacgtgggcggacaccaggcggatgcgcacgacgagccgtgt

SEQ ID NO: 2479 - DNA, 131 bp, Zea mays
caccaacgtcggcatctgcctcgccgacccatccctcaccaagattttctcggcttctaggatcgacattcctagcgcgtggcagatgcctcagggtggtatagatgcaggggaagaaccaagggcggctg

SEQ ID NO: 2480 - DNA, 231 bp, Zea mays
cggggaaccgacacagctcctcagcagagtagccagcacgacaagcccgatcagcagacagcaggcatggcactcgcggaggccgacgacggcgcggtggtcttcggcgaggagcaggaggcgctggtgctcaagtcgtgggccgtcatgaagaaggacgccgccaacctgggcctccgcttctttctcaaggtcttcgagatcgcgccgtcggcgaacagatgttctcgt

SEQ ID NO: 2481 - DNA, 293 bp, Zea mays
  unsure (1)..(293): unsure at all n locations
cccaaccttcccctacaccagaaaaatccccagttctttggtccgcgtcagagaggcggcggcgatgtctgggcgcggcaagggcggcaagggtctgggcaagggcggcgcgaagcatnccggaaggtgctccgcgacaacatccagggcatcaccaagccggcgatccggaggctggctaggaggggtggcgtgaagcgcatctcggggctcatctacgaggagacccgcggcgtgctcaagatctttctcgagaacgtcatccgcgacgccgtcacctacaccgagcacgc

SEQ ID NO: 2482 - DNA, 294 bp, Zea mays
gcctgctacactacacccctgccaagatccatctttccggttccgccgcctgatcgaagtgaacaagcaaggaagagccatggcgagcgagcacgcggcggggggcgaggctaagcatgaccagaagcagagcctgatggacaaggcgaaggggttcgttgtggagaagatcgcgcacatccccaagcccgaggcgacgctggacggcgtgacgttcaagggcctgagccgggagtgcatcacgctgcacagcagcgtgaacgtgtccaacccctacgaccaccgcctccccat

SEQ ID NO: 2483 - DNA, 290 bp, Zea mays
ggcgactacccgctgtcggcgaccatcatgtccgagtacgccaacaagaagacgcgcggcgcgttcatcgccgcggtgttcgcgatgcagggcttcggcatcatggccggcggcctcgtggccatcgtcgtgtccgcgtcgttcaaggccaggttccccgccccggcctacgccgtcgaccccgccggttccacgccgccgcaggcgacttcgtgtggcggatcatcctgatgctgggcgcgatgcccgcggcgctcacctactactggcgcaccaagatgcccgagacg

SEQ ID NO: 2484 - DNA, 291 bp, Zea mays
attggaggaggtagagaactttgaaaaatgggtccatgctatgaaatttaagataatgaggcctaatacaatgaacaagtatggtgctgtccttgatgattttggcctggaagctatgctgaaccagttcatggaacagttcatagctccaatttctaaagttctttatcctgaggttggtggaggaacattggactcccatcacgcttttattgttgaatatgggaaagacagggatgttgaactaggttttcatgttgatgattcagaagttacattaaatgtttgcct

SEQ ID NO: 2485 - DNA, 293 bp, Zea mays
ccgatgactcatgttgtgaagagaaatcaacggaacacaacatatgtggatgctgtgatgacggttccgcttggtgccatgctgcctgtgagcgggataaatgttgcattcaaccgcgatgtgctggggcctgctatgttcccaggcctgcgtctacgaaacgaagggaagcacagatgggatacccttgaagacatatggaatggcttatgtgctaaagtagtctgcgacagcttgggatatggtgtgaagaccggactgccttatgtgatgagaagtgatgcagaagcagg

SEQ ID NO: 2486 - DNA, 284 bp, Zea mays
cgcaaaatttgtgcctttgaggaagccgaagaagttgccaggcgaggtgatctccgaagagtattctttggaatatggaactgacaagatagaaatgcatgtcggagctgtacaggccaacgaccgggctcttgtagtcgatgatcttattgctaccggtggaacactatgtgcagctgtcaaacttattgaacgtgttggagcaaaggttgttgagtgtgcttgtgtcattgaattgccagaactgaagggccgagacaagcttggggacaggccatttttgg

SEQ ID NO: 2487 - DNA, 293 bp, Zea mays
gagaacaaggaggttgctgtgaatgactttctaccagcgagcgccgcttatgaagccatacagcactctatggacctgtatgctacatacatcgttgagggcctgaggaggtaggattctgatggctaggaaaggtggggaggatgttgacgaaaaactgggagaccatttaccgcatggaacgagtaccgttattattttatttgtgtcgtgtatactgctagtagtgaaccctcaatcaaagaccgaaatcccctggggagtcggagtcggtagtaggtgaagctagtaac

SEQ ID NO: 2488 - DNA, 295 bp, Zea mays
tgtgggttccaatttgttcttacacatctggacaacaggcagcttctcatcaaatcagaccctggtgaagttgttaaacctgaccaattcaaggcgattaacgatgaggggatgccaatttaccagaggcctttcatgaaggggaagctgtacatccatttcacggtggagttccccgactcgctggcaccagagcagtgcaaggctctcgagacagtacttccaccaaggccttcatccaagctgacagacatggagatagatgaatgcgaggagacgactatgcatgatgtga

SEQ ID NO: 2489 - DNA, 292 bp, Zea mays
cagtggagctgggccgtcggtacttcccgaactgctcgcaggtgctggacaagttcctggaggacgatctgccggaaggtctggaccagttctacctccagaggggcacagccgatgagcagaaggtgaagaggatgcgcttctgcgagctgaaagaggacgtgctgaaggcgtttagcaaggacaaggcggagggcagcgtgttctcgggcctgtcctcgtcgtcgtcgtgctcgccgccccagaagtatgcccagaggtgatcaaggcaccagtttttgccgtatagttt

SEQ ID NO: 2490 - DNA, 295 bp, Zea mays
ctccgcttcaagatgcagatctttgtgaaaaccctgactggcaagactatcaccctcgaggtggagtcgtctgacaccattgacaacgttaaggccaagatccaggacaaggagggcatccccccagaccagcagcggctcatctttgctggcaaacagcttgaggacgggcgcacgcttgctgactacaacatccagaaggagagcaccctccaccttgtgctccgtctcaggggaggcatgcagatctttgtgaaaaccctgaccggcaagactatcaccctcgaggtggagt

SEQ ID NO: 2491 - DNA, 291 bp, Zea mays
aaattatccgtcttgagggcgattcagctacaatccaagtttatgaggaaacagctggactgatggttaatgaccctgtattgagaacaagaaagcctctttcagttgaattgggacctggaattcttggaaacatttttgacggtatccagcgacctctaaaaaccatcgctattaagtcaggagatgtgtatattcctcgtggtgtttcagttcctgcccttgacaaagatgtattgtgggaatttcagccaacgaagctaggtgttggagatgtcatcacaggtggag

SEQ ID NO: 2492 - DNA, 288 bp, Zea mays
gcagcgcactactgaagcaccacttcctgcactcactgctagctgctcacaccgtgctagtaacagtccatcaccagtcaccaccaatggctcccaaggttgcgctcttccttgccctcggccttctcttcgctgccgccgcgaatggctgcgaaccctactgtcccggcccagtcgtcccaacgccgccagtcgtgccgacgccgtcgtcgcacagccacggccgctgcccgatcgacgcgctcaaactcaaggtgtgcgccaacgtgctaggcctcgtcaaggtcg

SEQ ID NO: 2493 - DNA, 289 bp, Zea mays
cgctcctcgcgccgccgccgcgtctcctcctgtacaggtaagatcgagaggaagagggcgaaatggtgaagcacaacaacgtcatccccaacgggcacttcaagaagcactggcagaactatgtcaagacatggttcaaccagcccgcccgcaagcagagacgccgcattgctcgtcaaaagaaggctgtgaagatattcccccgcccgactgctggtcctctacgccccattgttcaatgccagactttaaagtacaacatgaagtcaagggctgggagaggctttac

SEQ ID NO: 2494 - DNA, 287 bp, Zea mays
tctattgctagatgccgatgtatatatagagaagtatatgtgagatattatcagtaaactttgtttctattatctaggctcgtggtatgaattatctgcataattgttcaccagttatagttcatagagatctgaaatccccgaatctactggtggacaagaattgggttgtgaaggtttgcgattttggtttgtcaagaatgaagaacaataccttcctgtcatcaagatcaacagctggaacacggagtggatggcaccagaagtacttcggaatgaacgatcgg

SEQ ID NO: 2495 - DNA, 196 bp, Zea mays
ctggcctaatgtttcggaaaatgcaaaagatttagttcgacacatgttggaccctgatccaaagctcaggctaactgcaaagcaggttcttgaacatcattggcttcaaaatgcaaagaaggctcctaatgtccctcttggagatattgtaaagtcaaggctcaaacaattttctaggatgaatagatgatgttcc

SEQ ID NO: 2496 - DNA, 287 bp, Zea mays
agccaagaccacgcacgaaaaacggtgactattgaggaccatcctcacttattggctgggaagcatgcatcagtgcacccatgcaaacatgcagctgtgatgaaaaagatcatcgacgttccaatgtcggggggagtggaaccagaagttgacaagtaccttttcatatttttgaaattcatagcgacagtcataccgactattgagtacgattatacaatggacgtcgaccttggcagtacaagctgattattggttggcttgaagcttgtcacttgtctcgggaa

SEQ ID NO: 2497 - DNA, 216 bp, Zea mays
cggctcgagggtacctgacctgaccacgagagcaacatgggcggaggacacgacatgcacgggcagcactacggccacaacggcggcgtgaagggcttcgtgtccaacctcgtccacggcggcggcggccatggccatggaagcggctacggccatggccatggaaacggctacggccatgggaatggcggctacggcggcggccaccggtaccct

SEQ ID NO: 2498 - DNA, 280 bp, Zea mays
ctttccccttccctccctccctctccccgcgggccgccagaggcatcttcgccctcgattcgaccccgattcgtccgcccgcgaccgggattccctccgccaagcgcggatctgaacgctgcgctccgtgtcgccgctcgaatccgccatgaagggggccaaatccaagggcgccgccaaggccgatgccaagctggcggtgaagagcaagggggcggagaagcccgccaagggcaggaaagggaaggccggcaaggaccccaacaagcctaagagggct

SEQ ID NO: 2499 - DNA, 281 bp, Zea mays
attctgctccatatggaagtccttcagctgaacgtcgggttaatctgtcaagcattagggctcctaagttgggcaatgctcgtacagatgtgaagcctgaccattttgctcgtgaagctaaggagttcttacgcacgaggttgattggcaaacaagtggctgttgaaatggaatactctcgaaggatcagcactgtagatggacagagtgctgctccaacagcaaacatggctgatacaagagttttagattatgggtcagtttttctgggttcaccatca

SEQ ID NO: 2500 - DNA, 279 bp, Zea mays
gtggcatgaaccttgccttcgacagggatctcattggccctgctatgtactttggtctcatgggtgatggccagcccatcggtcgctacgacgacatgtgggcaggatggtgtgtgaaggtcatctgcgaccacctgagcctgggagtcaagactggcctgccatacatctggcacagcaaggctagcaaccccttcgttaacttgaagaaggaatacaagggcatcttctggcaggaggacatcatccccttcttccagaacgtgaccatccccaagg

SEQ ID NO: 2501 - DNA, 273 bp, Zea mays
ggtgtccgactgctgatcaaggactacccctatgccgttgacgggctcgtcatctggtgggcgatcgagcggtgggtcaaggagtacctggacatctactaccctaacgacggcgagctccagcgtgacgtggagctgcaggcgtggtggaaggaggtgcgtgaggaggcgcacggcgacctcaaggaccgagactggtggcccaggatggacaccgtccagcagctggctagggcgtgcacgaccatcatctgggtggcatccggctgcacg

SEQ ID NO: 2502 - DNA, 296 bp, Zea mays
cgcccaggagctcgccgtcggggaggctgctcgaggagccgcgctgtctctcccgcgccgcgaccttcgccctcgccgccgccatgatctgcgcgatctccggtgaggtgccggacgagccggtggtgtcgaagaagtcggggcttctcttcgagcggcggctcatcgagcgctacattgaggaccatggcaagtgccccatcaccaaggatgagcttactatggatgatatcgtgccggtcaataccaacaaggtcgtgatagccaggcctttgcaggctgcaagcattccagga

SEQ ID NO: 2503 - DNA, 285 bp, Zea mays
gtgactcagagcatgattgggcggaaaattctggaaagccaacttcaacgtataggagttcttagtgctggtgatacaataagcaaacatccagcctttgatacaaactacaaaattttgtgggccaatcatggagatgcaataagcattcagtactctggaactcctgctctgaagggagattttgttcggtacgggaagcgaactactcagggaattctaaacgatttgaggaatgcacttgctagatactacttgaataacttcgttgatgggactaagcag

SEQ ID NO: 2504 - DNA, 314 bp, Zea mays
  unsure (1)..(314): unsure at all n locations
tcgtattcttcatgaaggagatatagacaagcgagtgcaatttttgattgaaggcctttttgcaattagaaaagctanattccagggtttcncagccatccgtccagagttggatctagtggagcaggatgaccagtttacacatgtcagttcccttgtggattacctagactttgtgagcaatctaaatgttttccaggcaaaccccaagtttgttgaagatgagaaggcatatgagaatctaaagagaagcatcctgggagcagagtcttctgaagatgaagaaggatcagatgctgcttctgatgatgatg

SEQ ID NO: 2505 - DNA, 302 bp, Zea mays
cggcgcccgttcaggatccacatcttcccgagcgagttcttggttggcctcttcctcttcggactagctccaaggttatgtgaagccaaagacagtgacctgagcagatcaaaactaccaaggatgcatctataactgttcgttatgttgtttgtatcttggttatacaatacagtagtacaaaaaaacgaattggtgctcgttaaatagtacatgatgcatctagtcagctcaattcctgttttggatgttgggtggttgatttgatcataactccttgtttggaatgtggacctcatcat

SEQ ID NO: 2506 - DNA, 324 bp, Zea mays
  unsure (1)..(324): unsure at all n locations
ncaccctactctcactngtaacgtacctcagcactcggctcgagactcctccttcggatctcgcattcagcgcagctaggtgtgaaggacaggggacgcggatgaagatggggctcgcgttcgggaagctcttcagccggctcttcgctcagaaggacatgtcgatacttatggacggcgtcgactacgccggtaaaaccagcatcctctacaagctcaagctcggcgagatcgtcaccaccatccccaccatcggtttcaatgttgaaactgttgagtacaagaacattagcttcactgtctgggatgtcgggggtcaggaca

SEQ ID NO: 2507 - DNA, 306 bp, Zea mays
ccgttgcctccaaactcatttctcccgagcgccgccgcgagcctccgttccagcttcgtccatggcttccctcaccggatccgctctctcctttgcgaggcccgtcaaggcaatcagcattaagtctgtctctttctctggtttaaggaaggataatgtagccttccgcttgcagccagtgccacaaagattcgcagtctgctgtcctgctaaaaaggagactgtggatcgggtttgtgatattgtcaagaagcagcttgcacttcctgagggcactgaggtctgtggctcctctaagtttcaaga

SEQ ID NO: 2508 - DNA, 354 bp, Zea mays
  unsure (1)..(354): unsure at all n locations
cccccnctagacccgcacgcaagcatactcaggcactcggctcgagcctttctgctgagctcaggaaatcccctctggtctccccgtcccccattccacccgccgccgccgacgcgccgcgcctgttcaagatgaatgtggagaagctcaagaagatggcgggtgctgtgcgcactggaggaaagggcagcatgcgcaggaagaagaaggcagtccacaagaccgcaaccaccgatgacaagcggcttcagagcacgttgaaaagaattggagtgaacactattcctggtattgaggaggtcaacatcttcaaggatgatattgttatccaattccagaaccctaaagtgcaag

SEQ ID NO: 2509 - DNA, 307 bp, Zea mays
atcatgtcgctctccacacacagccacccggccgccgccgccgccgggagcggaaaatccctttttccggctggcccagcggcgcagtccgtacatttccccaaggcacggccccctgtccccgccgccgtctccgccgcgactgcgctgttcacgcggaggatagggtttcgtcgctgactcaagtctccggcgtgctggggtcgcagtggggcgacgagggaaagggcaagctcgtcgacgtgctcgccccccgcttcgacatagtcgcgcgttgccagtggggagcgaacgctggacatactat

SEQ ID NO: 2510 - DNA, 298 bp, Zea mays
ataagtcctctggggcatccaaggcactgtgtctgaagcaggagtcgtggcaagccacagacaccaagttccaggcctggcctcgcactgctgggccaccggttgtcatgaaccccatcagccgccagaacttcatcgtcaagtccactgagtaggtttgggctggagaagctggttctgcgacttggtgccgccatgaagccagagttccttttctaaggtcttaatcaattgtaataaaacgaaatacagtcaggatttttttgtgatttttacttgatctgtgagcgaacactgg

SEQ ID NO: 2511 - DNA, 295 bp, Zea mays
tagcgtgtgcgcgaacgatcgtggtcgacgcgcgccaccacatgctgggccgtctctcctcgatcaggagaacatggctgctcaatgggcagaaagttgtcgtcgtccgctgcgaggagatctgcatgtcgggcggcctcgtccgtcagaagatgaagtacctccgcttcctccgcaagcggatgaacaccaagccgtcccacgggcccatccacttccgcgcccccgccaagatcctgtggcgcaccatccgcgggatgattccgcacaagaccaagaggggggaggcggctct

SEQ ID NO: 2512 - DNA, 191 bp, Zea mays
cgcaagtttgccaggtcacagctcgactacatccttggcaagaacccattgaagatgagctacgttgtgggtttcggaaacaagtacccgaagcgccctcatcacagaggcgcgtcgatacctcacaacggcgtcaagtatgggtgcaaaggaggttacaagttgagggacacaaagaaggcaaaccctaa

SEQ ID NO: 2513 - DNA, 306 bp, Zea mays
agaacctgcagctgagcccggcccacgtggaggcgtcccggatgacgctccaccgcttcggcaacacctccagcagctccatctggtacgagctcgcctacatggaggccaagggtcgcgtccgccgcggccaccgcgtctggcagatcgccttcggcagcgggttcaagtgcaacagcgccgtctggcacgcactgcgcaacgtcaagccgtcgcccgatagcccctgggaggactgcattgaccgctacccggtggagctcgtcgacggcttccccacgcagcaatagtaccttcttttctcta

SEQ ID NO: 2514 - DNA, 256 bp, Zea mays
tggtgaatccagtgattttgttgctgataaagttgcatatgcactcactcaaggtctcaaggtaattgcttgcattggtgagacccttgagcagagagacgcaggaacaacaatggatgttgttgctgcacaaacaaaggctattgctgaaaaaatatcagattggacaaatattgtgttggcatatgaaccagtttgggctattggtaccggcaaagttgcaattccggttcaggctcaggaggtccatgatggc

SEQ ID NO: 2515 - DNA, 291 bp, Zea mays
gcagccgacaactctctaccgtccgagaccccaagcaccagcgcggcggcggcggcggcggcgagcatggctgtcgggaagaacaagaggatctccaagggaaagaagggtggcaagaaaaagaccgtcgaccctttctctaagaaggattggtatgacatcaaggcaccgtcggtgttcagtgtgcgcaacatcgggaagactctcgtatccagcacacagggtaccaggattgcttctgagggtctgaagcacagagtctttgaaggttgcctaactgatcttcaggcg

SEQ ID NO: 2516 - DNA, 188 bp, Zea mays
gaaacttataacaatggcgatgcatttatggtggggcccagccttttagctcaaggaatatacgaagagggccagaaatcagtgtcggtctaccttcctgggaaggagtcatggtatgacttgagaaatggatctccatacaagggaagcgcgacacacaagctacaggttttagaagatagcattcc

SEQ ID NO: 2517 - DNA, 281 bp, Zea mays
agccttcctaaaggccattggtttcatcatccctcttatggatgctctgtatgctagctactatacaaaggaggtgatgcaggtcctcattagggagttccagtctccagatgaagaaatgaagaaaattgttctcaaggtggtgaaacagtgtgtcagtacagagggtgtggaggctgattatatccggaatgacatccttccagatttcttcaagcacttctgggtgaggagaatggctctagatcgcaggaactataagcagcttgtggaaactacag

SEQ ID NO: 2518 - DNA, 298 bp, Zea mays
aaggatttcgactcatatgtcctctctgagtcaagcttgtttatctatcctctgaagattgtcatcaagacctgtggcactaccaagctcctgctcaccattccaagaatccttgagcttgctgaagagctgtctatgccacttgctgctgtgaagtactcccgtgggacgttcatctttcctggtgcacagccagccccccacaggagcttctctgaggaagttgctgcacttaaccgctactttggcggcctgaaatctggtggtaatgcttatgtgattggagatccagcaagac

SEQ ID NO: 2519 - DNA, 292 bp, Zea mays
gccttctgcgcctccatttcggcctctgtcccttgcaagttcaatctcacctccaaccatgggtaaagagaagtcccacatcaacattgtggttattggccacgttgactctggcaagtcgaccaccacaggacacctgatctacaagcttggaggcattgacaagcgtgtgatcgagaggtttgagaaggaggctgctgaaatgaacaagcggtccttcaagtacgcgtgggtgctcgacaagctcaaggctgagcgtgagagaggtatcaccattgatatcgctctgtgg

SEQ ID NO: 2520 - DNA, 289 bp, Zea mays
ggtagcaccccaagactgtttctgagaaggagtggtggcaagccacagacaccaagttccaggcctggcctcgcactgctgggccaccagttgtcatgaaccccatcagccgccagaacttcatcgtcaagtccactgagtaggtttgggctggagaagctggttctgcgacttggtgccgccatgaagccagagttccttttctaaggtcttaatcaattgtaataaaacgaaatacagtcaggatttttttgtgattttaacttgatctgtgagcgaacactgggtc

SEQ ID NO: 2521 - DNA, 300 bp, Zea mays
aggacaccaacctctgcgccatactagccaagcgcgtcaccatcatgcccaaagacatccagctcgcccgccgcatccgcggcgagcgcgcgtaggcgtatctcgcgcccggccccagtggcggcggagggatggaggagggcaatttgtaaccttatgctgtttgttcgcttttagacggcgtggtgaagaactagtgtaaaaacggctttaaagtctattttgtgcggtagttcgtgtaggccgcttcgtcacgaagcgatcttggtaaaagacttattcgtgttgccaaacgaaaaa

SEQ ID NO: 2522 - DNA, 100 bp, Zea mays
gcgccaagaagaccatggagatcggcgtgtacaccggctactccctcctcgccacggcgctcgccctcccggaagacggcacgatcttggccatggacat

SEQ ID NO: 2523 - DNA, 201 bp, Zea mays
tggcgataaagtcgccaaggtccagatctcgaagcgactcagctcttctccatgcgttcttgtttctggtaaatttggctggtcagccaacatggaaaggctcatgaaggcacagacccttggtgacacatcaagcctggagttcatgagaggtagacgaatttttgagatcaaccccgaccatcctatcatcaaggacct

SEQ ID NO: 2524 - DNA, 202 bp, Zea mays
cggctcgagggcagacaatgcggtcctaggaactgctgctaaggttgtagttaccaaggattcaacaacaatagtgggagatggcactacacaggaggaagtgaacaaaagggtgacacaaatcaagaaccagattgagcgctactgaacaagaatatgagagagaaaaactaaacgagaggatagctacactctctggtgg

SEQ ID NO: 2525 - DNA, 198 bp, Zea mays
tgtggatttcctaccttgaagtttttcccaaagggaaacaaagctggtgaagattatgatggcgatagggacttggttgactttgtcaagttcattaacgagaagagtggtaccagccgtgacacaaagggtcaactaacctcagaggctggccgtatagcaagtctggatgtcctggctaaggagttccttggtgct

SEQ ID NO: 2526 - DNA, 205 bp, Zea mays
  unsure (1)..(205): unsure at all n locations
gcnccgcgttcagggccgtggagcccgccgcgtgccccacgctcaccaagggcgtctacgcgtacgacttcggcgacacggccgggctcacgccgctgatgaagatgcataccctcggccacggcttcgtccccgacccgatccatgcaggtgggcttcggtaccatggaatggcacctctgatctcgcacgtgtacgagctggg

SEQ ID NO: 2527 - DNA, 207 bp, Zea mays
cccaagcaaacaaacagggtagagggagaggagaggagaggagaggagaggttgggtctgggacaccatggctccgatgaagctgtacggggcggtgatgtcgtggaacgtgacgaggtgcgcaacggcgctggaggaggctggctccgactacgagatcgtgcccatcaacttcgccaccgccgagcacaagagccccgagcacct

SEQ ID NO: 2528 - DNA, 260 bp, Zea mays
aaaatatggttccacactgaaggacactgagattcgtgatcttatggatgcagctgatatcgacaacaatggaacaattgactacattgaattcatcgctgcaactttgcatctcaataagctggagcgcgaagaacatctcgtggcggccttttcatatttcgacaaagatggtagtggctatatcacagtggatgaactacagcaagcttgcaaagagcataacatgccggatgcttttcttgatgatgtcatcaacg

SEQ ID NO: 2529 - DNA, 182 bp, Zea mays
cagaggaacaccgtggcggtgcctgtcaacggttgggcggtcatccagttcgtcgccgacaaccctggtgtgtggctcatgcattgccatctggacgtgcacatcacctggggcctggcaatggctttcctagtggaggacggctatggcgaactgcagtcgctggagccgcccccagttga

SEQ ID NO: 2530 - DNA, 199 bp, Zea mays
cacgcgtattgattgccacatgtgcctgccgcctggactggacctgcagtgcagctcctgtcctgtgcacgcctctcctgctgttctagtctcatcaacctcaagtttcattcttctttcttctccccgcaggtggtccctgatcgccggtcacttgcccggtcgaacagacaacgagatcaaaaactactggaactcg

SEQ ID NO: 2531 - DNA, 240 bp, Zea mays
gacagcgcgctcaaggcgagcctcctgccggccatgcagtccgtgtaccaggcgctgaccgcggtgggcctgcagggccgggtgaacgtcaccacggcgcactcgctggacatcatgggcagcacctacccgccctccgccggcgcgttcggccccgacgccgtgccctacctccagccgctcctggccttcctgtccgcggcgggtccccgttcctcatcaactgctactactacttcg

SEQ ID NO: 2532 - DNA, 180 bp, Zea mays
ctcgccacactggtgtcatggtagggatgggacagaaggacgcatatgttggcgatgaggcacagtccaagagaggtattcttacgctcaagtacccgattgagcacggtattgtgagcaactgggatgacatggagaaaatctggcatcatactttctacaacgagcttcgtgttgccc

SEQ ID NO: 2533 - DNA, 180 bp, Zea mays
ctcgcctatctccgcgactcaaagctttccccaattccccccaatctcccatttctcaccaccgccgccgctccccccgttcaacaacaccatgagggagtgcatctcgatccacatcggccaggctggtatccaggtcggaaacgcgtgctgggagctgtactgcctcgagcatggcat

SEQ ID NO: 2534 - DNA, 164 bp, Zea mays
cggctcgaggccttcaagaaagacaccggtgacaccagggagactccggccattgacgtctgcaagggcctgctgggcgacaaggcccagatcagcatctacgacccccaggtgacggtggaccagatccagcgggacctggccatgaacaagttcgactggga

SEQ ID NO: 2535 - DNA, 211 bp, Zea mays
cgcaccgcaaacgcgaaaccctagcctcgagctctatctccggccacagctggtcaggttagcgacgaaggatgagcaggcgctggagccgcacgatctacgtcgggaacctccccggcgacatccgggagagggaggtggaggatctgttctacaagtatggtaaaattgttgacattgacctgaaggtccccccaagaccacctggtta

SEQ ID NO: 2536 - DNA, 189 bp, Zea mays
agcgattcatgccaaagggggagaaagtattagcccaaagcaaaaggaccgcaccatcacctaattttaaaatataattttcaattgtcaatttggtatcttaatatgttcaaaaaggggagaaagtagtatttcaaaattgattcatcaaaaccctcttgaacactaagaggaagatttcatttaggg

SEQ ID NO: 2537 - DNA, 251 bp, Zea mays
ccgacggcagcggcaggttcgtcaccgagaaacggtccaaccccaacaaggactcgctccgggggttcgaggtcatcgacgagatcaaggccgcgctcgagcacgcctgcccgcacaccgtctcctgcgccgacatcgtcgccgtcgccgccagggactccgtcgtcctgaccggcggacctggctgggaggtgccactggggaggagggactcgctgacggccagcctgagcggctccaacaacctcatc

SEQ ID NO: 2538 - DNA, 207 bp, Zea mays
tgcagagacaggcgtcttcgtactcgcctatctccgcgactcaaagctttccccaattcccccccttctcccatttctcaccaccgccgccgctccccccgttcaacaacaccatgagggagtgcatctcgatccacatcggccaggctggtatccaggtcggaaacgcgtgctgggagctgtactgcctcgagcatggcattcagg

SEQ ID NO: 2539 - DNA, 242 bp, Zea mays
tcgccctcgattcgaccccgattcgtccgcccgcgaccgggattccctccgccaagcgcggatctgaacgctgcgctccgtgtcgccgctcgaatccgccatgaagggggccaaatccaagggcgccgccaaggccgatgccaagctggcggtgaagagcaagggggcggagaagcccgccaagggcaggaaagggaaggccggcaaggaccccaacaagcctaagagggctcccagcgctt

SEQ ID NO: 2540 - DNA, 282 bp, Zea mays
  unsure (1)..(282): unsure at all n locations
taacagaacgatagcagtctgttgatgaagcatatgaagatggaagaaatcggcttgaagctttgttatcaagattacattgcctcaatgtcccaacactttcttctggttctataaaactcaatgttgaaaactttggcccagtaatgcaaaaatcaacgatgtcaagcgaagaatataaaaatatcgttgtccaagctanagaacacatcttggccggtgacattttccaagttgttttaagccagcgttttgagagacggacattcgccgacccctttg

SEQ ID NO: 2541 - DNA, 283 bp, Zea mays
tgcagtccgcagacgagtcactcggcacgcaggctagcagcacagcagcagccagagccatcccctctcctcgatacgcttcgcttcctcggcgccgattcctcctcctactcctccaaccacgtaccgtccccttccggcgcacgagctcgcccgagatggcgaacgcgagatcgggtgtcgctgtgaacgatgagtgcatgctgaagtttggcgagctgcagtcgaagaggctgcaccgcttcataactttcaagatggacgacaagttcaaggagatagt

SEQ ID NO: 2542 - DNA, 284 bp, Zea mays
tgcagaagctctccgagtcactgacggcggcggcgtgccatgacctgacgtacccctacgccgtgttctactgccacacgaccaacccggcggccacgtacctggtgaagctggcagcccaggatggcgggacgcggacatggaggcgttggtcgtgtgccacctcgacacgtcattgtggagtcccagacacccattcttggtggcgcacagtctcaagccaggggacgacgcatgctgtgccattttctctctaagctcagcatcgtctgggtccccgctgg

SEQ ID NO: 2543 - DNA, 283 bp, Zea mays
agggagcattggatggaggcctggatattcctcacagcgagaagaggtttgctggattcaagaaggacgacaagcagttggatgctgatacccaccgcagtacatctatggtggccatgttgctgactacatgaagaaccttgctgaagaggagccagaaaagtaccagagccacttcagtgcgtacattaagaagggagttgaggctgatgaaatagaagcgctgtacaagaaggtccatgctgccatccgtgccgatccttccattgttaagtcaaccaag

SEQ ID NO: 2544 - DNA, 283 bp, Zea mays
gcttctcaagatgctcaagcacgggagggctggggtgcccatggaggtcatgggcctcatgctcggcgagttcgttgacgactacaccgtcaggatcgtcgacgtcttcgccatgccgcagagcgggactggtgtcagcgtcgaggccgtcgaccacgtcttccagacaaacatgcttgacatgcttaagcagaccggcaagccagaaatggttgtaacgtggtatcactcacatcctggcttcggatgctggctatcaggcgtcgatatcaatactcagcag

SEQ ID NO: 2545 - DNA, 282 bp, Zea mays
tgggaaggctgattgggagcttgcccttgtagagacagcaagcaacttgtccaatcagaagccagcaatgtcaggtggcatggacccgctgctgctgaatggtatgtatgaccagggtgttgtgcgccacatgtcggtgcacaggtgaccaccgggagtgccagcagtgtcgcgctgcctgctcctggacagaagactcagatgcttgctctgcccgcaccggatggttcgatgcagactgttggtggtgatcccttcgcggcgtcccttgccgtgccaccg

SEQ ID NO: 2546 - DNA, 272 bp, Zea mays
tgtcatttcgggattttatgcaaggaaagctccgacaagctcctggggagttgcctactcttaatgattgggagaaccatctaacaacaattttttctgaggttaggttaaagagataccttgagatgagaagtgctgatggtgggccatggaggagattgtgtgcgctgcctgcattttggggtgggctgctgtacgatgaggaatcattacaaagcattttagacatgacttttgactggacacaggaggaaagagagatgctaagacat

SEQ ID NO: 2547 - DNA, 280 bp, Zea mays
caagagtttgtgcagcaagtatggagtttccgggtatccaacaatccaatggttcccgaaaggatccttggagcccaaaaagtatgaaggacaacgcactgcagaagcccttgctgaatttctcaatactgaaggaggcacaaatgtaaagctggcaaccattccttcaagtgttgtggttctcaccccagagacctttgactcaattgtccttgatgaaaccaaagatgtccttgttgagttctatgccccatggtgtggtcactgcaagagtcttgca

SEQ ID NO: 2548 - DNA, 276 bp, Zea mays
gttggcttctcctccgcctccggttcgggttcgggttcgtgaggatctccggggttcggtttcgtgggtgagcggatcgagatggcggcgtcggatgttgagtaccgctgcttcgtcggcgtggtcgcctgggccacggacgaccactcgctccacaacgccttcagcacctacggcgaggtcctcgagtctaagattatcctcgatcggaagacgcagaggtcccgcggcttcggcttcgtcaccttctccacggaggaggcgatgcggaacgcc

SEQ ID NO: 2549 - DNA, 281 bp, Zea mays
tggaacaatgggtgctactgctcaatccaattggaaattcaatgttgttcagacgggagtacaccatgcgcttaatccagaccccttcagaggtgcttttggttctgacggggagaaatacgccagagatgttcaggaaatcatcgaatttggaactacagggagagttggtgggttcatttcggaagccatacagggggttggtggaatagtggaactggcaccaggatacttgcccgtggcatacagtatggtaaggaaagccggtgggctctgcatcg

SEQ ID NO: 2550 - DNA, 279 bp, Zea mays
gtggaactgcgtctcggagtttgagagcccgacttgcgtcgtggttaagcacacaaatccgtgtggcgtacgtctcggcacgacatcctggaagcgtacaggttggctgtgagggcagaccccgtgagcgcgttcggaggcatagtcgccttcaacacgacggtcgacgaggatctcgcgagggagatccgggagttcaggaggccgacggacggcgagacgaggatgttctacgagatcgtggtggcgcctgggtacacggcggagggcctggaggtg

SEQ ID NO: 2551 - DNA, 277 bp, Zea mays
tgccatctcggaactggacaccctgagcgaggagtcctacaaggacagcactttgatcatgcagctccttcgtgataacttgaccctatggacttctgacatctcggaggaccctgcggaagagatcagggaggcgcccaagcacgactcgagcgaggggcagtaaagccggctttacatgcctagaagctagtacctagtgtttgctgctgtctaatgacattatgcaatgtgatctggaccctggtttcttgggtgcgaccttgtagcagccgtc

SEQ ID NO: 2552 - DNA, 280 bp, Zea mays
gcaagctaagcaagtgccaaccaacgagtagcaggaaacatgtctccgcccgtcaagatcctcggccactacgcgagcccgtactcgcaccgcgtcgaggccgctctgcgctcaagggcgtgccgtacgagctggtccaggaagacctgggcaacaagagcgagctgctgctcgccaagaaccctgtccacaagaaggtgcccgtgctcctccatggcgacagggccgtctgcgagtccctcctcatcgtcgagtacgtcgacgaggccttcgacgggcc

SEQ ID NO: 2553 - DNA, 234 bp, Zea mays
tacggagagcaccctccaccttgtgctccgtctccgtggtggtcagtaagtcatgggtcgtttaagctgccgatgtgcctgcgtcgtctggtgccctctctccatatggaggttgtcaaagtatctgctgttcgtgtcatgagtcgtgtcagtgttggtttaataatggaccggttgtgttgtgtgtgcgtactacccagaactatgacaaatcatgaataagtttgatgtttg

SEQ ID NO: 2554 - DNA, 280 bp, Zea mays
tgagttgtccaggcgttttcaggaagaaggatgcaacctgacagcgaattccctgcatcctggagtgatcatcaccaatatcattcgctatgttgctggaaacagtgcgctgatttcggctctctcccctgtagcaaatcttgttctgaagagcgtgccccggggggctgcaactacttgttacttggcattgcaccctaatgtcaaaggtgtatctggtaaatacttcgctgattgcaatgaagcaacaccgactgctgtcgcgagagactcagagctg

SEQ ID NO: 2555 - DNA, 274 bp, Zea mays
ggcagccaataaggtaaggggtgacgaaaatggctccaacgaccgccaccaaggacgacagtggctacggcgacgagcgccggcgcgagctgcaggcgttcgacgacacgaagctgggggtgaaaggtctggtggactccggcgtcaagtccatcccgtccatcttccaccacccgccggaagccctgagcgacataatttctccggcgcctctgccgtcgtcgccaccctccggcgccgccatcccggtggtggacctctcggtgacgcggcg

SEQ ID NO: 2556 - DNA, 273 bp, Zea mays
cttggacgcaaatgtgcttacatggaagacactcagggctgccgcattgcaggccaggagcgccacaggcgcggcggcgctccgaagaatttggtctgggaggcattgaacacccatggatgataaacgggacgaggatatggctgagggaaggcaacttctggtgtttcagctttgtgccgacgcgattgtctggttgcttctaatctcagttgtttagattgtattggtcattgaacccgtccgagtcgggctggaatttttgtgttgaca

SEQ ID NO: 2557 - DNA, 274 bp, Zea mays
cggctcgagctcaaggaaaccttgcaggatatccttggggaaaacaaaactattttggttgaacagaagattgactacagcatcatgggaggattagtgattgaattcgggcagaaggtgcttgatatctcaatcaggaacagggcgaacaaatggaggcgttcttgaggcaaccacttgacttctaacagccttttggataaaagaagcatcatcggaatgcagaggctgtcctgttgaaggttttcctgtgtctgcaattttaatctgtcct

SEQ ID NO: 2558 - DNA, 269 bp, Zea mays
cacggcgttcgcccggagctgctgcgcggcgccgcgcggcgtggcgtggcttcttcaagcagcccgcggaggtgcgcgacgctacgcgaactcgccgtcgacgtacgagggctacggcagccgcctcggcaccgctaagggaggccccctggattggggcgactactacttcctccacctcctgccgtcgtccctcaagaaccacgaaaagtggccttccctcccttactctctacggggcacgacggaggagtatggagaggaagtgt

SEQ ID NO: 2559 - DNA, 247 bp, Zea mays
cggctcgaggaaacaagagctgtgcttctctgttgtctcattgctctggcagaagctcatagcttctcctgaaatgcagatgtctgcagaaagtacatcagctcaccaaggatggaggaaggttgttgatgcactttgtgatgtcgtttcagcctcaccaaccaaggcatcagctgctatcgttctccaggccgagaaggacttgcagccttggattgctagagatgacgaacaaggtcagaagatg

SEQ ID NO: 2560 - DNA, 282 bp, Zea mays
tgagcggcggcgcggacggacaaggagcaggcggaagaggagttgtgccaaggcacaatgggtatctcgcgtgactcgatgcacaagcgccgagccaccggtggaaagcagaaggcctggaggaagaagcgaaagtatgagcttggtcgccagccagccaacaccaagttgtcaagcaataagacagttaggagggtccgtgttcgtggaggtaatgtgaaatggagggctcttcgccttgatactggtaactactcatggggaagtgaagctgttacccgc

SEQ ID NO: 2561 - DNA, 160 bp, Zea mays
ggaggtgacgcagacggtgcaggtgaagccaggttggaggaaagggaggcaggtggtgctggaatgcatgggggacgagcggccggggtgcctgccgggcgacgccgtcctgacggtgtccgagaggaggcacccggcgttcaagcgggtgggcgacgac

SEQ ID NO: 2562 - DNA, 288 bp, Zea mays
cctagacacctcaaggcattatcttccagttgatgttattaagcaagtgatcgactctatgtcatttgctaagctgaacgttcttcattggcatatcatcgatgagcaatcctttccattggaggtgccaacatatccaaacctttggaaaggttcatactccaaatgggagcgctacaccgtggaagatgcacatgatattgtcaactacgctaagaaaagaggtatcaatgtgatggcagaaattgacgtgcctggtcatgcagaatcatggggaaatggataccc

SEQ ID NO: 2563 - DNA, 283 bp, Zea mays
cagaggtcacggagtacaaggaccgcttgccctctagctctgatcttatcacccactcgtgagctttcagtccaaatccatgaagaagcaaggaagtttgcataccagactggtgtcagagttgtggttgcatatggtggcgcaccaataactaaccagctgagggagttagagagaggtgtggaaatcctggtggcaactcctggtcgcttgatggatctgttggagagggctagagtctcacttcaaatgataaagtatttagctcttgatgaagctgatc

SEQ ID NO: 2564 - DNA, 288 bp, Zea mays
tgcagaagttgcggttggcctcgtcctcctcttctccgtcgcggctcagatctctgcgtgcggcgatggcgtcgttctcggaggctccccccgggaacccgaaagccggcgagaagatctttaagaccaagtgcgcgcagtgccacacggtcgacaagggcgccggccacaagcaaggtccaaacttgaacggtctttttgggagacagtcgggtaccactgcaggctactcctactctgcgggtaacaaaaacaaggctgtagtctgggaagaagacactttgtatg

SEQ ID NO: 2565 - DNA, 282 bp, Zea mays
gaagatgaagaacaatgccattgtctgcaacattggccactttgacaatgaaattgatatgctcggccttgagacctaccctggcgtcaagcgcatcaccatcaagccccagactgaccgctgggtgttccccgagaccaacactggcatcattgtccttgctgagggtcgcctgatgaaccttgggtgtgctactggccatcctagctttgtcatgtcctgctcattcactaaccaggtcattgcccaacttgaactgtggaaggagaagagctctggcaa

SEQ ID NO: 2566 - DNA, 278 bp, Zea mays
ggaacaatgggtgctactgctcaatccaattggaaattcaatgttgttcagacgggagtacaccatgcgcttaatccagaccccttcagaggtgcttttggttctgacggggagaaatacgccagagatgttcaggaaatcatcgaatttggaactacagggagagttggtgggttcatttcggaagccatacagggggttggtggaatagtggaactggcaccaggatacttgcccgtggcatacagtatggtaaggaaagccggtgggctctgcat

SEQ ID NO: 2567 - DNA, 281 bp, Zea mays
ctgccgcgccgccaccccctacaggtaaggaagaggagggcagcatgtcgcaccgtaagttcgagcacccgaggcacggctccctcggcttccttcccaggaagcgctcctcccgtcaccgcggcaaggtgaagtcattccctagggatgaccccaagaagccttgccatctcactgccttccttggctacaaggctggcatgactcacattgtccgtgaggttgagaagccaggatccaaactccataagaaggaaacttgtgaggctgttaccatcatt

SEQ ID NO: 2568 - DNA, 276 bp, Zea mays
cgtctctctctctcttctctctgactctctctctcgtagccgcgtccacctcgcagcagcaagcaagcgcgaccaaatggcgcctctaggagacggcggagctgctgccgcggcggcgtccaacaacctggtggtgtcgttcggcgagatgctgatcgacttcgtccccgacgtggccgggctgtcgctggccgagtcgggcggcttcgtcaaggcccccggcggcgcgcacgccaacgtcgcctgcgccatcgccaagctcggcggctcctccgc

SEQ ID NO: 2569 - DNA, 274 bp, Zea mays
agcgtatcagaccagaggtcattccggcaagtgagataggagtgacattcgatgacatcggagccctagcagatatcaaagagtctctccaggagctggtcatgcttcctcttcgacggcccgatctcttcaaaggagggctcctgaagccgtgcagagggattctgctgtttgggccacctggaaccgggaagaccatgcttgccaaggctatagcgaacgacgccggcgccagcttcatcaacgtatccatgtccaccatcacatcgaaatg

SEQ ID NO: 2570 - DNA, 275 bp, Zea mays
catgatcgccgccaccgtggactcggcctcgctctcccagttcgcgctgtcggcgtcctccacgctctcctacgacctcaacgtcaccatgacggtgcgcaaccccaacacgcgggtggggctctactacgacgacgtccaggcgctggccctgttcagcgaccagcgcttcggctacgccccgctcgacgccttctaccagggcacccaggcgtccacccagctcagccccgggttccgcggcacgcagctcctccagggcgacgtcaccgccg

SEQ ID NO: 2571 - DNA, 276 bp, Zea mays
cagcagctcatcacctgaaggagagcagcccggcggagggggagcaagcagcagccgtcggtggaagatgtcgtacctgctgccgcatctgcactcggggtgggcggtggaccaggccatcctcgccgaggaggagcgcctcgtcatcatccgcttcggccatgactgggacgagacctgcatgcagatggatgaagtgctagcagcagtagctgagaccataaagaactttgcggtcatctaccttgttgacatcacagaggtccctgatttcaa

SEQ ID NO: 2572 - DNA, 277 bp, Zea mays
ggtcgttcgagtggttcaagggggtcatgaacgaggtcgccgagatggacaagaagggtgtcattgagctgcacaactacctgacaagcgtgtacgaggagcgagacgcgaggacgactctgctgtccatggtgcaggccctcaaccacgccaagcatggcgtcgacattgtgtcagggacaagggtcaggacacattttgcaaggcctaattggaaagaagtatttacgaggatagcgtccaagcacccaaattctacagtcggggtattttactg

SEQ ID NO: 2573 - DNA, 277 bp, Zea mays
  unsure (1)..(277): unsure at all n locations
agcacaatcgcctcgccttcccttcnccaccagcccccgtctctctctctctnnnnnnnnnnnnnnnnnnnngtagccgcgtccacctcgcagcancangcnngcgcnaccaaatggcgcctctnngagacggnggantgctnccgnggcggcgtccaacaacctggtggtgtcgttnggcganatgctgatcgacttcgtccccgacgtggccgngctggcgctggccgagnngggcggcttcgtcaaggcccccggtggcgcgcccncnaacgtc

SEQ ID NO: 2574 - DNA, 277 bp, Zea mays
  unsure (1)..(277): unsure at all n locations
tgcgtcttgggggagagagagaagtgggagacccgcgagaggctgccgtgtagggactagggaccgtagagtaagcgacacganaggagggagagggggatggccgggatcgggccgatcagacaggactgggagccggtggttgtgcggaagaaggcacccaccgccgctgccaagaaggatgagaaggccgtcaacgccgcgcgccgctccggcgcggagatcgagaccatgaagaagtacaacgctggtatgaacaaggcggcgtccagcggca

SEQ ID NO: 2575 - DNA, 276 bp, Zea mays
gttgtggaggtttctacctcaaagactggtaagcatggccatgccaaatgccactttgttgccatagacatattcaacgggaaaaagctcgaagatattgttccttcgtcacacaactgtgatattccgcatgtgaaccgtactgagtaccagctgattgatatatcagaggatggatttgtgagccttcttacttcagatggcaacactaaggatgatcttagactcccaactgatgagactcttgtggcccagatcaaggaagggtttgaaagc

SEQ ID NO: 2576 - DNA, 273 bp, Zea mays
  unsure (1)..(273): unsure at all n locations
atcttccttttgctaggctcgtttgtttttccatcatcctaagtttggtatcctggacgagtgcaccaatgctacgagtgttgatgtcgaagagcatctgtacagacttgcaactagcatgggcataactgtgatcacttcctctcaaaggcctgctttgatacccttccatgccttggagctgaagctcattgacggcgaagggaactgggagctatgtgcgatccagcagtgagtgatggtgcccattaggagttgatgccattanatgca

SEQ ID NO: 2577 - DNA, 277 bp, Zea mays
ccccgaccaaaccctacctgtacccgccgccgccgccgcagcagccatgccgcccaaattggacccctctcaggtggtggaggtcttcgtccgcgtgacgggaggcgaggtcggcgcggcgtcgtcgctggcccccaagatcggcccgctcggtctctccccgaagaagatcggtgaggacatcgccaaggagaccgccaaggactggaagggcctccgcgtcaccgtcaagctcaccgtgcagaaccggcaggccaaggtctccgtcgtcccctcc

SEQ ID NO: 2578 - DNA, 278 bp, Zea mays
cgggttcgtcgagttctacagccacgctgcggctgaaaaagttctcgaagggttttctggccatatcatgccgaacaccgaccagcctttcaggctaaactgggcatcgtttagcatgggagacaggcgctcggattctgcctcggaccattccatattcgtaggcgaccttgcctctgacgtcaatgacgccacgctgctggaggccttctccagcaggtactcctctgtcaaaggtgccaaggttgttatcgatgctaacactggtagatccaagg

SEQ ID NO: 2579 - DNA, 266 bp, Zea mays
ctcgagcgcacaggagcaatgggaataaaatatgatgactttggaaaggagagctggagaaggctgcagggcattacatcttgcataaatttcttgcatacaggacggatctccttgctgagtgttgctgaaaacatcatgacttgcttatcatgaggagtcattttgaagatctcctgaacatctctccgcatgtctgcataatacatatatttgtcaaggatagcaattatactttatactataattaaacatgttgacaatag

SEQ ID NO: 2580 - DNA, 275 bp, Zea mays
atcaagaattcactaggccataccagagcaagaacatggatataaaagtgggtggctatgctaattatctagaagagtcgacattatattatctggatccccaaggaggtgtgtcagggctagtctgagtgctgacataatctcttggtatgaagatggatacttcggtttggacttaccagtacgactgtctcagtctccagatgatgttcctttccgtccacttgtctaagtcatgccccaccttgcgcaatagacgcgatcgcgtatacctc

SEQ ID NO: 2581 - DNA, 278 bp, Zea mays
cggctcgagagaccatgaaaagaaaaccccagccaaagctgagatctcacgtgtcatgaaccatatgaaagatatgggagtgctggttggtaagggtggtttctacgggaacgtttttaggataacaccaccgttgtgcttcaccaaagaggattccgacttcttcattgaggtgatggacattgcgctctcgaagctgtgaggcaagcagggcgaagatgatgtgcaaaccctggtccgtcgccatgggatttttgcccatgaataatattaagatt

SEQ ID NO: 2582 - DNA, 279 bp, Zea mays
tatggcttactccacaccacctgtgggactccagcatatgtagctccagaggtgatcagcaagacaggctatgatggggcaaagtcagacatctggtcctgtggtgttgttctatttgtactagttgctggttatcttcctttccgggccccaaacatgatggagatgtatcgcaagatacagaatggtgatttcaggtgccctagttggttttcacacaaactcaagaagctcttgtacaagatcctcgaccccagcccagacacaagaatttcagtg

SEQ ID NO: 2583 - DNA, 271 bp, Zea mays
agaaagcttatttttgtttgtttccacacataatttagtaaacataaaaatgaataaatccattttcttatttgccatctttggcttattaatcgttttggcatctgctgctggtcgtcgtggttacggtggtcgaggtggctatggcggtggtagtctaggaggcggctatggcggcggtcaccgaggtggattcggtggtggctatggaggtggtcatcgtggaggttatggaggtggacgaggcggctatggtggaggccatggtggc

SEQ ID NO: 2584 - DNA, 273 bp, Zea mays
tgccgcagcctccaaagccactcccaaacccccgcttccagaaccttctcgaagctccccgccgcctcctccactcgcaccgatggcgaaggaaccaatgcgcgtgctcgtcactggcgccgcagacaaattggatatgccctggttcccatgattgctaggggtgttatgcttggtgcagaccagcctgttattctgcacatgcttgacattccgccagcagctgaagcccttaatggtgttaagatggagttggttgatgctgcgtttcct

SEQ ID NO: 2585 - DNA, 271 bp, Zea mays
tgccgcgccggcgccgccattcgatcaggccgcttcgccggcgacacatattccaggtcggttggttttggcacttcggaccggcggccatggcttccgacggcatcggccccagagatgtatgtgttgttggggttgcacgcaccccaatgggcggtttccttggtgccttgtctcccttgcctgctacgaaacttggctctatagtaattcaagctgctctggaaagagcaaacgtggattcagccctcgtgcaagaggtctactttgg

SEQ ID NO: 2586 - DNA, 274 bp, Zea mays
ccgcacctctctccatctccctgctcctccgcctccttcttgatccagccaagccagggatcgccatgtcggactcggaggagcaccacttcgaatcgaaggccgacgccggagcgtccaagacctacccgcagcaggctggcaccgtccgtaagaacggcttcatcgtcatcaagaaccgcccctgcaaggttgtggaggtttctacctcaaagactggtaagcatggccatgccaaatgccactttgttgccatagacatattcaacgggaa

SEQ ID NO: 2587 - DNA, 260 bp, Zea mays
  unsure (1)..(260): unsure at all n locations
tgctcacttctccaggaaagtgttcgtcctcatggcgccgccgcagccgaagtcgggcctcttcgtgggcatcaacaagggccatgtcgtcaccaagcgcaactgcctctgcgaccgacccaccgcaggggaaagcaacgaagagggtgtccatggtcaggggcctgatcagagaggtagctggctttgctccatatgagaagcgtatcaccgagcttctgaaggttggcaaggacaaacgcgctctgnagcttgccaag

SEQ ID NO: 2588 - DNA, 267 bp, Zea mays
gcgcagagtccgtgtacacgaggaaggtgaacgagaaggtcgacgtgtacagcttcggggtcgatctcttggagctgaccaccggtagattagccaacgacggcggtgagcacggctccctggccgactgggcgtggcggcacctgcagtccggtaaaagcatcgccgaggacgcagacaagtccatcgcggacgccggttacggtgaccaagtcgaggccgtcttcaagctcggcattatatgcaccggtcgccagccgtcctcgc

SEQ ID NO: 2589 - DNA, 266 bp, Zea mays
cagagcagcagcacaaaaaatcattggagcattacaggaactcattagatctctacaagaaagctcttcgggtctattgcaattgtcctgctgctgtaaggcttggtatagctttttgccgatacaaacttggacaagtggaaaaagctcgtcaagcttttcagcgagttttagagttggaccctcagaatgttgatgcaccgggcgtgagcagcagatacggacgatctagattggctgaaggcagaaccaggggaggcagccta

SEQ ID NO: 2590 - DNA, 269 bp, Zea mays
agatcagggaggtggcggccggcctggaagccagcgggcagcggttcttgtgggtggtccgagccccgcccagcgacgacccggccaagaagttcgagaggccgccggagccggaccttgacgcgctcctcccggaggcgttcctggcccggaccaaggataggggtctcgtggtcaggtcgtgggcgccgcagcgggacgtgctggcgcacgcgtccgtgggcggcttcgtgacgcactgcggctggaactcggtcctggaggcggtg

SEQ ID NO: 2591 - DNA, 280 bp, Zea mays
cggcggccacggaggagggcacaggcagcagctaacatccctcactctcggtacctgacctgaccacgagagcaacatgggcggaggacacgacatgcacgggcagcactacggccacaacggcggcgtgaagggcttcgtgtccaacctcgtccacggcggcggcggccatggccatggaagcggctacggccatggccatggaaacggctacggccatgggaatggcggctacggcggcggccacgggtaccctcctcccggtgccgccggcgcgtac

SEQ ID NO: 2592 - DNA, 95 bp, Zea mays
ctccgacaccattgataatgtgaaggccaagatccaggacaaggagggtatccccccggaccagcagcggctgatcttcgccggcaagcagctgg

SEQ ID NO: 2593 - DNA, 283 bp, Zea mays
caacctctgaagtttatggtgatccacttgagcatcctcaaactgaggcctactggggcaatgttaacccgattggtgttaggagttgttatgatgagggtaagcgtgtagcagagacgctgatgttcgactatcacaggcagcatggcattgaaatccggattgccaggattttcaacacctatgggcctaggatgaacattgatgatggccgtgttgttagcaacttcattgctcaggctgtgcgcggtgagcccctgactgtccagaggccaggaacaca

SEQ ID NO: 2594 - DNA, 268 bp, Zea mays
  unsure (1)..(268): unsure at all n locations
tccaactcnccagcgcctctccgcgccgcgatccagatccaggttgttcagcatgggtctggtgaaggaaggcgtcgacatggaggagggaaccctagagatcggcatggagtacaggactgtatctggtgtggccgggcctctggttatcttggataaagtaaagggcccanagtaccaagaaattgtanacatccgacttggagatggcacactcgccgtggtcaagtcttgaagttgatggagaaaaactgttgtgcagtttttg

SEQ ID NO: 2595 - DNA, 283 bp, Zea mays
cacgaatgcctacaaactcgggacaagtggaaatgtggaaccaagcaaacaagctgtagacagagatgctcccaaagacttggaggagagtggagcctctggaatccggcaacctgacaaagctgaggcaggcactgcagagtacctcattgagcttgaagaacggcgatcaattaaggtattcggttcaaacaccttcatcgggctggggatcgtcttcttcgcgggcgtgtgcttctcgctcttctccccggcgttcaacctggccactaacgaccagtgg

SEQ ID NO: 2596 - DNA, 281 bp, Zea mays
tgtccaagcggtggatccgtcccgaggtgtacccgctgttcgtgccgatggccgtggccttgggcatctgctcgtaccagcttgtgcgcaacatcacgggcaaccccgaggtgcgggtgaccaaggagaagagggcggccggcgtcctggacaaccacgacgagggcgagaggtacgctatgcacggcctcaggaagttcgtccgcgggaagaagcccgagatcatggcctccatcaactccttcttcgccgaccctcccaaggacgattaagctagattc

SEQ ID NO: 2597 - DNA, 279 bp, Zea mays
  unsure (1)..(279): unsure at all n locations
aacagaaacgcaaggatggccagaggtcctaagaagcacttgaagcgccttgctgcgccaaagcactggatgctcgataagctcggtggtacctgggctcnccgcccctcccagggtccccacaagcttagagagtgccttcctctcatcgtgcttctcagaaacagattgaagtacgcccttaccagacgcgaggtcgttcagatctgcgctcagcgtctcgtgaaggttgacggcaaggtccgcactgacatcaacttccccgctggtttccaggat

SEQ ID NO: 2598 - DNA, 277 bp, Zea mays
tggatatgcagctccagagtacattgcaacaggccgcctctctgcaaaggcagatgtctatagcttcggggtggtgttgcttgaactgctcactggaagaagggctctggataaatcaaaaccaggctttgagcagaacctagttgactgggccagacctcacctgggcgacaagcgcagactgtaccgtatcatggacacgaagctgggaggacagtaccccaaaaagggcgcaaatgccattgcaagcattgcctcgcaatgcatttgcggtgac

SEQ ID NO: 2599 - DNA, 279 bp, Zea mays
caatgaggaccgagtaacactcatcaaggattatcgtggcaagattgagactgagctgaccaagatctgtgatggcatcctcaagctgcctgagacccatcttgtgccgtcttccactgcccccgagtccaaggtcttctatctcaagatgaagggtgattactacagataccttgctgagttcaagactggagctgagagaaaggacgccgctgagaacacgatggtggcatacaaggctgcccaggacattgctctggctgagcttgctccaactca

SEQ ID NO: 2600 - DNA, 283 bp, Zea mays
agaagccgccgtcgcagcaatcacagcagcccggagaacggccaggtccgacaagatgcagatctttgtgaagacgctgacagggaagaccatcaccctcgaggtcgagagcagcgacaccatcgacaatgtcaaggccaagatccaggacaaggaagggatcccgccggaccagcagcggctgatctttgccgggaagcagctggaggatggccgcacccttgcggactataacatccaaaaggagtctacgctccacctcgtgctcaggctccgcggtggc

SEQ ID NO: 2601 - DNA, 275 bp, Zea mays
  unsure (1)..(275): unsure at all n locations
aatttctcgcgctcctaccgccgccgcttcgttctctaaccttggctcccgctccctccgcagagcatctcaacaccgccttgaggaccccccaactcgccggctgcagccatggtgaaatattcgacggagccaaccaaccccaccaagtcaaccaaggccatgggccgtgacctacgtgttcacttcaagaacacccgtgagacagcttttgcccttaggaagttgtcactcaccaaggccanaaggtaccttgaggatgtgattgcccacaa

SEQ ID NO: 2602 - DNA, 274 bp, Zea mays
aattctatggctcttgtagccccacggccagggatggagctggctaatattcaacatcatccaaatcaggctcctgggcctggaggaaaacaacgcacatctagcctggaggcaccaataatgctacttacaggtcaccagagtgctatctactgcatgaaattcaatcctgcgggaactgtgatagcatcaggttcccatgacaaggatatcttcttatggtatgttcatggtgaatgtaagaactttatggtactgagagggcacaagaatg

SEQ ID NO: 2603 - DNA, 274 bp, Zea mays
caagtgtgtagacgagacagagagacactgagagagcgccatggccagcctccaagtcactcctacttcggcgttcactgagtggaacgagctgaagttcgaaggcctgtacctgttccacacgcccctgggctcaggcgccaaccaagctcgggtcatagacaacaaggcgccgattggcatcggtgccaccgtagttaacaactggacagtgtatgacgggccagggccgaacgcaaagctggttgcccgtgcacagggcttgcatatccaa

SEQ ID NO: 2604 - DNA, 267 bp, Zea mays
caaccaggtgctccggtgggcgctggggtccgtcgagatcttcttcagccggcacagccccctgctgtacggctacaagaacggcaacctcaagtggctggagcgcttcgcctacatcaacaccaccatctaccccttcacctcgctcccgctgctcgcctactgtaccctgccagccgtctgcctcctcaccggcaagttcatcatgccgtcgatcagcacgttcgccagcctcttcttcatcgccctcttcatgtccatcttcgc

SEQ ID NO: 2605 - DNA, 273 bp, Zea mays
  unsure (1)..(273): unsure at all n locations
aanaagagcaaccatgtcacgaggaagcttgagaagcgcaaggagggacgtacccttgacccacacattgaggagcaatttggcagtggacggttgctggcatgcatttcttcccgccctggacagtgtggccgagctgatgggtacatccttgagggtaagagcttgagttctacatgaagaagctacagaggaagaagggcaagagcgctgtagcttagagcattctcatggattgtcttgcaccgaaatgtgtgtcctgatgagtacact

SEQ ID NO: 2606 - DNA, 273 bp, Zea mays
cctcgttcctgtcgcgcaccacgacctccacttcacatctcccccggcggcggcgcggtcagttgaacaatggcggactccaaggccacctcggcggtcaccctccgcacccgcaagttcatgaccaaccgcctcctggcccgcaagcaattcgtgcttgaggtgatccaccccggccgcgccaacgtctccaaggcggagttgaaggagaggcttgccaaggcgtacgaggtgaaggacccaaacaccatctttgtcttcaagttccgcacc

SEQ ID NO: 2607 - DNA, 274 bp, Zea mays
agccaagcgaagttcctttttcatgggaaacaagaagattttgatttgtcagcgtccgggtttacggactgccaaaagaaagatggcttctggattaaacttaatgtcaaccagactagcttctatagggtgagctatgatgaggaacttgcagcccgacttcgatatgcaattgaaaccaacaaactgggtgcagcagacagatatggcgtacttgatgatgcctatgccctctgtatggctggcaaacaaaagctagtctccttgctgcatt

SEQ ID NO: 2608 - DNA, 277 bp, Zea mays
aaaccagacgctcgccccctttcctccacctatcttcttcagacgaccagcaggaggtacgagcaagaccacctaggaggcctctctctcccccccagccacccccgtagcgagagggagggcggaagaggatgagcgcgtccaggttcataaagtgcgtcacggtcggggacggcgccgtcggcaagacctgcatgctcatctcctacacctccaacaccttccccaccgactatgttccgacagtgtttgataacttcagtgccaacgttgtggt

SEQ ID NO: 2609 - DNA, 222 bp, Zea mays
ggctcgaggacaacttagctctaagagtgacgtttacagttttggcgttgttcttctggagctcgtgactggaagaaagcctgtggatcatacattaccaagaggacagcaaagtcttgtgacatgggcaactccacggctttgtgaagataaagttaggcaatgtgttgattcaagacttggagtagaatatcctcctaaatccgttgcaaagtttgcagc

SEQ ID NO: 2610 - DNA, 286 bp, Zea mays
ctcccgctcccagctcgtgttccgcttcttgcagccgtcgccgcgaagcatccagagaacttccgtcaacatggggaagacacgtggtatgggagccgggcgcaagctcaagacccaccgcaggaaccagcggtgggctgacaaggcatacaagaagagccatttgggcaatgagtggaagaaacccttcgctgggtcatcccatgccaagggcattgtcctggagaagattggtattgaggccaagcagcccaactccgctatccgtaagtgtgctcgtgttcag

SEQ ID NO: 2611 - DNA, 288 bp, Zea mays
gcaatgagggtggtgccatggtccccatccgtgtccacaccgtcctcatctccacccagcacgacgagacagtgaccaatgatgagatcgctgctgacctgaaggagcatgtcatcaagcctgtcatccctgagcagtaccttgacgagaagaccatcttccaccttaacccatctggccgctttgtcattggtggacctcacggcgatgctggcctcactggccgcaagatcatcattgacacctacggtggctggggagcccatggtggtggcgctttctccggca

SEQ ID NO: 2612 - DNA, 280 bp, Zea mays
atcgttgccctgaccactactgcttctgacaagatcggccgttccgttcccgctccaggccagggtgttctcaccacagctcgcgagaaccctggcaagttcccctcgcctcttctcgacatcaactaccgacgccgccagatcgagcgtcgcaagaagactatcaagcaatggcaagagtctgagctcgagtatgttcatgacgatattgatgctatgaaggctcagggtgcttcctttgacgagaaggactatgccgcggaccgcttcgctcacattg

SEQ ID NO: 2613 - DNA, 282 bp, Zea mays
cccaactcgccgccgccgctgccaacgccgcctgctgccgcagccgccatgggggcgtacaagtatgtgtcggaactatggaggaggaagcagtcggacgtgatgcgcttcgtgcagcgcgtgcgctgctgggagtacaggcagcagccgtccatcgtccgcctcaccaggcccacccgccccgacaaggcccgtcgtctcggctacaaggccaagcagggatatgttgtctaccgtgtccgtgtgaagcgtggtggcaggaagaggcctgtgcccaagggt

SEQ ID NO: 2614 - DNA, 285 bp, Zea mays
caacatcctggccgccggccccttcagcggcggctccatgaacccggcccgctccttcggccccgccgtggcggccggtaacttcgccggcaactgggtgtactgggtcggccccctcgtcggcggtggcctggcggggctcgtctacggcgacgtgttcatcgcctcctaccagccggtcggccagcaggagtacccatgaaagtccggatgagctagcccgatcgatccgtctgtgttgatttcaccatcgtcgtcgtcgtgtcatctggcgcttcgtgctgt

SEQ ID NO: 2615 - DNA, 284 bp, Zea mays
caagcttggtattgaccctccgaaaggtgtcctttgctatggcccacctggtactggcaagacacttcttgcaagagctgtagcaaaccggactgatgcttgtttcatccgtgtaattggaagtgagctagttcagaagtatgttggagaaggtgctcggatggtcagggaactgttccagatggcccgctcaaagaaggcatgcattgtattctttgatgaagttgatgcaattggtggtgctcgttttgatgatggggttggtggtgacaatgaggtgcagc

SEQ ID NO: 2616 - DNA, 284 bp, Zea mays
agcaccgtgagcgtgatgggcgtcgttcagaggaacgagaacgtgcttgtgatcgttcctccagccgagcccatctccactggctgccagtggggcaagtgtgtcctcccgaccagcctcgagggcctggtcctgagatgcgaggacacgtctggcctggacgtgataccggtctagctagagaggttggttctggcgaatcctctggcgcggaataggactagggataaaaatgccttgacgtttggtttggtctccgtcggttgttagggttggaaggatgt

SEQ ID NO: 2617 - DNA, 286 bp, Zea mays
ctatccaatcgatcgaagacccatttgatcaggatgactggcgcacttatgccaaactcactgatgagattggacagatagtgcagattgtacgagatgatcttctcgttaccaacgccaccagggtcgccaaggccatcaatgagaagacctgcaatgctctcctcttgaaggtgaaccaaatcgggtctgtgaccgagagtatcgaagctgtcaggatgtccaagcgcgccggatggggagtgatggcaagccacaggagtggcgagacagaggacaccttcat

SEQ ID NO: 2618 - DNA, 275 bp, Zea mays
ctccattcctctttcccagtgcccccagtccatcaccacatccgttcaaatgggccgcaaccgcaaggccgcaagtagggtttcgcacgacgccgacgccgacgccgacgccgatggcagcgaggatgagagggccaccactgcgggcaggagcctctacgagattctaggagttgagaagaccgcttctcaacaagcaataaagaaggcgtatcacaaattggctctgcgcctccacccagataagaatcctggggatgaggaagccaaagaga

SEQ ID NO: 2619 - DNA, 274 bp, Zea mays
gttgggcgcagagaatccccaagcaaacaaacagggtagagggagaggagaggagaggagaggagaggttgggtctgggacaccatggctccgatgaagctgtacggggcggtgatgtcgtggaacgtgacgaggtgcgcaacggcgctggaggaggctggctccgactacaagatcgtgcccatcaacttcgccaccgccgagcacaagagccccgagcacctcgtccgcaacccgtttggtcaggttccagctctgcaggatggtgacttgt

SEQ ID NO: 2620 - DNA, 273 bp, Zea mays
ggtttttatgaatcgaacatagatgtgcctgagctgtcattacttgaaggtggtttcaatattacccacaaaataaacaaactgtcctttgggacagaattccctggtgttgtcaatccacttgatggtgctcagtggacacagccagcttcagatgggacataccagtatttcataaaagttgtccctacaatatacactgatataagaggacacaatattcattcgaaccagttctcggtaacggaacattttagggatggaaatgttcgt

SEQ ID NO: 2621 - DNA, 278 bp, Zea mays
aactgctttgtcattttgtgatatcattttgataactcctaaaatgcagttattcatggtttgttttgttctgcagtggcataattgaaataaactgttcaaaagatattaaagtccaaggtattattggaccatgcacatctttggagaagaaaggagccatgtgctctgacacagttgtcggtcaaggaaatacatcagcatggaaaatgtgtggtctcgatagaaatacttctcttacagtattttttgatgtctcaccgagtgaacgatcgagc

SEQ ID NO: 2622 - DNA, 280 bp, Zea mays
ctcctcgccgcctcactccctctgaggtcgcagatccgtccggttagacgaagccgcccgcacccatggcctccggtgagctcgcctgcacctacgccgccctcatcctcagcgacgacggcatcgccatcaccgccgagaagatcgccaccatcgtgaaggcggccaacatcaaggtcgagtcctactggccggcgctcttcgctaagctcctggagaagcgcagtgttgaggatctaatcctctccgttggatctggtggtggcgctgctccagttgc

SEQ ID NO: 2623 - DNA, 282 bp, Zea mays
acagcataaaccaaaagtctccaatgcggatgcaaaagctgataaagatgacactaagagtctcatgaaggggaagaaacgtaaaagtcagcttgggactgagattcaggacaaggaaaaaagatcatcacatagtctactagtgttgcagtttcctttgccactgaagaagcaacttgtggatgattgggcatttgttacgcagatggcttgtgaagctaccacgatcacctactgttgatgatattctaaagaagtacttggaacaccgggcaaagaagg

SEQ ID NO: 2624 - DNA, 280 bp, Zea mays
cggctcgagaataaggtaaggggcgacgaaaatggctccaacgaccgccaccaaggacgacagtggctacggcgacgagcgccggcgcgagctgcaggcgttcgacgacacgaagctgggggtgaaaggtctggtggactccggcgtcaagtccatcccgtccatcttccaccacccgccggaagccctgagcgacataatttctccggcgcctctgccgccgtcgccgccctccggcgccgccatcccggtggtggacctctcggtgacgcggcgcgag

SEQ ID NO: 2625 - DNA, 279 bp, Zea mays
gacccggacgcctcccgcccgcctcccccaccgggcacgacgagaagcgctgcagcttcatcacgccctactcagaccccctgtatgtcgcgtatcacgacgaggagtggggagtgcccgtgcacgacgacgagttgctattcgagatgctcacactgtctggcgtgcaagtcggggccgactggacttccatcctcaagaaaagacacgtctacagggaggcgttctccggcttcaacgtggatgcggtcgccaagtacaccgagaagcagatggcgt

SEQ ID NO: 2626 - DNA, 298 bp, Zea mays
cgccatcagcagctagcgcgctcctcgagcccagcagagaaaggccggcctacccactctctctctctctctctccagtctccaccggcagcgctaatcgtaatagccatgggctccaccgccggcgacgtggccgcggtggtggacgaggaggcgtgcatgtacgcgatgcagctggcgtcgtcgtccatcctgcccatgacgctgaagaacgccatcgagctgggcctgctggaggtgctgcagaaggaggtcggcggcggcaaggcggcgctggcgctcgaggaagtggtggcgc

SEQ ID NO: 2627 - DNA, 284 bp, Zea mays
  unsure (1)..(284): unsure at all n locations
ctccgatgaagctgtacggggcggtgatgtcgtggaacgtgacgaggtgcgcaacggcgctggaggaggctggctccgactacgagatcgtgcccatcaacttcgccaccgccgagcacaagagccccgagcacctcgtccgcaacccgtttggtcaggttccagctctgcaggatggtgacttgtacctcttcgaatcacgagcaatctgcaagtacgctgctcgcaaaaacaagccagagctgttgagggaaggaaacctcgaggangcagcaatggtggat

SEQ ID NO: 2628 - DNA, 308 bp, Zea mays
tgcaatgacaaaaatagtggctagtgtattggagaagaacaacttgccaggcgcaatttttacatctttttgtgggggcactgaaattggtcaagcaattgcccttgacattaggatacctttggtttcattcactggaagtacaagggctggtctaatggttcagcaacaagttagtgcaagatttggtaaatgccttcttgaacttagcggaaacaatgccatcattgttatggatgatgcagatatccagctagctgtgcgatctgtcttgttcgctgctgttggtacagcaagacaacgctgca

SEQ ID NO: 2629 - DNA, 305 bp, Zea mays
tgcgcgaggctggcggtcgatctactgcatgcccaagcggccagctttcaaggggtctgcccccatcaatctttcggaccgtctgaaccaggtgctccggtgggctcttgggtccgtggagatcctcttcagccggcactgccccctgtggtacggctacggagggcggctcaagttcctggagagattcgcgtacatcaacaccaccatctacccgctcacgtccatcccgcttctcatctactgcatcctgcccgccatctgtctgctcaccggaaagttcatcattccagagatcagcaact

SEQ ID NO: 2630 - DNA, 204 bp, Zea mays
gttctccggggttcggtttcgtgggtgagcggatcgagatggcggcgtcggatgttgagtaccgctgcttcgtcggcggcctcgcctgggccacggacgatgtactccctccacaacgccttcagcacctacggcgaggtcctcgagtccaagattatcctcgatcgggagacgcagaggtcccgcggcttcggcttcgtcatc

SEQ ID NO: 2631 - DNA, 208 bp, Zea mays
ggtccgggtgacaaatttggcggatgctgctgagcacattggtgaagttcttagtcgtgttaaaaaggagcatctccaaagagcgtacaaaattcaagattggtctgatgataatgattttgttgtccagctgtgcaggaccactggaaaacttctcaagggcggggagcctgatctgacaacagcagccaagatggtacttcatgac

SEQ ID NO: 2632 - DNA, 288 bp, Zea mays
cttcctctacatctccatcctcaccgtcatgggcgtctccgagtccacctccaagtgcgccaccgtcggcatccagggcatcgcctggtccttcggcggcatgatcttcgccctcgtctactgcgccgccggcatctccggcgggcacatcaacccggcggtgaccttcgggctgttcctggcgaggaagttgtccctcaccagggcggtgttttacatcatcatgcagtgcctgggcgccatctgcggcgcgggcgtcgtcaaggggttcagcaggggctgtacatg

SEQ ID NO: 2633 - DNA, 301 bp, Zea mays
ctggtggtatgggccatcacggaggggcggcaggctgctgcagcggtagacaagtacatatcaaggcatgatcagaatgtcgcaggcgacatcactccctttggggcagggctcgttcagccggttggagcataaaaaaaacatagaccgaggcatgttttaggttctcgtcagtggttcctcacagcaaattttgttcttgtatattttgacgatagataaacagttgaaagttttggtgtctattgtttctttttcttctccggttattatgttttgcgtgtctgcatgtggttttcta

SEQ ID NO: 2634 - DNA, 264 bp, Zea mays
caagtttgctgttgccgccccggttgctgctggggactctggcgctgcggctgctcccaaggaagaagagaaggctgcggacctgaagaggagtcggacgaggaaatgggcttcagcctcttcgacgactagagctgctgttttcgtcaaactgctgcaagttttggctttttttatcatccacaagtactgtttcctatatttttttagcagacaaattatcgtgtgtaatcgacaatgatatctccttcaattttaagtacc

SEQ ID NO: 2635 - DNA, 277 bp, Zea mays
cggctcgaggggatggcctaagcaagcacttcttccaccggccgtccaaggcctacacgacgggcacgaggaagaggaggaagatacagacggagtgcgacgtccacaagggggagacgaggtggcacaagaccggcaagacgcggccggtgatggtgaacggccggcagaaggggtgcaagaagatattggtgctgtacaccaacttcggcaagcaccgcaagccggagaagacgaactgggtcatgcactagtaccacctcggcgacctagaaga

SEQ ID NO: 2636 - DNA, 278 bp, Zea mays
cggctcgagacatgttccacacacatgcagggcaactgacgaatggcggcgcgctggacctggcgggcctggtggtgatcgcgatcgcgcacgcgctggcgctgttcgtgggcgtgtccgtcgtggcgaacatctcgggcggccacctgaacccggccgtgacgttcgggctggccgtgggcggccacatcaccatcctgatggacgtcttctactgggtggcgcagctgatgggcgccaccgtggcgtgcctgctcgtcgggttcgtcaccacggca

SEQ ID NO: 2637 - DNA, 153 bp, Zea mays
tgacgagatggccgccatcccggacgcggaggatgccccggactcggtctgcgccatctgctgcctcaggaacgggatggagttcgagccggtggggattatgcccggcggcgagatgcggatcgtgcgggagagccccacctcggcgtacgt

SEQ ID NO: 2638 - DNA, 284 bp, Zea mays
tgcttctcctccccctccggttcgggttcgggttcgtgaggttctccggggttcgggttcgtgggtgagcggatcgagatggcggcgtcggatgttgagtaccgctgcttcgtcggcggcctcgcctgggccacggacgaccactccctccacaacgccttcagcacctacggcgaggtcctcgagtccaagatcatcctcgatcgggagacgcagaggtctcgctgcttcggcttcgtcaccttctccacggaggaggcgatgcggaacgcatcgagggcatg

SEQ ID NO: 2639 - DNA, 268 bp, Zea mays
acgcggctgatgttggctcgggtgagcaacatggcggagacgctgacgccggagcaggtggccgagtgcaaggcaatcttcgacctgttcgacgccgacgaggacggtcgcatcgccacgggcgagctcgtgacggcgctgcgctccctgggccagaacgtggacgaggcggatgcgcggcgcttcctggaggacgcgggcatcgccgcgggcgccggcgacatcgacctcgcggcgttcctggccgtggcggcgtgcaagatgggcg

SEQ ID NO: 2640 - DNA, 292 bp, Zea mays
gcgacgaatctcgcggggcggaggtggtggcgcgacagacgcggtgtcgactccgacgaactcgcagccaccggtggatacgcaccagcagcaccggcgcactccaccgacgttcatatttaaggacttggtttggatagttctactcgtcaacaaaagtgattaaaaatggtggttcttgcagcttcaatcgtttcaaagtcggggaaagcacttgtttcaagacagtttgttgacatgtctcgcataagaattgaaggattacttgctgcgttcccgaaactggttggaa

SEQ ID NO: 2641 - DNA, 286 bp, Zea mays
  unsure (1)..(286): unsure at all n locations
actacagccaacccctggatctttaccatgacatgcggctgtatgacttagtggtcaaggtggccagctccatggagaaggtcccagtgacagtgatcgatatcacaaggatgtcagattaccggaaggacgcccacacctccctgtacaccatccggcaagggaagctgctgacgcctaagcagaaggcagacccggagaagttcgcggactgcatccactggtgcctacctggcgtgccggacgtgtggaacanatactctacacgaggatctttcgaaatcat

SEQ ID NO: 2642 - DNA, 276 bp, Zea mays
cattcgtagattggtcgcctactggattcaagtgcggaatcaaccaacagaagcctactgtcgttccaggaggagagctcgctcaaaccaaccgttctgtgtgcatgttagccaacaccaccgccattagcgaagtattctctcgcattgacaagaagttcgatcttatgttcggtaagcgtgccttcgtccactggtacgtcggtgaaggaatggcagaaggagaatttattgaggcccgtgcagatcttgccgctttagaaaaggatacgctga

SEQ ID NO: 2643 - DNA, 290 bp, Zea mays
atcaaatccgcagacggtagcggctgtggtgaagcagtgctgaaaactctctggcaccatgccggcgctatactctgctgctctctcaaggccttgccagtgttcacgttcgcgaaccagtccgggctcgacatgctggagacgacgctggtggcgctgcaggacatcgcgctggagagagtgttcgacgaccaagggaggaagaacctgtgcgcggactccccggcgtcatggagcaggggttcgcgtgcgtccccggcgggatgtgcgtgtcgggcctaggccggccg

SEQ ID NO: 2644 - DNA, 287 bp, Zea mays
cttctctccggtccgggaatcggaagctcagggcagaagccatggggcagacgcatcttttgttgctcgcttgtttctgggtcctgtcaacatgctccttgctacttgatgcttcctccgatggactgttaagaatcaacctgaacaagaagagactggacaaggaagctttgactgctgctaaattggcgaagaaggagagccaccttcgaaggtctgtgggtgctgaccagtatctcagtgcctcaactgatgacatagtccctttggacaactacctggacacc

SEQ ID NO: 2645 - DNA, 269 bp, Zea mays
cttgctggcatgggaatcatccctctatgcttcaaagcaggggaggatgcagacaccctgggcctaaccggccatgagcgctacacggtccaccttccaaccaatgtgagtgagataaagtctggccaagatgttaccgtgacaactgataatgggaagtcgttcacttgcacactcagattcgacactgaggtggagcttgcttactacgaccatggtggcattctaccatatgtcatcagaaagttgcggaacagtagattgagatg

SEQ ID NO: 2646 - DNA, 85 bp, Zea mays
cttcgacgccttccacggcgacaacggccacggcggcgtgcactacggcaccaccgtggtgctgtctgagtgcgccaatggcgac

SEQ ID NO: 2647 - DNA, 288 bp, Zea mays
tggctccaagcataagattgctccgatgcatgtgaacaatgttcgtgaagttcctgaatatgagattgacccggctgagcttgatttcagtaatggcaatgatttatccaagggcacgtttagaaaagcaacatggaggggcattccggttgctgttaagaagctggacgatgatctaattgcggacggcagcaaagtgcaggcattcagagacgagcttgatgtgctgcaacttatacgtcatccaaatgttgtgcaatttttgggcgctgtgacacaaagcaatcc

SEQ ID NO: 2648 - DNA, 286 bp, Zea mays
ggctggtgctgcgcccccacaagccccggttctacctgcaggacctgtcggtgctgtgcctgaacgtgacgccgccgggtccacgtacctgttcacgacgatgcaggcgacggtggcggcgcgcaacccgaacgagcgcgtgggcgtgtactacgaccaggcggacgcgtacgcggagtacaagggcgtggcgatcacggtgccgacgcggctgcccgtgcagtaccaggggccccgggacgcgtccgtgtggtccccgttcctgcgcgccccggacggcggggtg

SEQ ID NO: 2649 - DNA, 280 bp, Zea mays
ggcacggctccctcggcttccttcccaggaagcgctcctcccgtcaccgcggcaaggtgaagtcattccctacggatgacgccaagaagccttgccatctcactgccttccttggctacaaggctggcatgactcacattgtccgtgaggttgagaagccaggatccaaactccataagaaggaaacttgtgaggctgttaccatcattgaaacccctcctcttgtcattgttgggctcgtggcatatgtgaacactcctcgtggcctccgcacactcaa

SEQ ID NO: 2650 - DNA, 288 bp, Zea mays
gagttgctgtgttgtctttctgtaatttgctggcaaagggtgcatttgctgcccagatgatcgatcttggattgccgcaaatagtacaaaacttgaaagctcaagcatggactgatgaggatctgttagatgctttgaatcaactagaggtgggactcaaagaaaacctcaagaagttgagttcctttgataagtacaaacagcaagttcttcttggtcatcttgactggtctccaatgcacaaagatccaagtttctggcgtgagaacattaacaattttgaagaga

SEQ ID NO: 2651 - DNA, 281 bp, Zea mays
gtccacctccccaaacgacatcgcggttgcttgacaagttggttggccatttcttggaggagacatgtgtgaatccaacatttatcatcaatcatccagagataatgagtccattagcaaagtggcataggtcccgacctggattgactgagaggttcgagttgtttgttaacaaacatgaggtgtgcaacgcatacacagagttgaacgatcctgttgtgcagaggcaacggtttgaggaacaactaaaggaccgtcaatctggtgatgacgagctatgg

SEQ ID NO: 2652 - DNA, 280 bp, Zea mays
cccgtgggacgttcatctttcctggcgcacagccagccccccacaggagcttctctgaggaagttgctgcacttaaccgctactttggcggcctgaaatctggtggtaatgcttatgtgattggagatccagcaagacctggacagaagtggcacgtcttctacgccactgagtacccagagcaaccaatggttaaccttgagatgtgcatgactggtctggacaagaagaaagcttgtgtctttttcaagactaatgctgatgggaacacaacatgtgc

SEQ ID NO: 2653 - DNA, 277 bp, Zea mays
tagaaggcacaaaagttcgtgtatacactcaagttggcaagagtagccaagggaagtttgcactagatgttggaatcaaatcattgcatctttataaagattactttggtactccttatccgcttcccaaattggatatggttgctatccctgattttgctgctggagccatggagaactatgggcttgttactttccgcgaagtggctttgctttttgatgaggagtcttcaatggaatccagcaaacagagtattgcaattactgtagcacatga

SEQ ID NO: 2654 - DNA, 281 bp, Zea mays
tacatattctcatatacactcattagcacatagcgctaggcgccataccaaccatgagcgacctgttatcctacatttccaaggtcatgtgcatcaaggcaagatcggaggcaacacaagccggcgaggacagcggctgcccagcggacgagtgccgcgtctgcctgtccaagattcggctcggcgaggctacccgccgactgccgtgtcgccatgtgttccaccgggactgcgtcgaccggtggctctcgtcctgcaagcgaacctgtccgctgtgccga

SEQ ID NO: 2655 - DNA, 275 bp, Zea mays
ccaaactcaatcattggcagagctgttgttgttcacgctgatcctgatgatcttggaaagggtgggcacgagctcagcaagagcactggaaacgccggtggccgtgttgcttgtgggatcattggactccagggctgaaaacgatcgccggacttgggggtgcctgagaggtccgtctcctgccgtccccagcagacgagcctgaacattcggagacatcgtgaaataagagcgtcgctgatctgtgatcatcgtatttgtcattatgcacctgt

SEQ ID NO: 2656 - DNA, 279 bp, Zea mays
gtgggttttactgatgcatatacatgatggcatatgcagcatctattcatatgctctaaccttgagtacctatctattataataaacaaatgcagatctttgtgaaaaccctgactggcaagactatcaccctcgaggtggagtcgtctgacaccattgacaacgttaaggccaagatccaggacaaggagggcatccccccagaccagcagcggctcatctttgctggcaaacagcttgaggacgggcgcacgcttgctgactacaacatccagaagg

SEQ ID NO: 2657 - DNA, 269 bp, Zea mays
gaaaaaaaactgggccggacacatcattagcattattattagaagatatatatagttcctctataaataaattataaccaataaaaaacacctcagtctgaacctcctaatgacgtagtcctagtcctatgtagaatcaaagcgtagaggagctcgttccacgcgtccggcacgcctggcaggcaccagtggctgcagtcggccgccctcgtcgtcacctgctcctgcgcggccgccggcgacgggaggcggacgttgtacaccgacgg

SEQ ID NO: 2658 - DNA, 281 bp, Zea mays
cgcaaccagtgccgcacccagaccagatctccgcgacatatcagtcgttcgtccagctaactgcactgcactgcactgcacgcaatggccaccacggcgaccgaggcggccaaggctgcaccggcgcaggagcagcaggccaacggcaacggcaacggcgagcagaagacgcgccactccgaggtcggccacaagagcctgctcaagagcgacgacctgtaccagtacatcctggacacgagcgtgtacccgcgggagccggagagcatgaaggagctgcg

SEQ ID NO: 2659 - DNA, 281 bp, Zea mays
gcacgggcggcacgtgtgggacatggcccgccacgacgcgagcttcgccaagctctgcgacacggcatggtcgcggacagccggttcatcatggacgtcatggtcgaggagtgcgccgacgatgttttccgagggatcagctccctggtcgacgtcgccggcgggctcggcggcgctgcccaggccatcgcgaaggcgttcccgcacatcgactgcagcgtgctggacctcccgaacgtcgtcgccgctgcgcccactagcaccgacgtgaagtacatcgc

SEQ ID NO: 2660 - DNA, 261 bp, Zea mays
  unsure (1)..(261): unsure at all n locations
gtgacagcagctgcctgcctgctccgaggcgccacccagctcttcctcgccccagcagccgcttcccgagatccttttcactttcaccaacatggtacatagaccgcatctgcggtgctctgcgctcctcggactcgatttgttggttcatccatctagctgccgccggacgtcgatcagctacctatcttgaaatcacaggaccgagcgtgganactcccggaccggtcattccattttccattccgaagatggggtgag

SEQ ID NO: 2661 - DNA, 273 bp, Zea mays
gcgactttatttcaagaagacagaagaagggagagtcgtactgaggtgtaagaatggcgagtgcacaggcagtggggcaaggagaacgaggccacttcgttctgaagagcggacacaccattccggccgttggtctaggcacttggagggccggctcagataccgctcactctgttcggaccgccatcgccgaggctggatataggcacgtggacacagccgctcaatacggagtagagaaagaggtcggtagaggacttaaagctgcgatgg

SEQ ID NO: 2662 - DNA, 160 bp, Zea mays
  unsure (1)..(160): unsure at all n locations
tggcacggctccctcggcttccttcgcaggaagcgctcctcccgtcaccgcggcaaggtgaagtcattccctcacggatgacgccaagaagccttgccatctcactgccttccttggctacaaggctggcatgactcacattgtccgtgnagttgagaag

SEQ ID NO: 2663 - DNA, 275 bp, Zea mays
ctcgagccgtcagaattggacggtcttcaaccagagacaaagattatcgatgaccagttggtgaatattaaccagaagggtttccttacaattaacagccaacctgctgtaaatggagagaaatccgactcgcctactgttggttggggtggtcctggaggctacgtttatcagaaggcctacctcgaattcttctgcgcaaaggagaagttggaccaactaattgagaagatcaaagcattcccttctctcacttacattgctgtgaacaagga

SEQ ID NO: 2664 - DNA, 274 bp, Zea mays
ggcaaacagttctgaggtgtgagcaatggcggccggccagtttgcagcagcaggagtcctcaccggccttctcgctctcgcaacacttgcaagctgcaacactgatggcgacatactgtacaagcagaggctagcatgggaggatccaaacaacgtgctgcagagctgggatccaaccctcgccaatccctgcacgtggtttcatgttacctgcaacctgaacaactccgtcgtccgtgtggatttgggaaaggcaggcatctccggccccctg

SEQ ID NO: 2665 - DNA, 273 bp, Zea mays
cgcaggaagaagaaggcagtccacaagactacaaccacagatgacaaacggcttcaaagcaccttgaaaagaataggagtgaacagcattcctggtattgaagaggtcaacatctttaaggatgatgttgttattcagtttgtaaatcctaaagtgcaagcgtcaattggtgctaatacatgggtggtcagtggaactccacagacaaagaagctgcaagatctgcttccgtcgattatcaaccagcttggtcctgacaacctggacaatctg

SEQ ID NO: 2666 - DNA, 282 bp, Zea mays
aggttctgcatactgcctgtggaactccaaactatgtagcacctgagatgtgtaagtatcgcacacttcctgcaggtgctcgctgataaaggctatgatggtatggctgcagatgtatggtcctgtggcataatcttgtttgttcttatggccggatacttaccctttgatgatgtcaatctgatgagactgtacaaactgatctgccatgcaactttttcttgcccaccatggttttcttctggagcaaggaagtttattaagcgcattctcgatcctaac

SEQ ID NO: 2667 - DNA, 285 bp, Zea mays
cggctcgaggaggctcttctcctcctcgcctcctctccctagcctccacgacgcaagggagggtgacggaaagcgacgcggcgcgagcgagggcgggccaaggcgaagaggggaagcaccgcaccaggacccttgttcgccgccgccgccgcctctgatctccgcgaggttgtcaggattcaatatgtcgaccagcacattcgctacttcctgcacgctgttgggcaatgttagaacaacgcaggcctcccagacagcggtgaagagcccttcgtctctaagctt

SEQ ID NO: 2668 - DNA, 266 bp, Zea mays
atcatatctagctagtagctccctgacaagttcactagagaagcatttcacggaggagccatgtctgacgagacgcaccaccagcacctgttccaccaccgcaaggcagaggaggatgaaggcgcctccggcgaggtcgactacgagaagaaggagaagcaccacaagcacatggagcagctcggccagctcggcgccatcgccgccggcgagtacgctctgcacgagacgcacaaggccaggatggacccggagaacgatcacgg

SEQ ID NO: 2669 - DNA, 281 bp, Zea mays
ctcccatcgacttcctccgtcgtccgtcgcactgccacggatcaccctcttccttcgtcttcctccacaaaacctacagcgctggtgcgccgaggagctagctagctagcccggccggccggcggcgccatgcctcccgtgaaggccgaggacctggttgtgcacgccgtcaaggagcagttcgccggcctcgactactgcatcaccagccccccgccatggatcacgacggtgctcgttggcttccagcactacctggtcatgctcggcaacaccgtcct

SEQ ID NO: 2670 - DNA, 149 bp, Zea mays
tgctcttgtgccgtttgcgcacgggatggctctcatttcagagagtatatacaaggaagccagcactgcatgtcaagggaattactggaactctagcagtgcaaaatgcgacgaggcgctgtcaaaagtcgagacggaaatcgacggat

SEQ ID NO: 2671 - DNA, 263 bp, Zea mays
ccgcttccaagatgtcgaagcgaggacgtggaggttctgctggtaacaagttccggatgtcactgggtctaccagtggcagccactgtgaactgtgctgataacactggagccaagaacctttacatcatttctgtgaagggaatcaaggggcgccttaacaggcttccttctgcctgtgttggtgacatggttatggcaactgtgaagaagggaaagcctgaccttaggaagaaggtgatgccagctgtcattgtgaggcag

SEQ ID NO: 2672 - DNA, 271 bp, Zea mays
cggctcgagggattcgcaacatagagcagcacgcatctgataatgtcaacaagatcttggtgggcaacaaggtcgatatggatgcgaagcgggtggtctccacagctcaaggtcagaagctcgcagatgaatacgggatcaagtttttcgagacgagtgcgaaaacgaaccgaaatgtggagcaggtattcttcgccatggcaagggacgtgaagcaaaggctcaccgagaccgttgccgctgcggctgagcccccgacaattcagattag

SEQ ID NO: 2673 - DNA, 272 bp, Zea mays
cggctcgagcgcacatctccggggtcaacttcgacctgccgcacgtcatctccgaggcgccgcagttccccggcgtgcgccacgtgggcggggacatgttcgcgtccgtgcccgccggcgacgccatcctcatgaagtggatcctccacgactggagcgacgcgcactgcgccacgctgctcaagaactgctacgacgcgctgccggaaaatggcaaggtcatcgtcgtcgagtgcgtgctgccggtcaacacggaggccacccccaaggcg

SEQ ID NO: 2674 - DNA, 269 bp, Zea mays
ctcacacaagactttactttcgctcaagaccagcgataacaaagaccttctctcttccgattaccatctatccacatcacttccgcgacagatcaccgccatcatgcagatcttcgtcaagaccctgaccggcaagaccatcaccctcgaggttgagtcttctgacactatcgacaacgtcaaatccaagattcaggacaaggagggtatcccccccgaccagcaacgcttgattttcgccggcaagcagcttgaggacggccgcactc

SEQ ID NO: 2675 - DNA, 267 bp, Zea mays
ggaatacctccgcatccgaactgcgcacccatcccccgactacgccggcgccacgccttcctcctacactacgccgcttcgctcggtctccacaccaccacgctccacttcaccccgtgcaagaccaagcccctgctcctcctcacctggcgaggctccgatccctccctcccctccgtgctcctcaactcccacatggactccgtccccgcggagcccgagcactgggcgcaccctccattcgccgcgcaccgcgacccgaccacg

SEQ ID NO: 2676 - DNA, 263 bp, Zea mays
cgcagacgagacgcgtgtagctagggttttggcctcgccgcgcacgcctcctgaagcttctagacgttcgaggaggaggagaggctcccgccgccgccgcagccatggcgtccaccaaggtgcagcgtatcacgacccagcccatcaacctcatcttccgtttcctccagagcaaagcgcgtatccagatctggctcttcgagcagaaggacctccggattgagggtcgcatcatcggattcgatgagtacatgaacttggtc

SEQ ID NO: 2677 - DNA, 261 bp, Zea mays
ggatgttggtcagccaagagactacattactggattgcgtctttatctagactcgcttaggaagaaatcggctgccaggctagctgctggagcacatgttgttggcaacgtgctggtgcatgagagcgccaagattggagaaggttgcctgatcggtcctgatgtcgcaattggacctggatgtgtcgtggaggatggcgtgaggctttcccgctgtactgtcatgcgtggtgtgcgtatcaagaagcatgcctgcatctc

SEQ ID NO: 2678 - DNA, 262 bp, Zea mays
gccggacatcacaaaggcgaaggaagttctgggatgggagcccaagatcgtcctgcgggacggcttggtgctcatggaggatgatttccgggagcgcctgaccgtgcccaagaaaaccaaggcctaaattgccctgcagttggggaagaatatccacacggggaagcatactcatagtcgggctcgtcattatttgtggccacatttcattacggaatttgagttccaataaacttaatattcctttgtcgttcaccttgaa

SEQ ID NO: 2679 - DNA, 262 bp, Zea mays
aaagacatgaagcagaggatgccccttatatatgttaaattgtatatgtaccagatattccggggactagcttatattcatactgtaccaggaatttgtcaccgagatattaagcctcagaatatcttggtggatcctctttcccaccaagtcaaggtttgtgacttcgggagtgctaaaatcttgattaaaggtgaagctaatatatcatatatatgctcacgctattatcgtgctcctgagctcatatttggtgcactga

SEQ ID NO: 2680 - DNA, 285 bp, Zea mays
agcacctcatgtgcgaggtcgagggccaccaccacctcacctccgccgccatcatcggccacgacggcaccgtctgggcccagagcgccgcattcccgctgttcaagcctgaggagatggccaacatcatgaaggacttcgacgagcccgggttcctggccccgaccggcctcttcctcggccccaccaagtacatggtcatccagggcgagcccggcgccgtcatccgcgggaagaagggatctggaggcataaccgtgaagaagaccggggaggcgctggtgg

SEQ ID NO: 2681 - DNA, 280 bp, Zea mays
gtccagaagccaggaacacagactaggagcttctgctatgtcgccgatatggttgatggtcttattagactgatgaatggaaacaacactgggccgattaacttggggaaccaggtgaattcaccatgctggaacttgctgagaatgtgaaggagttgattaacccagatataacagtgacgatgaccgagaacactcctgatgatccccgccagaggaagccggacatcaccaaggcaaaggaagttctagggtgggagcccaagatcgtcctgaagga

SEQ ID NO: 2682 - DNA, 283 bp, Zea mays
tgcgcggacgccaccagcagcttcccccttgctgtcgccgcctctctccgcgcgaccgatctaccgccgccgccaccatgtcgctgatcgccggcgaggacttccaacatattctgcgtctgctgaacaccaacgtggatgggaagcagaagatcatgttcgccatgacctccataaagggtgttgggcgccgcttctccaacatcgtctgcaagaaggccgacatcgacatgaacaagagggccggtgagctgacgcctgaagagctggagcgcctgatgac

SEQ ID NO: 2683 - DNA, 131 bp, Zea mays
atgcaatcgcaagcgagcagaatggcgaggtccagtggtagtagaccagtggccctcgtgctgctggcgctgtgcgcgctcgccctctcgtcggccacggtgaccgtgaatgagcccatcgccaatggcct

SEQ ID NO: 2684 - DNA, 278 bp, Zea mays
ctcttctccaactccacctccacctccacccatggcggcctccaccttcagcggcgacgagacggcgcccttcttcggcttcctcggcgccgcgccgcgctcgtcttctcctgcatgggcgccgcctacgggacggccaagagcggcgtcggcgtcgcctccatgggcgtcatgcgccccgagctcgtcatgaagtccatcgtccccgtcgtcatggcgggagtactcggcatctacggcctcatcatcgccgtcatcatctccaccgggatcaaccc

SEQ ID NO: 2685 - DNA, 285 bp, Zea mays
cgggaaggtgcttgtcctcgacggagttattcaggtgacagagagggatgagtgtgcgtaccaagagatgattactcacctgcccctttgctccatcaaagaccccaagaaggtgttggttattggagggggggatggtggtgttttgcgtgaggtttcacggcatatctctgtggagcagattgacatctgtgaaattgataagatggtggtagatgtctccaagcaatttttccctcatctagctgttggatttgaagaccctcgtgtgtcattacacattgg

SEQ ID NO: 2686 - DNA, 290 bp, Zea mays
cttcacttcaactccatcgccgcgtcctgccgcctcgcgctcgccctcaagggcctcccgcccgtcttccacgaactggagtgggacctcgtcatggtcgacgcgcccacggggtggacgccgcaggccccggacggatggccgccatctacaccgccggcatggcggcgcgcgcgcgcaggcccggggacggacccaccgacgtcttcgtgcacgacgtcgaccgacccgtcgaggacaacttctccaaggcgttcctgtgcgagggatacctcgccgagcaggtcggc

SEQ ID NO: 2687 - DNA, 281 bp, Zea mays
tgtcggtgcagcaggcgctgcagagatgacaggctgtacatgctggactaccacgacatcttcatgccgttcctggaccggatgaacgcgctgtacgggcggaaagcctacggtacgcgcacgctcttcttcctgacggctcgcggggacgctgaagctcatcgcgatcgagctgtgcctgccgccgatgaccgactggtgcgcgcgcgccaagcgcgtgttcacgtcgaccgccgatgctcacagcaactggctgtggcagctcgccaaggcatacgtct

SEQ ID NO: 2688 - DNA, 277 bp, Zea mays
tggagaaatctgtgttcgaggaccgaacataatggaaggctatttcaacaatgtgcaagcgactgagtctacaatcaagaatggatggttgcataccggtgatcttggatacttcgatgaaagaggccagcttcatgttgtcgatagacttaaagaactgattaagtacaaaggcttccagattgctcctgctgagcttgaaggactgcttttgtctcatccagaaatccttgatgccgctgttatcccgtatcctgatgctgaagcgggggaagtt

SEQ ID NO: 2689 - DNA, 278 bp, Zea mays
cccaaattcattcaagtggatgctgcagaatccaatgtaccgccaacaactacaggatatgctaaataacatgggcgcaactcctgatcaatgggataaccgcatgcttgatcaccttaagaacttcgaccttagcagtccagaagtgcggcagcagtttgcgcaagttggcatgactcctgaggaagtagtatcgaaaataatggcaaacccagatgtagctgttgcattccagaatccaaaaatacagacagccatcatggactgctcgcagaacc

SEQ ID NO: 2690 - DNA, 279 bp, Zea mays
tgtcggcactccctctccaccgcgctgcaggggcgacgcaaggccgagcgctcctcgatccagatccaaggtaggagatggctctcacgagaattggcctcgccggcctcgcggtcatgggacagaaccttgccctcaacatcgcggagaaagggttccccatctcggtctacaacaggacaacctccaaggttgatgagaccgtgcagcgtgccaaggtcgaaggaaacctcccagtgtttggtttccacgaccccgcgtccttcgtgagctccatcc

SEQ ID NO: 2691 - DNA, 274 bp, Zea mays
tgcgccgccgccgctcgtctccctgagaggtgccgggaccgaggaactggccgagtactaggtagagaatcggtttttcttgtctcagcccggggtctgctgcgtctggtggtggtgaaggggagaaattcgtgagatctgttccggatcatgcgtgcgagctcgggaatcaggggtttcacacatagcttcgtcgatttgaatttgatgtactaatggagtctaagggtggcaaaaagtctagcagtagtcgttctatgatgtatgaagctcc

SEQ ID NO: 2692 - DNA, 283 bp, Zea mays
cgtcaacgtcgccaaggacgactccatcttccacaacgaggagaagctccgcgaggctctcaagttctccaacgcctgcggcgccatctgcaccaccaagaagggcgccatcccggcgctgcccacggtcgccaccgcccaggacctcatcgccaaggccaactagatggccgcacgccccgccgttccaccacgtcactgtcccccgccgccccgcccctcgtcgtcgacgtcctcggtttcggttcattaggtagatcgagtcttagcgtccgtctctgcg

SEQ ID NO: 2693 - DNA, 282 bp, Zea mays
catgaaccggctgatttctacaatgtggacattcctctcgactcatcaaaggatctgaagaaaaaggagaaagaactccaggctatggaggctgagctaaacaaaagagaacgggaattgaaaaggaaggaagaggcggcatcccgagctggcgttgtgatagaagagaaaaactggcctccctttttccccctcatccaccacgacatttccaatgaaatacctatccatctacaaaggatgcagtaccttgcattctcatcattcttgggattgatagcg

SEQ ID NO: 2694 - DNA, 283 bp, Zea mays
atcattcaattcaaatgcctgatgaaaatggagattatttcacatggccaacagtggaacactattaccaggctcataagtttgttggtgttgacaatcctcaagcaagagacattgttcaagaaataaagctagcaaagagtcctgaagaggctgctagaataggaaggacccgacaaaaagggttccctgaactggtaagaacagattgggagagtacaaaaatagatgtgatgtatagagctatcaaatgcaagttttcaacttatccccatctgactaa

SEQ ID NO: 2695 - DNA, 274 bp, Zea mays
tggcgaccgtctcacccgcgccgcaaaggtgctcgagcagctcagcggccagacccccgtcttctccaaggcgaggtacacggtgcggtcgttcggcatccggcgtaacgagaagatcgcctgctacgtcacggtgaggggcgagaaggccatgcagctgcttgagagcggcctcaaggtcaaggagtacgagctgctcaggaggaacttcagcgacaccgggtgctttggtttcggcatccaggagcacatcgaccttggtatcaagtacgat

SEQ ID NO: 2696 - DNA, 272 bp, Zea mays
attaaggcttacaacactgggactaggaagcgtcgaaggataaacactgacgatgctgatgtccgttggcacaagacaggcaacacaaagccagtactagttgatggaaaacaccttggttgtaagaaaataatggtgctttatataagcccgttgaagggtggaaaggctgagaagaccaattgggtgatccaccagtaccacctaggcactggagaggatgagagagatggtgaatatgttgtctccaaaatattttttcagcaacagtt

SEQ ID NO: 2697 - DNA, 272 bp, Zea mays
gctacatcgatcaagaaaatgatcagtttagggcttcctcagtggccaggaccagtaccagccgacacagcatgtccagagcaagtccaatgccactaacaccagctgccttaaaggaaaatgattctgatgttcatccacctgcaccatctttctccaggcttcttgcaatgaacgcacctgagtggaggcaggcagtcgtaggcagtttatccgcattggtatatggttccttgcagcctatctatgccataaccatcggaggaatgatt

SEQ ID NO: 2698 - DNA, 276 bp, Zea mays
cgcctagtcatgcgccaggctaaaacgcttaagatctgcgcgaaccacctcgtggcctccaccacgaagatgcaggagcatgcgggcagcgacaagtcgtgtgtttggcacgctgctgactttgccgatggcgaacttaaggaggagatgtttgccatcaggtttggttcggtagaaaactgcaagaagttcaaggagttggttgaggagatagctgagtcgcttacaaagaacgagggcaaggaaggtgaagatggtggttccacggctggattg

SEQ ID NO: 2699 - DNA, 275 bp, Zea mays
ggactactattcggccatgttcgagtcaatcgacacgaacctgccacgggacaacaaggagcggatcaacgtggagcagcactgtcttgccaaggacatcgtgaacatcatcgcctgcgaggggaaggaccgggtggagcgtcacgagctcctgggcaaatggcggtcgaggctgaccatggccgggttcagaccatacccgctgagctcgtacgtgaactcggtgatcaggaagctccttgcctgctactcggacaagtacaccctggaagaga

SEQ ID NO: 2700 - DNA, 281 bp, Zea mays
cggctcgagaagctttccacaccaacctttggtgatctcaaccacctcatctctgcaacaatgagtggtgttacatgctgccttcgtttccctggtcagctgaattctgaccttcggaaacttgcagtgaacctgatccccttcccgcgcctccacttttttatggttggattcgctccactgacctcacggggctcccagcagtaccgtgccctcactgtgccagagctgacccagcagatgtgggactccaagaacatgatgtgtgctgctgaccctcg

SEQ ID NO: 2701 - DNA, 287 bp, Zea mays
ctcggggcaaaagtcctcaggtgctgttccattcaccaccatgtttgctcttgtcctcctttggttcggtatttcagtacctttggtttttgttggaagcttccttggcttcaagaaacctaccattgaagatccagtgaagacaaacaagataccaaggcagatccctgagcaggcctggtacatgaacccaatcttctcgattctaatcggagggatccttccatttggtgctgtcttcatcgaactcttctttatccttacttccatctggctgcaccagttct

SEQ ID NO: 2702 - DNA, 288 bp, Zea mays
cgaacgccggagctcgacaaggacgaccgacgacgcacgcggagatccggcgtactgcaaattttgaaaactgaactgtaagatggcatcagcagagctttcccgtgaggaaaatgtgtacatggcgaactcgctgagcaggcggagaggtacgaggagatggttgagttcatggagaaggtagccaagactgttgactcggaggagctcactgtggaggagcgaaacctcttgtctgttgctacaagaacgtcattggagcccgccgcgcctcatggcgcatcatct

SEQ ID NO: 2703 - DNA, 293 bp, Zea mays
gcacgagccatgagggtcctcaagcagcgcaggatgtacgaagggcagcgtgacatgctctacaaccaaacatataaccttgaccaagttgcttttgcggcagagggacttaaagatgctcagcaaactatgactgcgatgaaggctgccaataaagagctcaaagggatgatgaaaactgtcaagctcgaagatattgatagtatgcaagatgagatgatggatcttatggatgtgagcactgaaatacaagaaactcttggcagaagctacaacgtcccagatgacatcga

SEQ ID NO: 2704 - DNA, 293 bp, Zea mays
cacgccgccgcagcccgcagtcgcttgcgcgcacagcacctcgcaccgccgccccatcccatcgccgccagtggctgctcgatccgatggctcccacgaagaagtcgaagaagagcacagagagcatcaacaacaagctgcagctggtgatgaagagcggcaagtacaccctgggctacaagaccgtcctcaagacgctgcgcaactccaagggaaagctgatcatcatcgcaaacaactgccctccacttaggaagtctgagattgagtactacgccatgctggccaaagtt

SEQ ID NO: 2705 - DNA, 290 bp, Zea mays
ccaccgcttcccgtgcagcgccctccctctacgttcccccatttcctgtgttggcggcgatggcgcggcacttcgtgctcaacaccggcgccaagatcccctccgtggggctcggcacctggcagtctgaccccggcgtcgttggcaacgctgtctacgccgccgtcaaggcgggttaccgacatatcgattgtgccagagtttacggcaacgaaaaggagattggtttggcgctgaagaagctatttgaagagggtgtagtgaagcgagaagatctgtttatcacctct

SEQ ID NO: 2706 - DNA, 292 bp, Zea mays
gcggcgcgggcggacaaggagcaggcggaggaggagctgtgccaagccacaatgggtatctcgcgtgactcgatgcacaagcgccgggccaccggtggaaagcagaaggcctggaggaagaagcgaaagtatgagcttggtcgccagccagccaacaccaagttgtcaagcaataagacagtgaggagggtccgtgttcgtggaggtaatgtgaaatggagggctcttcgccttgatactggtaactactcatggggaagtgaagctgttacccgcaagacccgtatcctcg

SEQ ID NO: 2707 - DNA, 280 bp, Zea mays
gacgaattcaggctctcgttattgataacggctccggcatgtgcaaggctggtttcgccggtgacgacgctccccgcgccgtgttcccctccatcgtcggtcgcccccgccacaccggcgtgatggtcggcatgggacagaaggactcgtacgtcggtgacgaggctcagtccaagcgtggtatcctcacgctcaagtaccccattgagcacggcatcgtgaccaactgggacgacatggagaagatctggcaccacaccttctacaatgagctccgcgt

SEQ ID NO: 2708 - DNA, 285 bp, Zea mays
gcgccatctgcggcgtcgggctcgtcaagggcttccagagcgccttctacgtgcgctacggcggcggcgccaacgagctcagcgccggctactccaagggcaccggcctcgccgcggagatcatcggcaccttcgtgctcgtctacaccgtcttctccgccaccgaccccaagcgcaacgcccgtgactctcatgtccccgtgcttgcccctctccccatcgggtttgcggtgttcatggtccatctggccacgatccccatcaccggcaccggcatcaacccgg

SEQ ID NO: 2709 - DNA, 281 bp, Zea mays
tgcaattatggagctggcaactctggggatggaaaaggaagggatcaagaagaagggcagcaaggtgacgcccctcaaggctcctattatcgaggcttctgagatgctataagttgtaatttgagttgtgggggtagttctagtgcatcatgttgtgtcgctggtgtacttgcctgtgggtcgcccaggttcttttgctggctgtttcgtgtgccaggttgttgcctgggcagcggtgtttgtttctttggttggtattttcggtgtctctatctgtctta

SEQ ID NO: 2710 - DNA, 282 bp, Zea mays
aatttgaggagcatgctgagaaggcaaagaccttgcctgagagcacgagcaatgagaacaagctgatcctctacgggctctacaagcaagccacggttggagatgtgaataccgatcgtccgggcatattctaccaaaaggacagggccaagtgggatgcctggaaggctgttgaaggcaaatcgaaggatgaggcgatgaatgactacatcaccaaggtgaagcagctccaggaggaggctgccgcctcttaaaagtctcttaatagtgttgccaaacagc

SEQ ID NO: 2711 - DNA, 280 bp, Zea mays
caagaaactcctgttgctggaaacacgtatactgtctgtgtagtggatgctgctttattcatgggtagatcatttcgtgttggttggggaccaaatggtttacttgtacattcaggtagtctggtcaatagtcctggaactggcctatcttctgttattcacatagagaaagttgcaagtgacaaagttgtgcgtgatgataaggataagattaaggatgacctaacagaactatgtttttctgctccaatggacctccataagagtcttgatcatgact

SEQ ID NO: 2712 - DNA, 285 bp, Zea mays
ctgccccctgtggtacggctacggagggcggctcaagttcctggacgagattcgcgtacatcaacaccaccatctacccgctcacgtccatcccgcttctcatctactgcatcctgcccgccatctgtctgctcaccggaaagttcatcattccagagatcagcaacttcgccagcatctggttcatctccctcttcatctcgatcttcgccacgggcatcctggagatgaggtggagcggggtgggcatcgacgagtggtggaggaacgagcagttctgggtga

SEQ ID NO: 2713 - DNA, 288 bp, Zea mays
gttccttgcgctgacatatgaccacaggctgatcgatggcagagaggctgtattcttcctccgtcgcatcaaggatgtcgttgaggaccccaggaggttgctgcttgacatataaagttacttaccagtgctttcccgccgactgttttgtgctttctggaaataataccatgcaaatttttgactgatgaaaaagaattgcttcctcggaaagacgaattctgagctgaggatacagtgaggtttttctctataatcgtagaagagagcagcaaactcaactcaatg

SEQ ID NO: 2714 - DNA, 278 bp, Zea mays
atccgcctcttaattaatacatacaaagcactgatcacgcatgatgcatgcagcttgtgacgaatgaccggtacaagagcgtggatcaccgggtgccggctaacaagagcagtgacacggcgagggtctcggtagctgccttcttcaaccccgacgagaagagaaccgagaggctgtatggcccaattccagacaccagcaagcctccgctgtacaggagcgtcacgttcccggacttcatcgccaagttcaacagcatcggactggacggtcgcgtg

SEQ ID NO: 2715 - DNA, 275 bp, Zea mays
gcccaaccgcacaagcgcgcgaggcaggagagagagagaggcggggagcaaaacaatggaggggaaagaggaggacgtgcgcctgggcgccaacaagttctcggagcgccagcccatcgggacggcggcgcagggcgccgctgacgacaaggactacaaggagcccccgccggcgccgctgttcgagcccggggagctcaagtcctggtccttctaccgcgcgggcatcgccgagttcgtcgccaccttcctcttcctctacatcaccatcctca

SEQ ID NO: 2716 - DNA, 171 bp, Zea mays
tcggctcgagggtgggttggactctcctccccctccggttcgggttcgggttcgtgaggttctccgcggttctggttcgtgggtgatcggatcgagatggcggcgtcggatgttgagtaccgctgcgtcgtcggcggcctcgccttagccacggacgaccactccctccac

SEQ ID NO: 2717 - DNA, 265 bp, Zea mays
ccgagcacaagcaggccccgatggcgacgacggcgacgaaccggcgggtgatcctcaaggagtacgtggagggatatcctcgcgaggagcacatggagctgctccagggcgccgaggttcccctccgcctgatcggcgccgagccggccgggtccgtcctcgtcaggaacctctacctctcctgcgacccctacatgcgtgccaagatgtcgcgcccgctgcgggagtcctacacggccgccttcgtcccgggcgacaccatcac

SEQ ID NO: 2718 - DNA, 349 bp, Zea mays
  unsure (1)..(349): unsure at all n locations
gagcggcacggangaacggcgatgctacggccgcggctgagcgcgacgacgtggacgccggggctacgnnnnnnnnnnnnnnnnnnnnnnnnagctcgcagggtcccgcggcggcctcggggagaagaagcggcggctggcagcggatcaggtgcgcgcgctggagcggagcttcgaggtagacaacaagctggacccggagcgcaaggcccggatcgcgcgcgacctcagcctccacccgcgccagtcgccgtctgtttcagaaccgccgcgcgcgctggaagaccaagcagtcgancgcgattcgccgcgtccgntgcgcangacgcatccggtcantgcgaggttc

SEQ ID NO: 2719 - DNA, 310 bp, Zea mays
  unsure (1)..(310): unsure at all n locations
gtcgtccccgacgtggccgggctgtcgctggccgagtcgggcggcttcgtcaaggcacccggcggcgcgcccgccaacgtcgcctgcgccatcgccaagctcggcggatcctccgccttcgtaggcaagttcggcgacgacgagttcgggcacatgctggtgaacatcctgaagcagaacaacgtgaacgcggacgggtgcctgttcgacaagcacgcgcggacggcgctggggttcgtgacgctcaagcagtacggggagcgcgagttcatgttctacangaacccgagcgacgacatgctgctgacgg

SEQ ID NO: 2720 - DNA, 361 bp, Zea mays
agcaggtagaacgctgcacaatccccttcgccgccgccaagatggtgaacgttcctaagaccaagaagacgtactgcaagaacaaagagtgcaagaagcacacactccacaaggtgactcagtataagaagggcaaggatagcctgtctgcccagggaaagcgccgttatgaccgcaagcagtcaggatatggtggtcagaccaagcctgtcttccacaagaaggccaagaccaccaagaagattgttctgaagctgcagtgccagagctgcaagcactactcacagcacgccatcaagagatgcaagcattttgagattggtggagacaagaagggcaagggcacatctcttttctaagc

SEQ ID NO: 2721 - DNA, 349 bp, Zea mays
gcgcacggcgctggaggaggctggctccgactacgagatcgtgcccatcaacttcgccaccgccgagcacaagagccccgagcacctcgtccgcaacccgtttggtcaggttccagctctgcaggatggtgacttgtacctcttcgaatcacgagcaatctgcaagtacgctgctcgcaaaaacaagccagagctgttgagggaaggaaacctcgaggaggcagcaatggtggatgtttggatcgaggtggaggctaaccagtacaccgctgcactgaatcccatcctcttccaggtcctcatcagtccgatgcttgggggaaccaccgacagaaagttgtggatgaga

SEQ ID NO: 2722 - DNA, 346 bp, Zea mays
gcagggcaaggggtgccagcccaacgagcgcgcctacagcacgctgctcatgggcctctgcaagaacaagaagctggacaaggccgtcgaggtgtacaagtccatggcggcggctgggacgaagctcgagtcgccagcgtacgcctccttcgtcagggcgctgtgccgatcgggcagcgtcgcgacgcgtatgaggtgtttgattatgcgatccagaccaagagtttcgccgaggtgacggcgtattctgagctcgagaactcgctcaagtggctgcgcaggatgaattcatgacgcaaactgcctgcacagagagtatgcgatacgtcagtgccttcaatgcaat

SEQ ID NO: 2723 - DNA, 346 bp, Zea mays
cggctcgagcttagttatacggagagccccacatgaattcaagattgcttgcctggaggacattaaggcgctctttccttctgattacaatccattttatgctgggtttggtaacagagatactgatgagctcagttacaagaagatgggaatacctaaaggcaagatttttatcatcaacccaaagggtgaagtggctgtcaacagttctgttgatgtgaagtcttatacgtccctacatacccttgtcaatgacatgtttccaccaacaactctggttgagcaggtcagtttttttcatatctgctgaatagagtggtaatttgcttgtcttaggcatggactg

SEQ ID NO: 2724 - DNA, 352 bp, Zea mays
ctaactccaaaaaccctcgctctcctctcatggccgccgccgcagctgacgacgcagccgaggtggagcggctttacgagctcggcgagcgcctctcctccgccaatgacaagtccgagcatgcggcggactacgaggcgattattgcagcggtgaagggacagagtgccaaggcgaacagctcgcagcgcagcttatccccaggttcttccggagcttccctgcactcggcacgcgcgccatgtcagccatgttcgatctcgtcgatatggaggagctcgcgatcagaatacaagctattcgtggctttccacttcttggcagagatactgaatttgtgtcaaaaattgca

SEQ ID NO: 2725 - DNA, 348 bp, Zea mays
ggcggtctcaaccccaggcgagctcggctccggtcacccgtcgatccacgcaaccatgtcgaggaggaagaccagggagcccaaggaggagaacgttacccttggacccactgtccgtgaaggagagtttgtctttggtgttgctcacatctttgcatccttcaatgacaccttcattcatgtcactgatttgtctgggagggaaactttggttcggatcactggtggcatgaaggttaaggctgatcgtgatgagtcgtctccttatgctgctatgcttgctgctcaagatgttgcacagcgttgcaaggagctcggtatcaccgcgctgcacattaagcttcgtgc

SEQ ID NO: 2726 - DNA, 270 bp, Zea mays
gtcgacgaggctttccccgccgccgcacctaatttccttccatccgacccctacgaccgcgccattgctcgcttctgggcctcctacgtcgacgacaagttctacagcgcgtggatacccgtgttcaggggcaggacggcggaggagatggcggaggcggcgaggcaggccgtcgcggcgctggagacgctggagcaggcgttcagggagtgctccaaggggaaggccttcttcggatgggacagcgatgggctcgtcgacgtcgtgctc

SEQ ID NO: 2727 - DNA, 348 bp, Zea mays
aagcttacaggaaaatcaggctccgtgctgaagatgtgcagggcaggaatgtgctcacaaacttttggggtatgaattttaccactgataaactgagatccctagtgaagaagtggcagacattaatcgaagcccatgttgatgtcaagacaaccgacaactacatgttgcgtttgttctgcatcggcttcacgaagaggcgcccaaaccaggtcaagagaacctgctatgctcaggcatcccagatccgtcagatccgccgtaagatggttgagattatgatcaaccaggcttctacatgtgacctgaaagaacttgtttcgaagttcattccagaagttattggta

SEQ ID NO: 2728 - DNA, 347 bp, Zea mays
ctgtttcttgcaagttgctcttgcggtagttcccccaactgccaccatgcagaacgaggagggtaagactgtggacctctatgtccccaggaagtgctcggccacaaacaggatcatcactgccaaggaccatgcctctgtccagatcaacattggccacttggatgcgaatggcctgtatgatggtcacttcacaacgtttgctctctctgggtttgtccgtgctcagggcgacgcagacagctccttggacaggctgtggcagaagaaggctgatatcaagcagtagattttacatctagtttaccaagaattggacactgcccttagctatgtttgaattcatg

SEQ ID NO: 2729 - DNA, 344 bp, Zea mays
ggcggcgtaggtagcggcggtctcaaccccaggcgagctcggctccggtcacccgtcgatccacgcaaccatgtcgaggaggaagaccagggagcccaaggaggagaacgttacccttggacccactgtccgtgaaggagagtttgtctttggtgttgctcacatctttgcatccttcaatgacaccttcattcatgtcactgatttgtctgggagggaaactttggttcggatcactggtggcatgaaggttaaggctgatcgtgatgagtcgtctccttatgctgctatgcttgctgctcaagatgttgcacagcgttgcaaggagctcggtatcaccgcgc

SEQ ID NO: 2730 - DNA, 345 bp, Zea mays
caggtatacacagagacaacagatggatcttcaatcgagtcaaaggaaagcgccctagtatggcactatttggacgcggaccatgatttcggttccttccaagcaaaggagctacaaggtcatcttgagagggtgctatcgaatgagcctgttgttgtgaagtgtggtcattatattgtagaggtgaaaccacagggagttagcaaggggcttgctgtcaacaagctgattcacacactggtcaagaacgggaaggcaccggatttcctgatgtgcgtcggcaacgacagatctgatgaggacatgtttgaaagcatcaacggtatgacctccaacgctgtctta

SEQ ID NO: 2731 - DNA, 346 bp, Zea mays
  unsure (1)..(346): unsure at all n locations
cagcagttgaagggcaaactaaaagtgatggagcatatgccaggtgatgaagattcagcgtcaaagaataaaattaatgagctgagtgaggcattgcaagaaaagatagatgaactggatggaatggagtcacttaaccaaactctggttatcaaagaaagcaaaagcaacattgaactgcaagaagctcgcaaagagctagaaaatggcctgcttgatctttcaggtgggcagacacatataggaatcaagagaatgggagagcttgatctanaagcattttcanaggcatgccanaaggagcgtacagaaaatgcagaagttactgctgcctttctttgttcaa

SEQ ID NO: 2732 - DNA, 337 bp, Zea mays
atcagaagaggctgcggcatggatagataccaaagggtagagaagcctcggaatgacacgccaatcagccagaatgagatcagaatcactactcaggggaggatgaggaactatatcagctatgggatgtcgctgcttgaggaaaatggacatgatgagattagtatcaaggccatgggacgggccataaataagacagttatggttgttgaattgatcaagagaagggttggaggtcttcatcagaacactgctactgaatctgttgatatcacagacacatgggaacctttggaagaagggcttctcccactagagacaactcgccatgtgtcga

SEQ ID NO: 2733 - DNA, 348 bp, Zea mays
ccatctcagtcaactacaagcttcaaatcttcaaatcttccaagttttcaaaaacttcaatcaatcaatcaacatgtctgacgccggccgcaaggatttctctaccaaggctaaggaggaaatcactcctgactcctccaagtccacccaggagaaggtcaaggagtccttcaccgacaccaccgaccgcctcgcccgcggtgtccagtccgatgacagcaagtctagcacccaggaggccttcgacaagacccagcgcagctacgacaaccatgctcacggcggtgccaccggctccattggtgacaagatcaaggacactcttggcttgggcaacaactagatgat

SEQ ID NO: 2734 - DNA, 99 bp, Zea mays
cggcaactacagcgatggcaacctagtcgccactctgctcgcgcacaagttgggagtcactcagtgtaccatcgctcatgccttggagaaaaccaaata

SEQ ID NO: 2735 - DNA, 290 bp, Zea mays
tggcctcttcatttttgcatcatgggttggtcagaatggcggtgtgattgctggcttagcagcctgcggtgttatgatgtccatcgtgtccactgcagccgatctcatgcaggacttcaagaccggttacctcacactctcttcccctaggtccatgttcgtgtcgcagttgatcgggaccgcccttggttgtgtcattgctccactcaccttttggctctactggtcggctttcgatattggtaaccctgacggcgcattcaaagctccatatgctgtaatcttccgtg

SEQ ID NO: 2736 - DNA, 188 bp, Zea mays
cggctcgagggatggtaaatatatctccgcccgtgggaaaaaggtggtggttattggtggaggtgatacaggcacagattgcattggcacatctattaggcatggttgcaccagccttgtaaatcttgaactcctgtcaaaaccaccaagcactagagctgctgacaacccatggccccagtggacaa

SEQ ID NO: 2737 - DNA, 283 bp, Zea mays
gttccccagtcttgctccttgcactcctccctcctccatctccagcattgtgttctgattcacctgctccaatggctgttctttctgctgctgatgcttccccggtctcagctatcgggtttgagggctatgagaagcgccttgagatcacattctctgaggcacctgtctttgtggaccctcatgggcgtggtttgcgtgccctctccagggcccagattgactctgttctggatcttgcacggtgcacaattgtgtccgagctctccaacaaggatttcga

SEQ ID NO: 2738 - DNA, 129 bp, Zea mays
cccgcctccactcccccctcccaggtgctgcccaggtaagtcggcggcggcgatgacaacgcgcttcaagaagaaccgcaagaagcgcggccacgtgtccgccgggcacggccgcatcggcaagcacag

SEQ ID NO: 2739 - DNA, 229 bp, Zea mays
ccaggggagagcgggcagagccaaaccagagacgcggcacgcgacgcggcagcaacgacaccatctacgacttctatggctttcccaagcccatgtaccagctcaagtaccccgctccgggcgctccggacttggccctgcggaccgtagagctcctggagcaagccgggttcggccccgtgaagcaggaccacagccgcgggctcgaccacggcgcctgggtgccgct

SEQ ID NO: 2740 - DNA, 283 bp, Zea mays
gcctggtccaccttagagcctcaagaaaaccctaatccctgtgtccatcggcatatatccacacctgagtcccctccgccgcctgccgcactctcctgcgacgccacaaccacacgttcacggtagcgagagcttatcgtcgtcggcggtgaagatggtgtcgctgaagctgcagaagcggctcgccgctagcgtcctcaagtgtgggaaaggcaaagtctggcttgaccccaatgaagtcagcgagatctccatggctaactcccgccagaacatccggaag

SEQ ID NO: 2741 - DNA, 172 bp, Zea mays
tgcggttggtgacttttttaatgaaggattatatgaagagcaagcccgattaaggggcatccctttactggactccaggcctaagcaagtcatgagaaatatgaatgcaagggatgcgtgcaagaatcaaaaggttgtctgcctaccacgtgtttcaagggttgttgatatc

SEQ ID NO: 2742 - DNA, 276 bp, Zea mays
cgtcttccttgtttaccattcctccccaaaacacatcctgcgatcctcgaagcctccgccgagcatcgatcatgtcggcctactgcggcaagtacgcggatgagctcatcaagaatgctgcctacatcggcacccctggcaagggtatccttgctgctgatgagtcaactggcaccattggcaagcgcctttccagcatcaatgtcgagaacgtggaggagaaccggcgggctctccgtgagctcctgttctgctgccctggtgccctccagtaca

SEQ ID NO: 2743 - DNA, 200 bp, Zea mays
cccgtcggcgcctccccagatttggccgccgccgccgctgacccaggttgtcttgatggcgcccgctgtagaagccgtgaaggagacaggcaccttccagaaggttcctgccttgaacgaaaggatactgtcatccatgtccaggaggtctgttgctgcacacccttggcatgatctggagataggtcctggtgctccaa

SEQ ID NO: 2744 - DNA, 239 bp, Zea mays
gggcacacctccaaaccctcatcacgatccggctccaaggtctcgagatgaagtcgagggcgaggtccggcggtggcgactccaggctctcggtgaggaagaccaaggttgagaaggacccaaacaagcccaagaggcctccgaccacgttcttcgtcttcatggaggagttcaggaaggactacaaggagaagcaccccaatgtgaagcaagtctcagtcattggcaaggctggtggt

SEQ ID NO: 2745 - DNA, 224 bp, Zea mays
gcgtctcgtctcctcctccccacaaaaagccgctgaattgctccgtcggcgtcatgtgtggcatcttagccgtgctcggatgctccgactgctcccaggccaggagggctcgcatcctcgcctgctccagaaggctgaagcacaggggccccgactggtcgggcctctaccagcacgagggcaacttcctggcgcacagcggctcgccatcgtctccccgctgt

SEQ ID NO: 2746 - DNA, 296 bp, Zea mays
ctcactttatgattccatggtttgaacgaccaatcatttatgatgtccgtgctcgaccgaatcttgttgagagtacttctgggagtcgggatcttcagatggtgaaaattggtctccgtgtccttacaaggcctatgccagagaggctaccacatatctacagaactctgggagagaacttcaatgagagagttttgccttcaatcatccatgaaacactgaaagctgttgttgctcaatataatgctagtcagctgatcacacagagagagactgtgagtagggagattaggaag

SEQ ID NO: 2747 - DNA, 193 bp, Zea mays
ctggcttctcctccccctcttaccaagtcctcctcgggttagggttccttagggttttgtggacgggcgatggcggcggctgatgtggagtaccgttgcttcgtcggcgggcttgcctgggccaccagcaacgagtcgctggagaatgccttcgcctcctacggcgagatcctcgactccaaggtcatcaccg

SEQ ID NO: 2748 - DNA, 302 bp, Zea mays
ctcgacctcccggatctctctcccacccacgcctcgtcggcgccgtcgtctgctgcagcgatggcctcccccgacctgctcttcaatctgcggaacctcttctacctgggcgcctaccaggcagccatcaacaacagcgacgtcccgggcctcgacgccgacgccgccgctgagcgcgacgccatcgtcttccgctcctacatcgccctcggctcctaccagctggtgatcagcgagatcgactcgtcggccgctacctcgctgcaggccgtgaagctgctcgcgctgtacctcactggaga

SEQ ID NO: 2749 - DNA, 268 bp, Zea mays
gtctcttccactctcccttgacctgtctccttcacctgctgattgctgtgccgctccgctccgctccggtggcatctgcatctgcatctccatccctcgatctgtcttctctcagggtggaataagcgtgacaatggaggctccacccgtggcgctgttcgacaccctcaaggcagccaaaccgttcttcttgttggctggtcccaacgtgattgaatcggaggagcacgtcctgaagatggccaaacacatcaaagcaattacgacc

SEQ ID NO: 2750 - DNA, 297 bp, Zea mays
ctagggtttttgattttagccgccgccgctgctcatctcacatccctcgagaagacgcctgctcctcgccgatcgatacgatggccgtcttctccgacctccacaccgccgacggcctcaagtccctcgaggctcacctcgccggcaaaacctatgtgtctggtgactccattactaaggatgacattaaggtcttcgccgcggtgccgtcgaagcctggcgctgagtttcctaatgccgcccgctggtacgagaccgtctctgcggctgtagcctcaagattccctggtaaggctg

SEQ ID NO: 2751 - DNA, 299 bp, Zea mays
ctctcccccacctcccggtccggcagcagagagcgggggtgcagagagatcgagatccggaggccgcgagtgggagcgccaccaccagcgactgcggcaatggcgggcacggtgacggtcccggggtcgtcgaccccctccacgccgctgctcaaggacgagctcgacatcgtgatcccgacgatccgcaacctcgacttcctggagatgtggcggcccttcttccagccctaccacctcatcatcgtgcaggacggcgacccgaccaagaccatcaaggtgcccgagggcttcgacta

SEQ ID NO: 2752 - DNA, 285 bp, Zea mays
aagagttcactagagaagcatttgacggaggagccatgtctgaggagaagcaccaccaccacctgttccaccaccgcaatgcagacgaagaggaaggcgcctccggcgaggtcgactacgagaagaaggagaagcaccacaagcacatggagcagctcggccagctcggcgccatcgccgccggcgcgtacgctctgcacgagaagcacaaggccaagaaggacccggagaacgagcacggccaccgggtacaagaggatgtggccgccgtcgccgccgtgggct

SEQ ID NO: 2753 - DNA, 291 bp, Zea mays
gtcatcgggcacaagcgcgaggccgagtcccagccgtgcggcagcgtcggcgtgctgggcatcgcctggtccttcggcggcatgatcttcgtgctcgtctactgcatcgccggcatctccggcggccacattaacccggcggtcaccttcggcctgctgctggcgcgcaagctgtcgctggtgcgcgccgcgctctacgtggtcgcgcagtgcctgggcgccatgtgcggcgccggcctcgtcaaggccttccacggcgcccactggtaccttcgctacggcggcggagca

SEQ ID NO: 2754 - DNA, 282 bp, Zea mays
ggaccggtccaaggacatcatcatctccggcggggagaacatcagcaccatcgatgtggaggcggcgctgttcgcgcacccggccgtggcggatgccgcagtggtggggcggcccgacgagtactggggcgagacgccgtgcgcattcgtgacgctcagggagggcgcggccggcagcgtgcgcgccgaggaggtggtggcgttctgccaggcgcgcctgccgcggtacatggcgccccggacggtgtgttcgtggccgagctgcccaagacagccacgggg

SEQ ID NO: 2755 - DNA, 293 bp, Zea mays
cagagcgccagccaagtcttgcggtcgcgaagagcaacgcaacaagatggtgaagctcgcattcggaagcgtcggcgactccttcagcgtcacctccatcaaggcctacgtggcggagttcatcgccaccctcctcttcgtcttcgccggcgtgggttccgccatcgccttcgggcaactgacgaatggcggcgcgctggaccctgcgggactggtggcgatcgcggtggcgcacgcgctggccctcttcgtgggcgtctccgtggccgcgaacacctccggcggccacctga

SEQ ID NO: 2756 - DNA, 288 bp, Zea mays
tgtgaattcaactgtaccgattgctgctgaggttttcaagaaggctgggacatatgatgagaagaagttgtttggcgtgaccacccttgatgttgttcgtgctaagactttctatgctgggaaggctaatttaccagttaccgatgtgaatgtccctgttgttggtggtcatgcgggtatcactatcctgccgttgttctcacaggccacccctgcaaccaacgcattgtctgatgaagacatcaaggctctcaccaagaggacacaggatggtggaactgaagttgt

SEQ ID NO: 2757 - DNA, 291 bp, Zea mays
ctcccgtctccgtcgtctcgtctccgctcctcacctcgccagccatgggcaagatcaagatcggaatcaacggtttcggaaggatcggcaggctcgtggccagggtcgccctgcagagcgaggatgtcgagctcgtcgccgtcaacgaccccttcatcaccacggattacatgacgtacatgttcaagtacgacaccgtgcacggccaatggaagcacagcgacatcgccctcaaggactccaagacgcttctcttcggcgagaagccggtcaccgtctttggcatcagga

SEQ ID NO: 2758 - DNA, 262 bp, Zea mays
cgaacccacaggacgtgaagaggatgcgacggatggtgtcgaaccgtgagtctgcttgacggtccaggaagaggaagcaagcccacctagctgaccttgagacacaggtcgaccagctgcgaggcgagaacgcgtcgctcttcaagcagctgacggacgccaaccagcagttcacgaccgcggtcacggacaacaggatcctcaagtcggacgtggaggccctcagagtcaaggtgaagctggcggaggacatggtggcgcg

SEQ ID NO: 2759 - DNA, 285 bp, Zea mays
gcagaacctggactacgcgtgctcccaggtgagctgcgccgtgatccagaagggcgggccgtgctactacccggacagccccgtgtcccgcgccgccgtcgccatgaacctctactacgcctacagcggcaggcacccctggaactgctacttcaacaactccgcgctcgtcgtgcagtccgacccaagctatggctcctgcacatactactgaggaggagtgtgaggaggagtggagagacgaggagaggagagagatccattcgtgcctggcggtggcggctc

SEQ ID NO: 2760 - DNA, 284 bp, Zea mays
agcaaacatgcccctgaagatatgcttccctgcaatggaagatgatgaatggcgcattattactggcagtgatcctaaaaataccccatggtcatatcataatggtggatcttggccaaccttattgtggcagttcacattggcctgcataaaaatgggcagaccagaattggcccggagagccattgctgtggccgaggagagactctcagatgacaagtggccagaatactatgacacccggtctgggaggttcgtagggaagcaatcccgatcttatcaga

SEQ ID NO: 2761 - DNA, 285 bp, Zea mays
ctcccgtctccgtcgtctcgtctccgctcctcacctcgccagccatgggcaagatcaagatcggaatcaacggtttcggaaggatcggcaggctcgtggccagggtcgccctgcagagcgaggatgtcgagctcgtcgccgtcaacgaccccttcatcaccacggattacatgacgtacatgttcaagtacgacaccgtgcacggccaatggaagcacagcgacatcgccctcaaggactccaagacgcttctcttcggcgagaagccggtcaccgtctttggca

SEQ ID NO: 2762 - DNA, 285 bp, Zea mays
gggcgtccaggtcctagggctcaccaccatcttcggaaactgcaccacagagcatgccacacgcaacgccttgatcctgtgcgagaaggcaagccatctagaggtcccagtagctgagggcagccatgagcctctcaagggaggaaagccgcacgttgctgacttcgttcatggacctgatggcctcgggaacgtagatcttcctgatcccactatcaagaaagtggaggaaagtgctaccgacttcttggttgataaggtctcgcgatttcctggagaggtctc

SEQ ID NO: 2763 - DNA, 285 bp, Zea mays
tcgagcctcactcgatccatcgcctcgccgcagcacacacgaggccggcggcgccatggccatgaagctggacatgtccgcgctcgagaccaacttcgccaacctgaccgcctccgccggcgacgacacgtacttctccgccgaggcccccgacgtgccgtccatggtgctccccatctgcgacgacttcgacggcttccaggcggccaccaaggatatggtgaagaataagaaggggacgaccacgcttgccttcatcttcgacaagggcgtcatcgtcgccgc

SEQ ID NO: 2764 - DNA, 287 bp, Zea mays
aaggtagcgggcgcggaggaagatggggctcgcgttcgggaagctcttcacccggctcttcgccaagaaggagatgcggattcttatggtcggtctcgacgccgccggtaaaaccaccatcctctacaagctcaagctcggcgagatcgtcacaaccatccccaccatcggtttcaatgttgaaactgttgagtacaagaacattagcttcacggtctgggatgtcgggggtcaggacaagatcagacctctctggaggcattacttccagaacacacagggtctta

SEQ ID NO: 2765 - DNA, 285 bp, Zea mays
cacaaacaaagttccacatcatgcgattcgggcgcaaggttgaggatcctgacatgttagaaaggatacggctaaccatcatcaacaacctgctccagtatcatcctgaatcaagtgagaagttggcaatgggtgaattttttgggataaaacctcctgtgaagaaggttgatatcgatattgcaacacatatagttgttgaagacgacgggccaaaaagaagcatgctttacatagagacagccgatcggcctggcctacttcttgagataatcaagatcatcg

SEQ ID NO: 2766 - DNA, 284 bp, Zea mays
catggtggtggcgctttctccggcaaggacccaaccaaggttgaccgcagcggagcctaatgtcgcgaggcaggctgccaagagcatcgtcgccagcggccttgctcgccgcgccatcgtccaggtgtcttacgccatcggcgtgcccgagcctctctccgtgttcgtcgacacgtacggcaccggcgcgatccccgacaaggagatcctcaagattgtcaaggagaacttcgatttcaggcctggcatgatcatcatcaaccttgacctcaagaaaggcggca

SEQ ID NO: 2767 - DNA, 281 bp, Zea mays
cgcaccgcaaacgcgaaaccctagcctcgagctctatctccggccacagctggtcaggttagcgacgaaggatgagcaggcgctggagccgcacgatctacgtcgggaacctccccggcgacatccgggagagggaggtggaggatctgttctacaagtatggtaaaattgttgacattgacctgaaggtccccccaagaccacctggttatgcttttgttgagtttgaagatcctcgtgatgctgaggaggcaattgctggacgggatggatacaacttt

SEQ ID NO: 2768 - DNA, 281 bp, Zea mays
agcatcgatccgccattgctcaccgcacaagtgcacgctcacctgtcacctcacacacgcagctaagtagctaacgccggaggtagaacaagaaaaagctcgacatggccgaggagaagaagcagggcctgcagctgctggacttctgggtgagcccattcgggcagcgctgccgcatcgcgatggacgagaagggcctggcctacgagtacctggagcaggacctggggaacaagagcgagctgctcctccgcgccaacccggtgcataagaagatcccc

SEQ ID NO: 2769 - DNA, 276 bp, Zea mays
ggcggcggcaaggtgatgggcacgtatgggtactgtgcgccggagtacttgcggacagggaagctcagcgtcaagtcggacgtctatagctttggggtgctactgctggagctcatcaccggccgtcgagccatcgacgccagccggccggatggcgagcaaagcctggtgggatgggcggcagggatgtttggtgactccacgaggttccatgagttgctggaccctcggctggtgatggcgattcgaggacggcctacagcatcacagctgaag

SEQ ID NO: 2770 - DNA, 276 bp, Zea mays
tttgcttggacacaaacaaggttccatctgcctgtctggcttggatttggtgcagcgataaagcacatcatgcagaaggacatcaggaacatccatatactgagagaaatgtacaatgagtggccattcttcagggtcacccttgatttgcttgagatggttttcgcgaagggagacccgggaatcgcagctgtgtacgacaaattgctagtggctgatgatttgcaatccttcggcgagcaactgaggaagaactatgaggagacaaaagagcta

SEQ ID NO: 2771 - DNA, 280 bp, Zea mays
actacgaggcaggtgcccgctttgccaagtggcgcgctgttctcaagattggccctaatgagccatcacagcttgccatcgacctgaacgctcagggtctggctcgctatgccatcatctgccaggagaatggtctggtgccaattgttgagcctgagatccttgttgatggccctcatgacattgatcgctgcgcttacgtcactgagaccgtccttgctgcctgctacaaggcgctcaacgagcaccatgtcctcctggagggtaccctcctgaagcc

SEQ ID NO: 2772 - DNA, 279 bp, Zea mays
tgagaagtttactgacctcatggttaaagacgagaagacaggcacatgctaccgtgctgaccacttgttgaaagatttttgcaaggagaagcttgagaaagaccttgccttgccccaagagaaggctgatgaatttaagcgtattcttgctattttggatgacctctcagcagaggaacttggtgcaaagattaaggaatacggcattgttgcccctgatacaaagaatccactttctgatccctacccattcaatcttatgttccagacatctattgg

SEQ ID NO: 2773 - DNA, 280 bp, Zea mays
cttaattattgccaggacaggagaaacaaacaaagatgaggcctcagctgatactcgtcggcactctggctgttctcgccatcctcgcagctctcggcgaaggctcgtcgtcctggccgtgctgcaacaactgcggtgcttgcaacaggaagcagccgcctgagtgccagtgcaatgacgtgtcggtgaacgggtgccatccggagtgcatgaactgcgtcaaggtcggtgcaggaattcgtcccggcatgggccccggccccgtcgtcacctaccgctg

SEQ ID NO: 2774 - DNA, 279 bp, Zea mays
ggtaagcaaagcaaagcaacaatggaagatgaatagtaatacgtgcagagcgtccttaatttgctcctcgcgctcgccggcacctcgtcggcgcactgtccacgggcttctactcctactcgtgccccggcgtgtacggcgccgtcaagtcggtgatgcagtccgccatcgccagggagaagcgcatgggggcctccatcctccgcctcttcttccacgactgcttcgtccagggctgcgacgcgtcgctgctgctggacgacacgcccagcttccagg

SEQ ID NO: 2775 - DNA, 273 bp, Zea mays
agccgttgctcgacaagaatggtggtatccagattctaacctcgcatacccttcagccggtgccggttgccattggaggccctggtcttcaccccggagtgaaattccggaacgacattcaaatccctgggctcgccaatgtagccgcaactgtgatgaacctccatggatttgaggcccctgctgactacgagcaaaccctaattgaagtggctgacaactaaatactggccagctatgtccaattttggttctatagttttgagaagggat

SEQ ID NO: 2776 - DNA, 273 bp, Zea mays
gcaaaaccatcagatctagcagaactctctcgacctcatcggcgttggcggacgcgtgttgaccggagatggcgccgagcgggtggaggaggagcgcggcggcgcgggtcgcctggcgcccggccacggtttgcctgtggctcgcgctcgccgccgccgcactgacgctcgcccaggctaagaaggacctgacggaggttacccacaaggtctacttcgacatcgagatcgacggcaagcccgcaggccggattgtcatggggctttttggga

SEQ ID NO: 2777 - DNA, 274 bp, Zea mays
gcatcagacaatgtctactgtacacttctagcccacagtgctatacatggtgcaatggcggggtacagcttcactgttgggatggtcaacggaagacatacctatatacctttctacagggtgacatccacaaggaacaaggttaaagtcacggacaggatatgggcaaggcttctgtcgtccaccaaccagccaagtttcctgagtcagaaggatatcgacgaagcgagtgaggcggataggctggcaaacaggccaccactgccaacgggtg

SEQ ID NO: 2778 - DNA, 273 bp, Zea mays
cccatttcttgtgtcagtctccctctccctctctccgatcctctctactagcagagaggcaagttcaatcttctagctagcagcatcggagaaggcagagctcgactgacacaatggcgggaggccagctcaacgtgctgaccacactcgaccaggccaagacacaatggtaccatttcatggcgatcgtcatcgccggcatggggttcttcaccgacgcatacgatttgttctgtatcgcgctcgtgaccaagctcctcggccgcatctact

SEQ ID NO: 2779 - DNA, 271 bp, Zea mays
cggctcgagatctcctcgcattttccttgcaaccgattgcctatccccctcccaacccaagaccgatggcgcccaaggccgagaagaagcccgcggcgaagaagccggcggaggaggagcccgcggcggagaagacgaccgccgggaagaagcccaaggcggagaagcgggtccccgcgggcaagtccgccggcaaggagggcggcgagggcaagcgtggcaagaagaagggcaagaagagcgtggagacgtacaagatctacatcttcaa

SEQ ID NO: 2780 - DNA, 269 bp, Zea mays
caggtcattccaactgccaggagggtcatttatgcttctcagctcacagccaagccaaggctgctggaaccagtttacctggtggagatccaggccccagaaaatgcactgggtggcatatacggtgttctgaaccagaagagaggacatgtattcgaggagatgcaaaggcctggtaccccgctctacaacatcaaggctttcctccctgtcatcgagtcctttgggttctcaagccagctgagggctgcaacctctggtcaggcgtt

SEQ ID NO: 2781 - DNA, 267 bp, Zea mays
caagaagagggaagagcaccaaggaccttcggcgcccgttcaggatccacatcttcccgagcgagttcttggttgacctcttcctcttcggaccacctccaaggctcttggtgtagcttgccactctcaccaatcaagttttcatgtctgatctcgacattcagatcccaactgccttcgatcccttcgctgaggccaatgctggggactctggtgcggcacagggtcaaaggactacgtacacgtgcgcatccagcagcgtaatgg

SEQ ID NO: 2782 - DNA, 264 bp, Zea mays
cccatctctggttttgagggcgacaacatgattgagaggtccaccaaccttgactggtacaaaggcccgaccctgcttgaggctcttgaccagatcaccgagcccaagagaccttcggacaagcccctgcgtctccccctgcaggatgtgtacaagattggtggtattggaactgtaccggttggtcgtgtggagactggtgtcatcaagcctggtatggttgtcaccttcggtccaactggcctgactactgaggtgaagtct

SEQ ID NO: 2783 - DNA, 266 bp, Zea mays
ggcgtccatgaaccaggttgccgggaacccgatgcgtctctacgatctgccttccaagctgctctgccgcgtgctcaacgtcgagctgaaggcggagaccgacaccgacgaggtgtacgcgcagatcatgctcatgccggagcccgagcaaaacgatgtggctgccgagaagacgagctctgggtctgctgcgccaccgaggccagcggtcaggtcattctgcaagacgctcaccgcctccgacaccagcacacacggcggcttct

SEQ ID NO: 2784 - DNA, 265 bp, Zea mays
accctagccgccatatctcacgatccactcgagcaccaagccgagggaaggtgaggagcgatggcgcgcggcgtggtgtcggcgaagggcggcgcggtcgcgggcaagaagaaggggtcggtttccttcacgatcgactgcaccaagccagtggaggacaagatcatggaggtcgcctcgctcgagaagttcctgcaggagcgcatcaaggtcgccggcggcaaggctggcaacctcggcgactccgtcaccatctctcgcgaga

SEQ ID NO: 2785 - DNA, 280 bp, Zea mays
atagcctgcagccttccatccacgaactcccgttctccatttccagccatggcggtgtcgatcgagctcaccaaggagtacggctacgtcgtgctggtgctggtggcctatgtcttcctcaacctttggatgggcttccaggtcggcaaggcccgcagaaagtacaaggtgttctaccccaccatgtacgccatcgagtcggagaacaaggacgccaagctcttcaactgcgtgcagagggggcaccagaactctctagagtggatgcccgttttcttcg

SEQ ID NO: 2786 - DNA, 224 bp, Zea mays
ggacttgcagccttggattgctagagatgacgaacaaggtcagaagatgtggagagtcaaccagcgtatagtgaagcttatagctgagcttatgaggaaccatgacagccctgaagcgttggtgatactcgctagtgcctccgaccttctacttcgtgctaccgatggaatgctcgtcgatggtgaagcttgtactttgccacagcttgagcttccggaaatga

SEQ ID NO: 2787 - DNA, 282 bp, Zea mays
caccctgaacgtgtgccaggcctacacgctgaagcggatacgtgacccgagcttccaggtgagcccgcagccgccactgtccaaggagttcaccgacgagagtcagccggcggagctggtgcagctgaacgagcagagcgagtacgccccgggcctggaggacacgctgatcctgaccatgaagggcatcgctgccggcatgcagaacaccggctaggccaagatacatactcggtttgcgaataacccgtctcgcatgagatggtaggcgatatgtgtagc

SEQ ID NO: 2788 - DNA, 281 bp, Zea mays
ggccgatacattgagcatgatccagggagggttcaccggtgggagcaccacttctgaaactagctgcgaagctgttcgacagtcgtgtgttgcgctggttgagagactgaagcccatcaaggagaatctggaagctgaggcaggcacagtggaatggagttccttgattgctcaggcaagtatggcgagtgtgaacttatcggcacatgcatactggaccccagatccaactttcagaagctatttaaactacggagctggcattagtgaggtggaaattg

SEQ ID NO: 2789 - DNA, 271 bp, Zea mays
tcgagcaacacactgaggccacatgtgccagcttcatgtgatccggagtggagaaggctcatggagcagtgctgggctccagatccggcacagcgcccagcgttcacagagatcgctggacggcttcgctccatgtcagttgcagcaaatcaggcgaaggcaaccaaataagatacaggtggagtactgcctttcaacccccaatccgttgggggttctcttctcctttttccccttgagactggagagtaatacatatacatgcatgtta

SEQ ID NO: 2790 - DNA, 276 bp, Zea mays
tgggaggcgaagatgatcgaggtggtgctgaacgaccgcctggggaagaaggtgcgggtgaagtgcaacgaggacgacaccatcggcgactcaagaagctggtggcggcgcagacggggacgcgccccgagaagatccgcatccagaagtggtacaacatctacaaggaccacatcacgctcaaggactacgagatccacgacgggatggggctcgagctctactacaactaggcgccctgaccccaaccgtgccctgatgttaatccgaattctg

SEQ ID NO: 2791 - DNA, 262 bp, Zea mays
gaaggttgctgctctccacttgggcaagcttggtgccaagctgaccaagctcaccaagtctcaggccgactacatcagcgtgccgatcgagggtccctacaagcctgcccactaccggtactaggcacacggcttgcagctcactcgggccgttgtgtgctatgaagttcgctacactggcctgtcagttatcttttgcatgcatatgcattatcatatacgcagtcgcgtagtaggttttcttatggttatcgcttgagct

SEQ ID NO: 2792 - DNA, 268 bp, Zea mays
cccgcggcagccgcaaacgccttcgccgtcgcgtcccgctcctccgcccgcccgacgcgacccctggacctggagagagaggtcggcatggctgccgcggtggtcgacgacgctgggatggacgccgtccagaagcgcctcatgttcgaagacgaatgcattttggtggacgagcaggacaatgttgttggccatgagtcaaagtacaactgccatttgatggaaaagattgattctgagaatctgctacatagggcatttagtgtgt

SEQ ID NO: 2793 - DNA, 267 bp, Zea mays
ggcatgagtgaattgtcacttgctgatcgggcgaccatcgcaaatatgtctcccgaatatggcgcaactatgggtttcttcccagttgatggaaagacgctggactatttgaagcttactggccgaagtgatgatacagtggccatggttgagtcctacctgcgtgcgaataagatgttcgttgatcacagccaggctgaagctgaaagagtatattcttcttatctagaactgaacctggaagaggtagaaccatgtctatcggga

SEQ ID NO: 2794 - DNA, 252 bp, Zea mays
gtgttgttcggagcgggcagcagcacacagccccatcccaatcctagtcgatcttcttcccctcctcaaggaagaaaagaagctgaaccatggggaagagaaagtcagctgctaagccacctcctaagaagcggatggacaagcttgacactgtcttttcctgcccattctgcaaccacgggagtagtgttgagtgccgaattgacatgaagaatctgattggcgagcatcttgtagaaccggccaggaaaa

SEQ ID NO: 2795 - DNA, 267 bp, Zea mays
cttgtcatttcaagaatcaagctgctgcgcaacaggagggagttacaactaataaatatgcgcaaagaaatggttcaatatcttcagactggccaggaatcaatcgcgaggattcgagtggagcacattattcgggagcaaaatatattggctgcctatgagatcgttgagcttttctgtgaatttgttctggcaagagtccctattgttgaggtccaaaaggaatgccccttagaactgcgtgaagccattgctagtataatcttt

SEQ ID NO: 2796 - DNA, 265 bp, Zea mays
attacatggctccagaggtgctaaagagaaactatggcccagaggttgatgtttggagtgcaggagtgattctgtacattcttctttgtggtgtccccccattctgggcagaaacggaacagggtgttgctcaggcaatcattcgatctgtcattgatttcaaaagagatccatggccaagggtgtctgataacgccaaagaccttgtcagagaaatgctgaatccggacccaaaacgacgattgacagctcaccaagtgcttgg

SEQ ID NO: 2797 - DNA, 263 bp, Zea mays
ccggaacactgtggttaaagaaaatccagcagcattgcttgcattatgttggtattgggcatcagaagggataggcaataaggatatggttgtacttccttacaaggatagtttgttgcttttgagtagatatttgcaacaacttgtcatggaatctcttgggaaagaatttgatctggatggcaaccgggtaaatcaagggctatctgtatatggaaacaaaggaagcactgaccagcacgcttacattcagcagctgagag

SEQ ID NO: 2798 - DNA, 265 bp, Zea mays
cgtttgcctcttctccctcttgccggtcccgaataaagagcagcagcgcaagaggtcggtagagcgagaagaaggcaatggcggccgagagcttccttttcacctcggagtccgtgaacgaggggcaccccgacaagctgtgcgaccaggtgtcggacgccgtgcttgacgcatgcctcgcgcaggaccccgacagcaaggtggcctgcgagacctgcaccaagaccaacatggtgatggtgttcggcgatatcacgaccaaggc

SEQ ID NO: 2799 - DNA, 262 bp, Zea mays
aagtatttgacgcctgctgttgccggcttcctcatgcagaaggaacttgactaccttgttggagctgttgccaacccaaagaagccatttgccgctattgttggtggatccaaggtctcaagtaagattggtgtcattgagtccttgctggcgaaggtcgatatcctcatccttggtggtggtatgatctacacattttacaaggcacaaggatattctgttggaaaatctctcgtggaagaggataaacttgagctcgcaa

SEQ ID NO: 2800 - DNA, 264 bp, Zea mays
cttcggcgccttcgtgggcggcaacatcaccctgttccgagggctcctgtactgggtggcgcactgctggggtccaccgtggcgtgcttcctgctccgcttctcgacgggcgggcaggccacgggcaccttcgggctgacgggcgtgtcggtgtgggaggcgctggtgctggagatcgtgatgaccttcgggctggtgtacacggtgtacgcgacggcggtggacccgaagaagggcagcctgggcaccatcgcccccattgcc

SEQ ID NO: 2801 - DNA, 249 bp, Zea mays
gcggggtgagcatcgaggactggtggcgcaacgagcagttctgggtcatcggcggcgtgtccgcgcatctcttcgccgtgttccagggcttcctcaaggtgctgggcggcgtggacaccagcttcaccgtcacctccaaggcggccggcgacgaggccgacgccttcggggacctctacctcttcaagtggaccaccctgctggtgccccccaccacgctcatcatcatcaacatggtgggcatcgtgg

SEQ ID NO: 2802 - DNA, 254 bp, Zea mays
  unsure (1)..(254): unsure at all n locations
atcgcaggaaccctagcgccgccgcacccgcacgaatgggtatcgacctcgtcgccggtgggaggaataagaagaccaagcgcactgcgcccaagtctgacgatgtctacctcaagctcctcgtcaagctctaccgtttcttggtcaggaggaccaagagcaatttcaacgctgtcattctcaagaggcttttcatgagtanaaccaaccgaccaccaatctccatgcgccgccttgtcaagtttatggaagga

SEQ ID NO: 2803 - DNA, 294 bp, Zea mays
  unsure (1)..(294): unsure at all n locations
cggaaactgccaaggagaagccatctatcggaacggtcgtagcggttggcccaggccccctggacgaggatggcgagaggctcgcgctgtccgtctccgcggggagcactgtcctgtactccaagtacgccggcagcgagttcaagggcgccgacggcacgaactacatcgtgctgagggcgtcggatctgatggccgttctctcctgaactgggcttgggctggaggacgaacgaggtgcaggtgcaggagcaggcttagcaataccgtaggattcctcgcggctttcncgtc

SEQ ID NO: 2804 - DNA, 99 bp, Zea mays
tgatttatgatggagatgggttcaactacatcaaagaatcttttgaagatggtactcttcaccttattgggttgttgagtgatggtggtagtcactccc

SEQ ID NO: 2805 - DNA, 248 bp, Zea mays
atcgcaggaaccctagcgccgccgcacccgcagaatgggtatcgacctcgtcgccggtgggaggaataagaagaccaagcgcactgcgcccaagtctgacgatgtctacctcaagctcctcgtcaagctctaccgtttcttggtcaggaggaccaagagcaatttcaacgctgtcattctcaagaggcttttcatgagtaaaaccaaccgaccaccaatctccatgcgccgccttgtcaagtttatgg

SEQ ID NO: 2806 - DNA, 283 bp, Zea mays
cggaaactgccaaggagaagccatctatcggaacggtcgtagcggttggcccaggccccctggacgaggatggcgagaggctcgcgctgtccgtctccgcggggagcactgtcctgtactccaagtacgccggcagcgagttcaagggcgccgacggcacgaactacatcgtgctgagggcgtcggatctgatggccgttctctcctgaactgggcttgggctggaggacgaacgaggtgcaggtgcaggagcaggcttagcaataccgtaggattcctcgcg

SEQ ID NO: 2807 - DNA, 229 bp, Zea mays
tgatttatgatggagatgggttcaactacatcaaagaatcttttgaaaatggtactcttcaccttattgggttgttgagtgatggtggtgtccactcccgccttgaccaactgcagttacttctgaaaggtgtcagtgagagaggagcaaaaaaaattcgtgtgcacatccttaccgatgggcgtgacgttttggatggcagcagtgttggtttcgtggacaccctaga

SEQ ID NO: 2808 - DNA, 290 bp, Zea mays
cggctcgaggcgcttcaggggagcctggtgaccgggtgcagtttacggagttcatacagaagaacctccacctgtaccagttccgcaacaccatcccgctgtcaaccgccgctgccgccaacttcacacgcggcgagctcgccacagcccttcgtaagaatccatacatggtcaatgttattctcggtggttacgataaggatgttggcgcctcactgtactacatcgactacattgcgaccttgcacaagatcgacaagggcgcttttgggtacggatcgtatttctgc

SEQ ID NO: 2809 - DNA, 283 bp, Zea mays
ccggggcggaagaagagagagaagacgtctctctcctctcggcgtccccgttccccaacctctcgtctgctgcctgcctgcctgcaaaaaggagtttgtcatggcgtctaagcgcatcctcaaggagctgaaggacctgcagaaagacccccccacatcatgcagtgcaggtcctgctggtgaggacatgtttcattggcaagcaacaattatgggaccacctgacagtccctatgctggtggtgttttcttagtgaacattcatttcccgccagattacccc

SEQ ID NO: 2810 - DNA, 282 bp, Zea mays
atcaaaagcttgatcagctcggtgcctacaaaacctcaacaaccaagtttcatgtctgatctcgacgtccagcttccatctgcctttgatccgtttgctgaggcaaatgctgaggactctggtgctggtcctggaacgaaggattatgtgcatgtgcgcatccagcagcgcaacggcagaaagagtctgactacagtccagggtctgaagaaagagttcagctataacaagatcctcaaggatctgaagaaggaattctgctgcaatggtactgtagttcag

SEQ ID NO: 2811 - DNA, 240 bp, Zea mays
aattgctgtagttggaatggtcttgtattcatacttctgcacagtggagacccagcaaaaaaatgttgaagtctccccacaacaggtgaaagaaagcgaggcaggccctttgatcgcagactctatgagcaaagttgaaaacgggggtggtggtgttgatgacgagcctttgaaggtacccatgtggagctcaaagtactcgcgggagtgaaaaggtcacgatggcatggcaccatacag

SEQ ID NO: 2812 - DNA, 177 bp, Zea mays
tggagtagtcgacgcgccgtcactgaatcctcagatcacggctagccgtaatcacgccactctgctgactcccggcgagcagtgtaacattttccttcagccatgggcaaggagaagactcacatcaacattgtggtcattggacatgtcgactctggcaagtcgaccaccactggc

SEQ ID NO: 2813 - DNA, 249 bp, Zea mays
  unsure (1)..(249): unsure at all n locations
atgatcttctcgttaacaacngccacaggggtcgcaaggccatcaatgagaagacctgcaatgctctcctcttgaacgtgaaccaaatcgggtctgtgaccgagagtatcgaagctgtcaggatgtcaagcgcgcggatcgggagtgatggcaagcacangagtggcgagacagaggacaccttcattgctgacctctcagttggcctgtctacgggccagatcaagacgggagctccttgcggtctga

SEQ ID NO: 2814 - DNA, 177 bp, Zea mays
ccacaaccacacgttcacggtagcgagagcgtatcgtcgtcggcggtgaagatggtgtcgctgaagctgcagaagcggctcgccgctagcgtcctcaagtgtgggaaaggaaagtctggcttgacccaatgaagtcagcgagatctcatggctaactcccgcagaacatccgaagtt

SEQ ID NO: 2815 - DNA, 179 bp, Zea mays
  unsure (1)..(179): unsure at all n locations
tagcgggacgttcgacgtgtcgtcgaggaccggcggtccattcggcacgatgaagcatcagtcggaattggctcacggcgctaacgcggggctggacatcgcggtgcggctgctcgnagccatcaangaggagttcccaatcctctcttacgccgatttctaacagctcgcgggagttg

SEQ ID NO: 2816 - DNA, 229 bp, Zea mays
  unsure (1)..(229): unsure at all n locations
tctgagacgaagaaggcggcgcagttcgaggcggcgggcgagtctggcgaggccgccacggctgcagctgcggtgacagctgcaagtgcagcccctgcaactgctgatcctgctgcgttgtttcgtttgcaggatgcatggatgtcaccttttntttactgtctgctttgtgcttgtggcgtgtcaagaatacangatcgcaccatcgtctggtctgactctggctctc

SEQ ID NO: 2817 - DNA, 208 bp, Zea mays
  unsure (1)..(208): unsure at all n locations
acctgaggatgagaggtataagcatctgcatggaagatatgcagtccacccttcaatggacgagaactcagaataatctgtgacgcggagttagttgatgccactttcggtactgnggctgtcaagattactcctgctcatgatgcaaatgactttgaggttgganagcgtcataatcttgaattcatcaacatattcacagatgatg

SEQ ID NO: 2818 - DNA, 286 bp, Zea mays
gcaaccctccagcaaccctcaggtgttcttggaccttcacatcaaatcatcaacatggccaaccccagagtcgaagagctccccgacgaggagatccccaaggccggtgtcgaggatgctggcagcgactctgagtctgaggcaggcgaggagcccaccattcctggtggcgctgccgttaccattcactcgcgcaacgaaaagaaagctcgtaaggctattggaaagctcggattgaagcacgttcctggtattactcgtgtcactctccgccgacctaagaaca

SEQ ID NO: 2819 - DNA, 281 bp, Zea mays
tgattgacaatgttgtccttattgtaactgggacactgcatgagagagatgttaacgaacttttggagaaatgccacccattgggcatgtttgacagcattgcatcacttgctgttgctcaaaacatgcgtgagctttatagattggttctagtcgatacaccactggccccttacttctcagagtgcattacatctgaggatttggatgacatgaatattgagattatgaggaacactctctacaaagcatatcttgaggacttctacaaattttgccag

SEQ ID NO: 2820 - DNA, 284 bp, Zea mays
gttgagatgcaccatgaggctctccaggaggcccttcccggtgacaatgttggcttcaacgtgaagaatgttgctgtgaaggatctgaagcgtgggtatgtggcctccaactccaaggatgaccctgccaaggaggctgctagctttacctcccaggtcatcatcatgaaccaccctggccagattggcaatggctatgccccagttctggactgccacacctcacacattgctgtcaagtttgctgagctcgttaccaagattgataggcgatccggcaagga

SEQ ID NO: 2821 - DNA, 284 bp, Zea mays
agacgtgatcctattgccatcacaaattcattggagcgataccaggaaattgacccgactttctctgggacacgtgaatacaagcttttagctgatcttgctgcatctatggatgaaggggatgttgccaaattcactgatgcaatcaaagaatttgatagcatgacacgtctggatccttggaaaaccaccctgctgctcagggcgaagaacgagctgaagaaaaaggaggacgatgaggacgaccttacataagtattgtagtaaaaagaaatggtacgata

SEQ ID NO: 2822 - DNA, 260 bp, Zea mays
tggcaattgttctactccagtcagcgccgctttctgataagcttaacgtgtttttcttatagcttttctcaaacggcatgaaagaatcggatcagagacatgcaacccttagaattactgactcagaggaaactgccctcatggagcttttaagctttatgtatagtggaaagttggcaactactgagcccactcttctgctggatatcttgatggctgccgacaaatttgacgttgtttcatgcatgaggtactgcagc

SEQ ID NO: 2823 - DNA, 282 bp, Zea mays
  unsure (1)..(282): unsure at all n locations
cgcggtncttctcggggtccttcaggtcgcccaagatcgacgtcgtcatcgacatgggaaaccccttcctcaaccgcaccgtcgacggcttcctcaagatcggcgccgtcgggcctgcaaggtggctgccgaggagaccttcgagtgcctccacaggggggatgtttcgaagcacaaggttgagcatgccctgaggaagatgtgcaaggagggcgcatattggggcactgttgctggagtttatgtgggcatggtgtacggcgtggaaagggtccgtggccg

SEQ ID NO: 2824 - DNA, 256 bp, Zea mays
gccggttcagcgtggagcagatcagggaggtggcggccggcctggaagccagcgggcagcggttcttgtgggtggtccgagccccgcccagcgacgacccggccaagaagttcgagaggccgccggagccggaccttgacgcgctcctcccggaggggttcctggcccggaccaaggataggggtctcgtggtcaggtcgtgggcgccgcagcgggacgtgctggcgcacgcgtccgtgggcggcttcgtgacgca

SEQ ID NO: 2825 - DNA, 279 bp, Zea mays
caggtattagcagtcgaccggttcctcggagcacgatgaagtttgttgctgcctacctgcttgctgtcctcgctgggaacgccagcccctccgctgacgatttgactgccattctggagtcagttggctgtgaagttgacaatgaaaagatggaactcctgctgtcccaactgagcggtaaggacatcaccgagctcattgccgcgggcagggagaagtttgcttcagtcccatgtggtggcggcggtgtcgctgttgcggcagctgcacctgctgctg

SEQ ID NO: 2826 - DNA, 280 bp, Zea mays
caacaaactaataagaagctaggtagctgaatattaagagagcacaaacacaaacgcgagtgcaaaaccaaatggctgcctcgacctacttccttgttgcttttctagcattggtcacttctcatgccattgcttctgatcctagcccgctccaagacttctgtgttgccgacaaagactctccggtcaaggtgaatggatttgtttgcaaggatcccatggctgtgaacgctgacgacttcttcaaggctgcaaaacttgaccagccaagggacaccac

SEQ ID NO: 2827 - DNA, 279 bp, Zea mays
tggcgaggcaaaagcattgcgaccacagacagcgcgcgcttcaaggcctttttttttgagataacaaggaggagaggaggagatggcggtcacgatcacgtgggtgaaggcgaggcagatcttcgacagccgcggcaaccccaccgtcgaggtggacgtgggccttagcgacggcagctacgcgaggggggccgtacccagcggcgcatccactgggatatatgaggccttggagttgagggatggaggatctgattatcttggcaagggtgttcttaa

SEQ ID NO: 2828 - DNA, 280 bp, Zea mays
cggctcgagtgcagggacaacctttcagtttcagccgccattggatggtccaccacaaagagtgttgtccggtgtcttgcattcctttctcacaagtggcccagctggtgtgccatttcaaccacttccggtaccagctgctcttggtttatctgaaagcgacaaacaatgcattcgtgatcgtagctgcataatggcacggcatattttttctgaccaaccagaagaatatatacagagtcaggtcaatactttgctgcattcgcttgatattgacaac

SEQ ID NO: 2829 - DNA, 198 bp, Zea mays
agacaatgcggtcctaggaactgctgctaaggttgtagttaccaaggattcaacaacaatagtgggagatggcactacacaggaggaagtgaacaaaagggtgacacaaatcaagaaccagattgaggctactgaacaagaatatgagagagcataactaaacgagaggatagctaaactctctggtggtgttgctgt

SEQ ID NO: 2830 - DNA, 278 bp, Zea mays
ccccatccaaggccctcccgaagtcccaaaggccgccgccgcccgccagcccaccatggccgcgcagtccttcctcctcgccgccactgccgccgccaggtcccccgcggtcttcgccgctccctattcctccgcacgccctttccactcggtccacttcgtcgccggcccgtggggcgccgccaccgccagggcgctcgtcgtcgcggacgccactaagaaggccgtagccgtcctcaagggcgcgtctgaggtcgagggcgtggtcacgctcacgc

SEQ ID NO: 2831 - DNA, 269 bp, Zea mays
ctgccttctgcagaaaggctcagacatccacggagaggtttgagatgtggggcgatggtctccagaccaggtccttcaccttcatcgacgagtgcgtggagggtgttctgagattgaccaagtcagacttccgcgagccagtgaacatcggaagcgatgagatggtgagcatgaacgagatggctgagatcgtgctgggctttgaggataggaagctgcccatccaccacatccctggcccggaaggggtccgcgggcgcaactctgac

SEQ ID NO: 2832 - DNA, 173 bp, Zea mays
agaaactccaactccattcatagattctcactcagaactgctgcacgtcgcagtgcaggcgtgttgctggcttcgcccagcttctttttttgcctgtgatttgcacgacatttatatttattgaaatcttgcagaatcgcttgacgatgaaagtggtagcatacttttgttgc

SEQ ID NO: 2833 - DNA, 269 bp, Zea mays
gagtacttggattgtgcgatgctttatacatttgtttgttctagcagagtttgagtttatatttctattcttatgtagggcgtcacgagtgtcgtcaattgttacatccttacatccttgtgttcacaatatgatccatcaactctttcttctgcggtctcttatccctgtgttctcatgtccatgtttcctgcttcttgttgcagttaaagcctgaggaggttgctggtatcataaaggactttgatgaacctggtactcttgcacca

SEQ ID NO: 2834 - DNA, 264 bp, Zea mays
ccttcattcacgaatcccttcttccgccttcttcgtcgggccatcctcaccgacgagaagagatctcctcttcggcacgaggaggacagcaggggagaaagatgggggggcgggtggatcacgagtactcttacctgttcaagatggtgctcatcggggacagcggcgtcggcaagtccaatatcctctctcgcttcacgcgcaaccacttctccctcgactccaagtccaccatcggcgtcgagttcgccaccaagtccctac

SEQ ID NO: 2835 - DNA, 272 bp, Zea mays
ccgccaacgtcgcctggcggccgtctgcagctccgcgcctctgctcggaagttggtgaaggtttcttgaagctgagaagatggtgctgaagacagaactctgccgcttcagcgccagaagatttatcctgggaaaggcatccgatttatccgtgctgattctcaggttttcctttttgccaactcaaaatgcaagcgctacttccacaaccgcctgaagcctgcaaagcttacctggacagcaatgtacaggaagcagcacaagaaggatat

SEQ ID NO: 2836 - DNA, 251 bp, Zea mays
cgaggaggtcggtgctgagtttgacgagggtgaggacggcgacgagggtgacgagtactagacgctctactggcgcggcgtcgtcgggcttgtgtgccactgctatcctgtgatctgccctgagtggctcctatcgtgttatgtttctgtcggttcttatctatctgtcgttgtgtggtttacaacttacgttgtaagactttattcccccgctttgctactgggttattaagtttggcgttattgtttta

SEQ ID NO: 2837 - DNA, 167 bp, Zea mays
ttggcttctcctccccctccggttcgggttcgggttcgtgaggttctccggggttcgggttcgtgggtgatcggatcgagatggcggcgtcggatgttgagtaccgctgcttcgtcggcggcctcgcctgggccacggacgaccactcgctccacaacgccttcagc

SEQ ID NO: 2838 - DNA, 290 bp, Zea mays
tgaaaaggcaaaggattttgcagattcattaggaattccctttattgagacaagcgcaaaggaatccatcaacgtggaggaagctttcctgaccatgtcatcagaaatcaagaaaaggatggcaacccaaccaacggtggagaggagacccacagtccatgttcacatgaaaggacagccaatacagcagaagagcagctgctgctcatcatagtcagggctcatagggcacttaaatttggctagtggttagatggacgccgcagatgttgttcacttaagattatact

SEQ ID NO: 2839 - DNA, 291 bp, Zea mays
  unsure (1)..(291): unsure at all n locations
cccggagctgtttcttcgtcgcaggaatgggcaaggacggcatccagtacgcangtggtggacgccttcacggcggacgcttcaagggcaaccccgccgcggtgtgcctcctcgaggacgccgccaaggccgccgacgagcggtggatgcagtccgtcgccgccgagttcaacatctccgagaccgccttcctcctccgggaaaagtcctccgcggccggcgccgtcccgctgttccagctccgatggttcacccccgtcgctgaggtggagctctgcggccacgccacgc

SEQ ID NO: 2840 - DNA, 289 bp, Zea mays
cggaactcgccatgcgatggcaccccgacaagaacactaccaacaagaaggaggcagaaaccaagttcaaggatatctctgttgcatatgaggtccttagcgatcccaagaaacgtgcaatctatgatcagctaggagaagaagggctcaaggggcagccgcccccaggagcaggaggttctggcgcattccccttcttccctggcggggctcattccaccgctccccattttaatcacaggagtgcggatgatatatttaaggagttctttggatcccctggcatggg

SEQ ID NO: 2841 - DNA, 288 bp, Zea mays
tgtgaaacattacaccgaagctctcaggagaaaccccaaggaccccagggtatacagcaacagggctgcctgttacaccaagctaggggcccttcctgaaggtctgaaagatgctgagaagtgcattgagctagatcccacattctccaagggatacacaaggaaaggtgctatccagtttttcatgaaagaatatgacaaagcgctggaaacttatcaagctggcctaaagcatgacccgaaaaaccaggagttacttgatggtgtaaggaggtgtgttgaacagat

SEQ ID NO: 2842 - DNA, 289 bp, Zea mays
accgccacctacgcaacaccagacgctccagcagtccagcactcggagctcgcgcgcccgacggcccaccatgatcatccccaagaagaaccgcaatgagatctgcaagtacctcttcaaggagggcgtgctgtatgccaagaaggactacaacctggcgaacacccacagattgatgtgcccaacctccaggtgatcaagctcatgcagagcttcaagtccaaggagtatgtcagagagaccttctcctggcagtactactactggtacctcaccaacgatggcattg

SEQ ID NO: 2843 - DNA, 278 bp, Zea mays
ttgtctaagcctgaattcagtctgctttaaacggcttccgcggaagaacatatttccatctcttgaattcgtacaacattaaacgtgtgttgggagtcgtatactgttagggtctgtaaacttgtgaactctcggcaaatgccttggtgcaattacgtaattttagccgctgagaagcggatggtaatgagacaagttgatatcaaacagatacatatttaaaagagcgtaccgctaatttagcagggcagtattattgtagtttgatatgtacggct

SEQ ID NO: 2844 - DNA, 278 bp, Zea mays
gctgttccacatctactcgctgaactcggtgctgctggccggcctgcgcgcgggctccaccatcgtgatcatgcgcaagttcgacctgggcgcgctggtggacctggtgcgcaggtacgtgatcaccatcgcgcccttcgtgccgcccatcgtggtggagatcgccaagagcccccgcgtgaccgccggcgacctcgcgtccatccgcatggtcatgtccggcgccgcgcccatgggcaaggagctccaggacgccttcatggccaagattcccaatg

SEQ ID NO: 2845 - DNA, 274 bp, Zea mays
ctcgagccgcgcgaggatggttcacatgagctgcaatctgagtgtggccaccatgggcacatacttgccttgtacactcaaacacgtggtgacttcattgtggttggcgatctgatgaagtcaatttccttgctggtgtataagcatgaggaaagcgcgatcgaagagcgtgctagggattacaatgcaaactggatgactgcagttgagatgcttgatgatgaagtctatgttggggcggagaatggctataacttattcaccgtgcgcaaga

SEQ ID NO: 2846 - DNA, 274 bp, Zea mays
attttatcgcctagtatcccaaaagttcgaggatcctgcagaaggcgaagaagctttggtcggcaagtttaagaaactttatgacgaccttaccactgggttccgcaacctagaagatgaggcacggtgaactgctgtagattttgtgtaagacaataatggctgccaaatgttttataaggtacggaagttgtagattgcgaccatgtatgagaattttccccaccgctactcatctctttgccaccactattttagtcatcagtgctggatg

SEQ ID NO: 2847 - DNA, 272 bp, Zea mays
tgctctcaaggctaaggttgctgaagccatggaggttctccgctcagcccagcatctccagcagagcaatgcctccaccgagcagcagctggctaatctatcactgaatgatggcgtcctctccagctgaatgtttctgatgattcagaaattgctggcaatttttgcttgatacctatctctagaatgcaattactttgtttactttattggaattttaggtgctgctctataattagctgaactagggggtggatttaattgcttgaatg

SEQ ID NO: 2848 - DNA, 269 bp, Zea mays
ctggctccctgcgttgcgtcttgggggagagagagaagtgggagacccgcgagaggctgccgtgtagggactagggaccgtagagtaagcgacacgaaggagggagagggggatggccgggatcgggccgatcagacaggactgggagccggtggttgtgcggaagaaggcacccaccgccgctgccaagaaggatgagaaggccgtcaacgccgcgcgccgctccggcgcggagatcgagaccatgaagaagtacaacgctggtatga

SEQ ID NO: 2849 - DNA, 273 bp, Zea mays
ggaccgccagatctcgcagctgcgggattgcaagttcctgcctgaggcggaggtcaaaacgctatgcgagcaggccaaggcgatcctcatggaggagtggaacgtgcagcccgtgcgctgccccgtcactgtctgcggcgacatccacggccagttctacgacctcatcgagctctttcgcatcggtggcgacgcgcccgacaccaactacctctttatgggcgactacgtcgaccgtggctactactcagtggagactgtgtccttattggt

SEQ ID NO: 2850 - DNA, 272 bp, Zea mays
tgcaaatgagatttattttccgaaaagtacacagttcactcaaagggccttatcctgaagaaccttgtttgattacatcatcaatcttcaaaatcattttgacaacttgagtagcgagcaaaagttgttgcttcttcgagatgaagcattcaaaaacattgctgtctttcatattctttactttcaattcgttacagtccacgccaatgaacggattgttttccagttgttgttgtgctttgatctcagcgagggtggagataggttgcata

SEQ ID NO: 2851 - DNA, 282 bp, Zea mays
ctcccaagacctcctcagacccgagaagcgcactgcgtgccatggacgccaccggcactggagctggagggaaggcgaagaagggagcggccggtcgcaaggccggcgggccgaggaagaagtcggtgacgaggtccgtgaaggccgggctccagttccccgtcggccgcatcgggcgctacctcaagaagggccgctacgcgcacggcgtcggcagcggtgcccccgtctacctcgcggccgtcctggagtacctcgccgctgaggtcctggagctcgccg

SEQ ID NO: 2852 - DNA, 284 bp, Zea mays
  unsure (1)..(284): unsure at all n locations
ctcttctcctcctcgcctcctctccctagcctccacgacgcaagggagggtgacggaaagcgacgcggcgcgagcgagngagggccaaggcgaagaggggaagcaccgcaccaggacccttgttcgccgccgccgccgcctctgatctccgcgaggttgtcaggattcaatatgtcgaccagcacattcgctacttcctgcacgctgttgggcaatgttagaacaacgcaggcctcccagacagcggtgaagagcccttcgtctctaagcttcttcagccaagt

SEQ ID NO: 2853 - DNA, 279 bp, Zea mays
gcgtgaagggcttcgtgtccaacctcgtccacggcggcggcggccatggccatggaagcggctacggccatggccatggaaacggctacggccatgggaatggcggctacggcggcggccacgggtaccctcctcccgccgccgccgggcgtaccctcacccgcacggcgcataccctcacccgcacggcggccacgggtaccctcctcccgccacctaccccgcgcactcggcgcactacgggcacacggggtcgtaccacaccagccacaacagcta

SEQ ID NO: 2854 - DNA, 278 bp, Zea mays
cggatgttgagtaccgctgcttcgtcggcagcctcgcctgggccacggacgaccactccctccacaacgccttcagcacctacggcgatgtcctcgagtccaagattatcctcgatcgggagacgcagaggtcccgcggcttcggcttcgtcaccttctccacggaggaggcgatgcggaacgccatcgagggcatgaacggcaaggagctggacggccgcaacatcaccgtcaacgatgcccagtcccgcggcggccgtggatgcggctgcggcggc

SEQ ID NO: 2855 - DNA, 267 bp, Zea mays
cccggagctgtttcttcgtcgcaggaatgggcaaggacggcatccagtacgcatggtggacgccttcacggcggagcattcaagggcaaccccgccgcggtgtgcctcctcgaggacgccgccaaggccgccgacgagcggtggatgcagtccgtcgccgccgagttcaacatctccgagaccgccttcctcctccgggaaaagtcctccgcggccggcgccgtcccgctgttccagctccgatggttcacccccgtcgctgaggtg

SEQ ID NO: 2856 - DNA, 234 bp, Zea mays
gcagagcaacgtgagctggcccatcgggctgggcatccccacggcactcatgttcctggcatgcgtgctcttcttcgtgggcacgcgcctatacgtgcgggtgacgcccgaggggagccccttcaccagcgtcgtgcaggtgctatcggccgcgctcaagaagcggtcgctgaagcagcccaaggacccgaagcaggacctcttcgacccgccgcacaccagcgccatcgtcac

SEQ ID NO: 2857 - DNA, 77 bp, Zea mays
cgccgccacaacaatatcgcattgacacatcgttcatcggatccagtcttctcccgggatctcctccggctataaat

SEQ ID NO: 2858 - DNA, 284 bp, Zea mays
  unsure (1)..(284): unsure at all n locations
taggaaatggggggagcatgagcttgactacctgctgttcatcgtccgggacgtgaaggtgcagccgaacccagatgaagtcgctgacgtgaagtacgtgaaccgcgacgagctcaaggagctcatccggaaggctgacgctggcgaggacggggtgaagatctccccctggttcaggctggtggtggacaacttcctcatgggctggtgggaccatgtcgagataggcaccctcgncgaagccgtggacatggagaccatccataagctgaaggagtgggggg

SEQ ID NO: 2859 - DNA, 270 bp, Zea mays
gaggacgcagaggagagagggctgatctcgcctggcgccacgacgctggtcgagccgacgagcggcaacatgggcatagccctggcgtacatcgctctggcccgaggctacaggttcgtcgcggtcatgcccgccgagtactcgctcgacaagcagatcctgctgcggtacctgggggcagatttggtgttaaccgatcctgcgcttggcttccagggacagctcgacaagctggagcagctcaggaaagaaatacccaacgcgcacgtt

SEQ ID NO: 2860 - DNA, 277 bp, Zea mays
gcaggccattcttctcgccttactccctcacagaacccagtaaaatatcgccagtcccgccgtcgagatggccccacgccgcctgctcgtcctcgccgtcgtcgccctcgcggccaccgccgccgcggccaactccggcttcgcggactccaacccgatccgccccgtcaccgaccgcgcggcctccgcgctcgagtccacggtcttcgccgcgctcggccgcacccgcgacgcgctccgcttcgcacgcttcgccgtcaggtacggcaagagctac

SEQ ID NO: 2861 - DNA, 273 bp, Zea mays
gttccttctttgttaaggggatatagtgctcctgtccgtctagattctgatctgagtgagggtgacctatttttcttgcttgccagtgactcggatgaatttaacagatgggaagctggccaagttttggcacgtaagttgatgctcagtctcgtagctgatttccagcaacagaaaacactggttctaaatccaaaatttgttgatgggattagaacaattctgtgcaacacaagcttggataaggaattcattgcgaaagaataactttgc

SEQ ID NO: 2862 - DNA, 275 bp, Zea mays
ccacgatggctggactcagggccatcggctacagcttcgattacgatgagtaccacgccttcgtccatggaaggctgccgtacgacaacatcaagcctgaccccattctcaagcacattctcaagaacctgcgcatccgcaaactcatattcaccaacggtgacatggtccacgccgtgagagccctcaagaggctgggcctggaggactgcttcgaggggatcatctgcttcgagaccctgaacccgccctgcccgccgcagggagaccaggag

SEQ ID NO: 2863 - DNA, 187 bp, Zea mays
tgatagctcagatcagtatgcttggctaaaggctgatcttggcaaggttgatagaaagaggacaccctggctcattgtgttgttgcacgtaccatggtacaatagcaattgggctcatcagggtgaaggcgacagtatgatggcttcaatggagcctttgctgtacgctgctcatgtggatatggta

SEQ ID NO: 2864 - DNA, 187 bp, Zea mays
gaactataagtatgctgatgttgagttcggaaggctacaagcaagagatatgctgcagcacttgtggacaggtccgatctcaaatgcagctgttgatgttgttcaagggagtcgatcagttgaagttcggtctgttggagttaccaagggtgctgcaattgatcgtattttaggggagatagttcac

SEQ ID NO: 2865 - DNA, 137 bp, Zea mays
accggtccggcatcagatagcgggggtgcacacacatcgagatccggaggccgcgagtcggagcgccaccaccagcgtctgcagcaattgcttgcaccgtgaccgtccctcggtcgtcgactacctccacgccgctg

SEQ ID NO: 2866 - DNA, 272 bp, Zea mays
ctggactgatcaaggtggaccgtgtgctgtattcatcagttgtttaccctcacaactatggattcattcctcgcacgctttgtgaagacagtgatcctttggatgtactggttataatgcaggagcctgttatcccaggctgtttcctacgtgcgaaggccatcggccttatgccgatgattgatcagggagaggcagatgacaagatcattgcagtgtgcgctgatgatcccgagtacaggcattacaatgatatcaaggagctcccacct

SEQ ID NO: 2867 - DNA, 271 bp, Zea mays
ggccaatcccgagcagtggtgcgaaacctcgagcgctcgcgccggtgaccataacaaagaggaagccgcggtagcactggtagcggcagcagtaagggggagatgtcgtcggcgttcagcggcgatgagaccgcccctttcttcggcttccttggcgcctccgctgcgctcgtcttctcatgcatgggggcggcgtacgggacagccaagagtggcgtcggcgtggcgtccatgggtgtcatgcgcccagagctcgtcatgaagtccatcg

SEQ ID NO: 2868 - DNA, 268 bp, Zea mays
actcgagctgctgattcagcgccacttcgggaggctggagcatccttcggtgccaagacgaactacaagtacaatcgcatatcacataatcctcctgcttgatgtcctcgtcgtgcaggctgcagggttcgctcgttggattcgtaatagtgttcagaagagagaacggcaacgatcactgtagctggtgccactacctgacctgcgaggcgacgtcaagctggaagtgtgacaattgaactgatcagagattagtgacgggatagca

SEQ ID NO: 2869 - DNA, 266 bp, Zea mays
cagtcctatgcttgggggaacaccgaccagaaagttgtggatgagaaccttgagaagctgaagaaggtgatagaggtgtacgaggcacgcctgaccaagtgcaagtaccttgctggagacttcctcagcctcgccgacctgaaccatgtgtctgtcactctctgcctgttcgctacgccctacgcatctgtgctcgacgcctacccgcatgtgaaggcctggtggtctggtctgatggagaggccgtctgtccagaaggtcgctgc

SEQ ID NO: 2870 - DNA, 270 bp, Zea mays
tgcaggcggcgtgacgtccatgaacccgttcctggagaagttcttcccggaggtgtaccggaagaagcaggaggccaagacgaaccagtactgcaagtacgacaaccagctgctgcagaccttcacctcctccctctacctggccgcgctggtcgcctcgttcttcgccgccaccgtcacccgcgccgtcggccgcaagtggtccatgctcgtcggcggcctcaccttcctcgtcggcgccgccctcaacggcgccgcccagaacatcgc

SEQ ID NO: 2871 - DNA, 264 bp, Zea mays
tcgatgggttcacggtcacagtggcgtcggtgggagactcgcgctgcatcctggacacgcagggcggcgagttgcagctgctaaccgtggaccatcgcctggaggagaatgcagaggagcgggagcgcgtcacggccagcggtggggaagtaggccggctcaatctcttcggtggtcaggaggttggtcctctccggtgctggcctggtggcttgtgcctttcaagatccattggggacatggatgttggggagtacattgtgc

SEQ ID NO: 2872 - DNA, 269 bp, Zea mays
acgaggggcaccgtgcgaagaaggacccggcgaacgcgcagaggcacaagatcgaggccggcgtggcaacggcggcggcgctgggcgcggcggctacgcgtaccacgagcaccgcgagcagaaggaggcccactacgagagcaggcagcaggagcacagggtgccgcacgggcacgggcacgggcacggctactcctactactgcgactgaaacgactgatcatctcatcgatcgagatatgcatgcagaactcgatatatatacggcc

SEQ ID NO: 2873 - DNA, 271 bp, Zea mays
cggctcgagcgacgccctccacggcgacaagtggcacggcggcgtccgtgacggcaccgacgtcgtgctctggaagtggtgcgagggcgacaaccagcgctggaagatccagccctactactgaaccaacggatgatatgaccatcgcgcccatcgatcgtgcacatgcatgcatacgtactagcagaataacaggggtcttatctcccgaggcgtcttttgcatgcatgccagcagttgcatagataaagcaggagcgagacaaagggtg

SEQ ID NO: 2874 - DNA, 172 bp, Zea mays
gcacgcagtagtgcagcagcactgaagcactacttcctgcactcactgtgctagctgctcaaaccgtagtagtaacagtccatcaccatcaccatcaccaccaatggctcccaaggttgcgctcttccttgccctaagcctcctgttcgctgccaccgcgcatggctgcgaa

SEQ ID NO: 2875 - DNA, 260 bp, Zea mays
ctgacggttgctctagatcctttcatcctggtggttttgtgaggtcgaaagcggcgagcgaattagaagatgctggacaagctgtgggacgacgtggtggccgggcctcgtcggagacgggcctcgagaagctccgcaaggccaccaccgcccgcccgctcgtcatcaacaaagacgcggacggcggcagctacaagcgggcgcagtcgatgccgtcgaccccgacgacgccggtgacgccgtcgtcgtcgtcgtcgtcg

SEQ ID NO: 2876 - DNA, 260 bp, Zea mays
atactacagcaacagagctgctgcctttctagaactaactagctaccgtcagctgaggcagattgcacaagtgccatcgaacttgattccaagagcgtgaaagcttatttacggagaggcactgcaagggagatgctaggttattataaggaggccgttgatgatttcaaccacgcccttgttctagaaccaatgaacaagacggctggtgttgccatcaacaggttaaagaagctgtttccttgaatatgaagctgcat

SEQ ID NO: 2877 - DNA, 259 bp, Zea mays
acgagacttcacagatgcaaatggaagatactactcaagtttggaggtagcatcagaatatttcaggtccggtgctgacaaaatttcaattggaagtgatgctgtctatgctgctgaagcctttttacagactggtgtagagacagggagaagcagcttcgagcaaatctctagagtatatggcaatcaggctgtagttgtcagtattgatcctcgacgggtatatgtcaatagtcaataagatgtgccatttagaact

SEQ ID NO: 2878 - DNA, 168 bp, Zea mays
aagagactgacagtccatgaagttctacggtatccttgggtccatgttggtggttaggctcctgacaagacgctggactcggctgttcttgctcgcatgaagcagttctcggccatgaactatctgaaaaagatggctctcagggtgatcgccgtgaacctggccgaa

SEQ ID NO: 2879 - DNA, 276 bp, Zea mays
cggctcgagcggctcgaggcagttcacccgcgcccgagacgcaaccccgcgccaagactaagtttgctcttttatcgatatggcgagggacgagacatgtctacatggccaagctggctgagcaggccgtaaggtatgaagagatggttgagtatatggagaaggtggctaagactgtagatgtggaagagctcactgttgaggagcgtaacctcttgtcggtcgcatacaagaatgtgattggggctcgccgtgcttcatggcgcattgtctctt

SEQ ID NO: 2880 - DNA, 274 bp, Zea mays
cttgtgtcagtctccctctccctctctccgatcctctctactagcagagaggcaagttcaatcttctagctagcagcatcggagaaggcagagctcgactgacacaatggcgggaggccagctcaacgtgctgaccacactcgaccaggccaagacacaatggtaccatttcatggcgatcgtcatcgccggcatggggttcttcaccgacgcatacgatttgttctgtatcgcgctcgtgaccaagctcctcggccgcatctactactccgac

SEQ ID NO: 2881 - DNA, 276 bp, Zea mays
catggttcaaaggagtcatgaatgaggttgcagggagcgatcacagcaatgttatagagatgcacaattacctgaccagcgtgtatgaagaaggtgacgcaaggtcagctctgattgccatggtacagtcacttcagcgtgctaaaaacggcgtggatatcgtctccggcagcaagattcgaacacattttgcaagaccaaactggaggaaggtattctgtgatttggccagcgcacacaagaactctcgcataggagttttctattgtggatctc

SEQ ID NO: 2882 - DNA, 271 bp, Zea mays
caagctaggatcatcagcatctgagcttatatattactacatcgatcggttgccaaatggcggggatgacagtcggcaataagctggcgctggctgcggtgctgctgtgcgcggcggcggccatggccacggcgcagaggcctccggcgtgcgcgccacctacaacttctacaacccgcagcagaacaactgggacctcaacgccgtgagcgcgtactgcgcgacgtgggacgccagcaagccgctgtcgtggcgcatgaagtacggctgg

SEQ ID NO: 2883 - DNA, 269 bp, Zea mays
tgccgtcgagctgggcaaggagctggtgtcagaggggcatagacctggtctacgggggcggttccatcggcctcatggggctggtctcgcatgcagttcatgacggagggcgccatgtgattgggtcactggcgagcctgttggggaagtaagggccgtctccggcatgcacgagaggaaggccgagatggcccgcttcgccgatgccttcatagcgttacctggtggctatggaactctggaagagctgctggaggtcatcacctggg

SEQ ID NO: 2884 - DNA, 266 bp, Zea mays
acctgctcattctactggtcttgagggaaaggcgcgatgaggcgaggtgctcgcagaagtacagggagatctgggtacagtactgcaagctcgtgccgtggaggatcctgccttatgtgtactgaagagacggtagaaaccaaggcagctcatggccctgggccagctgtaaaccttattttgtttgcccttaaacaggtggtgaatgttgatgtagcactcggtaaactgtgaccgtgcaaacttttgttattgttggtccatac

SEQ ID NO: 2885 - DNA, 263 bp, Zea mays
tgcggggactggggcggcggcgacgacgggccccgcgcctggacgcacgtcaagctggagcacccgtccacgttcgccacgctcgccatggacacggacaggaagcgggaggtcgtcgacgacctcgacatgttccgcgacggcagggactactacgcgtccgtgggcaaggcgtggaagcgcggctacctgctgttcggcccgcccggcaccggcaagtccaccatgatcgccgccatggccaactacctgggctacgacat

SEQ ID NO: 2886 - DNA, 262 bp, Zea mays
cggctcgaggtagctattgcaatccaaagatctggcttcaagatcgtgttgctactaaggcttgtacctttacttccgttcaacatgttgaactacctgttatctgtcactcctgttggtgttggagaatacatgctggcttcttggttgggaatgatgccaatcactcttgctctggtgtacgttggaacaacactaaaagatctatcagatgtgacacatgggtggagtgagatctcgactactcgacggattctgataa

SEQ ID NO: 2887 - DNA, 267 bp, Zea mays
caaagacgaggagttcgcgaggcagacgatcgcggggctcaacccgctgtgcatccagctcctgacggagttccccatcaggagcaagctggacccggaggtgtacggcccggcggagtccgccatcaccaaggagatcctggagaagcacatgagcggcggcgccgccatgaccgtggagcaggcgctcgcggcgaacgtctgttcatcctggactaccacgacgtgttcctgccctacgtgcacagggtgcgcgagctgccggac

SEQ ID NO: 2888 - DNA, 282 bp, Zea mays
tgtgacaactgacatcacgattccaatcgtgaccccaaatgaagctgctcaattggctgcaaaataccgcggacaagggtttcaaactctgaagctcaaggtcgggaagaacttgaattcagatatagaagttctgaaagctatacggcttgtccatccagattgctcgtttattttggatgcgaatgagggatacacagcaaatcaagcaattgaggttctcgatagactaaatgaaatgggagttacccctgtgctcttcgagcaaccggttcacagaga

SEQ ID NO: 2889 - DNA, 279 bp, Zea mays
cggctcgagcgccgatcatcacaacgaccatcaccctaccacctctgctgcctctccgcgaggccgacgcgctcacgttctccatcgggcgcttcgccgacatcctcgccatgttcgcgccgacgacatccgacgccatgggcgaagagatacggtcgacgctcgacacctgcgagaacacgcgcccgctccctggcgagaaggccgcctgcgtcacctctctcgagtctctcgccaggatactcgccgtcctcctcgggacacgcaacgtccgcgctt

SEQ ID NO: 2890 - DNA, 285 bp, Zea mays
cgccgggtcctgggagctgcgtaccaactacggtacctgggtctcctccaagacgttccacgcgggtgaccagatcgtgttcaagtactcgccccaggtgcacgacgtggtggaggtgaacaaggcggactacgactcctgctcaatcgccagccccgtcgccacccacaactccggcaacgacgccatcgccctggcctcccccggcacccgctacttcatctgcggcttccctggccactgcgccgcgggcatgaagatccagatcaacgtcgtgcccagcgc

SEQ ID NO: 2891 - DNA, 283 bp, Zea mays
cggctcgaggtcggagagagaggggtccagctatccggtggccagaagcagcgggtggccatagcgagagccatactgaaggaccctaggattctactccttgacgaggcaacgagcgccctggacgccgaatctgagcgcatagtgcaggatgccctggacaatgtgatggtcggcaggacgacggtcatcgtggcgcaccgcctctccactatcaagagcgctgatatcatcgccgttctcaaggatggcgtcatagtggagaaaggaaggcacgacgcgc

SEQ ID NO: 2892 - DNA, 274 bp, Zea mays
attcgctcttcgtcctcgctgcctccaacttgcttggctttatcctcaccttcctcgtgccggagtccaagggtaagtcgctcgaggagatgtccggggaggctgacgacgccgaggacgacgccgtcggcacccgcgcggtgcggccgtcggggacccagatggtgtagaatcgaacatggcgacgcgtgcacacgggtcctccatcctggggcccgactgggaagacaaggcgcgccggttcaagcctgccgatgctttgctgtgcagaagt

SEQ ID NO: 2893 - DNA, 275 bp, Zea mays
gagagatcagcgacttaacaacaataatggccaccgccatagttcccacggacgccgagctgctgcaggcgcaggccgacctgtggcgccacagcctctactacctgacatccatggcgctcaagtgcgcggtggagctccacatcccgaccgccatccacaacctaggcgggtctgccacgctgccggacctcgtggccgcgctgtccctgccagcggccaagctcccgttcctcgggcgcgtgatgcggctgctggtcacgtcgggcgtcttc

SEQ ID NO: 2894 - DNA, 275 bp, Zea mays
tggcgattacaaggccaagatggagatgtcactggggaggatgttcctgcaactccaaagaaaatattccagatattgcatcagactattgaagcactttcttgtgttccttctccagagttagctctgagactatatttgcagtgtgcagaggctgccaatgactgtgatttggaaccagttgcttatgagttctttactcaagcgttcattttatatgaagaagaaatcacggattcaaaggctcagatcactgcaattcacctgataattgg

SEQ ID NO: 2895 - DNA, 277 bp, Zea mays
gcactgcgctcatttctgcatccccctcccgccgcgccgcctcaccgccgccggagaagatgggtcgcgtgatccgcgcgcacgtacagggtgcggggtccgtgttcaagtcccacacccaccaccgcaagggccccgcccgcttccgctccctcgacttcggcgagcgcaacgggtacctcaagggcgtcgtcaccgacgtcatccacgaccccggccgtggcgcgccgctcgccaaggtcactttccgccacccattcaggtacaagcaccagaa

SEQ ID NO: 2896 - DNA, 274 bp, Zea mays
aacaagcgttcctggagtatatgccattggtgatgtggctaccttccctttgaagatgtacaatgagttgaggagagtggaacatgttgaccattctagaaagtctgcagagcaggctgtaaaggcgatcaagggcaaagagtccggtgaaccagttccggagtatgactacctgccatacttctactcccgatcattcgacctggcgtggcaattctacggcgacaacgtgggcgaaaccatcctgtttggcgacagtgaccccacctccagc

SEQ ID NO: 2897 - DNA, 276 bp, Zea mays
atcgtctcctccccagatccatcaattcgttcggaccgcccttctcgtgtccccgttccaaagcgcggcaggctgagcggttccgtcagatttgagtcgtcatgaatcccgagtatgattaccttttcaaacttctgcttatcggtgattctggtgttggaaaatcatgcttgcttctcagatttgcagatgattcatatctggacagctacatcagcacaattggagttgactttaaaattaggacagtagagcaagacgggaagaccataaagc

SEQ ID NO: 2898 - DNA, 269 bp, Zea mays
ccgcaagtccaccggaggcaaggccccgcgcaacagctcgccaccaaggcggcgaggaagtctgcgccgacgaccggcggcgtgaagaagccccacaggtacaggcccgggacggtggctctgcgcgagatccgcaagtaccagaagagcacggagctgctgatccggaagttgcccttccagcgcctggtccgtgagatcgctcaggacttcaagacggatctgcggttccagagccacgccgtcctggccctccaggaagccgccga

SEQ ID NO: 2899 - DNA, 267 bp, Zea mays
  unsure (1)..(267): unsure at all n locations
tgncgtcgcaaatggcaaggccaagtagatgtgccatcacttcggcactggagtgaaaaagaaagtatgattgggtcctgcctaggccccatagatatagctcttttttgagaaggaagagagattaattcagcagcagcttttataaattctttgttgtcatgaagcaggtggttcttttgtagttgatgaaagggatttgtcgtcgctatcgtttacataattcagacaataattttatattgtgtaattctgagaatcaaagca

SEQ ID NO: 2900 - DNA, 229 bp, Zea mays
agagggaacgcgccgacgccgcagaggagacgcatcgaggagagcaagcgaggaagcgaccatgagggccaagtggaagaagaagcgcatgaggaggctcaagaggaagcgtagaaagatgaggcagagatccaagtaggcagcagatcgagatggattgtggacgtgatgacatgcgtgggtacatacatttcttcggatgcgttggtgtgcctgtggagagatgtca

SEQ ID NO: 2901 - DNA, 275 bp, Zea mays
gtgggttggcttctcctcccccaccggttcgtgttcaggttctggttcgtgggcgagagggaagagatggcggcgtcggacgttgagtaccgttgcttcgttggcggcctcgcctgggccaccgacgaccactccctcaacaacgccttcagcacctacggcgaggtcctcgagtcgaagatcatcctggatcgggagacgcagaggtcccgcggcttcggcttcgtcactttctccacgggggacgcgatgcgcaggccatcgagggcatgaac

SEQ ID NO: 2902 - DNA, 274 bp, Zea mays
cccggcgtcagacgcgcatcttccagcaatggcggacgagaagctgccaactgcgcgaagcaccgccggcctcacgcagatcagcgataacgagaagtccggcttcctcagcctcgtcggccgctacctcagcggcgacgaggagcacatcgagtgggccaagatccacacgcccaccgacgaggtggtggtgccgtacgacaccctggagtccccgccagaaggcactgaggcgaccaagaagctgctcgacaagctcgccgtgctcaagctc

SEQ ID NO: 2903 - DNA, 263 bp, Zea mays
atcgacacctcaccgagatgggccgcaagttcttcgtcggtggcaactggaaatgcaatggaaccacagatcaggtcgagaagattgtcaaaaccctgaatgaaggacaggttcccccttcagatgttgtggaggtcgttgtcagccctccttatgtcttccttcctgtggtcaagagccagctgcgccaagagttccatgttgctgctcagaactgctgggtgaagaagggaggtgctttcactggtgaagtcagtgctgag

SEQ ID NO: 2904 - DNA, 268 bp, Zea mays
caccgccgtcacgccatctcgccggcggggaaccccgaccgcgagtatggggaacatcttcgtgaagaagcccaagatcactgacgtcgatagggccatcctcaccctcaagacgcagcgccgcaagctcgcccagtttcaacagcagcttgagaaggtaatcgaagcagaaaaggaagctgcacggcagttggttcaacagaagaagagagacagagctttgattgctctgaagaagaagaaagctcaggaagagctgttgaaacaa

SEQ ID NO: 2905 - DNA, 270 bp, Zea mays
cacgcggcctcgctcctcgtcgcctcactccgccgccgcgcgccgcctcacgggcttcccgccaagctcgtcagctcctcccacatggcaggacgcaaccggcgtttcgtgctgtggctgcacggcctcggcgactcaggccctgccaacgagcccatccgcaacctcttctccgccccggagttccggctacgccaagtggtcgttcgcctccgctccccgcgcgcccgtatcatgcaacaatggttttgtcatgccgtcgtggatcga

SEQ ID NO: 2906 - DNA, 175 bp, Zea mays
agccaatcgaagccgagatacggccatggactccaccggcaccggagcagggggtaatgggaagaagggagcggccgggcgcaaggtcggcgggccaaggaagaagtcggtgtcgaggtccgtgaaggccgggctccagttccccgtcggccgcatcgggcgctacttgaagaag

SEQ ID NO: 2907 - DNA, 261 bp, Zea mays
ggcccaaattcaacgtgtttgtcaaaaatgtatctgctcatctgggagtagctgtgccacacattgagttgaagcatgtgattgctgctacaattggtcttaagggtcttggaagcctcctttttattttgagcagctctctcggtgcttatctcctgctgctgtaccttgctttgatcactcctatcatccatgacttctacaactacgatatggagaaggcagaatttgcaggcctctttgcgaagttcacccaggatt

SEQ ID NO: 2908 - DNA, 262 bp, Zea mays
ccccagcagcagggccaccagacagagaggatctcaggaagcgccggcgacgtgctggaagacaaccccgtcgggaggctaaaggtgtacgtgtacgacctccccagcaagtacaacaagaagctgctgaagaaggaccccaggtgcctgagccacatgttcgccgcggagatcttcatgcaccggttcctgctgtcgagcgccgtccggaccttcaaccccgaggaggcggactggttctacacgcccgtgtacaccacct

SEQ ID NO: 2909 - DNA, 263 bp, Zea mays
tctggacttaggtgatagcaatgaggaaagagaggagataaagcagcagttcagccaaacctgtgattggataaagaatcgcttgggtgacaaggttgcacgtgttgacatatctaatcgtctgaggtcatcgccatgtgttcttgttgcagcgaagtttggttggtcagccaatatggaaaggctaatgagagcacagactatgggtgatacaaccactttggatttcatgcggtcaaggaaggtttttgaaataaatccag

SEQ ID NO: 2910 - DNA, 261 bp, Zea mays
tgcacgtattactattcatcttccattgttgctttgctttgcttaccggcaaccatggccagcactcgtgcagcagcaactctccttttgctcctcgcgctcgccggcacctcgtcggcgcactgtccacgggcttctactcctactcgtgccccggcgtgtacggcgccgtcaagtcggtgatgcagtccgccatcgccagggagaagcgcatgggggcctccatcctccgcctcttcttccacgactgcttcgtccagg

SEQ ID NO: 2911 - DNA, 257 bp, Zea mays
aactctgttcgccaagcagcagaagttcatagacaggtgcggaaatatatgaggagcatcataaaacctggaatgttaatggttgatctatgtgagacattggaaaacatggtccggaaacttatcaaggagaatggactgcaagctggcattgcttttccgactggatgctccttgaattgggttgcagctcactggactccaaatgcgggcgacaaaactgtgctacaatatgatgatgtgatgaagcttgattt

SEQ ID NO: 2912 - DNA, 256 bp, Zea mays
gacacgatacatggatcacttcgtgtaacagttcaaggcgaagttattgagcactcctttggagaggagctcttgtgcttcagaactttgcaacgctacactgcagctactcttgagcatggcatgcatcctccgatttcccctaagccagaatggcgtgctctgatggatgaaatggctgttgtagcaactaaagaatatcgatcaattgtcttccaagaaccacgcttcgttgaatacttcagatcggctacac

SEQ ID NO: 2913 - DNA, 255 bp, Zea mays
ctcgagccgctgaagggttggaatttgggaacagtgtttactggactagctttggcaatgagtacgctgaaaagaaattccctgcatccagaccgtttggtatcaagtacaagtttcacttagaggatgctgttgattgcgcagaatgggttgttccattccatctcttcaaattattggcagaggagtatgatctcgagctggttctgatgaagaacttccatgaatttgtacacgagtacttgcaaaaaccag

SEQ ID NO: 2914 - DNA, 256 bp, Zea mays
cgcaacctatcgacccaatctcgtccgacccggcgcgtcgtcccctccagatctccgtcgccctctccaggtagcagaaactgttctgctgcagtctgacaaagtggagggcttaggagcttctgcttcttttatgtctgaacaatctttgctttatttgggattgttgggagagtactctcgtgcaactaggaaaaggcacaaggttccgtcccactgcatgcgtcaagagactgtctggttttcttgttctgaa

SEQ ID NO: 2915 - DNA, 290 bp, Zea mays
atggacggcttttcagggacattctgtgccgaggccagcgcgcacgagattggccgcctcgtacgtcaacttctacatcgccaatggtgggatcatagcgccttccttcggcgacaggtgggacgaggaggcgtatgcggttctccagaaggcattccccgatcacgaggttgtatatctttgttttttgttccacctccgaactttaaggctgctcacaatcgcattgtgtgcggttgaacacttgttagaggttagaagatggtgtgatgaatgctgtggttggcacg

SEQ ID NO: 2916 - DNA, 294 bp, Zea mays
cggctcgagcgtcggtgaagaacaccgtgacccaggtggccaagaaggtgctgaccatgaacccctcgggcgagctctccagcgcccgcttcagcgagaaggagctgatcagcgccatcgaccgcgaggccgtgttcacgtacgcggaggacgcggccagcggcagcctgccgctgatgcagaagctgcgcgccgtgctggtggaccacgccctcagcagcggcgacgcggagcgggagccctccgtgttctccaagatcaccaggttcgaggaggagctccgcgcggtgctgc

SEQ ID NO: 2917 - DNA, 290 bp, Zea mays
cctctctgccttcctgcctgcttccctccctccgtcagatccccgctcgggttgccatggcggaccagctcaccgacgaacagatcgccgagttcaaggaggccttcagcctcttcgacaaggacggcgacggctgcatcaccaccaaggaacttggcactgtgatgcgctcattggggcagaaccctactgaggctgagcttcaggacatgatcaatgaggttgatgctgatggcaatggaaccatcgactttcctgagtttctcaacctgatggcacgcaagatgaag

SEQ ID NO: 2918 - DNA, 284 bp, Zea mays
acgttcagagctcacaccagtgacgacgacgagctgtgaggacagggcaaagacacaagcctgtgaggaatgcggcgatggagacgtacgaggtgatcgaggacataggatcgggcaacttcggggtggtcaagctggtcagggacgtcaggaccaacgagctcttcgacgtcaacttcatcgagcggaggatgaagattgatgagaatgtccagagggacatcatgaacctcatgtcactgaggcatccgaacatagctaactttaaggaggttgtgctagct

SEQ ID NO: 2919 - DNA, 292 bp, Zea mays
agcttgcttgattgttccaggtattcgcagtcgaccgtgtcctcggagcacgatgaaggctgttgctgcctacctgcttgctgtcctcgctgggaatgccagcccctccgctgaggatttgactggcattctggagtcagttggatgtgaagttgacaatgacaggatggaactgctgctgtcccaactgagcggtaaggacatcaccgagctcattgccgcgggcagacagaagtatgcttcagtcccatgtggcggcggcggtgtggctgttgctgcacgtgcacctgct

SEQ ID NO: 2920 - DNA, 286 bp, Zea mays
tgcggagaaaaagtctacaggcaagaaatcagcaggtccagcatctgctgtcagtggctctgtttctacagttgatgcttcgtatgagaagcttctttcgtccattccggaattcgctgattttggaaagctttttaagtcatctgcacctgtagaattgactgaagctgagaccgaatactcagtgaatgttgtgaagcatatttttgatcgacatgttgtgctccaatacaactgtaccaatacaattcctgaacaattgcttgaacaggttattgttttggtt

SEQ ID NO: 2921 - DNA, 283 bp, Zea mays
gttctgtggaagcccttgcagaatttgttaacagcgaacaggtaccaatgtcaagatagctgccattccttcaagcgtcgtggttctgacttcagagacctttgactcaattgtccttgatgaaaccaaagatgtccttgttgagttttatgccccatggtgtggtcactgcaagcatcttgctccgatttatgagaagctggcttcagttttcaagcaggacgacggtgttgtgattgccaatattgatgctgacaagcacactgacttggctgaaaaatat

SEQ ID NO: 2922 - DNA, 287 bp, Zea mays
tgcgccgtcctgatcggcatcacgtacggcggcgcgcgccggggctgcggcgagctgcggggccccatcaacgacgtcaagtgcatgaggcagctcctctgccagcgcttcgccttccccagcgacggcatcatcatgctcactgacgaccagaaggacccgttccgggtgcccaccaaggacaacatccggatggcgatgcagtggctggtgcaggggtgcagcagcggcgactccctggtgttccacttctctgggctgggcgcgcaggtcgccgacgcggactg

SEQ ID NO: 2923 - DNA, 286 bp, Zea mays
cagctttggattccctagaaagctggagttctgaaatgtaccaaattgaccaccggttggaataggcccctctaggtcattgttagaaacgttgaatgtggaaaggaagtgcagattctcgaatgcaactggaattttacccgtgagatcattgctggataaatctagcatccagcaggtttgtgagattgcagatagatgtggggatcggtccggttaagctgttggagctgatatcaagtgaaaggaggccttttaactgaccaatctctgggagaatcagaac

SEQ ID NO: 2924 - DNA, 280 bp, Zea mays
gaaaaaaaagctactacagcaatggccggaggagacgacctgaagctgctgggcctgtgggcgagcccatacgtgctgcgggtgaagctcgcgctcagcctcaagggcctgagctacgagaacgtggaggaggatctgagggacaagagcgagctcctgctcaagtccaaccccgtgcaccagaaggtccccgtgctgatccacggcggcaagcccgtctgcgagtcgcaggtcatcctgcagtacatcgacgaggccttcgccggcaccggcccgtccc

SEQ ID NO: 2925 - DNA, 279 bp, Zea mays
ctggtgccaattgttgagcctgagatccttgttgatggccctcatgacattgatcgctgcgcttacgtcactgagaccgtccttgctgcctgctacaaggcgctcaacgagcaccatgtcctcctggagggtaccctcctgaagcccaacatggtgactccaggctccgactccaagaaggtgacccctgaggtgattgctgagtacaccgtccgtaccctccagaggaccgtccctgctgctgtgcctgctgttgtcttcctctctggtggacagagc

SEQ ID NO: 2926 - DNA, 279 bp, Zea mays
tattccatggagcgggtcaccctttttctgaatctggctaacgaccccaccattgaacgtattatcacccctcggattgctctaacaacagcggaatatttggcatatgaatgtgggaagcatgtacttgttatcttgacagatatgagctcttatgcagatgcacttcgtgaggtttctgcagcccgagaagaggtgccaggtaggcgtggttatcctggatatatgtatactgatttggcaacaatatatgagcgtgctgggcgtattgaaggaaga

SEQ ID NO: 2927 - DNA, 280 bp, Zea mays
gctggagttgatgaccgcagatacaagaatcatttaacactaggaaatggaaaacttctctctgggcttggagtatcacctgcaacacatgggaatatgtcgttcagcttgatttctgcagctgatgctctattgggttcatctgcaaccaagtacagtgcattagattgccagaggcctgaactattgaataagaataaagttcaggggagaattcttttgtgtggctattcgttcaattacatttctgggacagcttcaataaagaaagtgtctcaga

SEQ ID NO: 2928 - DNA, 212 bp, Zea mays
cccacacccccgagctgagcttagctccactccagctccaatcacagtcgtgccagagcgcgaagctagtagagggccgtgaaaatgccgatcaataggatcgccctggggagccaccaggaggtgtaccacccgggcgccctcaaggcggcgttcgctgagttcatctccaccctcatcttcgtcttcgccggccagggctccggcatggc

SEQ ID NO: 2929 - DNA, 279 bp, Zea mays
gggactgttatcagacgctcctgaagtactggccggtgacgaacagtcagaaggagatgatgtcctaggagaagtggaggaggtgctggagctgacagaaatggcagatttccagaagtgtgcggttcctttgtttcgcaggatcgcacagtgcctgaatagctctcattttcaggttgctgaaagggccttattcctgtggaataatgaacatttgttcgacctgatctcccaaaactgccaagttatcctgccaatcatctatccagctctggagag

SEQ ID NO: 2930 - DNA, 281 bp, Zea mays
tgagatgagctccacaggatgctgaacgaggatgagctacgtgatgctgtgctgcttgtttttgccaacaagcaagatcttcccaatgccatgaatgctgctgagattactgacaagcttggattacactccctgcgccagcgacactggtacatccagagcacttgtgccacaactggcgagggtctgtatgagggcctggactggctgtccagcaacattgcgagcaaggcttgaggcctaccttgaatatcaactgcgaactgactaggagctccggg

SEQ ID NO: 2931 - DNA, 275 bp, Zea mays
aatggcttccatcgattctgtccttcagggtgtttccgtttctggcaaggttgacgacatccaccgcaagatcctcacacccgaggccctcgcctttcttgcactgctgcaccgttcttttaatgagcgacgcaagaatctccttgagcgccgcaaggctcgccaggccgagcttgatcgaggagttctccctgactttcttcctgagactaagcacattcgcgagaaccctacatggaagggtgcgctcccgccccgggcctggtggaccgtcg

SEQ ID NO: 2932 - DNA, 273 bp, Zea mays
gctcggccgcacctctcctatcttgctccaagcagcaagttccaactcgagtagattcacttcgccactccgttgccctctcctccgccgcccgatcctttccccgtctgagatggcatctccggcatcggcgtcgcttaaggaagccgtgggcagcctcgaccgcgacggctttgttggtctcctctccaacctcatcggcgagaccgcacacctgcagaacgacccgccgatctacaggcctcaggaggagcgcgtggcgcacacgtagtc

SEQ ID NO: 2933 - DNA, 266 bp, Zea mays
acggaaggctgccgtacgacaacatcaagcccgaccctgttctcaagcacattctcaagaacctgcccatccgcaaactcatattcaccaacggcgacaaggtccacgccgtgagagccctggagacgctgggcctggaggactgcttcgaggggatcatctgcttcgagaccctgaacccgccgtgcccgcctcagggagaccgggaggccgagatcttcgacatcgccggccacttcgcccgctccggcgccgccgccgagctg

SEQ ID NO: 2934 - DNA, 264 bp, Zea mays
ggcacaaggtctgcgagacccacagcaagaccatcagggccgtcgtcgccaaccaggcgcagcgcttctgccagcagtgtagtagatttcacccactcgcggagtttgacgagggtaagaggagctgccggcgtaggcttgctgggcacaaccggcggagaagaaaaacccagccagcagatgtttcttcgcagttgctgctacctggaaaccaagaaaatgcagcaaataggacgcaggatattgtcaatctaattacagtga

SEQ ID NO: 2935 - DNA, 265 bp, Zea mays
taaaaagtgaacgagtgttggattggttgattctggaagaagaatttttgggacgtgctcgagttaatttagccaaaaatgaacacgaacaagatgaacatgatgaaagaagtaaagttgatgattttagaggttctcctatgtcagtaggaaatttggaagaaattattgatgataatcatgctattgtttctacttcagttggttctgagcattatgttcccattttatcatttgttgataaacaacaattagaaccaaactg

SEQ ID NO: 2936 - DNA, 264 bp, Zea mays
attttggctgagctttttacactgtccccactttttcctggtgaaagtgaaactgaccagctttacaaaatatgcactgtgcttgggacccctgattgcactatttggccagagggaatgaacctgcctcgttcatgcagctttaagttttttcagaatcctccaagaaacttatgggagcttattcctaatgcttcatctgaagcaatcgatttgatccagcaactttgttcctgggatcctcgaaggaggccaactgctgag

SEQ ID NO: 2937 - DNA, 267 bp, Zea mays
caagggggccagacaccagcaagggcctgatgcgcgtgatcggagaagtgttcagcgcgtctaagtccaggatccccgtgggggttgtgaacatcacccagctctccgagtacaggaaggacgcgcacacccagatatacaagaagcagtggaacccgctgaccccggagcaggtcgcggaccctaagagctacgcggactgcacgcactggtgcctgccggggctccaggacacgtggaacgagctgctctactccaagctctttt

SEQ ID NO: 2938 - DNA, 278 bp, Zea mays
cagcatctgagcttattattactaaatcgatcggttgccatggcggggatgagagtcggcaagctggcgctggctgcggtgctgctgtgcgcggcggcggccatggccacggcgcacaggcctccggcgtgcgcgccacctacaacttctacaacccgcagcagaacaactgggacctcaacgccgtgagcgcgtactgcgcgacgtgggacgccagcaagccgctgtcgtggcgcatgaagtacggctggaacgcttctgcgggcccgcgggcccaa

SEQ ID NO: 2939 - DNA, 298 bp, Zea mays
agtcgatgactgcgaggccgccctcaacgagcagatcaacgtggagtacaacgcctcgtatgcataccactccctcttcgcctacttcgaccgcgacaacgtggctctcaaaggatttgccaagttcttcaaggaatccagcgacgaggagagggagcacgctgaaaagctcatggagtaccagaacaaacgtggaggcagggtgaggctccaatcgattgtgacgcctttaaccgagtttgaccaccctgagaaaggagatgctctgtacgctatggagctggctctggccctggaa

SEQ ID NO: 2940 - DNA, 284 bp, Zea mays
ctgggagagcgctgcccgcatgattgccgatgtctccaactctgacaagattgttgttgagaagtccactgtcactgtcaagaccgctgaggctattgagaagatcttgacccacaacagcaagggcatcaactaccagatcctttccaacccagagttccttgcggagggtactgccactgaggacctgttcaagcctgacagagtgctcatcggtggccgggagacccctgagggcaggaaggccgtccaggctctcaaggatgtgtacgctcactgggttc

SEQ ID NO: 2941 - DNA, 297 bp, Zea mays
tcaaagacgtcaactccaggagacaagacagtgagaactgaagagaaggatgggcttcgagaagcagatcctgagatccggcaccggccccaagccgataaagggccagaaggtcaccgttcactgcaccggctacgggaaggatcgtgatctgtccaagaaattttggagcaccaaggaccctgggcagcagccattcagtttcagcattggtcagggttcagtgatcaaaggatgggacgagggagttatgaccatgcaagtgggtgaagttgctcgtatccagtgcacgcctga

SEQ ID NO: 2942 - DNA, 211 bp, Zea mays
ctggagtacctcgccgctgacgtcctggagctcgccggcaacgctgccaaggacaacaagaagacgcgcatcgtcccgcgccacgtgctgctggcgatccgcaacgacgaggagctcgggaagctgctgaccggcgtgaccatcgcccacggcggcgtgttgcccaacatcaacccggtcctgctgctcaagaagacggcggagaaggcgt

SEQ ID NO: 2943 - DNA, 247 bp, Zea mays
agtgaggagggagagttcaaggaccgaggcggcgtcgggcgagatgaagcttaacgtcaagaccctcaagggcaccaacttcgagatcgaggcgagccccgatgcatcggttgctgatgtgaagaggatcattgagaccactcaaggtcagagtacctaccgggcggaccagcaaatgctcatataccaagggaaaattctcaaggatgaaaccactttggaaagcaacggagttgctgagaacagc

SEQ ID NO: 2944 - DNA, 288 bp, Zea mays
tggtggctcatgcttccagaaggacatcctgaacctggtgtacatctgcgagtgcaacggcctgcccgaggtggccaactactggaagcaggtgatcaggatcaacgactaccagaagagccggttcgtgaaccgcgtcgtggcctccatgttcaacaccgtcgccggcaagaagatcgccgtcctcggcttcgccttcaagaaagacaccggtgacaccagggagaccccggccattgacgtctgcaagggcctgctgggcgacaaggcccagatcagcttctacga

SEQ ID NO: 2945 - DNA, 272 bp, Zea mays
cggctcgagtcctactgtcacacacacacacacacacagacaagtggtttccaaagccaagtgtgtgtactagcaaccagctagctcgggcggcagcaggcagccatcatgtcggaggagaagcaccaccacttcttcaaccaccacaagaaggacgaggagcagcccgccggcgagtacgggtactccgagaccgaggtggtcaccgccaccggcgagggcgagtacgagaggtacaagaaggaggagaaggagcacaagcacaagcagca

SEQ ID NO: 2946 - DNA, 291 bp, Zea mays
tggggatttcatgaggatagatcatgttgaagggtaccttgcattgtcaggcaaaaccaagacctactttgctacagctgtttcactatgggacgccgacttttatgttaaggttgacgatgatgtccatgtgaacatagcaacgctcggacagattctgtcgaaacatgcattgaagccgagagtgtacatcggatgcatgaaatctggacctgtcttatccgaaaagggcgtgagatattatgaacccgagcactggaagttcggcgaatcggggaacaagtacttccg

SEQ ID NO: 2947 - DNA, 229 bp, Zea mays
ccgggggacggccaggcgcaggcgcgcgccgagatggtcgagatcctccgcacgctggagggcgcgctcggcgacgggcccttcttcggcggcgacgccctcggcttcgtcgacgtcgcgctcgtgcccttcacgtcctggttcctcgcctacgaccgcttcggcggcgtcagcgtggagaaggagtgcccgaggctggccgcctgggccaagcgctgcgccgagcgcc

SEQ ID NO: 2948 - DNA, 220 bp, Zea mays
tgccgagagagtcggcgccggcgcccctgtctacctcgctgccgtgctcgagtatcttgctgctgaggttcttgagctggccggcaatgcggcacgtgacaacaagaagacccgcatcgtaccgcgccacatccagctcgccgtccgcaacgacgaagagctctcccgcttgctgggcacggtgaccatcgctagcggtggtgtcatgcccaacatccat

SEQ ID NO: 2949 - DNA, 279 bp, Zea mays
tggacgaagcacagatccatcggagtgacagcgagcgagagcgagagagacagagagattgtccgcgcgtcatcgactcccggcgaagacgatggggaaggggttcgcatcctacctggcgatgaagacggggccggagggcggcgacgcggcggcggcgcagcaggctctgatcgacgcggacctgcgggagctcggcgtcgccgcgcggaatctcgcaaaccacgtattcgtcctcggcggcgggctggggttcggcacctccttcataaagtggct

SEQ ID NO: 2950 - DNA, 294 bp, Zea mays
tgctcgtgctcagcttcagctggtgggtcatcgtcgcggcccagttcgggtacatcgtcaccagcgcccggtgcagggacacctggacgggattcaccacgcaggccttctcgggcctcggcaccttcttcaagctctcggcagcgtccgccgtcatgctgtgcttggagacttggtacttccagatcatcgtgctcatcgccggcctgctcaagaacccggagctctccctcgactccctctccatatgcatgaacgtgaacgcatgggtgttcatgatctccgtcgggttca

SEQ ID NO: 2951 - DNA, 285 bp, Zea mays
cgtggactcggcctcgctctcccagttcgcgctgtcggcgtcctccacgctctcctacgacctcaacgtcaccatgacggtgcgcaaccccaacacgcgggtggggctctactacgacgacgtccaggcgctggccctgttcagcgaccagcgcttcggctacgccccgctcgacgccttctaccagggcacccaggcgtccacccagctcagccccgggttccgcggcacgcagctcctccagggcgacgtcaccgccgccgagttcaggcaggagcagtccgc

SEQ ID NO: 2952 - DNA, 241 bp, Zea mays
gtcagaatcatcactgaagcttacagcaagctactcttcatttgtaaggaccagatggcatattttgccatcagcctagtgaatgtccttaccgagcttctagaaagcaagcaggagaatgttcacatccttggctgtcaaactttagcaaactttattaacagtcaggtagacaacacatatgcacgcaatattgaaagcttggtgcacaaagtatgtgcacttacacgtcgacagggag

SEQ ID NO: 2953 - DNA, 282 bp, Zea mays
tgcacttgctgttgctctacagcaaactatgtcgcctggcttcaaggcctatgcaaagcaagtgaaggccaatgctgttgcaattggaaactatctcatgagcaagggctacaagatggtgactgatggaactgagaaccaccttgttctctgggatctccgcccccttggcttgactggaaacaaggtcgaaaagctatgtgatctttgccacatcacattgaacaagaatgctgtcttcggtgacagcagtgcattgtctgcgggtggtctccgtattgg

SEQ ID NO: 2954 - DNA, 270 bp, Zea mays
aagaacttattcaagcttgtaagcccgcacttgagtctgatcatatcaccaaagttattcatgattgtaaaagggacagtgaggctttgtattttcagtttggcataaaactgcataatgtgatggatacacagattgcttattctctgatagaagagcaggagcaggaaggaaaaaagatgacatctgatgattacaattacatatcttttgtcagccttcttgctgataaacgatactgtggcatactatatcctgaagaggaagaag

SEQ ID NO: 2955 - DNA, 285 bp, Zea mays
ggcaacccaccactgagaggcacgcagaggagcaggaagccggagaccaagatgtcgtcggtgttcagcggcgatgagacggcccccttcttcggtttcctcggcgccgccgccgccctcgtcttctcatgcatgggcgcacgtacgggaccgcgaagagcggcgtcggcgtggcgtcgatgggtgtgatgcggccggagctcgtcatgaagtccatcgtgcccgtggtcatggctggtgtgctcggtatctacgggctcatcatcgccgtcatcatcagcactg

SEQ ID NO: 2956 - DNA, 266 bp, Zea mays
gatgcggacgaagagggcgaccagggccacgtgttcgggtacgccaccgacgagacccccgagctgatgccgctgagccacgtgctggccaccaagatgggcgcgcgcgtcaccgaggagccaagaacggcacgtgcgcgtggatgaggcccgacggcaagacccaggtgacggcagtacgtgaacgaaggcggcgccatggtgcacgtccgcgtgcacaccgtgatcgtgtgcacccagcacgacgagaccgtcgccagcgacga

SEQ ID NO: 2957 - DNA, 275 bp, Zea mays
ccaaaccctacctgtacccgcagccgccgccgcagcagccatgccgcccaaattggacccctctcaggtggtggaggtcttcgtccgcgtgacgggaggcgaggtcggcgcggcgtcgtcgctggcccccaagatcggcccgctcggtctctccccgaagaagatcggtgaggacatcgccaaggagaccgccaaggactggaagggcctccgcgtcaccgtcaagctcaccgtgcagaaccggcaggccaaggtctccgtcgtcccctccgccg

SEQ ID NO: 2958 - DNA, 275 bp, Zea mays
tgcgagataggattaggaggcagagaataccacggttccgtcgccagggcgtccatccgatccgcgacgatccacaggccacagccatggcgatggcttacaagatggcgacggaggggatggacgtgaaggaggagtgccagcgctggttcatggagatgaagtggaagaaggtgcaccgcttcgtggtgtacaggatcgacgagcggtcgcgcgccgtgctggtggacagggtgggcggccccggggacgggtacgaggagctcgtggccgcg

SEQ ID NO: 2959 - DNA, 274 bp, Zea mays
tctcttggccaggtctccctctccccggctctccgccttcctcttccagtccccgcgcgcgagatcgccgccccgtgtgggccctagatcccgatggcatcgcgccgccgcaccctgctcaaggtcatcatcctcggcgatagtggggttgggaagacttccttgatgaaccagtatgtgaacaagaagttcagcaatcagtacaaggctacgatcggcgcggatttcctcaccaaggaggtgcagttcgaggacaggctcttcactctgcaaa

SEQ ID NO: 2960 - DNA, 278 bp, Zea mays
tagtggagctcccaaggaggaggaggttctgcagtatgctagagtgcttttggattgcgctacctctgatgctgatggcagtaagagagcccttctaatcggaggaggaatcgctaacttcacagatgttgcttctacatttagtggcatcattcgggctttaagagagaaggagtccaagttgaaggctgcaaggatgaacatttatgtccggagacgtggtccgaactgccaaactggactcgccaaaatgcgcaccctaggcgccgaacttggcg

SEQ ID NO: 2961 - DNA, 278 bp, Zea mays
agccggaggattgggatcgcagatttctatacggggaagaacattctcatcacaggtggaactgggttcgtggccaaagttcttgtggagaagattttaaggacgagtcctaccatcggtaagatatacatgatggtgaaagccaaggacgcacaaacggctctcgagaggttgcaaaaggaggtgttagacacagaactgttcaaatccttggaagaaatccatgggaaagactacgagagctttgttgcgagtaagttgattcctgtggtcggcaa

SEQ ID NO: 2962 - DNA, 240 bp, Zea mays
tacaggttgagggagctggatgtcagtttcaacgaagtgagactatacctgagaacatttgctttgcagccagccttgtgaagttgaatgtcagcaggaactttgccgacttaagagccctgccaaaatcaataggggaacttgagatgctagaggagctggaaatccgtagcaaccagatacgagtgcttgcagactcttttgggcatctctcaaagctacgtgtgtttcatgctgatg

SEQ ID NO: 2963 - DNA, 271 bp, Zea mays
tagtgaacccgcagccgacgcagcagcaggagacgcgccaaggagagcccgcaacgaggcgactatgagggccaagtggaacaagaagcgcatgacgacgctgaacaggaagcgccgaaagatgacgcagagatccaagtaggctgatggggattgtggatggtggtgtcggcatagttgtgttacgtttcttcgatgcgtgagttcatggagagatgtcacatcctagttcgtcgtcaccgtttgccatgggtccaatggctcgtcttgg

SEQ ID NO: 2964 - DNA, 274 bp, Zea mays
atcccaaatactccaaggcacgttatgaagagattgagaaggaagtctcatcctacctcaagaaagttgggtacaaccctgataagattgcctttgttcccatttctcggtattgagggagacgacatgattgagaggaccaccaaccttgactggtacaaaggcccaaccctgcttgaggctcttgaccagatcaccgagcccaagaggacttcagacaagcacctgcgtctggccctccaggatgtgtacaagataggtggtattggaactg

SEQ ID NO: 2965 - DNA, 231 bp, Zea mays
agtgacacgaagcaatccaatgatgaatgtcgtggaatttatgcgcaagggtgacttgcgcagtcacttgagtaagaaaggagctctgccaccatcatgtgctgtgaagttagctcttggtattgcaagatgaatgaattacttgcatgagcataggcctcaggctatcatccatcgtgatcttgagccttctaacatattgagggatgacactggacatctgaaggtggc

SEQ ID NO: 2966 - DNA, 268 bp, Zea mays
tagataatgattgctggagtcaatgtgaacttccgggatgctcatggatggactgcactccactgggctgcatctttgggaagagagcggacagttagtgtcgtcatagcaaatggagctgcagcaggagcactaaccgatgcaacttgtgagttcccttctggaagaagtccagctgatttagcttcagtaaatggacacaaggggattgctggttttctcgcagaatctgctttgacaagccgtctgtcagcacttactattaggg

SEQ ID NO: 2967 - DNA, 274 bp, Zea mays
tgggctacatcgacggaaacaacgaccgccgcctcgacgactgcatccgatactgcatcgtcagtgcgcaacaaggctctcgaggctgccggtattgcccacggctccaagcccatggaaaagattgacaaaacccgggctggtgtgcatgtgggcactggtatgggtggcctcacggtgttttctgatggtgttcagaatctcattgagaagggctacacaaaaataactcctttcttcatcccatatgctataacaaacatgggttctgcct

SEQ ID NO: 2968 - DNA, 263 bp, Zea mays
cttgagaacaaccttctcaacggaagcatacgtgcagagatcgtatcgctcggtagcatgcagcatctggtgctcggtggaaacaagctcagcggggagatcccagacgcgcttcacctcaatgcagggcctcctagagctgcagctcggcggcaactccctggacggagccgtgccatggagcctaggcaagctccagttcatctcccaggtcatgaacatgagcagcaacatgctgagcggcacgatcccaagcagcctcg

SEQ ID NO: 2969 - DNA, 263 bp, Zea mays
acgacatcgtcccttcgtcctcacgagcaaccgataatccgcaggcgttgagatgttggtttatcaggatctcctatctggcgatcagctcctgtcggattcattcacctacaatgagctcgagaacggcgtcctgtgggaggacgaaggaaagtgggtcacccaaggtcctgttgatgtggacattggtgccaatccatccgccgagggtggtgaggacgaaagcgttgatgacacagctgtgaaggtggttgatattgttg

SEQ ID NO: 2970 - DNA, 258 bp, Zea mays
ctctcaacaccacctcgcatgcgatgttcgtagcctccgtagcgtcgagcatcgatcatgtcggcctactgcggaaagtacaaggatgagctcatcaagaatgctgcctacattggcacccccggcaagggtatcgttgttgctgatgagtccactggaacaattggaaggcgcctttcgagtatcaatgtcgagacctttgagttaaccggcgttgcctccgtgagctcctaatctggtagcctggtggtctccagt

SEQ ID NO: 2971 - DNA, 264 bp, Zea mays
cacccacccactcgcttcagccgcctccgccgcgcgtacaagcaggtggacacaggatgccggctggccacggcctgcgctcgcggacgccgacctcttcgcgcccccttccgcaagaacggctacatcccgctcaccacctacctccgcacctacaaggtcggcgattacgtcgatgtcaaggtgaacggcgccgtctacaacgggatgccgcacaagttctaccacggccgcaccggtcgcgtctggaacgtcaccaagcgc

SEQ ID NO: 2972 - DNA, 281 bp, Zea mays
gatacattgaactgattgatctcaaggtccgctacaaggacgatctaccattagttcttcatggcgtcagttcgtatgtttcctggcgggaacaagattgggattgtagggcgtactggaagcggtaaatctactcttattcaggcccttttccgcctaattgagcccattggagggaagattataattcacaacattgacatctctgcaattggccttcatgatctgcggacacggttgagcatcattcccgaagaccctacattgtttgagggtactat

SEQ ID NO: 2973 - DNA, 281 bp, Zea mays
gggggagcaagcagcagccgtcggtggaagatgtcgtacctgctgccgcatctgcactcggggtgggcggtggaccaggccatcctcgccgaggaggagcgcctcgtcatcatccgcttcggccatgactgggacgagacctgcatgcagatggatgaagtgctagcagcagtagctgagaccataaagaactttgcggtcatctaccttgttgacatcacagaggtccctgatttcaacaccatgtatgagctgtacgacccttcgacagtgatgttctt

SEQ ID NO: 2974 - DNA, 141 bp, Zea mays
gacacattgaactgattgatctcaaggtccgctacaaggacgatctaccattagttcttcatggtgtaagttgtatgtttcctggcgggaataagattgggattgtagggcgtactggaagcggtacatctactctgagtc

SEQ ID NO: 2975 - DNA, 189 bp, Zea mays
cttctctggctggtcctacaacaattgctgctcgaataaacggccaggggatatcatggctttttccttttactgatggccatccacctcttggctggtcagatactttggcatacattgtgttaccagttcttcttgtcatttcacagtacatatctactcaagtaatgcagccaccacagagcaatg

SEQ ID NO: 2976 - DNA, 277 bp, Zea mays
ccttgtttcagcgacagtttcttatcttcagacatcttgccaaatgctgagaaagtgccctcaaaaccgaagcttaaaaaaatttcaaaaaagccacgcaagtgttggtgcgcaagagttaaaagttgggtgagtaagaacagatggcaagaaagcatgccaaatgaacccgtggtgagctcttatttatacgcctagtgcgttgaaaattggagggtcccgcttgtcaatgactgttgctattctagcaaagggaaggtgttttttcggaccttcg

SEQ ID NO: 2977 - DNA, 280 bp, Zea mays
ctagtcctctgttacttctcccgccgccgccaatcccctcccgttctccgccaccgccaatcccctcccgtcctccgccacctctgctgagagcgagaagagatggccggcaagggtgatgggccggcaatcggcatcgatctcggcacgacctactcttgcgtcggtgtgtggcagcacgaccgtgtcgagatcatcgccaacgaccagggtaaccgcaccacaccctcgtacgtcgccttcaccgactccgagcgcctcatcggagatgcggccaaga

SEQ ID NO: 2978 - DNA, 278 bp, Zea mays
aggctcgagagcatttgagatttgtcaggccatagatgaaggaaaagcagactgggatgcattgtttgagccatatccattttttgaatcatataaaaattatctagaagttaatatcacagcgagaaatgaagatgacctcaggaattggaaaggatgggtggaatctcgccttcgcactcttgtattaaagattgagcgttattcacatgagatgatccttgcacacccatatcccaaagatttctcagataaatccaggcccttacatatctttt

SEQ ID NO: 2979 - DNA, 280 bp, Zea mays
tgcagcgctcgcttcgcgggcgttcctggcagcagcgctcgcttctcgggcattgctggcgccagactggacaacgacgaggagagtgaaaccaaggagaggccactggtgcttcgtaataagccgcctaggtggcacgaacagctgcagtgttggtgcctcaacttccgtggccgtgtgacaattgcctcggtgaagaacttccagctgatcgccgcggctaccccgccaccggcaggtgcgccaaccccctctcagcctgccccgtcagatcccgaca

SEQ ID NO: 2980 - DNA, 276 bp, Zea mays
  unsure (1)..(276): unsure at all n locations
caagangctagctgagcttacaaccacgaagggtgtcactaccatcatcggcggcggcgactctgttgctgctgtcgagaaggctgggctggccgacaagatgagccacatttcgaccggcggcggtgcgagcttggaactcttggaaggcaagactctacctggtgtccttgccctcgatgacgcctagatnnnnnnnnnnnnnnnnnnnncaggttctgccagctttgcgtgtcatcttgtttcggaccttggtgtagcactgcaaggctaagg

SEQ ID NO: 2981 - DNA, 276 bp, Zea mays
tgcagcctccaaagccactcccaaacccccgcttccagaaccttctcgaagctccccgccgcctcctccactcgcaccgatggcgaaggaaccaatgcgcgtgctcgtcactggcgccgcagacaaattggatatgccctggttcccatgattgctaggggtgttatgcttggtgcagaccagcctgttattctgcacatgcttgacattccgccagcagctgaagcccttaatggtcgtaagatggagttggttgatgctgcgtttcctcttctg

SEQ ID NO: 2982 - DNA, 275 bp, Zea mays
tgatttgttgatttgactatggaacataagggcggagatgaaggttgtggtcaggacagttatttcactcaccaaggaggaagcggatgccatggaggagaaggcgggagtgcttgatgagtaagacgggcttctggtgtcgatttgcttctgagttgtttattttatatcgtcgcaatttcgtggttgtcgtttggttattctgtgaagcagccaagccaggctattgttatgaaaatttgtcgtctgtaagcatgtgaacttccgatgttgcc

SEQ ID NO: 2983 - DNA, 281 bp, Zea mays
gtcgcacgcccgcctacgtcaccccggcactccgctcgaccgctctatctctctcgccgagctcctcgacaccctaggcgcgctgttgaccggcggcggcgaggtgatggcgatggaccctgacgcggtagcaaggccttcgtggagcattactaccgaacgttcgacaccaaccgcgcggcgctggttgggctgtaccaggagacctccatgctcaccttcgagggccagaacttccagggcccgtccgccattgccggcaagctcggatctctcccttt

SEQ ID NO: 2984 - DNA, 273 bp, Zea mays
gtacagctcccacatgcagcttggtggtcctaagatcatggcgaccaatggtgttgtccacctcactgttccagatgaccttgaaggtgtttccaatatattgaggtggctcagctatgttcctgcaaacattggtggacctcttcctattaccaaacctctggaccctccagacagacctgttgcttacatccctgagaacacatgcgatccacgtgcagctatctgtggtgtagatgacagccaagggaaatggttgggtggtatgtttga

SEQ ID NO: 2985 - DNA, 275 bp, Zea mays
ctgcggaagagcttcaagattggctcactgcagatgttcatggagaacaatggaagcactgaagatatgggtcctcgaccttttcctgtcaaggaggttcacaaaatagcagtactagatattaggttagctaatgctgatcgtcatgctgggaatattctagtgtgcaaggagggagaaggtggcaactacaagctgattccaattgatcatggttattgcttgcctgagaagtttgaagatgttacatttgagtggctctactggccccaagc

SEQ ID NO: 2986 - DNA, 274 bp, Zea mays
cagctccccaagccaacaaacagggtagagggagaggagaggagaggagaggagaggttgggtctgggacaccatggctccgatgaagctgtacggggcggtgatgtcgtggaacgtgacgaggtgcgcaacggcgctggaggaggctggctccgactacgagatcgtgcccatcaacttcgccaccgccgagcacaagagccccgagcacctcgtccgcaacccgtttggtcaggttccagctctgcaggatggtgacttgtacctcttcgaa

SEQ ID NO: 2987 - DNA, 271 bp, Zea mays
gcatcccgtgcacaagctgctgagcccgcactaccgtgacacgctgaacatcaacgccctggcacgccagacactcatcaacgccggcggcgtcttcgagcgcaccgtgttccctgcaaagtacgcgctggggatgtcggcagacgtgtacaagacctggaatttcaacgaccaggctctcccagcagatctcgtcaagagaggtgtggctgtgccggaccagtcaagcccatatggtgtccgactgctgatcaaggactacccctatgcc

SEQ ID NO: 2988 - DNA, 271 bp, Zea mays
cgcctggctcggcaccgcgctgctgctgctcaccgtctactacctcacgccgccccgccccgtgtacctcgtcgagttcgcgtgctacaagccggaggagcggctcaagatctccaagtcggccttcctcgagatgaccgagagcaccggctccttcaatgaggcggctctggacttccagaccaagatcaccagccgctccgcgctcggggacgagacgtacctgcccccgggcgtccaggcgcgcccgcccaggctcaacatggcggag

SEQ ID NO: 2989 - DNA, 305 bp, Zea mays
gcgcatccccgcctccctcagcccggccttcggctcgaccacggcccggctctacaacttcagccggacgaacatgcccgacccgacgctggacgcctcctaccgagccttcctgacagagagatgccccaggcacggcgaccccacagccctgaacgacctggacccgacgaccccggacaccttcgacaacaactactacaccaacatcgaggtgaaccgaggcatcctcaactccgaccaggagctcaagtcgtcgcccctagcgcagggcaccacggcgcccatcgtcgaccagttcgcgg

SEQ ID NO: 2990 - DNA, 266 bp, Zea mays
  unsure (1)..(266): unsure at all n locations
ctgatgatggctcagctatgctgacttttgactctctctctgaaactgccgaatttgctagacagtgggtgccttttgtaagaagcacaatattgaaccaagagctccagaattttactttgctcaaaaaatagattacctgaaggacaaaattcaaccttcatttgttaaggaaagacgagcaatgaagagagagtatgaagaattcaaaataagaatcaatgcccttgttgccanagcacagaaagtgcctgaagaggggtgga

SEQ ID NO: 2991 - DNA, 225 bp, Zea mays
cagaaattcaagagcgcgctcaatggcattcaggttgaactccaggccacagatgcgagtgacatcagcctcgatgagatcaaggatcgggcacgctaggcgcaccgccatcgcgagtttcatggtcacgcatcatggactcgcctactactgtggatttgtacgccattatagacttggtgctgcgaaagactgctttggtgatatgtgggtttgatgctgtgt

SEQ ID NO: 2992 - DNA, 292 bp, Zea mays
accgccgccgccgccgccgccggccgacgactccaaggccctggccatcgtcgagaaagttgcagatgaacctgctcccgagaagcctgcccctgcgaacaagggggctccaatgacagggatctcgctcttgcaagggtggaaacagagaagaggaactctttgatcaaagcttgggaagagaatgagaagacaaaagctgagaacaaggctgctaagaaagtatccgctattctttcatgggaaaacacaaagaaagcaaacatagaagctgaactgaagaagattgagg

SEQ ID NO: 2993 - DNA, 285 bp, Zea mays
cggacggcacgccgtggtggcacgcgcacagctcctggctcagggccaccgtctaccgcgcgctcatcatccgccccagggagaacaagacctacccattcgccaagccctcgcgagacgtccccgtcatcctcggtgagtggtgggatgcgaacccgatcgacgtcatccgggaggcgcagaggaccggcggcggtcccaacgtctccgacgcgttcaccatcaacggccagcccggcgacctgtacaaatgctccaacaaagagactacggccatcccggtga

SEQ ID NO: 2994 - DNA, 287 bp, Zea mays
cgtcgatgccggcgacataacggccggagcgccgccgcgcgctcacgaggaggagcaagcgggaactccggcatacggttcggtggtcctcggcggcacttttgaccgcctccacgacggccaccgccgccttctcaaggcctccgcggatttggggagagaccggatcgtggtgggcgtctgcacgggacctatgctcgccaagaaggagtatgcggacttattgagcccgttgacaagcgcacaagggtgtggaggatacatcaatctataaagccgaactgata

SEQ ID NO: 2995 - DNA, 293 bp, Zea mays
tgaagcagcacactctgcactctcggcaacaactgacggccggaggaagaaggcgcagacgacaagcagaagcttgtgccatcgatcaatggcggcggtgacaaagatctacgtcgtgtactactcgacgtacggccacgtggcgaggctggcggaggagatcaagaagggcgccgactccgtggacggcgtcgaagcaaccatctggcaagtggcggagacgctgccggaggaggcgctggcgaagatgcgcgcgccggcgaggatcgaggagcacccggtgatctcgggca

SEQ ID NO: 2996 - DNA, 283 bp, Zea mays
cagaagtcactgtgaggccctggagaaagaaccaatgcttgcagcaagactcactgttgaagacgccctttgccttgttcttgaggttgatgacactgaccgtctgttgcagtctagccagtcacaggacaacattttcgaactgaaacgaagacggcaagtcctcctggaaggtctagctgcatcattgcagtttgttgatcctctcggacccagcaaatctggtcattcatctgggtcagccctgaaggacgatgttatttttctgcgcattgtttctctg

SEQ ID NO: 2997 - DNA, 289 bp, Zea mays
cgctggcggctgctgcacacacactggcacttgcgcagtggtggcctacgaccccctggacccgaacggcaacatcaccatcaagtgggacgtgatctcgtggacgcccgacgggtacgtggcgatggtgacgatgagcaactaccagatgtaccggcacatcatggcgcccgggtggacgttggggtggtcgtgggccaagaaggaggtgatctggtccatcgtgtcggcgcaggccacggagcatggggactgctccaacttcaacggctgcatgccgcactgctgc

SEQ ID NO: 2998 - DNA, 291 bp, Zea mays
ctggtgttgtggatggacgcaacatctgggctgatgatcttgctacatctctcagcactctccagtctcttgaggctgttgttgggaaggacaagcttgtcgtatcaacttcctgctcgctcatgcacaccgctgtggatcttgtgaacgagactaagcttgacagcgagattaagtcttggcttgcttttgctgcccagaaggttgttgaggttgatgctctcgctaaggcattggctggtcaaaaggatgaggcttacttcgcagcaaatgctgctgctcaggcctcga

SEQ ID NO: 2999 - DNA, 295 bp, Zea mays
cgcgagaacgcgctgctggagttcgtgcgcgtggtggaggcccaggagcaggtggtggccggcacgctgcaccacctcacgctcgaggccgtcgaggccggaaggaagaagctctacgaggccaaggtctgggtcaagacatggctcgacttcaaggagctccaggaattcagccacaagggggacgccaccgccttcaccaacgccgacctcggcgccaaggaaggtggacatgagcctggttggcgtgaggttccagtagacgatcctgtggtcaaagatgctgcacaccatg

SEQ ID NO: 3000 - DNA, 229 bp, Zea mays
gtccaaacaaaggccaagaaagctgacaattcatggaagtgatggcaatgattatgcattcttgcttaaaggccacgaagatttgcggcaagatgaacgagtaatgcagctttttggtttggtgaatactctcctagagaactcaaggaaaacatcagagaaggatttatcaatccaaagatatgctgttatacctttgtcacctaacagtggtttaattggatgggtt

SEQ ID NO: 3001 - DNA, 287 bp, Zea mays
atgaagtcccctttgatgggtctattcgagaagcgcagagcaacgaacttcttcatttatgtccaagattacaatgaagctgatccaaggacacatcaaggattagaccttactagggtgacaactagagaacttatagcaaaatatggtttaagtgatgatacagtggatttcattggacatgcacttgctcttcatagagatgatcgctatcttgatgaaccggcacttgatacagtgacaaggatgacactatattcagagtctcttgcgcgctttcaaggagg

SEQ ID NO: 3002 - DNA, 245 bp, Zea mays
cctctagcctcacctaccctatacacagccactactgttgatcgattgactttgaccccaccaggatcaggcttaggattacagcatgtcggcgtccccggagttgtacaggcccgcgcgaaccccggccttctcgccgtcctgcgccacgcagccgccgctcccgctcgtgttcgccggcgacgactactgctgcaggacgccgacgggcagcgggatctgctacctgacggagcccacacgtg

SEQ ID NO: 3003 - DNA, 258 bp, Zea mays
ctctggtgtcaacaagtatgtgaccagaatccgtgcccagccgcaccgctgcgaggtgatccagcagcttggtgagatctgccgggagctcattggagtctttgagaagcagaacctcgtgaagccgcagaagatcatctacttccgtgatggcgtgagcgacgggcagttcgatatggtcctgaacgaggagctggctgacctggagaaggcgatcaaggtgaatggctatgcgccaaccatcaccgtggtcgtggc

SEQ ID NO: 3004 - DNA, 234 bp, Zea mays
aaagaagtagccgttaacgatggcttccgacgagctcgcaaaggccgtcgagcccaggaagaagggcaacgtcaagtatgcctccatatgtgccatcctggcctccatggcctctgtcatccttggctatgacattggggtgatgagtggagcggccatgtacatcaagaaggacctgaatatcacggacgtgcagctggagatcctgatcgggatcctcagtctctaattcgt

SEQ ID NO: 3005 - DNA, 284 bp, Zea mays
ccgcgacgtccctcgccttcgccgccgaatccgagactccgatctcgggttcaccgcagcgcacagagcagccccgactcccggcccgatccgcgctctcctctccgtcgcttcagtcatggcaggaatggcacctgagggttctcagttcgatgctaagcactatgattctaagatgcaggagctgctgagcaccggtgagactgaggagttcttcacttcatatgatgaagtttttgagagttttgatgatatgggcctccaagagaatcttctgagaggca

SEQ ID NO: 3006 - DNA, 283 bp, Zea mays
cgagaactacgcctacaatatgcgcaacaccatcagagacgacaagatcgcctccaagctaccggaggacgacaagaaaaagatcgatgacgccgtcgagggggccatcaattggctcgacaacaaccagctcgccgaggttgatgagtttgaggacaagatgaaggagctggagggcatctgcaaccccatcatcgcgaagatgtatcagggcgccgctggtcctgacatggccggtggcatggatcaggatgcttcgccggctggtggcagcggtgctgga

SEQ ID NO: 3007 - DNA, 282 bp, Zea mays
ctcattcctcagccgctgaaagaacactgcccttccaagttaaaggtggtgagtgggaaatcgacaaacgacttctgaagatgggagggatggttgcttctggttcttgtggggacttgtatcacgggacttaccttggtgaggatgtagctgttaaagttataagagctgagcatttgaataagaatgtttggaacgactttacgcaagaagtatatatactaagagaagttcaacataaaaatgttgtgcgattcattggtgcatgcacaaaaccacccc

SEQ ID NO: 3008 - DNA, 276 bp, Zea mays
cgccccacagccacgcgagccttcgccgatccgcgagcgcagatcgccgaagccaggcggcggagagggagctcgaggcggcggaggaaggcgttcgccacagtcgctgatttccctggggaagagatgggtctctactttgggaagctgttcagccgcctcttcgccaagaaggagatgaggattctcatggtcgggctcgatgccgccggtaagaccaccatcctctacaagctcaagctcggcgagatcgtcaccaccatccccactatcgga

SEQ ID NO: 3009 - DNA, 277 bp, Zea mays
tttttggtcctcctatcgctttagccattggcgcaaaatttgtgcctttgaggaagccgaagaagttgccaggcgaggtgatctccgaagagtattctttggaatatggaactgacaagatagaaatgcatgtcggagctgtacaggccaacgaccgggctcttgtagtcgatgatcttattgctaccggtggaacactatgtgcagctgtcaaacttattgaacgtgttggagcaaaggttgttgagtgtgcttgtgtcattgaattgccagaact

SEQ ID NO: 3010 - DNA, 274 bp, Zea mays
cggctcgaggcgtacacagtccattattgccgtctcccttttgcgtgagaaagaaagagacgcgagaagagcagtcgccatgtctggcatcatccacaagatcgaggagaagctccacatggggggcgaccacaagaataaggaggaggaccaccacaagaaggccgaggagcaccacaagaaggaggagggggagcacacaagaaggacggcggggagcacaaggaaggcatcgtggagaaatcaaggacaagtcaccgcgagcacgcgacaa

SEQ ID NO: 3011 - DNA, 280 bp, Zea mays
tgcgccatccctcactctcctccgaagccatcgtccacgtcccagcctccccggactctaggggcagaagctgcagcgtcgagatggtgaaggggcgcacggggcagcgcgtgaggctctacgtccggggcaccgtccttggatacaagcggtccaagtcgaaccagtacgagactacgtcgctggtgcagatcgagggggtgaacaccaaggaggacgtcgcgtggtactgcgggaagcggatggcctacatctacaaggccaagaccaagagcagcgg

SEQ ID NO: 3012 - DNA, 281 bp, Zea mays
agcacgacgcacgcagagccgcagagatccgtcacactgcaagttttgaaaactgaactgtaagatggcatcagcagagctttcccgtgaggaaaatgtgtacatggcgaactcgccgagcaggcagagaggtacgaggaaatggttgagttcatggagaaggtagcgaaaactgttgactcggaggagctcactgtggaggagcgcaacctcctgtctgttgcatacaagaacgtcattggagcccgccgtgtacaccggctcgagctcgagccgctcga

SEQ ID NO: 3013 - DNA, 244 bp, Zea mays
catgtgttgttcggagcgggcagcagcacacagccccatcccaatcctagtcgatcttcttcccctcctcaaggaagaaaagaagctgaactcatggggagagaaagtcagctgctaagccacctcctaagaagcggatggacaagcttgacactgtcttttcctgcccattctgcaaccacgggagtagtgttgagtgccgaattgacatgaagaatctgattggctgacatcttgtagaatc

SEQ ID NO: 3014 - DNA, 270 bp, Zea mays
gtttagaacctctaacatttcccccactcgccagtcgcagcagcacctgtagcagtcatggacgccagcggagccggtagcaaggggaagaagggggcggccgggcgcaaggcaggcggccccaggaagaagtcggtgacgcggtccgtcaaggccgggctgcagttccccgtcggccggatcgggcgctacctcaagaagggccggtacgcgcagccgtgcggcactggcgctcccgtctacctcgccgccgtcctggagtacctcgcc

SEQ ID NO: 3015 - DNA, 280 bp, Zea mays
accgctttcccgtcccccaccccgaccgactgctccccctcccccgcaccagcctcaagccctcaaggcctcaaggcatcgccggcgccgcaacttcgctgaggaagcccgcacccctgcccggatccgatggccaacagcaacctcccgcggcggatcatcaaggagactcagcggctgctcagcgagccagcaccggggatcagcgcgtcgccctcggaggagaacatgcgctacttcaacgttatgatccttgggccggcgcagtcgccctatgaag

SEQ ID NO: 3016 - DNA, 270 bp, Zea mays
attccaagctgctctcgtccctagaaataaagcagctcctccgcggggcggcgaactactacccatcgccaaaaccctagccccgatccggtcgaggagcactacttcttggcatggcgggcacccctagccaggcaagcctcctgctccagaagcagctcaaggatcttgcgaagaaccccgtggatgggttctccgcagggcttgtagacgatagcaacgtcttcgagtggcaggtcaccatcatcggcccgcgcgacaccctatatg

SEQ ID NO: 3017 - DNA, 278 bp, Zea mays
caggtgcagatattgagaaggctggaattgtaaatcaacagaaactagaaaagaaatttgggcagtcttctgtttttgttgcatcgacacttcttgagaatggtgggaccctgaagagtgcaagcccagcttctcttctaaaggaagctatacatgttatcagctgcggctatgaagacaagactgactggggaaaagagatcggctggatctatggatcaattacggaggatatcttgactggatttaagatgcactgccatggttggcggtctatt

SEQ ID NO: 3018 - DNA, 277 bp, Zea mays
aggtcactcgttgatggtgaaggttacaatagtgctgatgaacagggtccctgttacgcctcgagttatgatgattcggaaagagagcgtatgtttgagcatgacctaaggcgagtgaaagggttggaaatcagaaagacggccgaagatgggaactgtctattcagagctgttgctgatcaagtttatggagatgcagaagcttatgacatggctaggcagatgtgtgttgattatatggaaagggaacgggatcatttctctcagtttataactg

SEQ ID NO: 3019 - DNA, 274 bp, Zea mays
aacctctcaaaccctagccgcctcctgcaagtttcagagctcaggaatctgcgccatggcgagtgagacggagaccttcgcatttcaggctgagatcaaccagctgctctcactcatcatcaacaccttctactccaacaaggagatcttcctccgcgagcttatctccaactcttccgatgcgctggacaagatcaggttcgagagtctcactgacaagagcaagctcgatgcgcacctgagcttttcatccaccttgtcccagacaaggcca

SEQ ID NO: 3020 - DNA, 271 bp, Zea mays
ccgttcgcctcttctcctccctcctgccgggtccttaataaagagcagcagcgcaaggtgagccgccagcttgccccaggttggtagagcgagcgagaagaaggcaatggcggcggagagcttcctgttcacctcggagtccgtgaacgaggggcacccagacaagctgtgcgaccaggtgtcggacgcggtgctggacgcctgcctggcgcaggaccccgacagcaaggtggcctgcgagacctgcaccaagacgaacatggtgatggtg

SEQ ID NO: 3021 - DNA, 269 bp, Zea mays
ctaattgctcctgctctgagattgttgccacttggagtgcctaagcttattgtatctactgttgccagtggtcacactacaccttatgtcgaaacatctgatttggtcttgtttccttcggttgttgacatctgtggaataaacagtgtcagtcgtgttatattatctaatgctgcagcagcttttgctggaatggtacatggaatcttgtcggcttccaatgagtctgatgaaacgtcaacaaagccaactgttggtattactatgtt

SEQ ID NO: 3022 - DNA, 272 bp, Zea mays
tgttggcttctcctccccctccggttcgggttcgggttcgtgaggttctccggggttcgggttcgtgggtgagcggatcgagatggcggcgtcggatgttgagtaccgctgcttcgtcggcggcctcgcctgggccacggacgaccactccctccacaacgccttcagcacctacggcgaggtcctcgagtccaagatcatcctcgatcgggagacgcagaggtcccgcggcttcggcttcgtcaccttctccacggaggaggcgatgcgga

SEQ ID NO: 3023 - DNA, 272 bp, Zea mays
agggatcgccatgtcggactcggaggagcaccacttcgaatcgaaggccgacgctggggcgtccaagacctacccgcagcaggctggcaccgtccgtaagaacggcttcatcgtcatcaagaaccgtccctgcaaggttgtggaggtttctacctccaagactggtaagcatggccacgccaaatgccactttgtcgccatagacatattcaatgggaaaaagcttgaagatattgttccttcatcacacaactgtgacattccgcatgtga

SEQ ID NO: 3024 - DNA, 274 bp, Zea mays
tggaagatgaagaggagtctgacaagtccaagtcggaggtcaatgacgaggatgatgaagagggtagtgaggaggatgaagatgatgacgagtgatggagctcctcgagacaatggaccgtgcttcatccaacaatggagcggctacacaaggccccgtggcgatcacaaaaaaggagcctatatccatgtactagaattattcagtttcactccacatcgtgatgttttatttttacttttgtcgtgctataacggatagcgctcctcgttgg

SEQ ID NO: 3025 - DNA, 272 bp, Zea mays
cccgtaccccctcccccggagagcgatggcgacggagctgacggcggcgcactgcgcgcgtacgacggcaccgacccgtccaagcccatctacgtctccgtccggggcaaggtctacgacgtcacctccggccgcggcttctacggccccggcggcgcctacgccgtcttcgcgggccgcgaggccagccgcgccctcggcaagatgtccaaggacgaggccgacgtctccggggacctctccgggctcaccgacaaggagctcggcgtcct

SEQ ID NO: 3026 - DNA, 269 bp, Zea mays
tcagaggcgacgctcgggcgctcctaccctgccccgtctccggtccccccgcgccgtcggcgaggcagccggccgtcacagaagcccgatccggaccccgcgagaaatccttgttatacctgatggctatgattgatgagcctctttatccaattgctgtactgattgacgagctcaagaatgaagacatccagttgcgtctaaactccattagaagactttcaacaattgcacgggctcttggagaagaaagaaccaggaaggagctg

SEQ ID NO: 3027 - DNA, 270 bp, Zea mays
cagacttctgctgcagcgcctccgccgccgccgccgcatctaacgcattccctccgccgcagcccgaggcaagatggttctccagaacgacattgatctgctcaacccgccggcagaactcgagaagctcaagcacaagaaaaagagactcgtccagtcgcccaactccttcttcatggatgttaagtgccaggggtgcttcagcataaccactgttttcagccactcccagactgttgttgtgtgccctggctgccaaactgtcctctg

SEQ ID NO: 3028 - DNA, 270 bp, Zea mays
gaatgggagaattgtcagcacaaggaatagctgcagaattgatgtttgcgcaccaccggcagcgtctttaaaatgccaccgtgcaagttgttcttggctctcacaagagcctttcgctgcatcaacacctgccgactgctgcaggcaagtaaaggtggatttgatggaacagcttgcaaggcatttcataaggccccttactaaggatcaaatggaggcaattatggagttggcaattcagggaaaggagaaggaagggaccaagaagaa

SEQ ID NO: 3029 - DNA, 267 bp, Zea mays
gatatcattctgggggtcgcgcggggtctgcagtacctgcacgaggattcgaggttcaggatcgtccacagggatctcaaggcgagcaacgtgttgctggacacgaacatggtccccaaaatttcggacttcggcatcgcaaggatgttcggaggtgaccagaccacggcatacacattgaaggtcattgggacatacggctacatgtccccggagtatgcgatggacggcgtgttttccatgaagtccgacgtctacagcttcggc

SEQ ID NO: 3030 - DNA, 266 bp, Zea mays
tggcttctcctccccctcttaccaagtcctcctcgggttagggttccttagggttttgtggaggggcgatggcggcggctgatgtggagtaccgttgcttcgacggctggcttgcctgggccaccagcaacgagtcgctggagaatgcattcgactcctacggcgagatcctcgactccaaggtcatcaccgaccgggagatggggaggtctcgcggcttcggcttcgttactttctccaccgagaactccatgctcgacgctatc

SEQ ID NO: 3031 - DNA, 260 bp, Zea mays
ttctcctccccctccggttcgggttcgggttcgtgaggttctccggggttcgggttcgtgggtgagcggatcgagatggcggcgtcggatgttgagtaccgctgcttcgtcggcggcctcgcctgggccacggacgaccactccctccacaacgccttcagcacctacggcgaggtcctcgagtccaagatcatcctcgatcgggagacgcagaggtcccgcggcttcggcttcgtcaccttctccacggaggaggcgat

SEQ ID NO: 3032 - DNA, 258 bp, Zea mays
aaatagtgcgtacaattacagaagctggcggtcaggttgactatgttgagattgtggggcaggaaagcttggtgcctgtggagaggatggaccgcccttgtgtaatttgtgtcgcggcttggtttggaaaggtcaggctaattgacaacatcgagatccatgtagatagctctactgctttgtctatctgatgaacgaagatgtttagacacacggcaaaatggcataccactttctacgtagcagtagcagagcaag

SEQ ID NO: 3033 - DNA, 266 bp, Zea mays
cgctccgaagcttctcctctcgcgtatcctaccaggagggtgggagacccagggagcggaggtgtgcgaactcgcctcgcaccacgcgctgcggcctgcggggcgagagatcggggcctgagctagggtctggtggcggagatgtcgacgccggcgaggaagcgcctgatgcgggacttcaagcgcctgcagcaggatccgcccgccggcatcagcggcgcgccgtacgacaacaatatcatgctctggaacgccgtcatattcgg

SEQ ID NO: 3034 - DNA, 258 bp, Zea mays
cgaggacaaggacggcgacctcatgctcgtcggcgacgtgcccttcagcatgttcatcggcacctgcaagcggctgaggatcatgaaggggtctgaggccagactaggcctcgggtcagccaagaacaacgactgagggagagggagacgacgaccattgtgcagacccgaccgagatccacgcacacggcggcttgtgcacgcgtgagcgggggattgttgtgcgtccgaggcatggggtagtatgggcttgtgttg

SEQ ID NO: 3035 - DNA, 268 bp, Zea mays
cacgcactgaagcaccactacttcctgcgctgctgctcatcacacaccgtagtagcaacagtccatcgccacaatggctcccaaggttgcgctcttccttgccctcagcctcctcttcgctgccgccgcgcatggctgcgaaccctactgtcccgacacagtcgtcccaacgtcgcacagccacgggcgctgcccgatcgatacactcaaactcaaggtttgcgcaaacgtgctgggcctcgtcaaggtcggcctgccccagcacgag

SEQ ID NO: 3036 - DNA, 284 bp, Zea mays
gcttaccatggcaactcgtttgagcaaacataccgttgttatccagcatcgttttttgataagccacacctggaaggcggtgataaagtaataatgccaccttctgcccttgatcgtcttgcttccttgcacatcgagtaccctatgctatttgagctgcacaatgatgcaacccagcggatttcacactgtggtgttttggagtttgttgcagaagaaggcatgatcatcatgccctattggatgatgcaaaacatgctgcttcaagagggtgacactgtcca

SEQ ID NO: 3037 - DNA, 229 bp, Zea mays
tatcgacggccacctcgtcccggcgggcaccacggccatggtgaaccagtgggccatcagccgcgaccccgaggtgtgggacgcgccgctcgagttccggcccgagcggttcctccccggcggcgagggccaggacgtgtccgtgctcggcgccgacggccgcctcgtgccgttcgggtccggcaggaggagctgccccggaaagtccctggccatgaccaccgtgacc

SEQ ID NO: 3038 - DNA, 279 bp, Zea mays
cgaagagagatcagcgacttaacaacaataatggccaccgccatagttcccacggacgccgagctgctgcaggcgcaggccgacctgtggcgccacagcctctactacctgacatccatggcgctcaagtgcgcggtggagctccacatcccgaccgccatccacaacctaggcgggtctgccacgctgccggacctcgtggccgcgctgtccctgccagcggccaagctcccgttcctcgggcgcgtgatgcggctgctggtcacgtcgggcgtcttc

SEQ ID NO: 3039 - DNA, 280 bp, Zea mays
agtgaacccgccgccgacgcagcagcaggagacgcgccaaggagagcccgcaaggaggcgactatgagggccaagtggaagaagaagcgcatgaggaggctgaagaggaagcgccgaaagatgaggcagagatccaagtaggctgatggggattgtggatggtggtgtcggcatagttgtgttacgtttcttcgatgcgtgagttcatggagagatgtcacatcctagttcgtcgtcaccgtttgccatgggtccaatggctcgtcttggaaacctgcac

SEQ ID NO: 3040 - DNA, 279 bp, Zea mays
atcgaccccatctgtgccctccaggctctgatggagggtcttcaggtccttcccttggaggacgttgtctctgaagctgacatcttcgtgaccaccactggcaacaaggatatcatcatggttgaccacatgaggaagatgaagaacaatgccattgtctgcaacattggccactttgacaatgaaattgatatgctcggccttgagacctaccctggcgtcaagcgcatcaccatcaagccccagactgaccgctgggtgttccccgagaccaacact

SEQ ID NO: 3041 - DNA, 281 bp, Zea mays
gtcggatctgagacgagacgagacgaccccccctcccctcaaccggaacttgttttaccccatctcatcccactcgcctccccccacccacccgcccgctgcctccgccggatctcgtcggactcggatccgcccgaccacgaccaccccgcgtcgccgccgcgcagcagcagcagatcagagaagatggccggactcgacaccttcctcttcacctcggagtccgtgaacgagggacaccctgacaagctctgcgaccaggtctcagatgctgttctgga

SEQ ID NO: 3042 - DNA, 275 bp, Zea mays
tagaggagatcgctctctggttccctgaaggtgtggcacagtggaagagcaaccttcatccctggatctacgaggcttgaacagttgagcttggatgacttgcctgcttccatggaaaccagagttttgtttgagtattatctgttggctctggctgaagagtcataatttagcgctctgtgtgttacaccagagttaagtctgcctgaacttatgtggcatttgtttgagtttctaccttcgtgccctgttttctaatgtaccgtggttgtgaa

SEQ ID NO: 3043 - DNA, 275 bp, Zea mays
cgagacttttctgtttctttatgttggtatggatgcattggatatagagaagtggaagattgtcggtcaaacttatagcccggtaaagtctatcgctttgagcagcaccattttagccttggtgctggtttcaagagctgcttttgttttcccactatcctttgtatcaaatttgaccaaaaaaactccaaatggaaagatatcttttaggcagcaggttattgtttggtgggcgggtctcatgagaggtgctgtgtctattgcgttggcttaca

SEQ ID NO: 3044 - DNA, 281 bp, Zea mays
tgccgtcgccgcccgccagcccgccagcgagagaagtccgcttcatccgttcgccgcctcaaggacgagatggacacatcaagccctgcagcacttgtcaatgcacagatgctgaacatgtttgttgggcgaagagtgcgcacggttgttcaagtccaacacaatgaaggtggagtgcttgtcgggcagtccaccgatgggcaccagttgtgtgtcaaaagtgccatggacgtccccgtatcacattttatggaggtttatggaattgctgaaaacagcca

SEQ ID NO: 3045 - DNA, 274 bp, Zea mays
atcgtcctgtggatgttcctgacgttggtcttctatgtgatatgttatggtcggaccctgataaagagattgttgggtggggtgagaatgacaggggtgtttcctacacctttggagctgacatagttgctgagtttcttcagaaacatgatctagatttgatctgcagggctcaccaggtcgtagaggatggctatgagtttttcgcaaatcgccagcttgtaacaatattctcagcaccgaactactgtggagagtttgacaatgctggtgc

SEQ ID NO: 3046 - DNA, 278 bp, Zea mays
gtttcctcaaagatttgatgggattgatcgccatgatcgatatgctaacagaaatgttgtctttttcgatatcaacatgaaaggtttggatggtatccagggcccaatttatgtgggtactggatgtgtcttcagaaggcaggcattatatggctacgatgctcccaaaacaaagaagccaccatcaagaacttgcaactgctggccaaagtggtgcatttgctgttgctgttttggtaacaggaagaccaagaagaagaccaagacctctaaaccta

SEQ ID NO: 3047 - DNA, 275 bp, Zea mays
cacgtatgatgtgtcgctcctcaccatcgaggagggcatcttcgaggtgaaggccactgcgggcgacactcaccttggcggcgaggacttcgacaatcgcatggtgaaccacttcgtccaagagttcaagcgcaagaataagaaggacataagcggcaacccccgtgcactgcgccggctgcgcacggcgtgcgagcgcgccaaggcacgctgtcatcgactgcccagacgaccattgagatcgactccctgttcgagggcatcgatttctactc

SEQ ID NO: 3048 - DNA, 276 bp, Zea mays
atccaatctagaagcgcccctctccctctctctctctctcttcgccgtccgaagctccgcaccccaatctaatcgacacctcgccgagatgggccgcaagttcttcgtcggtggcaactggaaatgcaatggaaccacagatcaggtcgagaagattgtcaaaaccctgaatgaaggacaggttcccccttcagatgttgtggaggtcgttgtcagccctccttatgtcttccttcctgtggtcaagagccagctgcgccaagagttccatgttgc

SEQ ID NO: 3049 - DNA, 185 bp, Zea mays
ctcacccgtcgcagccaatcactccccagcagccgtcgtcgctaccgctgcagcgcggaggcgaccccccatcggacgtaagatgcagatcttcgtgaagaccctgacggggaaaacgatcacgttggaagtggagtcctctgacaccatcgacaacgtgaatgccaagatacatgacaaggagg

SEQ ID NO: 3050 - DNA, 274 bp, Zea mays
gccaattcgctcgagttcagatcgagcgcgcgccaagcaagtcttccggccggccgcgaagagcgcaatcaagcaagacaagatggtgaagctcgccttcggaagcgtcggcgactccttcagcgccacctccatcaaggcctacgtggccgagttcatcgccaccctcctcttcgtcttcgccggcgtcggttccgccatcgcctacgggcaactgacgaatggcggcgcgctggacccggcgggcctggtggcgatcgcgatcgcgcacgcg

SEQ ID NO: 3051 - DNA, 273 bp, Zea mays
gaaaggaagaacagattgaaagtatatgaagggttgtactgcatggcaactagaaacttcaagaaagctgctagtttattcttggattcaatttcaactttcacgacatatgagctattcacatatgatacattcatcttctacacagtcctcacgagtgttatatctctggaccgtgtatctctgaaacaaaaggttgtagatgcacctgagatcttagccgtaattggcaaagtacctcacctctcagagtttctcaattccctctacaat

SEQ ID NO: 3052 - DNA, 268 bp, Zea mays
cacgaccttgtttcaagggttctgcaccaatcaatctttctgatcgtcttaatcaggtgctccgttgggctcttgggtcagtggaaattctgcttagcagacattgtcctatatggtatggctacaatgggcgattgaagcttttggagaggctggcttacattaacaccattgtttatccaatcacatctgttccgcttatcgcctattgtgtgcttcctgctatctgtcttcttaccaataaatttatcattcctgagattagtaa

SEQ ID NO: 3053 - DNA, 272 bp, Zea mays
atcctacctcaagaaagttgggtacaaccctgataagattgccttcgttcccatttctggttttgagggcgacaacatgattgagaggtccaccaaccttgactggtacaaaggcccaaccctgcttgaggctcttgaccagatcaccgagcccaagaggccttcggacaagcccctgcgtctgcccctccaggatgtgtacaagattggtggtattggaactgtaccggttggtcgtgtggagactggtgtcatcaagcctggtatggtag

SEQ ID NO: 3054 - DNA, 271 bp, Zea mays
aggctcgaggctgaaaagagaaatgaggaaaggatgcacatttgacggttggttcgaaggagttatcagctttgccccaacatacaaatatgagtttgactcagaaaactatgtaagcgatgagagtgaatctgggagaagaactcctgcatggtgtgaccgcattctctcatacgggaagggaatcaggctactttcatacaagaggggggagcttacactttctgatcaccgccctgtggctgcagtctacgtggcagagattgaagtt

SEQ ID NO: 3055 - DNA, 273 bp, Zea mays
cgcgccgccgccgctgcagactcctccttttcgatcccttcacaaagcgccgccgtcgccccatcgaacatggctccgaagaaggataaggccccgcccccgtcgtcgaagcccgccaagtccggcggtggcaagcagaagaagaagaagtggagcaagggaaagctaaaggagaaggtgaacaacgcggtgctgttcgaccaggctacctacgacaagctgctctctgaggtgcccaagtacaagcagatcaccccctccatcctatccgag

SEQ ID NO: 3056 - DNA, 267 bp, Zea mays
ctcttctcgagcgttttcggcaccacggcgcagtaggatggcggcggcggccccgacgagagcagaggtgctgtcgctcttccgttccttactccgcacggcgaagaagttctcggactacaacatccgcgagtacacgcgccgacgcgccgcggactccttccgcgaaaaccgcgccctcgccgatgcgtcggccgccgccgcggcgttctcggaggggaagaagcagctagaggttgcgaacgtgcaagcggtggtttactctct

SEQ ID NO: 3057 - DNA, 266 bp, Zea mays
caattggagcagccttcttttcccagaccttagcggtcaatgatgagactgttaagttcgaaatctgggatactgccgggcaggagaggtatcatagcttggctcccatgtactataggggtgcagctgctgccattgttgtctatgacatcacaaatccggcctccttcacccgtgccaagaaatgggttcaagaacttcaagctcaaggaaatcagaataccatagtggctcttgctggaaacaaggctgatatgctagatgcg

SEQ ID NO: 3058 - DNA, 268 bp, Zea mays
cttccctcccgacccactatcccaaaaccgtagcgccctcgcctgctcgccgccgccgtcgttgcgagctccccatcttcctccgtcaaccatggcgacccagatcagcaagaagaagaagttcgtcagcgacggcgtgttctacgccgagctcaatgagatgctgacgcgggagctcgcggaggacggctactccggcgtggaggtgcgcgtcacaccgatgcgcacggagatcatcatccgcgccacgcgcacgcagaacgtgctc

SEQ ID NO: 3059 - DNA, 267 bp, Zea mays
tgggttggcttctcctccccctccggttcgggttcgggttcgtgaggttctccggggttcgggttcgtgggtgagcggatcgagatggcggcgtcggatgttgagtaccgctgcttcgtcggcggactcgcctggtccacggacgaccactccctccacaacgccttcagcacctacggcgaggtcctcgagtccaagattctcctcgatcgggagacgtcgaggtcccgctgcttcggcttcgtcacattctccacggaggaggcg

SEQ ID NO: 3060 - DNA, 267 bp, Zea mays
gccaccaatggcgccggcgaggggggcgtgcccacagacaggccgatccgggtctacgccgacggcatctacgacctcttccacttcggccatgccaagtcgctggagcaggccaagaagtcgtttccaaacacatatcttcttgttggatgctgcaatgatgagttgacacataaattcaaaggaagaactgttatgactgaggatgagcgatatgagtcacttcgtcattgcaagtgggttgatgaagtcattccagatgctcca

SEQ ID NO: 3061 - DNA, 267 bp, Zea mays
atcggcgcacctggttggcagcttgggtggacatgggcaaagaaggaggttatatggtcaatggttggggctcagaccactgaacagggcgactgctcaaagttcaagagcagcccaccccattgctgcaagaaagatccaacaattgtcgatttacttccaggcactccatacaacatgcaaattgccaattgctgcaaggcaggagttgtaaatacctttaaccaggacccagcaaatgctgcttcctccttccagatcagtgtt

SEQ ID NO: 3062 - DNA, 266 bp, Zea mays
tagccagccatcctactgtcacacacacacacacacacagacaagtggtttccaaagccaagtgtgtgtactagcaaccagctagctcgggcggcagcaggcagccatcatgtcggaggagaagcaccaccacttcttcaaccaccacaagaaggacgaggagcagcccgccggcgagtacgggtactccgagaccgaggtggtcaccgccaccggcgagggcgagtacgagaggtacaagaaggaggagaaggagcacaagcaca

SEQ ID NO: 3063 - DNA, 263 bp, Zea mays
tgattgttccaggtattagcagtcgaccggttcctcggagcacgatgaagtttgttgctgcctacctgcttgctgtcctcgctgggaacgccagcccctccgctgacgatttgactgccattctggagtcagttggctgtgaagttgacaatgaaaagatggaactcctgctgtcccaactgagcggtaaggacatcaccgagctcattgccgcgggcagggagaagtttgcttcagtcccatgtggtggcggcggtgtcgct

SEQ ID NO: 3064 - DNA, 258 bp, Zea mays
gccctaaaatactctgccgatgctgcttgcacggtgctgcgggttgaccagatcattatggcaaagccggcaggaggtccaagaagagatgcccagcctggtggcgggatggacgaggattagtttgattatagttgttttctttgtatcacgtatgtgaggtttcagagcagagatcatactttatcttggcttttggttctgtagaaggtttgggtgcctggagttcacttttggaaggtctgcacggttgcgcgg

SEQ ID NO: 3065 - DNA, 275 bp, Zea mays
tgcatagtggatagagttgttcactactcagaactggtgaacattatccgcaacatgtatcctactcttcctcttccggacaagtgtgcagatgacaagccgtttgtcccaacctaccaagtatcagaggagccgatataaagcataggcatcgcgttgattccactggagacgagtcgtcaacgcgaccatcgaaagcgtgaaagagaaggggttcgctagtttttgactcgatcgagctgtgaaacataagtgctactgtactacgtgatgct

SEQ ID NO: 3066 - DNA, 282 bp, Zea mays
  unsure (1)..(282): unsure at all n locations
agcaaagcgngcaacagagcagaagcaaagcgcagagctagcaagtgaccgaccgagagcaaataggcaaggcaacgcaggcaagatggtgcagcaagccgcgaaggaggtgatcccgctgctgacgccttacaagatggggcagttcgagctctctcaccgggtggtgctggcgccgctgacgaggtgccgctcctacggcaacgtgccgcagccacacgccgccgtgtactactcgcaacgcgccacaggggtggcctgctcatcgcggaggccacgggg

SEQ ID NO: 3067 - DNA, 279 bp, Zea mays
ccctcctccatttggcagtggcacatctatataggcacccggaatccccactcccccacgacgccgtccccgtccccgtcccgacgaattggaataggagaagcaaaagatgatggatctcgccgacagccagcaacagcggctcatcgccggcgcggctctgctggtcgccaccgtcgccttcttcaggttcctcctgcgctctcgctccgggggcaagggctgccgcccaccatcccgggggcgccggtggtcggcggcctcgtcaagttcatgcgc

SEQ ID NO: 3068 - DNA, 283 bp, Zea mays
aaggcaccacacctcttcttcttcttcctcctcctcctagcacagctagcgcctgctccccttcgcctgtgatcatgtcttgcagcagcggcaagtgcgactgtggctccagctgctcctgcggcagctcatgcaactgcatgtcccctaacgtggagaccgccgccgccagcagcatcaagaccacggtcctcgccgcgccgaccaccaaggccagcgccggcggcttcgaggcggccaccgagggcggcggctgcgactgcaacacctgcaactgcggcac

SEQ ID NO: 3069 - DNA, 282 bp, Zea mays
cgcaagatgaaggacaccgactctgaggaagagctcaaggaggccttccgtgtgtttgacaaggaccagaacggcttcatctcggccgccgagctccgccatgtcatgacaaatcttggtgagaagctaactgatgaggaggtggacgagatgatccgtgaggctgatgtcgatggtgatggccagatcaactacgaggagtttgtcaaggtcatgatggccaagtgagccacagaaccataatctgaaggcagagaagattatgcattgcatattagtcaa

SEQ ID NO: 3070 - DNA, 203 bp, Zea mays
  unsure (1)..(203): unsure at all n locations
ctgggccacggacgaccactccctccacaacgccttcagcacctacggcgaggtcctcgagtccaagattatcctcgatcgggagacgcagaggtcccgcggcttcggcttcgtcaccttctccacggaggaggcgatgcggaacgcatcgagggcatgaacggcaangagctggatggccgcaacatcaccgtcaacgaggc

SEQ ID NO: 3071 - DNA, 315 bp, Zea mays
gagagcagcagcgacgagctcggaatcggccgagctcccccgcatcgacgaggcgaacccagcgcccgagtccctctccctgctcccacgacccatggcggcggatatggcgtacgcgccgccgatgaaggcgggcaaggccgggttcgaggctggcatgatggatccgcagcacaggatccgcatcacgctctcctccaagagcgtcaagaacctcgagaaagtctgcggggatctggtgaagggcgccaagggtaaggagctcaaggtcaagggccccgtgcggatgcctaccaaggtgctccacatcaccac

SEQ ID NO: 3072 - DNA, 258 bp, Zea mays
gacgcacgcggccatggagccgttcatcatcgcggcgcaccggcacctgagcgcgatgcaccccatcttcaagctgctcaagcctcacatgcggtacacgctcaagatcaacgcgctggcgtcgcagatcctcatcaacggcgacggcgtcatcgagtccgggttcacccctggccgctactgcatggagatgagctcgttcgcgtaccgggagctctggcggcttgaccaggagggtctccctgccgatctcatcag

SEQ ID NO: 3073 - DNA, 274 bp, Zea mays
cggctcgagtaaatccgcgccaaatcgtcaaaccaaaaccaggccgcgcccgcctcgtcagtcctcagtcctcactttcgggccgagctccggatatccagcggcggcaatggcagccgaagccagcgccgtccagcagctcgctggcctcctggaccaagtggacgcgccgctgaagaagacatttgagaatgtgcatcagggctacccaacagagacattattgcgtttccttaaagctagagagtggcatgtgaataaggctcacaggatg

SEQ ID NO: 3074 - DNA, 275 bp, Zea mays
attttggtttagccaagcttcttggtgctggaaagagtcatgtcaccactagggttatgggtacctttgggtatgtggcaccagagtatgcaaatactggactcttgaacgaaaagagtgacatttacagctttggagtcgttctccttgaagcaattaccggaaggaatcctgttgactatggacgcccaccaaacgaggtgaatctagttgactggctaaaaatgatggttgccagcaggcggtcagaagaagtagtggatcccaccatagag

SEQ ID NO: 3075 - DNA, 276 bp, Zea mays
tggggcaagggccacactcaccacaagaacaggccctcaaggagagccacctggaagcgcaaccagaccctctccctccgtcgctaccgctgagcagctcgtcgggtgcttggatactgccactgtccgaccattcccaatcaagacaacaagggtgcctgtctctggttgcattttcaaagttttgctatttgtgttcttggcacttttaatgttagaagtcaattatggagcatatgtcatgaactatttgcaattccgctgtattatcagaca

SEQ ID NO: 3076 - DNA, 278 bp, Zea mays
atccaatctagaagcgcccctctccctctctctctctctcttcgccgtccgaagctccgcaccccaatctaatcgacacctcgccgagatgggccgcaagttcttcgtcggtggcaactggaaatgcaatggaaccacagatcaggtcgagaagattgtcaaaaccctgaatgaaggacaggttcccccttcagatgttgtggaggtcgttgtcagccctccttatgtcttccttcctgtggtcaagagccagctgcgccaagagttccatgttgcgg

SEQ ID NO: 3077 - DNA, 280 bp, Zea mays
tgattactacagatacctcgctgagttcaagactggagctgagagaaaggacgctgctgagaacacgatggtggcatacaaggctgcccaggacattgctctggctgagcttgctccaactcaccctattaggcttggactggcacttaacttctcagtgttctactatgagattctgaactcacctgatcgcgcctgcagtcttgcaaagcaggcttttgacgaggccatctcggaactggacaccctgagcgaggagtcctacaaggacagcactttg

SEQ ID NO: 3078 - DNA, 278 bp, Zea mays
caatgatatgctgaatgtgcttgcacttcgtttagatcataccagagttgtagacataatgcgcaaggctggtcaattgcatcttgtgaaaccatatatggttgcagttcagagtaataatgtctctgctgtgaatgaagccttgaatgagctttatgttgaagaggaagactatgagagactccgtgaatcagttgacatgcatgacaactttgaccaaataggtcttgcccagaagctggagaagcatgaattgcttgagatgaggaggattgctg

SEQ ID NO: 3079 - DNA, 274 bp, Zea mays
tatcaggtgccaggtgaacttcaagcggctctcacttactgacatcaagattgacatcaagcgtgtccccaagaagacaaccctgatcaaggcgatggaggaagctgatgtgaagaccaagtgggagaacagctcatggggcaagaagctgattgtccagaagaggagagcatcgctcaatgactttgataggttcaaagtcatgctggcgaagattaagaggggcggtgctatcatgcaagagctcgccaagctgaagaaggcgtccacggct

SEQ ID NO: 3080 - DNA, 272 bp, Zea mays
gacacacctgggtacggttcatcccacactgaagatgatgcacatggttttgttgttctcgatgatggtgttgagtccggtgaagattttgatgaaaaatcaggccacccttcagatcctgcagacagcaggagctgtgatactggcgcctcatgcaaatgttggttgaagaagcatatgacatgcttgtataaccaagcaaaggaaacaaatgctatctggtctgtggtggttgcagctgcactagttggtattgtgactttgggacgttg

SEQ ID NO: 3081 - DNA, 274 bp, Zea mays
gcctccctcgccacgcctcacagggccggttgcgtaggagaaaggagaaaggaaggaggggaggcggtcgtcgggcgagatgagcgactccttctgccccgactgcaagaagcatacggaggtggcgttcgaccactcggcgggggacatggtgtgcaccgagtgcggcctcgtcctcgaggcgcactccgtcgacgagacctccgagtggcgcaccttcgcgaacgagtccaacgacaacgaccccgtccgtgtcggtggccccaccaacccg

SEQ ID NO: 3082 - DNA, 268 bp, Zea mays
tggccaggtcattcagctccaaggtgatcagcgcaagaatgttgctactttcctagttcaggctgggattgcgaagaaagagaacatcaagattcacgggttctaagggacctgtaaatgcttgtgccctatattgtgtgcctccacatattggggagcttgaagcatcgacaagttactagtcattgcttacttatataagaacataagtagtatttgctattgtcaagtgtgccttgcttgatgcaagttgtgttttcgtatcatt

SEQ ID NO: 3083 - DNA, 275 bp, Zea mays
tgatctttaagaccaagtgcgcgcagtgccacacggtcgacaagggcgccggccacaagcaaggtccaaacttgaacggtctttttgggagacagtcgggtaccactgcaggctactcctactctgcgggaaacaaaaacaaggctgtagtctgggaagaagacactttgtatgagtacctgcttaaccctaaaaagtacattcctggaaccaagatggtcttccctgggctgaagaagccgcaggagcgtgctgatctcatcgcgtacctgaag

SEQ ID NO: 3084 - DNA, 299 bp, Zea mays
tggactggagaggtggcagggctgccagctttaacatcattcccagcagcaccggtgctgccaaggctgtcggtaaggttcttcctgaattgaatggcaagctcactggcatgtccttccgggttcccaccgtggatgtgtcagttgttgacctcactgtcagaatcgagaagggggcctcttacgaggaaatcaagaaagctattaaggctgcttctgagggcccactcaagggtattatgggctacgtggaggaggatctggtttccaccgacttcaccggtgacagcaggtcgagc

SEQ ID NO: 3085 - DNA, 240 bp, Zea mays
gctcgctcgacactgtcactagctagttgctctactagagggcgggtatagagctgcctgcaatccgccgctgagaagggaggatcggaagcgacgatgaggtcgtttgctcctgtctttctgtcggcggtcgtggcctggctggagctggcgggcacgcgcagggcggcaacttctaccaggacacagagatgacctggggcgatggccgcggcaaggtagtggacggcgggcgcgggc

SEQ ID NO: 3086 - DNA, 286 bp, Zea mays
aataagtaggagcagagctgaaggacaccaataagaaacggttgctcgctgccaccaccatgtcctatgatcagatgctctcgccgcttttcggtgccggcgggcgatcggcgtggagagcggcccagcacggcggcggcgacgcggtggcgaggcagatactcaagtgcacgaggtggcagctcgaggagaccaccgacttcgtcacctgcccctaccactactactgcgacactcctacccgggcgactaccccgccgccgtcggcgccctcgtcgccccttcg

SEQ ID NO: 3087 - DNA, 291 bp, Zea mays
cctcgatccaattcagtatactctaatgaaagatcctgtgacactgccatcgtcaaaggtcacagtagaccggcccgtaattatcaggcatctgctgagtgattcttcagatccatttaaccgctcccacctcactcaagacatgctgataccaaacacggagctcaagttgcagatcgaggagtttgtccggtcccagcagtcgagaaagcgaactgctgcggcgttgttggagattggcgaacggagggtactgatgatatggccgaatgaattgtgccaggagcaggg

SEQ ID NO: 3088 - DNA, 224 bp, Zea mays
tgaggaggccatggagctgccgccggggttccgcttccaccccacagacgaggagctcatcacgcactacctcgcctccagcagtagcagcctcgtcgcgtcgtcggtcagagctggcgcgtcgtcaaagcaggacgagtgggtgctgtgcaggggtgtcaagaagagcatcgagccgccatccgtgctcggcagcaagagggtctcgtcggttgcgtgcatgg

SEQ ID NO: 3089 - DNA, 289 bp, Zea mays
tgttggcttctcctccccctccggttcgggttcgggttcgtgaggttctccggggttcggtttcgtgggtgagcggatcgagatggcggcgtcggatgttgagtaccgctgcttcgtcggcggcctcgcctgggccacggacgaccactccctccacaacgccttcagcacctacggcgaggtcctcgagtccaagattatcctcgatcgggagacgcagaggtcccgcggcttcggcttcgtcaccttctccacggaggatgcgatgcggaacccatcgagggcatga

SEQ ID NO: 3090 - DNA, 289 bp, Zea mays
cattgccggtgtcttctgtgctattgtttctcacccggctgacaaccttgtgtctttcctgaacaatgccaagggagctacagtgggagatgctgttaagaagcttggtctctggggtctcttcactagaggacttcctcttcgtatcgtcatgattggtacccttactggtgctcagtggggaatttacgatgcattcaaagtgatggttggactcccaacaacgggaggtgttacacctgccccagcagcagaggctgaattgaaagccagtgcttgattttttttt

SEQ ID NO: 3091 - DNA, 291 bp, Zea mays
ggccgggaaagagcttacgctgctggggttatgggcgagcccgttcgtgctccgggcgcgcatcgcgctcagcctcaaaggcctcacctacgcttactccgaggagaacctcgacgacaagagcgagtttctcctcagctccaaccccgtgctcaagaaggtgcccgtgctcatccaccacggcaagcccgtctgcgagtcccagatcatcgtgcagtacgtcgacgaggctttccccgccgccgcacctaatttccttccatccgacccctacgaccgcgccattgctcg

SEQ ID NO: 3092 - DNA, 287 bp, Zea mays
tgggttccttcatgatatgcttcatggaaggaaaggggttaaaggggctcaacccggtccagtcttatcgtggtcgcaacgtgtgaagatagcggttggggcagcgaaaggcctcgagtatcttcatgagaaagcgcaccccatatcatacaccgagacatcaagtctagcaacgtccttcttttcgatgacgatgtagctaagatcgctgactttgatctgtcgaaccaagctcctgacatggcagctcggcttcactcaactagggttctcggaacattcggata

SEQ ID NO: 3093 - DNA, 286 bp, Zea mays
agctgcgtgactacgtgtctttgagtagcgactggatttgttatgccatgattgacgatattgttgacagttttggtccaatcatgcgtgatgttgagattgagtccgaagcgattgaagatcatgtgtttgttgctcgcgtggaagattttggtactttcttgccacgcattggcgaccttcgcaagaaagtcatgactctgatgcgactcctaggcggcaaggccgacgttatcaggggcttttccaagcgatgcaatgagcagtattctgtcacaccgcgtgg

SEQ ID NO: 3094 - DNA, 245 bp, Zea mays
cgctcatggaaggcgctatctcccttcctcgcaacacaagaattgccgtggttaccggcgcgaacagaggtatcgggctagaggtgtgccggcagctggctggcaatggcgtcaccgtcgtcttgacagcagtggacgaggagctaggcgcgaaagccgtcggcaatctccaagggctagctctctccgatgttctttctcaccagctggatatcacggatgcttccagcatcgctcggttggcc

SEQ ID NO: 3095 - DNA, 287 bp, Zea mays
  unsure (1)..(287): unsure at all n locations
atatctttgattgatgtcctgcctttgttttcaaacactgcctgcgggccaacattccaacctagcctttttagagaagcatatgggagcctcatttgagaaacgaacccaaccttgggttgctaacattagaaaggaggatatacaatctggtgactttttggctttatcaaagattcgaggacgatggggtgggtttgagacattagagaaatgggtgactggtgcatttgctgggcatacctcggtttgcttanaagacgagaanggtgatctttgggttgcag

SEQ ID NO: 3096 - DNA, 230 bp, Zea mays
cggctcgagtgcagagatcattgtagctcctaatatgtctgatggtttccgtagcattgtgcagacaatgggcctaggaaacttaaaaccaaatattgttgtgatgcggtaccctgagatctggcgacgtgagaatttgacacagataccgtcaacatttgtcagcataataaatgattgcattattgctaacaaggcagtagtcattgtgaaaggactcgatgagtggg

SEQ ID NO: 3097 - DNA, 278 bp, Zea mays
ggaaagcggcgacacggaggcagcgttcctgaaggtgttcggcgagggcttgcggttcttctcggcttacatggactcgctggaagagagcttccccaagactagcaacgagaggctggcgctggagaggggagccggacgtgccattgtagacttggtctcgtgcccggcatcggagtccatggagcggcgggagacggcggcttcatgggcgcgccgcatgcggtcttccggcttctctccggtggcgttcagcgaggacgtcgccgacgacgtgc

SEQ ID NO: 3098 - DNA, 278 bp, Zea mays
agcgacggccgctcgcgatctagaactagggctacgcgcgcatcttttttcgcaactccgtggccactggagaggtgtaccctctggagctcacggacgttggggcctggaaggagtgcaagacaggggatgtggtcaccgtggaccttgctaactccgtttttattaaccacacctctggcaaggagtacaagctgaaaccaattggtgatgctggccctgtaattgaggcgggagggatctttgcctacgcccggaagacaggaatgattgcgtcg

SEQ ID NO: 3099 - DNA, 280 bp, Zea mays
tggcttctcctcccccaccggttcgtgttcaggttctggttcgtgggcgagagggaagagatggcggcgtcggacgttgagtaccgttgcttcgttggcggcctcgcctgggccaccgacgaccactccctcaacaacgccttcagcacctacggcgaggtcctcgagtcgaagatcatcctggatcgggagacgcagaggtcccgcggcttcggcttcgtcaccttctccacggaggacgcgatgcgcacgccatcgagggcatgaacggcaaggagct

SEQ ID NO: 3100 - DNA, 281 bp, Zea mays
tgacatgctcatcgcaacagttgttctgtgctactcagtcattgcgcctttgattattccgttcggtgtcgcatactttgccctcggatggcttatagcaagaaatcagatcctgagagtttacgttcctagctacgagagctacggacgaatgtggccacacatgcacacgaggatcatcgcggctctgatggtttaccagaccaccatgatcggcttcatctccctgaagaagttcgcctacgcgtccgttctcgtgcccctgcttccagccagcataa

SEQ ID NO: 3101 - DNA, 279 bp, Zea mays
ggcgattccatttctaccccgagacctccagccgtccgcccctgaaccctcagccttctccgtcccgcctcggcactcgacggccgccggcacacaccgcgcagtctcgagacaggaaccggaggaacgaggatggaggatgactcgccgctgacgaagacgatgaagggtgcggtgacaggactcgccgcggggaccatctggggcaccgtcgtcgccacctggtacgacgtgccccgtgtggagcgccacgtcgcgctccctggccttatccggacg

SEQ ID NO: 3102 - DNA, 277 bp, Zea mays
gtccgtcctaccaccacagctcaccgcggtttggctttctcccctcttccgcacccgcttctcgctccggattccctctgctctttccctaacgaaggtagccatggcggggagaggtaaggcgatcggctcaggcgccgccaagaaggccacgtccaggagctccaaggctggcctccagttccccgtgggaaggatcgccaggttcctcaaggccggcaagtatgccgagagagtcggcgccggcgcccctgtctacctcgctgccgtgctcgag

SEQ ID NO: 3103 - DNA, 276 bp, Zea mays
cgactgggagggcattgatcggatcactactcctcctcacgccaactactcttactcaattgaggctggtgttggtgctggaattgacatgatcatggttccattcagatacacagaattcatcgacgatctgacgacacaagttcagaacaaggtaatccccatgagcagaatcgacgacgccgtctacaggatccttcgtgtcaagttcacaatgggtctgttcgagaacccttaccccgactctagcctcgccggcgagctcgggaagcaaga

SEQ ID NO: 3104 - DNA, 216 bp, Zea mays
aacaactagaaattccccagcccggttccttttcgtgcggtttgatctcgtcggaggcccggccgcagttccgccatcagccatcgaattcgatggcggccaacttcgggaacaagatccgcaacgccaagctggttcttcttggagatgtaggcgctggcaaatctagcttggttcttcggtttgtcaagggacagtttgttgaattccaggaat

SEQ ID NO: 3105 - DNA, 277 bp, Zea mays
tggtgatctgtgggataaagttcttcagcctgagaatgaatatagaaggcaactcattgaccaagtggtttcgaccgcattgcctgaaagcaagagccccgagcaagtctctgctgctgttaaggcattcatgactgctgaccttcctcacgaattgattgagcttcttgaaaagattgttcttcagaattctgcattcagtggaaacttcaacctgcagaacctactcatcctgaccgccatcaaggcggatccatccagagtcatggactatgtt

SEQ ID NO: 3106 - DNA, 199 bp, Zea mays
acgagctcttcttctccatcgccaaccacacgctcaccgtagtcgacgtcgacgccgcctacgtcaagccgttccacacggacatcgtgctcatcacgccgggccagaccaccaacgtgctcctgcgcgccaagcccgacgcggggtgccccgggccacgcacctcatgctggcgcgcccctacggcacgggccagccg

SEQ ID NO: 3107 - DNA, 276 bp, Zea mays
tgaatggggctgtggtgtatcactccagtgagccgttaccggcattcaaggatgtgccggcatcagagaagcagaatttgtttgtcaagaaggtgaacctatgctgtgctgtgtatgacttcgcggatccaactaagaacctcaaggagaaggaggtgaagcgtcagacacttatggagcttgttgattacatcacttctgcgaatggcaagttctcagaggttgtcatgctggagatcacaaagatggtgtcgattaatttgttccggagctcca

SEQ ID NO: 3108 - DNA, 222 bp, Zea mays
gtgaggttctccggggttcgggttcgtgggtgagcggatcgagatggcggcgtcggatgttgagtaccgctgcttcgtcggcgcactctccttggccacggacgaccactcgctccactacgccttcagcacctacggcgaggtcctcgagtccaagatcatcctcgatcgggagacgcagaggtcccgcggcttcggcttcgtcaccttctccacggagga

SEQ ID NO: 3109 - DNA, 270 bp, Zea mays
tgcgcttcagcacccaggtcaaggacgaggagggcaaccctgcgttcgccctggtcaacaaggccactgggctcgccatcaagcactccctcggccagtcccacccggtgaagctggtgccgttcaacccggagtaccaggacgagtcggtgctgtggacggagagcggcgacgtgggcaagggcttccgctgcatccgcatggtgaacaacatccgcctcaacttcgacgccttccacggcgacaagggccacggcggcgtgcacgacg

SEQ ID NO: 3110 - DNA, 276 bp, Zea mays
tgagaacttcgacttcaggcccggcatgatcatcatcaacctcgacctcaagaaaggcggcaacgggcgctacctcaagacggcggcctacgggcactttgggagggacgaccccgacttcacctgggaggtggtgaagcccctcaaggcggagaagccgtcttctgcatgaggcgcctcctctgtttcggaagaagcttttggtctggtctgcctgcgctctatcatgcttttttatggctcctacgtgttgtgattcttgatctgccccttgct

SEQ ID NO: 3111 - DNA, 266 bp, Zea mays
tgggcgcagagaatccccaagcaaacaaacagggtagagggagaggagaggagaggagaggagaggttgggtctgggacaccatggctccgatgaagctgtacggggcggtgatgtcgtggaacgtgacgaggtgcgcaacggcgctggaggaggctggctccgactacgagatcgtgcccatcaacttcgccaccgccgagcacaagagccccgagcacctcgtccgcaacccgtttggtcaggttccagctctgcaggatggtg

SEQ ID NO: 3112 - DNA, 266 bp, Zea mays
agaagctatggataagggagagcttgtttcagataacttggttgtggggattattgatgaagctatgaagaaaccgtcatgccagaaaggtttcattcttgatggcttccctagaactgtcactcaagcacagaagcttgatgagatgttggtaaagcaaggtgctaatgttgacaaggtcctaaactttgcaattgatgatgctatattggaagaacggattactggccgttggatccacccacccagtggtaggacttaccata

SEQ ID NO: 3113 - DNA, 270 bp, Zea mays
tcggcagccacaagaaaccacccccttccggcacacgggctcgaccacctgactccatcaccgtgcctgtctgtgttctagggacaagaagagcagagagatccaggagcgagcagaggcggggagaagaggatgagcaccacaacggcgtcgtcgctgaaccccaacgcgccgctcttcatcccggcggcgtaccggcaggtggaggacttctcgcccgagtggtgggagctcgtcaacaccaccgcctggttccgggaccactgcttc

SEQ ID NO: 3114 - DNA, 269 bp, Zea mays
ctctttcccctcctcgcttcgcttcctcggcggattcctcctccctcggccgtccccgtcccctttttcggcgcgcgagcacgcccgagatggcaaacgcgagatcgggtgtcgctgtgaatgacgagtgcatgctcaagttcggcgagctgcagtcgaagaggctgcaccgcttcctaactttcaagatggacgacaagttcaaggagatcgttgtggaccaggtcggggatcgcgctaccagctacgaggacttcacaaacagcctc

SEQ ID NO: 3115 - DNA, 226 bp, Zea mays
cgccgggccgctcctcaggatgcacttccacgactgcttcgtcagggggtgcgacggctcggtgctcctcgactccacggcgaacaacaccgcggagaaggacgcgaaccgaacctgacgctgcgcgcttcggcttcatcgagagggtcaaggccgcggtggagaaggcgtgccctgacaccgtctcctgcgccgacgtgctggctctcatggccagggacgcatg

SEQ ID NO: 3116 - DNA, 270 bp, Zea mays
atctaatgcctctgatgcgttggataagattaggttcctttcccttactgataaggaagttctgggtgaaggggacactgcaaagcttgagattcagattaagttggacaaagagaagaaaatcctctccattcgggataggggtattggtatgaccaaggaagatcttattaagaaccttggaacgattgctaaatctggcacttcagcttttgtggaaaagatgcagtctggaggtgacctcaatcttattggacagtttggtgttgg

SEQ ID NO: 3117 - DNA, 272 bp, Zea mays
cggctcgagcgacaaacgtcgagaggggccgatcgtgatcgagcagcgatgtcgacgtcgcggaggcggacactgctcaaggtcatcgtccttggcgacacggggtcgggaagacgtcgctgatgaaccaatatgtccacaaaaagttcagtcagcagtacaaagctacaatcggtgcagatttcgtcacaaaggaggttctgatcgaagacaggctagtcacgttgcagatatgggacaccgcggggcaggagagattccagagtcttggg

SEQ ID NO: 3118 - DNA, 286 bp, Zea mays
tgaaaatgtctcgatgggtaacctatgcaagttgcatggatggaaagtcagggagactccacgccgtgtctttgatgccgtgctcttcagcaatgagcttgacatccttgatatccgctggcacgagcttagcccgtatgtgtcagaatttgtgctgcttgagtccaattcaacttttaccggcataaagaaggaccttcacttcaaggaaaaccgccaacggtttggctttgcagagtcacggttgacctatggcatgataggtggaaggtttgtgaagggagag

SEQ ID NO: 3119 - DNA, 292 bp, Zea mays
actccgccgccgctcccgctccgccccagcgcatcgcccgccgccacagcgtaccgcgacctcatctatcaccttcagctttcaatcatggcggacgtcgatgtcgaaccggaggttgccgccggagctcccaagaagaggacgttccgcaagtacagctaccgcggcgtcgacctagatgcgcttctcgacatgtccactgacgacctcgtccagctcttccccgcgcgcgccaggagaaggttccagaggggtctgaagaggaagcccatggcgctcatcaagaaactgc

SEQ ID NO: 3120 - DNA, 294 bp, Zea mays
actcattacaagacgttttggcttttttagatacatagtttttgttatgcacttagatatacattatgtctaggtactctgtaaaagcaatgtatctaaaaagacaacatcttaaaatttgtaaatgagggagtagtatattcaagttgatgggggctgacaacaaattactgttagtttactgtactatgccctggttgtaagagttgattaactgattatcctagaaatgattcagttcagcttaatgtttttttgttaaaataatcaagatatttgtaaaacatgtttgat

SEQ ID NO: 3121 - DNA, 294 bp, Zea mays
tacggggacaaggggagagtgaggtatcaggcttccataactggattcagttttacctggaagaagccaagggaaatgtggattaccaaggttatatatttccaaggcgccgtggtgaatcgcctgattcagagatacagctgctgactgttcagtttgagtggcatggcgtgctgaaatcggtatccagcacgttgattggcgtcagtcctgagtttgaggttgcactctacacgttgtgcttttttgttggaggggaagacaaccgcgtcgatattggcccgtatagtgtga

SEQ ID NO: 3122 - DNA, 286 bp, Zea mays
tatgggatcatatgcagttcaaggatgtttgtgttaaagttgcaaatgttgagctatactacaaggcagttcacttctatttgcaggagcatcctgatctcatcaatgatatgctgaatgtgcttgcacttcgtttagatcataccagagttgtagacataatgcgcaaggctggtcaattgcatcttgtgaaaccatatatggttgcagttcagagtaacaatgtctctgctgtgaatgaggcctgaacgaactttatgtgaagagaaactacgagagactcgtg

SEQ ID NO: 3123 - DNA, 285 bp, Zea mays
tattccggatgtgcggtgaaggttggcttgaccgtgccaatggacagggtgtgcctgctgagctgcggtgtgtctgcaggactcggtgcagtctggaatgtagctaatgtatcaaagggctcaagtgtagctatatttggtcttgggaccgtaagactttctgtcgctcaaggtgctaagcttcgaggggcgtccaagattataggagttgatactaatcctgagaagcaagaaaaggggaaatcatttggtgtcacggactttataacccagatgaattgagtg

SEQ ID NO: 3124 - DNA, 293 bp, Zea mays
tcccaggccaccatggcggaggatgctacgagcagccacccgtcacgctacgtcaagctcaccaaggaccaggacgcccccgccgaggacatccgccccggcgagctcaaccagccagttcacgtcccgcagcagctcgaaggccggaggtgtagcgagtgcggtcaggtcctgcccgagagctacgagccgcccgccgacgagccctggaccaccgggatcttcggatgcaccgatgacccagagacctgccgaactggattgttttgcccctgcgtgctgtttgggcgcaa

SEQ ID NO: 3125 - DNA, 292 bp, Zea mays
cgcactcgcccgccggagtcctcaccgtcgccttctccaaggactcgtcggtgccagcagccggcggcgtggcgatcgagaacaagcgcctctgcgaggccgtgctggagtccatcatcggggagcgcggcgtgtcgccggccgcgaagctgagcctcgccgcgagggtgtcggagctcctcgccaaggagaccgccgcgcccgccgacgcgccgcagcgtagcccgtctccatcaccgcctgatgcgaggagcgggcgggcgagcgaacgaaccgcgagtagaaagaaagc

SEQ ID NO: 3126 - DNA, 287 bp, Zea mays
agaagttctgaaggagatgctgcaggctcttcctgctcttgctatgacaacaaattctgtaaacgctacggccctggacaccgccgcgattcagggccatgttgacatcgtcaatctcctgctggaaaccgatgctagcctcgccaggatcacgaggaacaacgggaaaacggttttacactcagcagcaagaatgggccacgtggaagttgtaagatcgttgctgaataaggatcccaggattggtttgaggacagacaagaaggggcaaactgcgctgcatatgg

SEQ ID NO: 3127 - DNA, 288 bp, Zea mays
tgcagaccacttctttgtcgtgccacatgactttggcgcatgcttccactaccaggaagagaaggccatcgagcggggcgtccttccgttgcttcgccgtgctacactggtccagacttttgggcagaaggatcatgtctgcctgaaggaaggctccatcaccatcccgccatatgctcctcctcagaagatgaaaacccacctcgttcccccagggacccctaggtcgatcttcgtgtatttccgcggtttattctatgacactgcaaatgatcctgagggtggtta

SEQ ID NO: 3128 - DNA, 285 bp, Zea mays
tgagcactgcagctaagaaggctcctgccaaggaggaagaggaggaagatgaagaggagtctgacaagtccaagtcggaggtcaatgacgaggatgatgaagagggcagtgaggaggatgaagatgatgacgagtgatggagctcctcgagacaatggaccgtgcttcatccaacaatggagcggctacacaaggccccgtggcgatcacaaaaaaggagcctatatccatgtactagaattattcagtttcactccacatcgtgatgttttatttttacttttg

SEQ ID NO: 3129 - DNA, 286 bp, Zea mays
agaaattcaaaggtctgcggaggatagtgatgacagacgaaatttgaagatgtgcttggggatgctaaagtccatgagaaatcgctgtgatcagaactttgttgcttatagaaagggtcttggtgttgtttgcaacaaaaaaggtggatttggtgtagattactttgttgttgaattctttggggaggtttacccttcttggagatggtatgaaaagcaagatggtatgaaacatatacaaaacaacagtgaagatcaagctcctgagttatacaacattatgtta

SEQ ID NO: 3130 - DNA, 288 bp, Zea mays
gtcacacacacacacacacacagacaagtggtttccaaagccaagtgtgtgtactagcaaccagctagctcgggcggcagcaggcagccatcatgtcggaggagaagcaccaccacttcttcaaccaccacaagaaggacgaggagcagcccgccggcgagtacgggtactccgagaccgaggtggtcaccgccaccggcgagggcgagtacgagaggtacaagaaggaggagaaggagcacaagcacaagcagcacctcggcgaggccggcgccatcgccgccggcg

SEQ ID NO: 3131 - DNA, 287 bp, Zea mays
tagatggccctgtttttgagagtaatgctatcgcacgctatgttgctcgcttgaaggatgacaaccctctttttgggtcttcccgtattgaacaagcccacgttgagcaatggatggattttgccgcaacagaagttgatcctggtgttgcatggtacttgtatccaaggcttgggtacctcccttatgttagcacaactgaggaaacagctatttcttcattgaagaggtcgcttggtgctctgaacacacaccttgcttcaaacacataccttgttgggcatgct

SEQ ID NO: 3132 - DNA, 285 bp, Zea mays
cagatgacaaaaggatccaggaggttccagcaatgaaggttactgccctgaggttcacggagacagcaagggccaggattgtcaatgctggtggcgagtgcctcacatttgaccagcttgctcttcgtgctccacttggcgagaacacggtcctcttgaggggccccaagaatgcccgtgaggcagtgaggcactttggcaaggctcctggagtgccgcacagccacaccaagccgtatgtgcgctccaagggaaggaagttcgagaaggctcgtggcaggagga

SEQ ID NO: 3133 - DNA, 287 bp, Zea mays
ctcgtcgcagcccccaaggccccaactacccccagtctcggaagagaactatccagaagcgcaagactccaaagccgtcgccttcctatccatcccttcctcgccgcgggggtcgcctgagatcacataaacaatggtgaaggctgttgctgtgcttggtagcagcgatggtgtcaagggcaccatcttcttcacccaagagggagatggccctaccactgtcaccggaagtgtctctggcctcaagcctggcctccatgggttccatgtgcatgcacttggtgaca

SEQ ID NO: 3134 - DNA, 286 bp, Zea mays
cggctcgaggcagaagtggaaggaagcaggcggccaccatggtgaagggacgcacgggacagcgcgtcaggctctacgtccggggcaccatcctcggatacaagacgtccaagtcgaaccagtacgagaccacgtcgctcattcagatcgacggggtgaacaccaaggaggacgtcgcgtggtacgctggcaagcgcatggcgtacatctacaaggctaagaccaagagcagcgagacccgctacaggtgcatctggggcaaggtcacccgcccgcacggcaactc

SEQ ID NO: 3135 - DNA, 290 bp, Zea mays
cgcagagcacgacaccgacacgcgccatggcggcggtgaggcaccggcagctggaggccaacggcatcacgatgcacgtcgcggaggccggccccgtgaacgcctccgcgccggcggtgctgttcgtgcacggcttcccggagctctggtactcgtggcgccaccagatgggctacctcgccgcgcgcggctaccgctgcgtggcacccgacctccgatgctacggcggcaccaccgcgccgccggaaccgaactcctacaccgtcttccatatcgtcggcgacatcgtc

SEQ ID NO: 3136 - DNA, 276 bp, Zea mays
ctattgtggtcgtccctcagccgcgtcgcaccgcatcgcattctacgattcgaagctctctctgctcgcagccatggcgaagaattacccaaccgtgagcgccgagtacagcgaggccgtcgagaaggccaggcgcaagcgccgcgccctcatcgccgagaagagctgcgcgcccctcatgctccgcctcgcgtggcactccgcggggacgttcgacgtgtcgtcgaggaccggcggtcgcttcggtactatgaaagtgccggcggaactggctca

SEQ ID NO: 3137 - DNA, 276 bp, Zea mays
tgaaattagcagtggctcttactctattggaggaatgtttcattcgtatggtggatcctagaactggtgtggacatgataccccatgttttatacaacaagggatcaaactttgctcgtgtggattatcagggattctatactgtaatcctggagaaaggtgatgaaatattatgtgtggcttctatcagagtacatggaactaaagccgctgagcttccttttattgctacttctgtagactttcgacggcaaggaatgtgccgaattctaatga

SEQ ID NO: 3138 - DNA, 276 bp, Zea mays
cagacaaggctggcaggatccttgttgataagcgcttcatgaccaatgtgaagggagtctatgcaatcggggatgccatccctggtcccatgcttgcccataaagctgaagaggatggtgtcgcatgcgtagaattcattgctggaaaagaaggccatgttgactatggcacagttcctggtgtggtctatacacatccagaagttgcatctgttggcaagactgaggagcaggtgaaggctctaggaattgcctataatgtggggaagtttccac

SEQ ID NO: 3139 - DNA, 282 bp, Zea mays
cattatttgcatagagatgggcattgcttcagttgttcacctctatgtgttcccagccaagccctatgcactcttaactaatcagtcacacggaaacatttctgtacttggggactatgtatcctctgagcccgtggacccttttgaaataaaggaaagcaaccggcctaccaaaatgaagcttccacagttggaaccagatgagagaagcgtgaccaacataaaagcaagtggtccggactttggtgtccgcaatggtgaatatgtgatccaagattttaa

SEQ ID NO: 3140 - DNA, 279 bp, Zea mays
gccggggaaccacaacttcgagctgctcaggaagctcgtgctccccgacggctccgtgctacgcgcgcagcttcccggccggcccacacgcgactgcctcttctccgactcggcgcgcgacggcgagagtttgctcaagatttggaacctgaacaagtgcggtggcgtggtgggtgtgttcaactgccagggtagcgggtggtgccgcgtgatcaagcggacgcgcgtgcacgacgcgtcgccgggcacgctgaccggcaccgtgcgtgccgacgacgt

SEQ ID NO: 3141 - DNA, 285 bp, Zea mays
atcgacatatctgagaaacagaaggtcatcaatgaatgctctgaagcagagaactggttaagagagaggaaacagcagcaggatgccctaccgaagcatgctaatcctgtgctgctcgtatcggatctgaagaagaaagctgaaacacttgaccggttctgcaaaccgatcatgacaaaaccaaagccggctccaaagccacagactccgccaccacaacctgaaacccaagcatctgagcctcaaacaccagagcaacaacaaagccggtctggcggaactggt

SEQ ID NO: 3142 - DNA, 186 bp, Zea mays
aaatgacatgctcatcgcaacagttgttctgtgctactcagtcattgcgcctttgattattccgttcggtgtcgcatactttgccctcggatggcttatagcaagaaatcagatcctgagagtttacgttcctagctacgagagctacggacgaatgtggccacacatgcacacgaggatcatcgc

SEQ ID NO: 3143 - DNA, 219 bp, Zea mays
cctcaatatggaactccacatacagccaccccggccgcaccttcgtccacttatgacaaccaggtctgtcctatctgtcttgtgaaccccaaagacatggcgtttggctgtggacaccagacctgctgtgactgcggacagagtctcgagtcgtgtccaatctgtcgcactcccatcaccacaagaataaagctatactagcaagtggtggctttggat

SEQ ID NO: 3144 - DNA, 281 bp, Zea mays
ccgacgaaggctagctacaccacctggtgcgggctcgtctccatcgcccgccacccgctccgtcgtcgtcgtccccgccgcgccgatcccgaatcgaatggggagcctggcgtccgagaggaaggtggtcgggtgggccgccagggacgccaccggacacctctccccctactcctacaccctcaggaacacaggccctgaagatgtggtggtgaaggtgctctactgcgggatctgccacacggacatccaccaggccaagaaccacctcggggcttcaa

SEQ ID NO: 3145 - DNA, 281 bp, Zea mays
cgctgctcttcctctacatcacggtggccacggtgatcgggtacaagcaccagacggacgcggcggcgtcgggccccgacgcggcgtgcggcggcgtcggcgtgctcggcatcgcctgggccttcggcggcatgatcatcatcctcgtctactgcaccgcgggggtgtcgggtgggcacatcaacccggccgtcaccttcggcctcttcctggcgcgcaaggtctcgctggtgcgcgcgctgctctacatcgtggcgcagtgcctcggcgccatctgcggc

SEQ ID NO: 3146 - DNA, 281 bp, Zea mays
ccccatccatcgattggaacccagatccgcaggccgcagcacaagagggtgggatcggatcggatcggagcagagggggacaaccgaccagaatccgccggtgaccaccatgggctccgcgagccgtgccgtctcgtgcctgtgctgcccctgcaagtgcctggcgtgcgggctcctgagctgcctgtgcagcatcctcgtctcgctcgccgtcgtcctgggcgtcgtcgcctcatcctctacttcatcttcaagccgcacatgatcgcgtgcaccgtgga

SEQ ID NO: 3147 - DNA, 280 bp, Zea mays
tggcgagcccattcgtcctgcgggtgaagctcgcgctcagcttcaagggcctgagctacgaggacgtggaggaggacctctccggcggcaagagcgagctgctcctcgagtccaacccggtgcacaagaaggtgcccgtgctcctccacaacggcaagcctgtgtgcgagtcgcagatcatcgtgcagtacatcgacgaggccttcgccggcactggtggcccgtcccttctccctgccgacccgcaccagcgcgccgtggctcgcttctggggtgccta

SEQ ID NO: 3148 - DNA, 280 bp, Zea mays
acccgcttctcgccccgtcgccatggacgcggtcgattctgtggtggatcccctccgcgacttcgccaaggacagcgtccgcctcgtcaagcgttgccacaagcctgaccgcaaggagttcaccaaggtggcagcgcggacggcgatagggttcgtcgtcatgggcttcgtcggcttcttcgtcaagctcatcttcattcccatcaacaacattatcgtcggttccggctaggctcagggcgcgactagcatgggagtagtgcgatacttttgagagcaa

SEQ ID NO: 3149 - DNA, 280 bp, Zea mays
tgtgggaagcatgtacttgttatcttgacagatatgagctcttatgcagatgcacttcgtgaggtttctgcagcccgagaagaggtgccaggtaggcgtggttatcctggatatatgtatactgatttggcaacaatatatgagcgtgctgggcgtattgaaggaagaacaggctccattacccagattcctattctaacaatgcctaacgatgatatcacacacccaactcctgaccttactggatacattactgagggacagatatacattgataggc

SEQ ID NO: 3150 - DNA, 281 bp, Zea mays
  unsure (1)..(281): unsure at all n locations
gttactatctctgttctcgaatatttgtcgtccgttagtttatttttgaactaaatcgcgacaaataaaaaagaacggagggagtatttcgttggacaaaagtagcggcaaagctttttttccttcgtctgatgcttttcttttgtcatttttcatgganaaagttcagtgtcanaattcttgtttcaatctgcagatcaggatttcagggaactcgtgcagaaggtccctgaaggttgcctattcaccatcgtctctgactcatgccatagtggtggctg

SEQ ID NO: 3151 - DNA, 229 bp, Zea mays
cggctcgagcaagtacctcatgtacacgccgtcgttccattctctgcaccacacgcagttccgcacgaactactcgctgttcatgccgctctacgactacgtatacagcaccatggacaagtcgtccgaccagctgtacgagacctcgctcaggggagcggaggagacgcctggcctcgtccacctcacgcacatgacggacctgcagtcggtctaccacctgcggatc

SEQ ID NO: 3152 - DNA, 280 bp, Zea mays
gtcatatctagctagtagctccctgaaaagttcactagagaagcatttgcccggaggagccatgtctgaggagaagcaccaccaccacctgttccaccaccgcaaggcagacgaggaggaaggcgcctccggcgaggtcgactacgagaagaaggagaagcaccacaagcacatggagcagctcggccagctcggcgccatcgccgccggcgcgtacgctctgcacgagaagcacaaggccaagaaggacccggagaacgagcacggccaccgggtcaag

SEQ ID NO: 3153 - DNA, 216 bp, Zea mays
ccacaacttctcaggcacagattctaggtgttgatttcagtgacatatacaagagatctgaactctaccagaggaacaaggccttgataaaggaattgagccaaccagcaccaggttcaactgacctgcatttccctagcaagtatgcgcagtcttccattacacaatgcgtggcatgcctatggaagcagaacctgtcatactggaggtaccctc

SEQ ID NO: 3154 - DNA, 275 bp, Zea mays
gtcggcgtcgggcccgacgcggcgtgcggcggcgtcggcatcctcggcatcgcgtgggccttcggcggaatgatcttcatcctcgtctactgcaccgccggcatctcaggtgggcacatcaacccggccgtgaccttcggcctgttcctggccaggaaggtgtccctcgtccgcgcgctgctctacatcgtggcgcagtgcctgggcgccatctgcggcgtgggcctcgtcaagggcttccagagcgcctactacgtgcgctacggcggcggcgc

SEQ ID NO: 3155 - DNA, 277 bp, Zea mays
tagcacgcgttcatcacgacgccgacggcgatctccccgccgccgtgaccgccccccttctcgcgcacccaccgtcgccgcctgagccttggcctgcgaactttggttcatcggagataaccgacgaggagatcgacgccgcctccgccgcctgctgccgcatctgcctcgaatccgagtccgagcctggtgatgtgctaatatctccatgtatgtgcaaggggacacagcagttcgtgcatcgctcctgccttgaccactggaggtctgttaagga

SEQ ID NO: 3156 - DNA, 278 bp, Zea mays
tgctgccaaggctgtcggtaaggttcttcctgaattgaatggcaagctcactggcatgtccttccgggttcccaccgtggatgtgtcagttgttgacctcactgtcagaatcgagaagggggcctcttacgaggaaatcaagaaagctattaaggctgcttctgagggcccactcaagggtattatgggctacgtggaggaggatctggtttccaccgacttcaccggtgacagcaggtcgagcatcttcgacgccaaggccgggattgccctgaacg

SEQ ID NO: 3157 - DNA, 275 bp, Zea mays
gccagtccatcaagtagtttagttcttaaagcattatatatcattagtgatggtcttcattttaagatttaccaggtctatgcagaggccagtagtcctcatgtagtgaatacagcttgggcaatgttggctttaatttatgctggacaggttcagcgagatccaacaccattgtatggtgctgcaaaagaactgatcaatatgcaacaagagtcaggcgagtttccccaacaagaacacattgggagcttcaattgttccttttacttcaacta

SEQ ID NO: 3158 - DNA, 273 bp, Zea mays
cggctcgaggctcgttctatctgtccagcagacttgaggttccgagcggccggaaaccagcggcaaccgtcggcatggcgctcgtattgcattctggggctggaaacaaaaatgccttcaaggcacttattgctgcagaatacagtggggtcaaggttgagttgaccaaggattttgagatgggtgtctccaacaagacccctgagtttctaaagatgaacccccttgggaaggttcctgttctggagactcctgatggccctgtttttgaga

SEQ ID NO: 3159 - DNA, 271 bp, Zea mays
gtttctgaccaagatttatcatcccaacattgacaagcttggtaggatatgcctcgacattctcaaggacaaatggagcccagcacttcagattcgaacagttcttttgagtatacaggctctactgagtgcaccaaatccagatgaccctctctccgataacattgcaaagcactggaaatccaatgaggtagaagctgttgaaacagccaaggagtggactcgcctgtatgcgagcggtgcatgagagcgcagtgctgttcttggtgta

SEQ ID NO: 3160 - DNA, 270 bp, Zea mays
ccacaacttctcaggaacagattctaggtgttgatttcagtgacatatacaagaaatctgaactctaccagaggaacaaggccttgataaaggaattgagccaaccagcaccaggttcaactgacctgcatttccctagcaagtatgcgcagtcttccattacacaatgcgtggcttgcctatggaagcagaacctgtcatactggaggaaccctccttacaataccgttaagttctttttcactaccatcattgctctcctccttggca

SEQ ID NO: 3161 - DNA, 266 bp, Zea mays
ccgcggcgcgaacacaacgccggacgcaccccggcggcgctgctcttcatccggccatggaacaacctgcagtacgtctccggcgccgccttcctcctcaccgtctactcggacgtcctcgcctcgctgggccagctcctacgctgcggctccggcgacgacggtggcgaacccgccgccggcgacgcgggcgacgtgctggctttcgccaagtcgcaggccgactacatcctgggcacgaactcgatgctcaccagctacctggt

SEQ ID NO: 3162 - DNA, 272 bp, Zea mays
gcctctcctcctccagagctcgtcgccaccggccaccgccaccctcgatcacgccgtccgtcgaggtaaggtcagcatggtgagggtcagtgtgctcaacgatgcgctcaagtccatgtacaacgctgagaagatcggcaagaggcaggtcatgatcaggccgtcgtccaaggtcatcatcaagttcctgacggtcatgcagcgccacggctacattggagagttcgagtacgttgatgaccaccgatcgggcaagatcgtggtcgaactca

SEQ ID NO: 3163 - DNA, 152 bp, Zea mays
atacgccctttttttttttttttttttgctttgttaagaatataaacaatgaggtttcaattttggtggcgccatccggtctgattgcgtactagtatcatgcatatctgagctggtctttccggagtaacagtttttttttgtttcgtgtc

SEQ ID NO: 3164 - DNA, 284 bp, Zea mays
tgaagattgtcacagttaaaagagatgatattgctgacacacctacagtcgcgacaccattccgtgaacctcgttattcattgggcggtgaaacaccaatgcacccgtctcgaacaccacatcatgcttatcagactccaatgcgggaccctggagcaacaccaatacatgatggaatgcggactcccatgcgaagtcgagcctgggctcctatgagtcctccaagggacaattgggaagatggaaatcctgctacttggggtagcagtcgagcttacgagcca

SEQ ID NO: 3165 - DNA, 292 bp, Zea mays
ttctggggtttagataaaaagctcgctcaaaggaagcaattcacagatgggaaatggctcatttcctattcgaaatactccaaggcccttgagtccttttatgagaagtttgatccagatttcattgatattaggacaaaagcacgtgaggtgttgcagagggaggacgatctaaatgaaattgtgcagcttgttggtaaagatgcgctggcagaatctgacaagattacactggagacagcaaagctactgagagaagattatttggcacaaaatgcatttaccccatatg

SEQ ID NO: 3166 - DNA, 292 bp, Zea mays
tctaaagagaccagagaactgggcactagttgaaaaggcaaaatacatctacattgctggatttttccttacagtgtcgcctgattctatccagctagtcgctgagcatgctgcagcaaataacaaggtgttcctgatgaacctctctgctcccttcatttgtgagttcttccgtgatgcccaagagaaggtcctcccgtatgctgactacatcttcggcaacgaaactgaggcaaagatctttgccaaagtcagaggatgggagactgagaatattgaggagattgctttg

SEQ ID NO: 3167 - DNA, 289 bp, Zea mays
tagctcgggtcaaaccctaagcagggagttgatttatccgctgcagccatgagtaagttgcagtctgagtctgtcaaggatgccatctcccagattgttggggatgccaaggagaagaataggaagttcactgagactgtggaacttcagattggtctgaagaattatgatccacagaaggacaagcgtttcagtggctctgttaagttgccccatatccctcgtcccaagatgaaggtgtgcatgcttggtgatgcccagcatgttgaggaggccgagaagatgggac

SEQ ID NO: 3168 - DNA, 287 bp, Zea mays
ggaaagcaggctgatttcttattgtgcatcggcgatgataggtctgatgaggacatgtttgaaaatattgctgatatcattgggaggaatttggttgctccaagaacagcactgtttgcgtgcactgtgggacaaaaaccaagcaaagccaaattctacctggatgatacattcgaagtggtcactatgctgagcgcactggcagatgccacaggtcctgaactggagactgattcggctgatgaatctgtcgcatatatctcatcacttgatattggtgacgaaca

SEQ ID NO: 3169 - DNA, 292 bp, Zea mays
tggaggatctaaaacgtgcagcgcaacatgtttgcggggtcgacttaacagatagagtagtagacatcattttccatgtgttcgacacaaatcaggatgggaacttgagcccagaagagttcttaagagcgttacaaagaagagaaactgatattcgtgaaccaacaataccaggtccattggggttcttgtcttgctggttcagtggtaggaagtgttcttcactaaaacatgtggttatctgattgagcccctatttgatcctcacggtatctgtcattcgcctttgatt

SEQ ID NO: 3170 - DNA, 291 bp, Zea mays
tcaacctcagtgagatccgtcccggccaggatgtgactgttactaccgacaatgggaaatctttcacttgcatcgttcgctttgacactgaggtggagctggcgtacttcaaccatggaggcatcctcccttatgtcatccgcaacttggcagctgcgcataactgaggcaagatcacacaccgtttgacccacaatggcagtggcaggctccatgttcccagggctagcgacctggttctcaatgtagtgacatttgtgatggatctaggggtctctttgtcgattcagc

SEQ ID NO: 3171 - DNA, 286 bp, Zea mays
cggctcgaggtactagagtatttgacgcagatccatcaaaggaaaaaaagaaaccaaaggaaggtgacagtattgttcaggatgctcctgcagatattccttcccttctagaattgaagcgcgtctactacgaactgatgattcgttattactctcacaacaatgattacttggaaatctgccgttgttacaaggctatttatgatattccagcaataaaagaggatccaacaaagtggataccgattcttaggaagatctgttggtacttggtgctagcacctca

SEQ ID NO: 3172 - DNA, 229 bp, Zea mays
aggctcgagagcaatttctctagcacttcaaggaaggatatctctgaagatacaagagaatttgttggagagctgaatattacagtcgtgaaaggtactaacttggccgttagagacatgctaccaagtgatccatatgttgttttaacactcggagggcaggaagtgtatgaccatgatacgttctcagccgatgatatcatgggtgaagcagagatagatctcccac

SEQ ID NO: 3173 - DNA, 278 bp, Zea mays
tgcgccgtcactgaatcctcagatcacggctagccgtaatcacgccactctgctgactcccggcgagcagtgtaacattttccttcagccatgggcaaggagaagactcacatcaacattgtggtcattggacatgtcgactctggcaagtcgaccaccactggccacctgatctacaagctcggcggtattgacaagcgtgtgattgagaggttcgagaaagaggccgcggagatgaacaagcggtcattcaagtatgcctgggtgcttgacaagct

SEQ ID NO: 3174 - DNA, 284 bp, Zea mays
cgcgttcctcagatcagatcggcaaggccaatccgaaatctcgagctttcgcgccggcgaccacagcaaagaggaggccacagcacgacagcgccccagggttcctactctcgtcgcagcggcagcagtgaggggaagatgtcgtcggtgttcagcggcgatgagaccgcccccttcttcggcttccttggcgccgccgccgctctcgttttctcatgcatgggggcggcgtacgggacggccaagagtggcgtcggcgtggcgtccatgggtgtcatgcgccc

SEQ ID NO: 3175 - DNA, 284 bp, Zea mays
tggctgaaggcaagcccgactgggtgaaggatcttgatgctgttggcgagaatggagaggagattgagaacccacttactctgttgaatgatccatcctctgttgagccactggggaactgtgggaagaaggtcctactgtggtggcttcgtgttgaagcacgggcggatagcaagtttcctcaagggtgggtaattgagccacctttggaagtcgtcgtccccgcaaagcgcactccatggcctgaaaccacccccgagcttccatccgagttattggatgac

SEQ ID NO: 3176 - DNA, 280 bp, Zea mays
cagagaaacacatggcagcagcagcagtgaagtcgtcggccgggatggcggggaagaagtcccggaagccgtacgtggtgagcaggccgcgggagaagtggaccgccgacgagcacggccgcttcctccacgcgctgctgctgttcggccgcgactggaagagggtccaggcgttcgtcgccaccaagacgggcacgcagatacgcagccacgcccagaaacacttcctcagagcggacaagaagctgggcctcgccgtgccgccgcggcaccctcaccg

SEQ ID NO: 3177 - DNA, 279 bp, Zea mays
tggggttgaagcagcagagacctacttcaataacctatctgacaaagataagacagagaaaccctatggtgcacttctcaactgctacacacgagaactcttggtcgacaaagcgttggcccattttcggaatatgaaagagctgggtttcgtgttctccacgctcccctacaatgacctcatgggcctctataccagaatagggcagcacgagagggtcccttcggtgatggcagaaatgaaaagcaatgggattgttcctgataattttagctacag

SEQ ID NO: 3178 - DNA, 279 bp, Zea mays
attttctctcctctctccgtcgccgcctcgggccaaaccctacgcagggagttgattgatcgattgcagccatgagtaagttgcattccgagcttctcaaggattgcatctcccagatagttcaggatgccaagaagaataggaagttcactgagactgttgagcttcagattagtctgaagaattatgatccacaaaaggacaagcgtttcagtggctctgttaagttgcctcacatccctcgtccaaagatgaaggtgtgcatgcttggtgatgccc

SEQ ID NO: 3179 - DNA, 281 bp, Zea mays
cccttccgttcccttcccacgaaaaccggagagggagtgagaagaagcaacaagaagcggagagccaacgcgcaacgcaagccctgagatggcggcgccggcgccgaagcaggaggagctgcagccgcacgccgtcagggaccagctgccatccgtctcctactgcctgacaagcccgcccccatggccggaggcggtcctcctcggcttccagcactacctcgtcatgctcggcaccaccgtcatcatccccaccgcgctcgtgccccagatgggcggcg

SEQ ID NO: 3180 - DNA, 278 bp, Zea mays
cgtcttcatcatcctccttattgtcaccgcgttcatcactgttgcactgacatacttccagcttgctgctgaagaccatgagtggtggtggaggtcattcctttgcggaggatcaactgggtttttcgtgtacggctactgcctgtactactactatgcgcgatccgacatgtctggcttcatgcagacatctttcttctttggctacatggcctgcatctgctatgcattcttcttgatgctcgggatggtgggcttccgcgccgccctgttctttg

SEQ ID NO: 3181 - DNA, 280 bp, Zea mays
gctggaggagttatgacagtgctgatcccgaggaacaccaccatccccaccaagaaggagcaggtattctccacctactcggacaaccagcccggtgtcctgatccaggtctacgagggtgagaggacccggacacgcgacaacaacctgctgggcaagttcgagctctccggcatcccccctgcaccccgtggtgtgccacagatcaccgtgtgctttgacatcgacgccaacggcatcctgaacgtgtctgccgaggacaagacaacggggcagaaga

SEQ ID NO: 3182 - DNA, 279 bp, Zea mays
cggcacctggtggccgtcaagcggctccgggagaagatcaccaaggggcacaaggagttcgaggccgaggcggcggtgctgggacggatccgccaccccaacctgctggcgctcagggcatactacctgggacccaaaggggagaagctactcgtcttcgattacatgcccaacggcagcctccactcgttcttgcacgctcgcgctcccaacacgccggtggactgggcgacgcggatgacgatcgccaagggcacggcgcgtggcttggcctacctc

SEQ ID NO: 3183 - DNA, 280 bp, Zea mays
atttcggcaaccccgcagaaaaaaaaaagggcgaaacgaggccaccagctcaccgccgagcggaagctggcgccgagcaaccaacccctctcctcgtccgccgccgtctccccggaccatgtccatggccgcctcctcccggctgctctgggcgtcccgcgccgccgcctacctcaagatctccaccttccccagggccttctccaccgtgctgaaggatctgaagtatgctgacactcatgaatgggtgaaagttgagggtgattcagcaaccgtgggg

SEQ ID NO: 3184 - DNA, 277 bp, Zea mays
ccaattcctgacttgaatgacaagcttgttgtatttgggcgagttatcaagggagaggacatcgttcaggagattgaagaagtcgacactgatgagcattaccagccaaaggccgccataggcatcatcgatatcgtgctaaaacaggagccttgagcctggatgcacatgatgacgttaaccacatgccgacggacttttctgtagttggaaaatctatctcatcgagttggtttttgttttggtgccttattatgtgttgttgcgtggaaagcag

SEQ ID NO: 3185 - DNA, 275 bp, Zea mays
ctgccgtctacgcctccaatttggcctctctcccttgcaagtataagcttcaccttcaaccatgggtaaggagaagtcccacatcaacattgtggtcattggccacgtcgactctggcaagtcgaccaccaccggccacctgatctacaagcttggaggcattgacaagcgtgtaatagagaggtttgagaaggaggctgctgagatgaacaagcggtccttcaagtatgcttgggtgctcgacaagctcaaggctgagcgtgagaggggtatca

SEQ ID NO: 3186 - DNA, 244 bp, Zea mays
tggtgacaatagcttccagggccatagggagtggctggctgaggttatatttcttggacagctctctcacccgaatttagtgaagttgatcggctattgttgtgaagatgaccacagggtccttgtttacgagttcatgcctctaggaagtgtggagtctcatttgttttcaagggttatggtgccacttacgtggtcgatcagaatgaaaattgcgctcggtgctgcgaaaggacttgctttt

SEQ ID NO: 3187 - DNA, 282 bp, Zea mays
cgagacgagagacgagacccagacgtctcgccctcggcttcttcctcccctccctgaccgctgccgcgacctctcggcgaaaccctaacctaccttagaccccgccgccgccgccgcccaagggagagagagacttgcacatcaaagggcgtccgatggggaagaagaagaagcgcgtcgataaggtcttctgctactactgcgaccgcgagttcgacgacgagaagatcctcgtccagcaccagaaggccaagcacatcaagtgccacgtatgccacaaga

SEQ ID NO: 3188 - DNA, 277 bp, Zea mays
gcagcggattcccctcgagagatccggcccttggcgcggtcgccggagagagcggcatggggctctgggactcgctcctcaactggctccggagcttgtttttcaagcaagaaatggagctctccctcgttgggttgcagaatgctgggaagacgtcgctggtcaatgccgttgctacaggtggctacagtgaggacatgattccaacggtaggcttcaatatgcggaaagtcaccaagggatatgtcacgattaagctttgggatcttggtgggca

SEQ ID NO: 3189 - DNA, 240 bp, Zea mays
ctgttagtgaagttgatatcttggatgatgggtatcgctggcgcaaatatgggcagaaagtagtgaaaggaaaccctaacccacggagttactacaaatgcacacatacaggatgcccagtcaggaaacatgttgagagagcatcacatgacccgaagtcagtgatcacaacatatgaaggaaaacataaccatgaagtcgctgcttccaggaatgcaagccatgagatgtctgcagctc

SEQ ID NO: 3190 - DNA, 279 bp, Zea mays
  unsure (1)..(279): unsure at all n locations
gcaaagcgaagtngcgcacagcagctgctgcaggtctcctgacatggcgaaggacatcgaagcatcggggcccgatgccggcgagttctcggccaaggactacaccgaccctccgccggcgccgctcgtcgacgcggatgagctcaccaagtggtccctctaccgcgcggtcatcgccgagttcatcgccacgctgctcttcctctacatcaccgtggccaccgtcatcgggtacaagcaccagacggacgcggcggcgtcgggcctcgacgcggcgtg

SEQ ID NO: 3191 - DNA, 271 bp, Zea mays
acttcatgctctcctccttcgcagaagagatcaccggtgcgtaggaggagagcatgaagtggatcctcgggtaaggacccaggttggtctggaactcgttcacatccacattgatcgcaccatcgaacctcagagaagcagtcagcgatgagatcacctgagacacaaggcgattcaagttggagtagtctgtggcggagatcaccagcagcgcgttcgagccggcttccatgatggtcaagtgcgacccacggcacggcaagtacatggc

SEQ ID NO: 3192 - DNA, 270 bp, Zea mays
ccccttccccgcaccgcacccaacccccgtcggagagagagagagagagatggcatcggtggcggagatgcagcccctcgcgccggcggggtaccgcgcgcgccggagatgaaggagaaggtggaggcgtcggtggtggacctggaggccgggaccggggagacgctgtacccggggatctcgcgcggggagagcgccctccgatggggcttcgtccgcaaggtctacggcatcctcgctgcgcactgctcctcaccaccgccgtctccg

SEQ ID NO: 3193 - DNA, 231 bp, Zea mays
gcaagttcaatctcacctccaaccatgggtaaagagaagtcccacatcaacattgtggttattggccatgtcgactctggcaagtcgaccaccacaggacaccttatctacaagcttggaggcattgacaagcgtgtgatcgagaggttcgagaaggaggctgctgaaatgaacaagcggtccttcaagtacgcgtgggtgctcgacaagctcaaggctgagcgtgagaga

SEQ ID NO: 3194 - DNA, 274 bp, Zea mays
aaaacctccaaggctccaaccctagccgcgatccgacaacgcctccatccctagccgactgctgcaagcttcagagctcaagagtcagggcgccatggcgacagagacggagaccttcgcctttcaggctgagatcaaccagctgctctcactcatcatcaacaccttctattccaacaaggagatcttcctccgggagctcatttccaactcttccgatgcgttggacaaaatcaggttcgagagcctcactgacaagagcaagctcgatgcg

SEQ ID NO: 3195 - DNA, 236 bp, Zea mays
tgcctgggcctgtcgcgcgaggaggcctgccacaacctcctcttcgccaccaccttcaacagctacggcggcctcaaggtgctgttcccgggcctgctggccaacgtggccagcggcggcgagaagctccacgagcggctggtggccgagatccgcggcgccgtggccgacgccggcggcaaggtcaccctcgcggcggtggagaggatggagctggccaagtcggtggtgtggga

SEQ ID NO: 3196 - DNA, 272 bp, Zea mays
cagacttctgctgcagcgcctccgccgccgccgccgcatctaacgcattccctccgccgcagccacaggcaagatggttctccagaacgacattgatctgctcaacccgccggcagaactcgagaagctcaagcacaagaaaaagagactcgtccagtcgcccaactccttcttcatggatgttaagtgccaggggtgcttcagcataaccactgttttcagccactcccagactgttgttgtgtgccctggctgccaaactgtcctctgcc

SEQ ID NO: 3197 - DNA, 227 bp, Zea mays
tgcaccccggccgcgttcgccgacgccgcactcaaggtctgctcgctgagcgttgccgatgccgaggccgcgttccccgatgcctgggacgccgagtacctctgcatggaccttgtgtacgagtacacgctgctcgtcgacggcttcggtttggagccgaccaaggagttcacgctggtgacaaaggtgaagtacggagaatactacgtcgacgcagcatggccgct

SEQ ID NO: 3198 - DNA, 271 bp, Zea mays
ctcaacccaggaacagagcgaggcgacgccgcggcacctcttctccggcgaagggaaatggcaaccgttccaggggatctgatctggcaggttgtgaggaagaacaactccttccttgtgaagcagttcggcaacggcaatgccaaggtgcagttcaccaaggagccgaacaacctctacaacatccactccttcaaacactcgggtttggcgaacaagaagactgtgacgatccagccagctgcaaaggactcggctgtggtcctctcta

SEQ ID NO: 3199 - DNA, 264 bp, Zea mays
gcgagactggccgtggcgtgcgcgctggcgtcggcgcatggcgcagtggtcgccgacgttctacgacgcgagctgccccagcctgcaggccatcgtgcgggccgagatggccgccgccgtgcagcaggagccgcggatgggggcctccatcctccgcctcttcttccacgactgcttcatccaggggtgcgacgcgtccgtgctcctcgacgactcgccgacgctgacgggggagaagaacgcgaggcccaacgccaactccct

SEQ ID NO: 3200 - DNA, 268 bp, Zea mays
aatcagtgcaggagggacaagctaaaatgaaagcgctgttcaaaaaacatggtgttagtccacttactccaatgaaaggactcctgatccaagggccaatattcatgagctttttctttgccatatcaaacatggttgagaaagtaccttcattcaaaggaggtggaacattgtggtttactgacctgacgactccagattctctttacatcttgcctatgttaacaggactgaccttcttggccacagtggagcttaacttgcaaga

SEQ ID NO: 3201 - DNA, 227 bp, Zea mays
gtgatcatcattgagatactcctgggcccgtacatggggccggtcatgtacgaggcccagctgctgatggacatgctcatgatggtgaacaccaagggcaggcagcgcggcgaagacgactggcgccacatctttaccaaggctggcttctccgactacaaggttgtcaagaaaatcggagctcgtggtgtcatcgaggtctacccatgatccatgatcgatgtcat

SEQ ID NO: 3202 - DNA, 267 bp, Zea mays
acgcatcatacaggcaatgattgatgtatgcgcgaatagtggatggcttacgagtgcattgacttgcatgcatctcttgcagatgatcatacagggtctctggtttgagagagattatgaatccctctggatgttgccatccatgaatgatgatatattagaccatctcaagagtagaggagtctcaacagtcccctccttactagatctttcccgtgaagaattgcgtagggtacttcaaccattttctgcgtcagagttgtatca

SEQ ID NO: 3203 - DNA, 265 bp, Zea mays
caattgccattttctaccgctcattagcagcaataccatttggcacaatggttgtcatgtttgtactttgggcattcatatcttttccgttggtgcttttgggaactgttgttggtagaaactggagtggtgctccgaacaatccctgccgagtaaagactattccacggcctattcctgagaagaagtggtaccttacaccttctgtcatctcattgatgggtggcctgcttccctttggcagtatcttcattgagatgtactt

SEQ ID NO: 3204 - DNA, 228 bp, Zea mays
ggcaaggctgccgacctcacctactgggagagcgctgcccgcatgattgcggatgtctccaagtctgacaagattgttgttgagaagtccactgtccctgtcaagaccgctgaggctattgagaagatcttgacccacaacagcaagggcatcaactaccagatcctttccaacccagagttccttgcggagggcactgccattgaggacctgttcaagcctgacaga

SEQ ID NO: 3205 - DNA, 316 bp, Zea mays
catccgccgccgcagccatccgcttcttctcttcggttcagctctcgagtttccaggatgaaggtaatagctgcctacctgcttgctgttctgggtggaaacacttccccgactgctgatgatgttaagagcattctggaatcagttggtgctgaagctgatgaagaaaaactagagttcctgctcacagaactcaaagacaaggacataacagaagtgattgcagctggaagggaaaggttatcctctgtgccttcaggtggtggtgcaattgacatgggagctccagcagctgtagctggcggtggcgcacacc

SEQ ID NO: 3206 - DNA, 314 bp, Zea mays
tggcggccgggcgtcgtctggcttcttctggctcaacgcagcggagatgcagattgacgtgcttgcaccaggttgggatggggtcactgaccatgagaacgggcggatcgacacactgtggatggctgaggctggtgtcatcgatgcattcttctttgttggttctgagcctaaggatgtgatcaagcagtacataagtgtcacgggcacaccttcaatgccacaacagtttgctactgcgtatcaccaatgccggtggaactaccgggatgaggcagatgttgacggtgtagatgctggttttgatgagcatg

SEQ ID NO: 3207 - DNA, 312 bp, Zea mays
cagccgcacgtgatgatgatcccgtacccggcgcagggccatgtcacgccgatgctgcagctggccaagctactccacacacgcggattccacgtcaccttcgtcaacaacgagttcaaccaccgtcgccacctgcgcgcgcgggggccgggcgcgctccacggcgccccggggttccgcttcaccgccattgacgacggccttccgccctccgacgccgacgccacccaggacgtccccaagctctgctactccaccatgaccacctgcctaccccggttcagggacctaattgtcaggaccaatgccgat

SEQ ID NO: 3208 - DNA, 309 bp, Zea mays
gggcatatcgaggaggtttttagggtggtggtggtgttgtgaggagctgctgccgctgctctccagtctccaccgatggcgatcaagaacatgacggtggcggcgacgacgcggtcgctggacgcggacatgacggtggacgagttcaaggagtggctgcggcggttcgacacggaccaggacgggcgcatcagccgcgacgagctgcggcgcgctctgcgtgccatccgctcccggttcacggggtggaggagcaggcagggcatcagttatgccgacactgacggcgacggctacatcgacgacagc

SEQ ID NO: 3209 - DNA, 311 bp, Zea mays
acaagaaaccacccccttccggcacacgggctcgaccacctgactccatcaccgtgcctgtctgtgttctagggacaagaagagcagagagatccaggagcgagcagaggcggggagaagaggatgagcaccacaacggcgtcgtcgctgaaccccaacgcgccgctcttcatcccggcggcgtaccggcaggtggaggacttctcgcccgagtggtgggagctcgtcaacaccaccgcctggttccgggaccactgcttccggcagcgccagtaccacgaggccgcctgcgacgacgtcgcgcgctcctc

SEQ ID NO: 3210 - DNA, 311 bp, Zea mays
gcagcagccaattcgctcgagttcagatcgagcgcgcgccaagcaagtcttccggccggccgcgaagagcgcaatcaagcaagacaagatggtgaagctcgccttcggaagcgtcggcgactccttcagcgccacctccatcaaggcctacgtggccgagttcatcgccaccctcctcttcgtcttcgccggcgtcggttccgccatcgcctacgggcaactgacgaatggcggcgcgctggacccggcgggcctggtggcgatcgcgatcgcgcacgcgctggcgctgttcgtgggcgtgtccgtcgcgg

SEQ ID NO: 3211 - DNA, 311 bp, Zea mays
ctgctccccctcccccgcaccagcctcaagccctcaaggcctcaaggcatcgccggcgccgcaacttcgctgaggaagcccgcacccctgcccggatccgatggccaacagcaacctcccgcggcggatcatcaaggagactcagcggctgctcagcgagccagcaccggggatcagcgcgtcgccctcggaggagaacatgcgctacttcaacgttatgatccttgggccggcgcagtcgccctatgaaggtggagtttttaagcttgaactctttttacctgaggaatatccaatggctgccccaaagg

SEQ ID NO: 3212 - DNA, 304 bp, Zea mays
ccgtgcgcggcggggcagaagtactacgggcgcgccgctgcagatctcgtggaactacaactacgggcccgccgggagggacatcggcttcaacgggctcgccgaccccaacagggtggcgcaggacgccgtgatcgcgttcaagacggcgctctggttctggatgaacaacgtgcaccgtgtgatgccgcaggcttcggcgccaccatcagggccatcaacggcgccctcgagtgcaacgggaacaaccccgcccagatgaacgcgcgcgtcggctactacaagcagtactgccagcagctcc

SEQ ID NO: 3213 - DNA, 301 bp, Zea mays
  unsure (1)..(301): unsure at all n locations
gtcatggtctcctactccagctggaacggagtgnagatgcacgcgaaccatttcctggtcacggattttctcaagaacaagctcaagtttaggggttttgtgatttccgactgggagggcattgatcggatcactactcctcctcacgccaactactcttactcaattgaggctggtgttggtgctggaattgacatgatcatggttccattcagatacacagaattcatcgacgatctgacgacacaagttcagaacaaggtaatccccatgagcagaatcgacgacgccgtctacagga

SEQ ID NO: 3214 - DNA, 305 bp, Zea mays
gagaaagatgtcgtggttcgggcaccaccaccacaaccagccggctcccccggcgtcgggccccaaccaggtgttcaagatcttctgccgcgccaacgagaactactgcctggccgtccgcgacgcgccgtcgtgctggccccggtcaaccccaaggacgaccaccagcactggtacaaggacatgcgcttcagcacccgggtcaaggacgaggaaggcatgccggcgttcgcgctcgtcaacaaggccacggggctcgcaatcaagcactccctcggccagtcccacccggtcaagctcgcgcc

SEQ ID NO: 3215 - DNA, 302 bp, Zea mays
ctcgagcgcgatcggggaggccaccaaccaccatatggcgggagggaaggtttactcgttcgaggaggtgaggaagcacagcgaccgcaaggactgctggctcatcatcgccggcaaggtgtacgacgtcacgccgttcatggaggagcaccccggcggcgacgaggtcctgctggcgtccgtcggcaaggacgccaccgcggacttcgaggacatcggccacagcgcctccgccaaggagctcatgccccagtactgcatcggcaaggtcgacgcggctaccttcccggccaagcccgcct

SEQ ID NO: 3216 - DNA, 300 bp, Zea mays
gggaccttacaatacgataagatggaaccccaaaggacgatttgttgtattagcaggttttggcaatttgcctggtgatatggcattctgggattattcagaaaaaaaaattggtagcgaaaacaaaggcagaatgttctgtcacaagtgaatggtcccctgatggtcgtcattttatgactgctacaacagctccgaggcttcaaatagacaattgtataaaaatatttgaccacaacggatctctgcagtttaagaagatgtttgaaaggctgtatcaggctgattggaaacctgaag

SEQ ID NO: 3217 - DNA, 301 bp, Zea mays
cagcgatcacccagttgacgcaccacggcatggtgttcgtgcctgtgggctacaccttcggcgccaagctgttcggcatggaccaggttcagggcggcagccctgacggcgccggcacgttcgccgccgacggctcgaggtggccgagcgaggtggagctggagcacgccttccaccaggggaagtacttcgcaggcatcgccaagaagctcaagggttcagcctgatctacacatatacccttgtcggatatcataaaaaacacttattacagattcgtcttacccatcaatagatcggt

SEQ ID NO: 3218 - DNA, 298 bp, Zea mays
gagaatttcaagtttcggcagccataccaacaagtcctatattattgttcgctaatactggaggaccaaacatggccatgggatgaggaattttctgcactttctcaccttgaagctagtgatctgggaatttttttgccccatttcctatcaaaaaccttcatcgagtgttattttgcaggtaatattgaacccaatgaagcaaacaatatcgttcaacatgttgaagatgtcttattcaatgcaccaattagtgcttgcaagccactatccccatcgcagcatcttgccaagagga

SEQ ID NO: 3219 - DNA, 286 bp, Zea mays
gcccaacttgaactgtggaaggagaagagctctggcaagtatgagaagaaggtgtatgtgctccccaagcaccttgatgagaaggttgctgctctccacttgggcaagcttggtgccaagctgaccaagctcaccaagtctcaggccgactacatcagcgtgccgatcgagggtccctacaagcctgcccactaccggtactaggcacacggcttgcagctcactcgggccgttgtgtgctatgaagttcgctacactggcctgtcagttatcttttgcatgcata

SEQ ID NO: 3220 - DNA, 278 bp, Zea mays
gtcgcgcacaacccaggcggcaaggagcggtacgagcgcgagttccgcgagctcgccaagggcgccggcttctccgggttcaaggccacctacatcgacgccaacgcctgggccatcgagttcatcaagtgaatacggctaccaccgtcgccgcgatgagacgcatggctgccacatgcatgcttgcttggttggtcctcgtatcgtacgtcgtcgtcgtcgtgttcttctgggtgcgctgctaccttgctgctctcgcgctcgcgtatgcatgtact

SEQ ID NO: 3221 - DNA, 278 bp, Zea mays
gcccaggagcccggagctgtttcttcgtcgcaggaatgggcaaggacggcatccagtacgcatggtggacgccttcacggcggagctatcaagggcaaccccgccgcggtgtgcctcctcgaggacgccgccaaggccgccgacgagcggtggatgcagtccgtcgccgccgagttcaacatctccgagaccgccttcctcctccgggaaaagtcctccgcggccggcgccgtcccgctgttccagctccgatggttcacccccgtcgctgaggtgga

SEQ ID NO: 3222 - DNA, 282 bp, Zea mays
ggcaattattactggaaccttttcaatcatcaagcagtgctcttcattaagttgtttccctggagtgaagattgtgcacacatcctcgacagtgcatggtcagatatacataccagaaatcaattggatgctgatgatactctgcctggctgttactattggcttcagagacacaaagcacttggcaaatgcacaaggtaaaaaaaaactcggattcatatagctgatcccagctacttgtagtgcttgttcatgcattgaagtgaatctcgtatataattg

SEQ ID NO: 3223 - DNA, 279 bp, Zea mays
  unsure (1)..(279): unsure at all n locations
gcctgataagctatagccatcttcttctctgaattccagtccaagggccggaataccgtcagaaagagttgaagaaaanangaacaaagntggtgaagctcgcatttggaagctttcgcgactctttgagcgccgcgtcgctcaaggcctatgatgccgagttcattgccacgctgctcttcgtgttcgccggcgtcgggtccgccattgcctactcgcaattgacgaagggcggcgctctggaccccgccggcctggtggccatcgccatcgcccatg

SEQ ID NO: 3224 - DNA, 272 bp, Zea mays
gccagcctgttaaaaatttaaagaacttggtgaacatggtggacaattgcaaggatgaatttttgaagtgtgatctggactatgaccagattgttgtcctcgagacgaaaactgcaaaggctgctacccatgacattctgacgacgcactgtataccttctgcgacgtcggatgaccttaaggcctagtgggaggagaaggtagcatgactcagccctgtgcctgagtcaaggccatcatgtgtgccaatagtttgggccacaatttcggct

SEQ ID NO: 3225 - DNA, 285 bp, Zea mays
ctcctgagaagcatatagcaccagcggaacacgggaacggcggaagcaaacaactagaaattccccagcccggttctttgcgtgcggttgatctcgtcggaggcccggccgcggttccccaatccgccatcgaattcgatggcggccaacgccgggaataagatccgcaacgccaagctggttcttcttggagatgtgggcgctggcaaatctagcttggttcttcggtttgttaagggacagtttgttgaattccaggaatcaacaattggagcagccttcttt

SEQ ID NO: 3226 - DNA, 221 bp, Zea mays
ctgttgcgaactggacaatgcagtttgctgcaaggataaccggtactgctgccctcatgactatcctgtttgtgatacaggtcgcgggcagtgtctcaaggccagcggcaacttctctgctatagaaggaatcaggaggaaacagtctttctctaaagctccctcgtggactggctggctggagttgatggaccaatgagcgtataatcagacatggatag

SEQ ID NO: 3227 - DNA, 276 bp, Zea mays
ctcgcgcacaacccaggcggcaaggagcggtacgagcgcgagttccgcgagctcgccaagggcgccggcttctccgggttcaaggccacctacatcgacgccaacgcctgggccatcgagttcatcaagtgaatacggctaccaccgtcgccgcgatgagatgcatggctgccacatgcatgcttgcttgcttggtcctcgtatcgtacgtcgccgtcgtcgtcttcttctggttgcgctgctaccttgctgctctcgccctcgcgtatgcatgta

SEQ ID NO: 3228 - DNA, 277 bp, Zea mays
tcgatggagagatggcattgcccgtgctgaggatgagagcactggctatatattacccaataagactctacttgagatagcaaaggagatgcctgtgacaagtgggaagttgaaaagaatgattaaatcaagaaattcgattttggaacgaaatctcaaccatgttattaacaatataagggatgccatagcagcttctggtgcttttgaaagtatagtggagcagctgaagaagggaaaactggaagagttaacattggcagatgtgaagaacagc

SEQ ID NO: 3229 - DNA, 246 bp, Zea mays
acgtcgagcgcttctacgacgcgctcgccgggaaggtgatgatcgacggcaaggacatgcggagactgaacctcaagtccctgcgcctcaggatcgggctggtgcagcaggagcccgtgctgttcgccaccagcatcctggagaacatcgcctacggcagggacggcgcgacggaggaggaggtcgtagaggcggccaaggtggccagcgtacacggcttcgtcagcgcgctccccgacgggtaca

SEQ ID NO: 3230 - DNA, 275 bp, Zea mays
caatgggaggaacagcattggatgcctgttctggcttttggccaagatgggtctgcagatgaagggcactatcctccctgggcacaagttggaagtcattggtgatctggtcttctacagagacccagaggaagcgaaggagcaggaggaggaagctgctgcggcccctgagtttgctgcagtcactgattaccaaggagctgatcagtggggtggtgaccagtggacctctgatgtggctgcaccacctgttgctcctactggtgctgattggg

SEQ ID NO: 3231 - DNA, 278 bp, Zea mays
gacaagtcatatctagctatagtagctcccttgagaagcatttgacggaggagccatgtctgaggagaagcaccaccaccacctgtttcaccaccgcaagccagaggaggagggcgcctccggcgaggtcgactacgagaagaaggagaagcaccacaagcacatggagaagctcggcgagctcggcgccatcgccgccggcgcgtacgccctgcacgagaagcacaaggccaagaaggacccagagaacgagcacgggcaccgggtcaaggaggagg

SEQ ID NO: 3232 - DNA, 271 bp, Zea mays
gtacatccatttcacggtggagttccctgactcgttggcaccagagcagtgcaaggctctcgagacagtacttccaccaaggccttcatccaagctgacagacatggagatagatgaatgcgaggagacgactatgcatgatgtgaacaacatcgaggaagagatgcgcaggaagcaagctcacgctgcccaggaggcgtacgatgaggacgacgagatgccgggcggagccagagagtgcagtgcgcgcaacagtaagcagactatcatc

SEQ ID NO: 3233 - DNA, 269 bp, Zea mays
accactgcctccaagcttcaacaagctaggcagctgcaagcatctcccaaatcccagcctgctgccccgcgcgaacacacttctcttgtcgttgcattgcagggcagctagccggctacagcatccgccatggcgcgcggcggggacggcctgcaggtgctcagcgcgctggacgcggcgaagacgcagtggtaccacttcacggccatcatcgtcgccggcatgggcttcttcacggacgcctacgacctcttctgcatctccctcgt

SEQ ID NO: 3234 - DNA, 270 bp, Zea mays
ggaaaggttatcctctgtgccttcaggtggtggtgcaattgacatgggagctccagcagctgtagctggcggtggcgcacacctgctgaagaggcaaagaaggaagaaaaggttgaagagaaggaagagtctgatgaagatatgggtttcagcttgttcgattaaaacaccactgccagtttacagtttctctcgcgaatggtctcacaatattcgctggtttccacaaaataagattgtcaatagctactacgtacttatgctattctg

SEQ ID NO: 3235 - DNA, 269 bp, Zea mays
gtcagttactctgctgtaggtggtctgtctgatcagattagagagctcagggagtccattgagttaccacttatgaatcctgaactctttcttcgggtgggaattaagcctcctaagggtgttctactctacggtcctccaggaactgggaagaccctattggcaagggctatcgcaagtaacatcgatgccaactttttgaagattgtttcaagtgctattatcgacaaatacattggagaaagtgctcgtttgattagagaaatgtt

SEQ ID NO: 3236 - DNA, 270 bp, Zea mays
cgtctcgctagtggctgccctactcgtgctgcttgccctcgccgccgtttcctccacgcgcacgcacaaaaggagtccgcggctgacaacgccgggatgttggcaggcggcatcaaggacgtgccggcgaacgagaacgacctccagctccaggagctcgcgcgcttcgccgtcaatgagcacaaccaaaaggccaatgctcttctggggttcgagaagcttgtgaaggccaagacacaagtggttgctggcacgatgtactatctcact

SEQ ID NO: 3237 - DNA, 273 bp, Zea mays
atctcctcgcatttcttcccatccgatccccccttcgcaaccaaaaccccaactcgccccgcatcgatggcgcccaaggccgagaagaaacccgcggcgaagaagccggcggaggaggagcccgcggccgagaaggcgcccgccgggaagaagccgaagcgggagaagcgggtccccgctggcaagtccgctgccaaggaaggcggcgagggcaagaggggcaagaagaagggcaagaagagcgtggagacctacaagatctacatcttcaag

SEQ ID NO: 3238 - DNA, 230 bp, Zea mays
aatctatccgccaagatcttacagttcagagaatccagaatgaactgactataaaggtttatgaaacacatgcccgattagctatgcaagctggtgatttacatgaatttaaccagtgccagtcacaactgaagaggctatatgcacaaggaatcaagggttgctattttgaattttctgcttacaatttgctgtgtgtcatgctacactctaataataaacgagacttg

SEQ ID NO: 3239 - DNA, 295 bp, Zea mays
cggctcgaggtgacatatacaagaaatctgaactctaccagaggaacaaggccttgataaaggaattgagccaaccagcaccaggttcaactgacctgcatttccctagcaagtatgcgcagtcttccattacacaatgcgtggcttgcctatggaagcagaacctgtcatactggaggaaccctccttacaataccgttaggttctttttcactaccatcattgctctcctccttggcaccatcttttgggacctcggcggcaaaacgtatacatcacaagacttgatgaatgc

SEQ ID NO: 3240 - DNA, 289 bp, Zea mays
cccaggcctaacctcagttcatccgagcagccgaacacgcccgccgccattctacgccctgctgcccaggtcggacggaccctttgccggagacgagcacacgccacagcaggaattatcgggcgtagagcagcgcgaagcagagatccaatggcggcggcggaggggcagtgggtgctcatggcaacggggcggacgccgactaacattgcggtgatcaagtactgggggaagcgggacgaggcgctcatcctccccatcaacgacagcatcagcgtaacgctcgacc

SEQ ID NO: 3241 - DNA, 287 bp, Zea mays
  unsure (1)..(287): unsure at all n locations
attccctcgtagcagcagcaccagcagagtctccttcctctccggcggcgatgtctgggcgcggcaacggcggcaaggggctgggcaagggtggcgccaagcggcaccgcaangtgctccgcgacaacatccaagggatcacgaagccggcgatccggaggcttgcgaggaggggcggcgtgaagcgcatctccgggctcatctacgaggagacccgcggcgtgctcaagatcttcctcgagaacgtcatccgcgacgccgtcacctacactgagcacgcccgtcga

SEQ ID NO: 3242 - DNA, 292 bp, Zea mays
ctcctgtcatcttctcctcctcagaaacccaccaaccccgtccagccgccggctgtctcggccgccgccgccgccgtcgccgccctatcccggtccttcaggcgaaccaggttggtcatggccttcaacaagatcaaggtctccaaccccgtcgtcgagatggacggcgatgagatgaccagggtgttctggaaatctatcaaggacaagcttatattccctttcgtagacctcgacatcaaatattttgacctcgggcttccacaccgtgatgctaccgacgacaaagtca

SEQ ID NO: 3243 - DNA, 285 bp, Zea mays
tgcattctcattcaagaacgggagactggaggtaactgagatcttcaacttttcccaagatgatttgttaactgaagacatgatgatacttgacacacatggtgaggttttcatttggattggtcagtgcgtggaatcaaaagagaaacagaaggcatttgatattggccagaaatacgtggagcatgcaaattctattgatgatctttctccatatgcaccactatataaagttatggaagggaatgagccatgcttcttcaagacatatttctcttgggataa

SEQ ID NO: 3244 - DNA, 284 bp, Zea mays
cggctcgaggatatgctgcacctgaatatgtaatgacaggtcacctgacatcgaagagtgacgtatatagctttggagttgtactactagagatgatgactggtagaaggtcaatggacaagaacaggccaaacggagaacacaacctggttgaatgggcacgcccttatctgggagaaagacgcagattctataagcttgtagaccctcgtttggatgggaacttctccataaaaggcgcccagaagacggctcagctggcccatgcctgcctcagccgtgac

SEQ ID NO: 3245 - DNA, 283 bp, Zea mays
  unsure (1)..(283): unsure at all n locations
cacctccctccacggctcncccttccgccgcgaacacgccgctgtctcgaccccttctcctcctccttcagcaagatggcggagattgagataaaaacagcacctgctgacttccgcttccctacaacaaaccaaacaaggcattgttttactcgctatgtcgagtaccacaggtgtttgaatgccaaaggggatgatgctggtgtttgcgaaaaatttgccaagtactacaggtccctttgccctggagaatgggttgagaaatggaacgagcagagggagc

SEQ ID NO: 3246 - DNA, 163 bp, Zea mays
cgcctcggctacctgcactgcgtcatcaacgagaccctgcgcatgtacccggtcgctccgctgctgctgccgcacgagtcggcggcggactgcacagtcggcggctacgacgtgccccgcgggacgctgctgatcgtgaacgcgtacgccatccacagggaca

SEQ ID NO: 3247 - DNA, 286 bp, Zea mays
ctgaaatcgaggagctcatctacagcgacgtcgagaactccgagcacaagttcgtgctgaacgacaagaagaagccgatcatcttctcgatggcgcgtctcgaccgcgtgaagaacatgacaggcctggtcgagatgtacggcaagaacgcgcgcctgacggagctggcgaacctcgtgatcgttgccggtgaccacggcaaggagtccaaggacagggaggagcaggcggagttcaagaagatgtacagcctcatcgacgagtacgagttgaagggccatatccg

SEQ ID NO: 3248 - DNA, 286 bp, Zea mays
tgctgacataaaggatatgtttgagaagatggatcttaacaaggatcaaatgcttagtttcgaggagctgaagcttggtctgcataagtttggtcaccagatgcctgatgcagatgttcaaacactaatggaagcggcggatgctgatggaaatgggtccttgaattatggagaatttgttacattatttgttcatctaagacagattggaaatgatgagcatctgcataaggcatttgcatacttcgaccgtaaccagagtggttttattgaaattgatgaactc

SEQ ID NO: 3249 - DNA, 291 bp, Zea mays
tgtcgcgcacgaaagtagcaaactcctgcgaccctacccaccgcacctaccattctggagaggagaggaacagagccaagaaacaagcccggaagatggcaggcggcggagtggtgaagcacatcctgctggcaagcttcaaggaggaggtgacgcaggagcgcctggacgagctcatccgaggatacgccgcgctcgtcggcgtggtcccctccatgaaggcgttccactggggaactgatgtgagcatagaaaacatgcatcaagggttcacgcacgtcttcgagtcca

SEQ ID NO: 3250 - DNA, 286 bp, Zea mays
ccgacgaaggctagctacaccacctggtgcgggctcgtctccatcgcccgccacccgctccgtcgtcgtcgtccccgccgcgccgatcccgaatcgaatggggagcctggcgtccgagaggaaggtggtcgggtgggccgccagggacgccaccggacacctctccccctactcctacaccctcaggaacacaggccctgaagatgtggtggtgaaggtgctctactgcgggatctgccacacggacatccaccaggccaagaaccacctcggggcttcaaagtat

SEQ ID NO: 3251 - DNA, 284 bp, Zea mays
ctcatctgaagcgcgcgagagaaacgcgtatacccaggcggcggttgaggaagaggaggagaagaagaagaagatggcttcctccgcatacgcctcatggtccaagcggtggatccgtcccgaggtgtacccgctgttcgtgccgatggccgtggccttgggcatctgctcgtaccagcttgtgcgcaacatcacgggcaaccccgaggtgcgggtgaccaaggagaagagggcggccggcgtcctggacaaccacgacgagggcgagaggtacgctatgcacg

SEQ ID NO: 3252 - DNA, 283 bp, Zea mays
cggctcgagcgagggtttgatcttgtgaaggatagggaaactggtaactcaaaaggctatgcattctgtgtttaccaggacctcaccgtcactgacatcgcttgtgctgcactaaatggtatcaagatgggtgacaaaacccttactgtcagacgagcaaaccagggggcatctcagcccagaccagagcaggaaagtatcctattgcaggcacaacaacaggtgcagttgcagaaacttgtgtatcaagttggagcgcttcctacaaaggttgtatgcctca

SEQ ID NO: 3253 - DNA, 277 bp, Zea mays
taccgctacgcagccgccgcgccagatttcgccgcgctggcggagctctacccgtcctttcgccccttcgtcttcatctccggcagcgggcgcgcgtccgttgacttcaccgacttctcctccaccagggagctcacgcgcgtgctcctcctccacgaccatggcgttaactggtggattccagatggacagctctgcccgactgttccaaacaggtccaactacattcactggatcgaggatcttctctcctcggatctgattccaccaatatcca

SEQ ID NO: 3254 - DNA, 280 bp, Zea mays
atcttgtgaccctccctcagccgcgtcgcgtcgcatcctacgatccaaagctctctctggtcgcaggtcgcagccatggcgaagaactacccgaccgtgagcgccgagtacagcgaggctgtggacaaggccaggcgcaagcaccgagccctcatcgccgagaagagctgcgccccgctcatgctccgcctcgcgtggcactccgcggggacgttcgacgtgtcgtcgaggaccggcggtccattcggcacgatgaagcatcagtcggaattggctcacg

SEQ ID NO: 3255 - DNA, 277 bp, Zea mays
aagagaggcagcgcagggtgcaagaagctgtccctcgctcgctcccctgtgcttctgctagctaggtgcctgcggaggagagatacggatacgatggccggcggtggcatcgtgaacacgggcggtggcaaagactaccccggcaagctcaccctcttcgtgttgctcacctgcatcgtcgccgccaccggcggtctcatcttcggatatgacatcggtatctcaggcggcgtgacgtccatgaacccgttcctggagaagttcttcccggaggtgt

SEQ ID NO: 3256 - DNA, 284 bp, Zea mays
ttgggagacagtcgggtaccactgcaggctactcctactctgcgggtaacaaaaacaaggctgtagtctgggaagaagacactttgtatgagtacctgcttaaccctaagaagtacattcctggaaccaagatggtcttccctgggctgaagaagccgcaggagcgtgctgatctcatcgcgtacctgaaggaagcaactgcatagttcattgacatgccttttgccatgaagagaaaaattgttttgcagtttaataaaaaaacattttagacaatttgggtc

SEQ ID NO: 3257 - DNA, 281 bp, Zea mays
agttgacagtgcagagaatcttggagaagttctgcgtggtgatcgcattgagaactctccttatgtgtttgagatgggggaaccaagatgtgccagattatctgcaaagcaaaaattgatgataaacaggcaaaggagctcaaggaaaaaatagaggatgagtatcgggtgaacatgattcttgacaatctcccactagttgttcctcttgcaaggcaggataggggtgctactgtttaccaggctggatatcatgttggtgtcaagggccaatacgctgg

SEQ ID NO: 3258 - DNA, 278 bp, Zea mays
aaagaggctagctctatggttgaagaggagattcaataccttcgagtggccatgggtcatgaaaatgaatcttttgaggacttcgtgaaagcacatgatgcatgccaagacgaccttatgttttttcctaccagcaatagctatggtttagctagtgtggctggaaatgctgataagatttctgctttgcaaaatgagtttgaaactgtgaagaagcgaatggatgatgaagctaagaaggcttctcggcttgagcagaagattaagcttctgacaca

SEQ ID NO: 3259 - DNA, 285 bp, Zea mays
cttaggaatggataccatgggaatgctgctggaacaatgggtgctactgctcaatccaattggaaattcaatgttgttcagacgggagtacaccatgcgcttaatccagaccccttcagaggtgcttttggttctgacggggagaaatacgccagagatgttcaggaaatcatcgaatttggaactacagggagagttggtgggttcatttcggaagccatacagggggttggtggaatagtggaactggcaccaggatacttgcccgtggcatacagtatggta

SEQ ID NO: 3260 - DNA, 282 bp, Zea mays
gaagcaagtctccctgattggcaaggctggtggtgacaagtggaagtccctgtctgatgccgagaaggctccctacgtgtctaaggcagagaagctcaaggctgagtacaccaagaagatcgacgcttacaacaacaagcagtctggagaccccacggcgtctggtgattccgacaagtccaagtccgaggtgaacgacgaggacgaggagggtgacgagtgattatgacggatgaaactctgtccaagtgtttgcagtcagggaaaaaatctcgtcgttgt

SEQ ID NO: 3261 - DNA, 274 bp, Zea mays
cggctcgaggcaaaatctgcacgagagacagacgacgagatggccgatgcggaggacgccgccgccgcgcgccgacgggccgccataaccgactaccgcaagaagctgctcaactgcagggagctcgagtcgcgcgtcggcaccgtgagagaaagccttaaaaatgcaaagagggattttaccaagactgaagacgacttgaaatctctgcagagcgtggggcaaataattggagaggttctccgacctcttgataatgaacgctttattgtga

SEQ ID NO: 3262 - DNA, 277 bp, Zea mays
cggctcgagattttgagacaactgtaacagatgtcctgaacatgtatacaatgatcactggaaagactgtggatcttagtgtggatttgagtgcagctagtgctgctgaagaatactgatttcagtcataatgtttatcaaagatcacatcattggggacagcacatgaccaaacttcaatgagtggctagtatgagtttagtcggttccagattataccatgccgacttctactgtacctcgtgaatcgtgatgtctattgggcacttgttgctga

SEQ ID NO: 3263 - DNA, 276 bp, Zea mays
gccagcaggtgctgcgatacattccacacaacaacccccagctctctgccccagcccgtcacaggagttcccgcatctccctctggtctggtcacaggagctccgagacctctccaatggcggttaagatctacgttgtgtactattccatgtatgggcatgttggcaaactagctgaagagatcaagaaaggtgccttatctgttgaaggcgttgaggctaaaatatggcaggtccctgaaattctctctgaagaagtgcttggaaagatgggcg

SEQ ID NO: 3264 - DNA, 274 bp, Zea mays
gaaggctgtacgttgcctatcattgcccgtacgcgcagccgcttggattgccaggaactacaagggtttgcaggacaagattaagatagtcgccatcgatcttgctgacaggccaacatggtacaaggagaaggtttatccagaaaacaaggtgccttctctggagcacaacaaccaggtgaaaggtgagagtttggatctggtcaagtacattgacagcaactttgaaggcccatcgttgctcccagaggatccttcaaaaaagcagttcgct

SEQ ID NO: 3265 - DNA, 272 bp, Zea mays
gagcttctgcgctgctgaagacgctgttgctacctcgcccaaatctgttttccactgctttgacggcgagaacgtggagagtgctcctcctcctatgaagaaggactacaaactagctaatcttctctgctgggacgaggaagcggatgccatggaggagaaggcgggagtacttgatgagtaagacgggcttctggtgtcgatttgcttctgagttgtttattttatatcgtcgcaatttcgtggttgtcgtttggttattctgtgaagca

SEQ ID NO: 3266 - DNA, 272 bp, Zea mays
cctcgttcctgtcgcgcaccacgacctccacttcacatctcccccggcggcggcgcggtcagttgaacaatggcggactccaaggccacctcggcggtcaccctccgcacccgcaagttcatgaccaaccgcctcctggcccgcaagcaattcgtgcttgaggtgatccaccccggccgcgccaacgtctccaaggcggagttgaaggagaggcttgccaaggcgtacgaggtgaaggaccaaacaccatctttgtcttcaagttccgcacc

SEQ ID NO: 3267 - DNA, 284 bp, Zea mays
cgctgatcgtatgagcaaggagatcacttcccttgcaccaagcagcatgaagatcaaggtcgttgcaccgcctgagaggaagtacagtgtctggataggagggtcgatcctagcctcgctcagcactttccaacagatgtggatatcgaaggaggagtacgacgagtctggcccggcaattgttcaccggaagtgcttctagggtttcacaagttcctcgtcgttacctagtctcaaattatgtcgcctccatttctcgagatatgtgtggcagatttgcatga

SEQ ID NO: 3268 - DNA, 283 bp, Zea mays
aggtcactcgttgatggtgaaggttacaatagtgctgatgaacagggtccctgttacgcctcgagttatgatgattcggaaagagagcgtatgtttgagcatgacctaaggcgagtgaaagggttggaaatcagaaagacggccgaagatgggaactgtctattcagagctgttgctgatcaagtttatggagatgcagaagcttatgacatggctaggcagatgtgtgttgattatatggaaagggaacgggatcatttctctcagtttataactgaaattt

SEQ ID NO: 3269 - DNA, 244 bp, Zea mays
tcttgacggaagtcacaacttaaagatttcagactttggtttgagtgcacttccaaactgcaagagaaaagatgggttactccacacaatttgtgggactcctgcatatgttgctccagaagtaattagtcaaaaaggatatgatggtgcaaaagctgacatatgggcttgtggagtgatcctctatgtgttgttggcgggctatcttcctttccaagacaagaacatgatggacatgtataag

SEQ ID NO: 3270 - DNA, 281 bp, Zea mays
ggcctgcacccaaagcttccggagaattcctcccttgccccgccgtcgcatcctcttcgaagttcgaatcgaatcgcgccgcgatcacccacctcatggcggacaaggagcctgtcgtggagcggccagatgcgggtgaggaggaggaggacgcctcagccgccgccgccgctggggaggaggaggacacgggcgcccaggtggctcccatcgtgcggcttgaggaggtagccgtcaccaccggcgaggaggacgaggacgtcctgctcgacatgaaggcg

SEQ ID NO: 3271 - DNA, 283 bp, Zea mays
tgcatgagcttagccctcctgtaacacacccagacataaagtcaagtgctatattgctatctgaggatggagctgcaaagatagtagacatgagcgtttggcatgaagtatatttcagaggaaacatgcccaaggatggcgacctagttgatcaccaggaacgagtagctgcagatccagctgggaatgtctacagttttggtctactcatgctggagatcatctcagggaagcctccgtactccgaagaaaagggttccctttcagacttggctttggagtg

SEQ ID NO: 3272 - DNA, 276 bp, Zea mays
tgaagggaggtgcattcaccggtgaaattagtgctgagatgctcgtcaaccttggcgttccctgggtcattcttggacactctgaaaggagagctctgctgggagaatcaaatgagtttgttggagacaaggttgcttttgctctgtctcagggactaaaggtcattgcatgtgttggtgagacccttgaggagagggaggctggttcaaccatggatgttgttgctgcacaaacaaaagcaattgctgagaagatcaaggactggagcaacgttg

SEQ ID NO: 3273 - DNA, 279 bp, Zea mays
ttcctcacagcagcagccatggcggccgagccggagaagcaggcggcccccgcggcacaggagacggccgtgcacatcgtgtacgttgaccgccccgaggacgccgaccctgaggagttccacatccgcaccctcacccccgtcctcggcagcgaacagaaggccagggacgcatgctctaccactacaagaacgccgccagcgtgttctccgcgaagtcaccccccagcaggtcaaggatctcaaggagcaaccaggtgttctccaggttgtgccgag

SEQ ID NO: 3274 - DNA, 271 bp, Zea mays
acatcgtctactctgcctactgacattgaaacaacatggcacgtggacctaagaagcatttgacgcgcatcaatgcgccccgatcctggatgttggacaaaatcggtggtgtctttgctccccgtccatcttgtggtccacacaaactacgcaattcacttccattggttgtaattttgcgtaatcgtctaaagtatgctttgaattatcatgaagttgtgaaaattgtaatgcaacgtactatcaaaatcgatggtaaagttcgtaccga

SEQ ID NO: 3275 - DNA, 281 bp, Zea mays
tgcagccgcagccgctgcttttcgttcgtcttcatcctacgcgagggcgaaacccacaaaccctctccctcctgtactccggccgacacatccaggggcgatgacgctgggtagctccggcgccggatcgagcgtcgtcgttcctcgaaacttcaggctattagaggagctcgagcgtggagagaagggcattggtgatgggacagtgagctatggaatggatgatgctgatgacatctacatgcggtcatggactggtaccatcattggccctcacaata

SEQ ID NO: 3276 - DNA, 208 bp, Zea mays
gtgaaaaatcaatcaagacaaaggttggggcattttcagtactgaaggagcttgtggttgtattaccagactgtcttgctgatcatttcgggtcacttgttcctgggattgagaaggctttgaatgacaagtcttctacctccaacctgaagattgaagcccttgtattaacaaggcttgttatggcttcacattcaccatctgtgtt

SEQ ID NO: 3277 - DNA, 232 bp, Zea mays
accaacgtgcctttggagggcagagcttagattttggcaaaggtggacaagcctaccgttgtgcctgtgctgctgacagaacaggacatgctatgctgcacacactatatggtcaagcaatgaagcacaacactcaattttttgtggaatactttgctttggaccttctcatggacaatgaaggaaaatgtcagggaatcattgccttaaacatggaggatggaactcttca

SEQ ID NO: 3278 - DNA, 196 bp, Zea mays
cggctcgaggccaaaggtaatgtgctcgaacctcaagggttaattgaaattaagttcaggtcagaggaactccaagactgtatgggcaggcttgacccagagttgataaatctgaaagcaaaacttcaagatgcaaagcatggaaatggaagtctaccagacatagaatcgcttcagaagagtatagaagcgcgta

SEQ ID NO: 3279 - DNA, 271 bp, Zea mays
gcgaaggagtagcagcagcaggcggcgccgagtagcggctccccatctcgagcttgccaccatggctagaggattgaagaagcatttgaagaggctcaatgcccccaagcattggatgctggacaagcttggcggagcttttgctcccaagccatcttctggacctcacaagtctagggagtgcctgccactgatcctcatcatcaggaacaggctcaagtatgctcttacataccgtgaggtcatttccatcctgatgcaacgccatgta

SEQ ID NO: 3280 - DNA, 73 bp, Zea mays
actcactgcaccgagctcactggcaatggctaccagcaccaagctcgtggcccttggctttgccgtcctcctg

SEQ ID NO: 3281 - DNA, 134 bp, Zea mays
gcgtcatgggtgaagatgttggtcattatggaggttcatacaaggtgaccaaagggttggctgagatgttcggagatctccgggtccttgatacccctatcgccgagaactccttcactggcatgggagttgga

SEQ ID NO: 3282 - DNA, 288 bp, Zea mays
  unsure (1)..(288): unsure at all n locations
gaagtttggttttgccaaacaactgcctagggcatgttgtggggctccatcgactcctgagaaagcagcttacaacttcactgtcacggccaaatgcggtgagcctggtgcgactgcctgtgctgatccgacaacccattggagctgggatggcattcacctgacggaggctgcgtaccgccatatcgctanaggctggttatacgggccttttgcggaccaaccaatcatccaatcctcatgatcacngcactcctgctgtagagtttcatcaaagtagcgcactgg

SEQ ID NO: 3283 - DNA, 197 bp, Zea mays
cggctcgagttcccgtcctgtccttccacccggcggcttaaaccctagttctcactcccatcgccgcttcagctccgccgctgcagatggagttctggggtctcgaggtcaagcctggttccactgttaagtgtgagcctggatatggctttgtgctgcacctttcccaggctgctcttggggaatcgaagagagtg

SEQ ID NO: 3284 - DNA, 185 bp, Zea mays
attgaagtcttcagctatggcgcgcctccgcatggtggtttcggggtgggtttggagagggtggtgatgctgttctgcgccctaaacaacatcaggaagacctcgatgttccctcgcgacccgcagaggcttgtgccgtaatttactgagtccaatgccctgagtttgcagcagagcgtactggt

SEQ ID NO: 3285 - DNA, 284 bp, Zea mays
  unsure (1)..(284): unsure at all n locations
tccgactcgctggcaccagagcagtgcaaggctctcgagtcggtacttccgccaaagccttcgtccaagctgacagacatggagatagatgaatgcgaggagacaaccatgcatgatgtgaacaacatcgaggaagagatgcgcaggaagcaggctcatgctgctcaggaggcgtacgaggaggacgacgagatgcctggcggagccaaagagtgcagtgcgctcaacagtaagcagactaccanaatgggattcaaggcactttggttgctcttcaattatgc

SEQ ID NO: 3286 - DNA, 277 bp, Zea mays
ctacaacccctacttccctggtggtgccatagccatgcccaaactgctcaatgatggagctgttgagtatgaggatggtactcctgcaactgaagcccagatgggtaaggatgttgtatcattcctttcatgggcagctgagcctgagatggaagagagaaagctgatgggagtgaaatggatctttctactatcactagcgcttcttcaagctgcatactaccgccgcatgaggtggtcagtcttgaagtcccgtaagctggtcctggatgttgtc

SEQ ID NO: 3287 - DNA, 280 bp, Zea mays
  unsure (1)..(280): unsure at all n locations
atgaattgtacgacaaggaagtgcggtacctcatgcaagcaaaccagaagacagataccattgatggtgaagacgaagatcaattggagcctttaacagcagaggagcaggaagagaaggagcagttattagaagagggttttgcatcatggacaaggagagacttcaacacatttattcgtgcatgtgagacatatggtcgcaatgatattaaaagtatatcctctgaaatggagggtaagacagaagaggaagttcaacgctatgctanagttttcaa

SEQ ID NO: 3288 - DNA, 278 bp, Zea mays
caagatgaagaagctgcaccgccggttcgacgacatgatggacgagatcattgcaggttatagggaggccaggagggttgcggcagacggagaggagagcaaggatttgcttggcttgctgctgtcgatggttgacgagcggccgttcgacagcggggaagaagtcaggatcaccgaaaccgatgtcaaggcactcattttgaacctgttcgtggcagggaccgacacgacgtcgaccatagtggagtggtctctcgcagagccgatccgccacccgg

SEQ ID NO: 3289 - DNA, 188 bp, Zea mays
tgcgatggggaggaccaagcgaaaggggaactagagcaagatgtgcggcgcactgctgcttgcgctcctcctcgtctctgctgctgccgcccctcaggtacttggagttggcaatggagacaatcacatgagaatcatccaggaggacatcatcgagacagtcaacaaccatcccagtgctgggtgga

SEQ ID NO: 3290 - DNA, 169 bp, Zea mays
ggcctatttgccgctcttctggcaactggtaccgcccagtgaagaagactcgcctgaggcttgtgcagagtttgagagagtacttgccaagcaagcaaccacccaattgtctgcgaagtgatcgaatcagactacaggaaggtggtaggtgttttctatttgacacaaa

SEQ ID NO: 3291 - DNA, 272 bp, Zea mays
cggggctgggcgaggacacgtaccttccccccgccgtcacgcgggtgccgcccaacccgtccatggacgaggcgcgcgcggaggcgcgggaggtcatgttcggcgccgttgacgagctgctcgccaagacgggggtcaagcccaaagacatcgggatcctcgtggtgaactgcagcctgttcaacccgacgccgtcgctgtcggccatggtggtcaaccactacaagctgcgcgggaacgtggtgagctacaacctcggcgggatggggtgc

SEQ ID NO: 3292 - DNA, 283 bp, Zea mays
gcagcagtatcttccaaatgttgccctgaaaataaatgtgaaggttgggggaaggaatactgtgcttgttgatgctttggcaaggagaatcccccttgtcagtgacatagcgactattatctttggtgctgatgtgacccatccccatcctggggaagattctagtccttccattgcagctgtggttgcttctcaagactggcctgaggttacaaagtatgcaggattggtgagtgctcaagcccatcgtcaagaattgatacaggatcttttcaaggtatgg

SEQ ID NO: 3293 - DNA, 171 bp, Zea mays
  unsure (1)..(171): unsure at all n locations
ccaaagtctatctttgacattcctggagcaaaggaggttgctattgagacagcctcattctcgaaatacgctgggttcacaggtgtccgtctaggttggactgttgtccccaaggagctccttttctcggatggacatccagttgctanagatttcaatcgcatagtttgc

SEQ ID NO: 3294 - DNA, 208 bp, Zea mays
ccgctcgaggtgtgtgtgtgttttccgactgacatgtttacccctaaattttgtagtgcaccactaccatcataccattctttggcgatcaattcttttggggcagcatggttcatgccagaggattgggtgcaccacctatacccgtggagcaattacaattgcattcgctgattgatgcaatcaaatttatgattgatcctaaggt

SEQ ID NO: 3295 - DNA, 275 bp, Zea mays
ccaaggcatctccagcctggtgtgctctgccactgcttcgcttgctaagatccggctccagggactgaacataactgatgcttcacttgctgtgattggatactacgggaaggccatcactgacctttcacttactcgtcttgctactgttggtgagaggggtttctgggtgatggctaatgctgctggcctgcagaatctcaggtgcatgagtgttacctcttgccctggagtcactgatcttgcgctcgcttctattgccaattctgcccaag

SEQ ID NO: 3296 - DNA, 189 bp, Zea mays
cctcaatatggaactccacatacagccaccccggccgcaccttcgtccacttatgacaaccaggtctgtcctatctgtcttgtgaaccccaaagacatggcgtttggctgtggacaccagacctgctgtgactgcggacagagtctcgagtcgtgtccaatctgtcgcactcccatcaacacaagaata

SEQ ID NO: 3297 - DNA, 276 bp, Zea mays
ccggctcgagcccatctgcacgccgcgccgccgagctcaaggcctttttggaggacccagcgaaccttgacaccctggctatggtgtttaacaggtcgagcagatttggaaggctgcagggagtgaagtgtgcgattgcagggaggaacctttacatgaggttcagctgcagcacaggggatgccatggggatgaacatggtctccaaaggtgtacagaacgtgctggactacctccaggctgacttccctgatatggatgtcatcagcatatcag

SEQ ID NO: 3298 - DNA, 200 bp, Zea mays
cctcctatccactgccgcctggacgcgtgcgacacacttgaccaagcagcagcagcagggatcgcgcctctgaagctgtacgggatgccgctgtcccccaacgtggtgcgcgtggccaccgtgctcaacgagaagggcctcgacttcgagatcgtccccgtcgacctcaccaacggcgcccacaagcagcccgacttcct

SEQ ID NO: 3299 - DNA, 272 bp, Zea mays
gttggatatagacaatggtgcaacaaattatggaatgccattcgttttgcgatgggcaaactgggtgatgattacattccgccggcaactgttgatgtgtctcttatgccaccaatatgcaagtggatactctcagtgcttaacaaggctgttggaaaaactgttacttctttagaagcatacaaattgtctgatgcaacatctgctatatactcgtggtggcagtatgagctatgcgatgtatttatagaagctatcaaaccttacttcag

SEQ ID NO: 3300 - DNA, 275 bp, Zea mays
caagagtgcccgccgtcgctctgattgctgtgtgaagcacggtggtggcaagcgttgcaggttcgatgggtgtgacaagagcgcacaggggagcactgacttctgcaaggctcatggagggggcaagcgatgcgcttggagcaccggctgcgacaagttcgctaggggaaggagtggcctatgcgcacgcatacgaccctgatggcttccaaggtagtgcaccatcctggacatgcacgaagcatggtcgggccttgccacttcagcggcggcgt

SEQ ID NO: 3301 - DNA, 156 bp, Zea mays
tgccggcgacgccagcacgatggcccgctacgaccgcgcgatcaccgtcttctcccccgacggccacctcttccaggtcgagtacgccctggaggccgtccgcaagggcaacgccgccgtcggcgtccgctgcacggacaccgtcgtcctcggtgt

SEQ ID NO: 3302 - DNA, 250 bp, Zea mays
cgcatgccgtgcagtcgggaagggatacgccgggccgtgaattcctgaattcatacgggcccgcggggcagagcatcgttcgacggctgggcgaccccgacgcggtggcgcgcagcgtgctcgcgttccgctccgcgctctggtactggatgaacaacgtgcacggggccatcgtctccggccagggcttcggcgccaccatccgggccatcaacggcgcgctcgagtgcgacggcaagaaccccaactc

SEQ ID NO: 3303 - DNA, 271 bp, Zea mays
cgccacccatggggtgctatgttcccacagttctatgaccattcgtgccccaaggcgaaggagattgtgcagtccattgtggcacaggctgtggccaaggagaccaggatggcggcatctttggtcagactgcatttccatgactgctttgtcaagggctgcgatgcttcggtgctgttggacaacagcagcagcatagttagtgagaaagggtccaacccgaacaggaactccctcagggggtttgaggtgatcgaccagattaaggctg

SEQ ID NO: 3304 - DNA, 271 bp, Zea mays
ccagcgccattagaggccacaagcccgcaccacgcctccctcgttctcgcgcgcgcgcacgcatgcacgaggagctgctgcagagaagaggaggcctgtcgatttgattgaactttccaaattcagattcagaagctggccaagatgactgccggtttccagctcggcgtgatcgggtctctcacgctctccgtcgcgtcgtcggttgccattgtcatctgcaacaaagccctcatcagcaccctaggctttccattcgctacgactctga

SEQ ID NO: 3305 - DNA, 271 bp, Zea mays
atccgaagctcaatcaattcactcgaacctcttccccaaattttcgattagattctcgttgacaagaagactagaaccgaacctgaccatgtcgctgatccgccgcagcaacgtgttcgatcccttctccctcgacctctgggacccctttgagggcttccccttcggctccggcaacagcagcagtctcttccactcgttcccgcggaccagctcggagaccgcggccttcgctggcgcgcggatcgactggaaggagactccagaggcg

SEQ ID NO: 3306 - DNA, 265 bp, Zea mays
gcgctggagtggatcatggcggactagtaaagaacccaggcgtgcaggacaagctctacgaggagatgatggtgaaagccaaagccaccactgacgcttctgctggcgtgctcccgttctcggaggatgacttgcccaagataccctacctgagagcggtggtgctggagggtctccggcgccatccgccggggcaccagatgccgccacgcagggtgatggaggacgtggaggtgggtgactacgtggtagccaagggctcagc

SEQ ID NO: 3307 - DNA, 270 bp, Zea mays
gcgacaggaggcatggaggaaggagacggtcgatcagagtctgagacggaggccgatccaccaccgcagcgacgagcgggaggagatgaagatcatcattgacacggatcccggcatcgatgacagcgtggccatcctgatggcattccagatgccgggcgtccaggtcctagggctcaccaccatcttcggaaactgcaccacagagcatgccacacgcaacgccttgatcctgtgcgagaaggcaagccatctagaggtcccagtagc

SEQ ID NO: 3308 - DNA, 268 bp, Zea mays
cgcttgcagcgccacctacaccgagcagccaagcgaggaagcgaagacccatttccccgagcgcaagagtaccatggcggcggcggcagtttatggcggcctcaaggggaagcttggcgtcgaggatgcccccgagctgcagctgaatcgcatccgcatcaccctctcatccaagaacgtcaagaacctggagaaagtttgtgcggatttggtaaagggagccaaggataagcatctgagggttaaggggcctgtcaggatccctact

SEQ ID NO: 3309 - DNA, 267 bp, Zea mays
tgtgaagttcagcgtactatgcttgaacttctaaaccagctcgatggttttgaagcatcaaacaaaattaaggttttgatggcaacgaacagaatagacattttggatcaagcccttctgaggcctggccgcatagacaggaagattgaatttccaaatcctaacgaggattcacgtttcgatatcttgaagatccattcaagaaaaatgaacttgatgcgtggcattgatctgaaaaagatcgcggaaaagatgaatggggcctca

SEQ ID NO: 3310 - DNA, 267 bp, Zea mays
tggctgcccccgcggccccggccagtccatcccctcgctcgctccccaactccagcaggcagatcagatacatccatccattcgcggaccggaagtaatcagcaggaaaggaagggttgaactatgagcgccgtggcggtttcgtcgtcgctgaacccggacgcgccgctcttcatcccggcggcgctgctgcaggtggaggacttctcgccgcagtggtgggacctcatcaccaccactgcctggttccgcgaccactggtcccgc

SEQ ID NO: 3311 - DNA, 265 bp, Zea mays
gtttcacgttcctcagcgcccatataccagcctaggtactctgcgggatcagatcatataccctctttcaagggaggaagcgaagataaaagttctttcgctacatagatctggtaacaattctagtgcctccatgctgctggatgatcacctgaagacaattctagagaatgttcggctggtgtatcttctagaaagggaagggtgggattctacaccaaactgggaagatgttctgtcgttaggagaacaacagaggcttgga

SEQ ID NO: 3312 - DNA, 262 bp, Zea mays
cgactttgatgactttgatcctcgtggatcagatggcaaaacaactgctaagtcaaatgaggtggatctgtttagcccaaacttgatggacgattttattgatgcatctgcagcaactccagcaacagacaatgctgcagaaccacaggttgatctgtttgctgatgcagattttcaatcggcaaccgcaagtacagatacagctgcaaatacagatgtcaaggtcaatgttgacctttttgcggaaaaggcatcttttcct

SEQ ID NO: 3313 - DNA, 265 bp, Zea mays
caaaaaccagtcctttgttcttcttcccccggcacgcccagcgccagtcaccaaccttccactccctccctccgtcgccatggcgcgcaagaagatccgggagtacgactccaagcgcctcctcagggagcacctcaagcgcctcgccggcatcgacctcaccatcctctccgcccagatcacgcaatcaacggacttcgcggacttgtgagccagcagccatggctgtcaaccatgaagctagtggtgaagcctgatatgctgt

SEQ ID NO: 3314 - DNA, 264 bp, Zea mays
tgacggcgttcgagtaccacgggacggacccgcgcttcaaccgcgtgttcaacgagggcatgaagaaccactcggtgatcatcaccaagaagctgctggacttctacacgggcttcgagggcgtgtcgacgctggtggacgtgggcggcggcgtgggcgccacgctgcacgccatcacgtcccgccacccgcacatctccggggtcaacttcgacctgccgcacgtcatctccgaggcgccgccgttccccggcgtgcgccacg

SEQ ID NO: 3315 - DNA, 262 bp, Zea mays
tggacgtgtccctccacggctcgtaccaggacctgctccgcacgctccgccgcatgttcccttcggctacccaacgaggtgcgggtgcgggtgcagatcacgaggtggaggaggaggaggtggtggtggaagaggtggcctcgcacgagcgccgccgtctgcatcgtccttacgtggtgacctacgaggacggggaaggggactggttgctcgtcggagacgatgtgccgtgggaggtctttgtgaagtcagtgaagcggct

SEQ ID NO: 3316 - DNA, 262 bp, Zea mays
cgccccgcccacgcccactcctcgctgccaccactcctgtcacctcttcccgcgccgacgcagccgccatggaccccgtcgccacatgggggctaaccccgctcgcgggcgccgacccggagatctacgacctcctggagcgcgagaagcggcgccagcgtcgcggcatcgagctcatcgcctccgagaacttcacctccttcgccgtcatggaggcgctcggctccgcgctcactaacaagtactccgagggcatgcccgg

SEQ ID NO: 3317 - DNA, 261 bp, Zea mays
gtctcagagaacctttgtatacatcaaggatgccatcgaagctgttgtgctgatgattgaaaatcctgctcgagccaatggtcacatcttcaatgttgggaatcctgacaatgaggttacggttagggagttggcccaaatgatgacagaggtctatgcaaacgtctcaggagaggcgccgctggatgagcctatgatcgacgtgagttcgagtcagttctacggtgaaggatacgatgacagtgataagagaattcctga

SEQ ID NO: 3318 - DNA, 290 bp, Zea mays
gtgagcttgtgggctactgcatggagcacggacaacacttgcttgtttatgatttccacaggaatggttcactgcatgatatgctccatctctcagatgattataacaaaccacttagttggaattctcgtgttaagattgcgttgggctctgcacgtgcactagagtaagcaactctgatctctctcccttatgcaactatgatgatagaattttgataaaaaatgtatgttgagcgaattctttttttggtgagtgaaactctactgcgaacacctcaacctttactc

SEQ ID NO: 3319 - DNA, 291 bp, Zea mays
gcaattgtcaaccgactctatcttagctctctttgcaagccagtaggtcaccactcaaaagcttgtgaagcaggtgagatgggcaaggaggtggatgtgtccactctagaggccggcggcgtccgtgaccgtgactacgcggaccctccgccggcaccgctgatcgacatcgacgagctcggcaagtggtccctgtaccgcgccgtgatcgccgagttcgtggccacgctgctgttcctgtacatcacggttgccacggtgatcgggtacaagcaccagacggacgcgtcg

SEQ ID NO: 3320 - DNA, 290 bp, Zea mays
atcccagcatccgagagagctccacaggccaggtccccatcgccgcggcgcttgccccacctctccctcgcccggtagtagcctcgccgccgttgccgagatggggttcgtgtccttcgtcgggagggtgctcttcgtcgccgctttcctcctctccgcctaccaggagtttaatgaattcggtgctgatggtggaccagcagctaaggcccttcggcccaaattcaacgtgtttgtcaaaaatgtatctgctcatctgggagtagctgtgccacacattgagttgaagc

SEQ ID NO: 3321 - DNA, 288 bp, Zea mays
gtcgcagcccccaaggccccaactacccccagtctcggaagagaactatccagaagcgcaagactccaaagccgtcgccttcctatccatcccttcctcgccgcgggggtcgcctgagatcacataaacaatggtgaaggctgttgctgtgcttggtagcagcgatggtgtcaagggcaccatcttcttcacccaagagggagatggccctaccactgtcaccggaagtgtctctggcctcaagcctggcctccatgggttccatgtgcatgcacttggtgacaccac

SEQ ID NO: 3322 - DNA, 284 bp, Zea mays
cggctcgagaccaaatacaactcaggggttggatacaacaagtctgatttctctgcttccttgctactggctgataaaggggagactttgaaggcatcttacgttcatttattcaatccgaccaacggggctacagttgcagctgaggtaacacacaagctgaaaaccaaggagaactatttcacacttgggagctcccatgcccttgatccttcaacattgctaaagacgagattcagcaactcggggaaggtcggtcttctctgtcagcatgagtggaggcc

SEQ ID NO: 3323 - DNA, 282 bp, Zea mays
gtgatttctatgtgcataggttctgggatgggtgctgctgctgtgttcgagcggggagacggcgttgatgagctcaccaatgctcggggaatctcgacccacaactggctttccaaggacgccatgtaaagctacacccaccaaaatttgccggaactggtagcattgtttccagatcgctgtagggagcgaattggggaataaaatgattttgtatttgtcgcccctgctggggatttaggaagatttttacgccactggtatttgaacttgcttacctgg

SEQ ID NO: 3324 - DNA, 262 bp, Zea mays
cgagctcattctcaactcgactcaagagctctgcctcctccatcttcccttctctttctggacgttgagggcctccggggccacgctgagagatggaggcgaatccgaagaacaccttcacgatcaaagtggaggacgggaagcccgggaaggacggccggctggcggtcggaccggtgttccggagcgttctggcaaaggatgggttccgcagcttgagcctgacatgaagacatcatgggatgtgttcagggtaccagca

SEQ ID NO: 3325 - DNA, 293 bp, Zea mays
gaggatcttgaggctggtggtattcaggttatccaaatcgacgaggctgcactgagagaagggctgccgctccgcaaggctgagcatgcattctacttggactgggctgtccactccttcagaattaccaactgcgagatccaggacaccacccagatccatacccacatgtgctactccaacttcaacgacatcatccactcgatcatcgacatggacgcggacgtgatcaccattgagaactcgcggtccgacgagaagctgctctccgtgttccgcgtaggcgtcaagta

SEQ ID NO: 3326 - DNA, 284 bp, Zea mays
caggagacatgtctccgcccgtcaagatcctcggccactacgcgagcccgtactcgcaccgcgtcgaggccgctctgcggctcaagggcgtgccgtacgagctggtccaggaagacctgggcaacaagagcgagctgctgctcgccaagaaccctgtccacaagaaggtgcccgtgctcctccatggcgacagggccgtctgcgagtcgctcctcatcgtcgagtacgtcgacgaggccttcgacgggccgtccatcctgccggccgacccccacgaccgtgcc

SEQ ID NO: 3327 - DNA, 281 bp, Zea mays
tcaacgtttcgtcgttttaataacctggatgttatctatctagtcaaccttattatgcaggttgaactttttgctgtagtaatatacattttctgtgaaaccacgattatgaggaaagtactgaaaaagcagtgcaatggttgaatgatatagtgactaatgctctgattcatgaacaagagttatgtttttctgtgaaccaggatttcaaatatgaggaaaataccgaaaaggcagtacaatgcttgaacgatatagtgacgaatgcactgattcatgcc

SEQ ID NO: 3328 - DNA, 281 bp, Zea mays
ggaaatctcgacctacttcaggatcaacgacaaggagaccggtcagtttgagaggactctgattgtggccgatgagagaagcacagttagctatttggaaggctgcactgcaccagcttacgactcgaatcagctccatgctgcggttgtggagcttgtgtgtgacgacggggcagagatcaagtactccacggtgcagaattggtactctggtgatgaggagggcaaaggaggcatttataactttgtgacaaagaggggacggtgcaaagggcatggtt

SEQ ID NO: 3329 - DNA, 276 bp, Zea mays
cagagttgttggtcatctggttggaaaagttaaccatgctgatgatgaaccatttgagttgacaaaggaaatcgaggcccaaataattggcaacctgctccctgatgacgacgacttattgtcaagtgtttgtggtgatattgggtataataccaatgcgaataatcaggatgagattgatgatgatattttttgtactggaggtggaatggaattggaagcagatggaaatagcaaattgttaaactttaatggtggagccagtcagactaggtc

SEQ ID NO: 3330 - DNA, 281 bp, Zea mays
gcaagccataactgcaagaaagcaacggcagcaagaaaccttgtaaacatcggagcatagatcgcggcggtgatggcggccaaggtgaggacggagctggacgtgggcgccgacggcgtggccgtaatcaccatctacaatccgcccgtcaactccctctccatcgacgtcttacatagcttaaaagatagctatgaagaagcacttcggagaaacgatgttaaagctattgtcgttacagggaaaggagggaaattttctggaggatttgatattagttc

SEQ ID NO: 3331 - DNA, 281 bp, Zea mays
ccgtggcacaggcgcgggctatgaccgccacatcaccatcttctccccggagggacgcctgtaccaagtcgagtacgcgttcaaggcggtgaagtcggcgggtgtcacgtcgatcggcgtccgcggcgcgactccgtctgcgttgttacgcagaagaaagtcccggataagttgctggatcagacgagcgtgacacacctgttcccgatcaccaagtacgtcggattgcttgccactggccttacagctgatgctaggtcattggtttcccaagcaaggaa

SEQ ID NO: 3332 - DNA, 281 bp, Zea mays
  unsure (1)..(281): unsure at all n locations
gtcggatctgagacgagacgagacgacacccctcncctcaaccggaacttgttttaccccatctcatcccactgaccccctcactcanacgncngntgnctccgccggatctcgtcggactcggatccgcccgaccacgaccaccccgcgtcgccgccgcgcacagcagcagatcagagaagatggccggactcgacaccttcctcttcacctcggagtccgtgaacgagggacaccctgacaagctctgcgaccaggtctcagatgctgttctggacgcc

SEQ ID NO: 3333 - DNA, 279 bp, Zea mays
cccacccacctccgcggctgccagtcccgccggagcgcacgcgcgctagctctacggacgccgcgcgccgttcgcgggagcgctcctgtttttcagcatcggtcgccgtcagcgctgcggtcgcgttcaggacagggtgcgccatctcacaccgacgtccccccttcctcggttccactagaatggagtcagcttcgaccacagtgccatccattgtcgtgtatgtgacagttccaaacagggaagcagggaagaagctgtcacagagcatcatcagcg

SEQ ID NO: 3334 - DNA, 277 bp, Zea mays
cgccgccaggagagccggctcggtcggttcgtcgaagatcccggatctgctctgtcacgaggtctttcggcgggtgttgtctcgcgaggtgtagcgagccaaggtctggtcgcctgttcaggagagtttcgagaagctgaaatggctcctaaagctgctcctgccaagaagggtgatgccaagacccaggccttgaaggttgccaaggctgtgaagtctgggtcagtaaagaagaccaagaagatccgcacgtccgtgacatttcaccgccccaaga

SEQ ID NO: 3335 - DNA, 276 bp, Zea mays
gtttttctctccgggacaggagaaaaggggagagagaggtgaggcgcggtgtccgcccgatctgctctgccccgacgcagctgttacgacctcctcagtctcagtcaggagcaagatgggtgccggcggcaggatgaccgagaaggagcgggagaagcaggagcagctcgcccgagctaccggtggcgccgcgatgcagcggtcgccggtggagaagcctccgttcactctgggtcagatcaagaaggccatcccgccacactgcttcgagcgctc

SEQ ID NO: 3336 - DNA, 278 bp, Zea mays
cacaaacacaacaagctaataagaagctacgtagctgaatattcagagagcacaaacacaaacgcgagtgcaaaaccaaatggctgcctcgacctacttccttcttgttgcttttctagcattggtcacttctcatgccattgcttctgatcctagcccgctccaagacttctgtgttgccgacaaagactctccggtgaaggtgaatggatttgtttgcaaggaccccatagctgtgaacgctgacgacttcttcaaggctgcaaaactggaccagc

SEQ ID NO: 3337 - DNA, 289 bp, Zea mays
tatttactcagaatatcaacgtatcatggctcgacctctggaaggaaagttcggtatcgtgaccggaggatcgcggggtattggcgaacgatagcccggaatctagcaagcaaagggtgctcgctcctcttgaactacacatccgaatcgtcacgaaccagaaccgaagagctagcatcgtctttcacagagtctttcggcattcaatgtaccacggtccgcgccgaccttaacgaccctcaggcagccagcgatgtaattatagacgcctccaagaagcactttggcg

SEQ ID NO: 3338 - DNA, 286 bp, Zea mays
aaagatggctcctacgaaagaggaagaactgaagcttcgaaactttaccggggactcatcgaagcttggttccgcagagcggtttctcaaggcagtgcttgacatacctttttctttcaaaagagttgatgctatgctctatcgagcaaattttgagagcgaaatcaattacctcaggaaatctttcgaaacattagagggagcttgtgatgatttaaaaagcagtagattgttcctgaagctacttgaagctgtcctgcgaactgggaaccgaatgaatgtcggc

SEQ ID NO: 3339 - DNA, 283 bp, Zea mays
ggaagctccatcgatcctgcgttattttgccggtaattgattgatagatggcgtcggagaagagcaagatcctggtggtcggcggcacggggtacctgggcaggcacgtcgtggcggcgagcgcgcggctgggccaccccacctcggcgctcgtcagggacacggcgccgtccgacccggccaaagcggcgctgctcaagaccttccaggacgccggtgtgacgctcctcaagggcgacctgtacgaccaggctagcctggtgagcgcggtgataggcgcgga

SEQ ID NO: 3340 - DNA, 281 bp, Zea mays
tgaacagctcttcagttgaaaagagctatgagctacctgatggacaagtaatcaccattggtgcagagagattcaggtgccctgaggtcctcttccagccgtcgatgattggtatggaggctgctggaatccatgagacaacatacaattcaatcatgaagtgtgacgtggatatcaggaaggacctctatggtaacattgtgctcagtggtggttcgactatgttcccgggtatcgctgatcgtatgagcaaggagatcacttcccttgcaccaagcagc

SEQ ID NO: 3341 - DNA, 281 bp, Zea mays
taatgtagtggctattgctggagacgactattcaattattgcatcagacacgcgtttggttaatggatatcaaatttacactcgtaatcaatctaaactttttaaagtaactaacaacactgttttaggatctactggttgttggtgtgatgttgttactttcaatcgtattttagaaacacaagtcaaaatgtattcttatgatcataaccaagaaatgtcttgtcaagctgctgctcagcttatttcaattatgctctacaatcgacgatttttccctt

SEQ ID NO: 3342 - DNA, 281 bp, Zea mays
ttgagggggagaaatataggagcaggaaaagatgaagaggaaatggaacaaaaagttttcagctgtatatgctagatcttgtaagtaactgctggtgagttccgttgtaaatgcagcttagttttcttgttaggccttcggcttctctcgtgaataggagtaccaaaattgccttcaccggtggagaaaatttcatactccctccgttttgttttagttgtcgctggatagtgcaaaattgaactattcagcgataactaaaaagaaacggagggagtatt

SEQ ID NO: 3343 - DNA, 278 bp, Zea mays
cgacgacgacgacgacatgcgggaggcgttccgcgtgttcgacgccaacggcgacgggtacatcaccgcggacgagctgggcgcggtgctgtcgtcgctggggctgcggcagggccgcaccgcggaggagtgccggcgcatgatcggccgcgtggaccgcgacggcgacggcagggtcgacttccgcgagttccgccagatgatgcgcgccggcgggctcgccgcgctcgggtgatgggtgaccgtcgccggccggtgctgcctcctgctcctgcacc

SEQ ID NO: 3344 - DNA, 211 bp, Zea mays
tgctattggtgtgagtaacttctcctcaaagaaattgggtgacttgcttgctgtagctcgtgtacctccagctgttgatcaggtggaatgtcatcctggttggcagcaaactaagctccatagcttttgtcagtcaactggtgttcatctaactgcttactcaccactaggttcacctggtacaacttggatgaatggtaatgtccttaaa

SEQ ID NO: 3345 - DNA, 273 bp, Zea mays
atttacctagtaggaatgatgggttctggaaaaagtactgtggggaagattatgtctgaagtcttgggttattcgttctttgatagtgacaagttagtggagcaagctgttggaatgccatcagttgcccaaatattcaaggtccatagtgaagccttctttcgggataatgagagtagtgtcttgagagatttgtcctccatgcgacgattagttgttgccaccggagtggtgcctgttatccgaccaattaactggagatatatgaagagg

SEQ ID NO: 3346 - DNA, 275 bp, Zea mays
ctttttgcattcgtcattaaaatgccaatgcttcatcgtctctcggttttcagagatgatgttatcttcttgatatacgtctaccagaggtggaaatatccggtcgacaagaagcgtgtcaacgagtttggcttcggaggcgaggaggaacccgcagcccaggagactttggaaggaagtgatccagcagctgcagcagcagcagccgagccaacggaggacaagaaaaccaagtgatctccaatcgttcgatcatccaaatgtagcacgccact

SEQ ID NO: 3347 - DNA, 273 bp, Zea mays
ctgcgtgtgcgtggccaagggcggcgcagagacgctcaagttcaacatggcgctgatcctgctcccggtgtgccggaacaccatcacctggatccgcaaccgcaccgccggagtggggcgcgtggtgcccttcgacgacaacctcaacttccacaaggtggtggcggtgggcatcgcggtcggggccgggctgcacatcatctcccacctgacgtgcgacttcccgcggctgctccacgccacggacgccgagtacgcgccgctggggcagta

SEQ ID NO: 3348 - DNA, 272 bp, Zea mays
accagctttgaccgccgcctctctccccctccgctactgctcctccccaccccactcccccgcaggagcggcggcggcggcggcggcggcgaggtcgtaccccacatcggcgagcggcggcggcaccgccggaggaaaggcaagatgttcgggcgcgcgccgaagaagagcgacaacaccaagtactacgagatcctcggggtgcccaagtcggcgtcccaggacgatctcaagaaggcctaccgcatagctgctatcaagaaccaccccga

SEQ ID NO: 3349 - DNA, 271 bp, Zea mays
ccgaggccagggaaatgccctgcggccacatctaccacgccgactgcatcctcccctggctcgcgctccgcaactcctgccccgtctgccgccaccagatgcccaccgacgccaacccccttgagcagcagcaggaggaggaggccacggtcgggctcaccatctggaggctccccggcggtgggttcgcggtcggtagattcgccggcgtcgggacgctcgatgagcgggagctacccgtcgtgtacacggagatggacggcgccgggtt

SEQ ID NO: 3350 - DNA, 292 bp, Zea mays
atctccatccagttctccgcttccacccacgaccacgacccacccacccactcctttccccaacccatggcggccgtggacgccagggtcttctacctcaagatgaagggggactaccaccgctacctcgccgagttcaagaccggcgccgagcgcaaggacgccgcggactccacgctcgccgcctaccaggccgcgcaggacatcgccgtcaaggagctgccgcccacgcatcccatcaggctcggcctcgccctcaacttctccgtcttctactacgagatcctcagct

SEQ ID NO: 3351 - DNA, 277 bp, Zea mays
attgggcttcaatgggtcctccttcactgacgtaaataccgtccaagaattttctgatatctttgttgtggactcgggtactttggtgaatttgagcagcagaagtggtgacgttttcaatgtcatttcctctgagaataatttcatctttgttggctgatcgttcaacaacaactccatcaagcataacagttcgtaaaacgactcgttgaccaatgaaattacgaacttcaaaaatttttccatcctcgctaatgctaacgtttacggggtaatg

SEQ ID NO: 3352 - DNA, 286 bp, Zea mays
cggctcgagttaggctctccgagtctccggttccctcctctcggcggcggctcaggtccctctccatctccggcgtggcgcttggcgtctgacctcaacaagcaagaaagcaaatggcaggcggcagggttgcgcatgccaccctcaagggcccgagtgtggtgaaggagatcttcattggactgaccctgggtctgatcgcgggaggcatgtggaagatgcaccactggaacgagcagaggaagactaggtccttctatgacatgcttgacaagggccagatcag

SEQ ID NO: 3353 - DNA, 289 bp, Zea mays
gacgacgtaaacgccttgctgaacaaaggcatggccgcggacagccgcttcctcatgccaattgtgctgagggagtgcggcgagacgtttcgtgggatcgactcgttggttgacgtcggtggtggccatggtggcgccgccgccgccatcgccgccgccttcccccacctcaagtgcagcgtgcttgacctcccgcacgttgtcgccggtgctccgtctgatggcaacgtgcacttcgtcgcaggcaatatgtttgagagtattccacctgcaaccgctgttttcctca

SEQ ID NO: 3354 - DNA, 288 bp, Zea mays
cgagaacacgatcgagcacacaagcacgaagactcgtttaggagataccacaaaccaccaagccgtgctagcatcatggagtacggtcagcaggtgcagcgcggccacggcgccacgggccatgtcgaccagtacggcaacccagtcggctgcgtcgagcacggcaccggcggcatgatgcacggcacgggaaccaccggcggcatgggccagctgggtgagcacggcggcgctggcatgggtggcgggcagttccagcctgcgagggaggagcacaagaccggcggc

SEQ ID NO: 3355 - DNA, 286 bp, Zea mays
gtacgttgcaattcaagcagtgctgtcactctatgccagtggacgtactactggtattgttctcgactctggtgatggtgtgagtcacactgtgcccatttatgaaggatatgcccttccccatgccattcttcgtctggatcttgctggtcgggacctcacagactccctcatgaaaattctcactgagaggggttattccttcacaacctctgccgagcgagaaattgtgagggacatcaaggagaagcttgcatatatagctcttgactatgagcaagagttg

SEQ ID NO: 3356 - DNA, 281 bp, Zea mays
ataacaaggatgcacaaacagatctcgctaggattgtggcctttgaggttaaaccgttcagtcttaaacatgaattcgatggtgattggaaggggaatgcaactcgacttaaaacctgtaatacacaatctgagcatctaatagtgaactctgatgggcctgaagaagtaaaggcaaacaaagagatcattttcacctatgatgttaactttgaggaaagcagtatccagtggtcatcccgctgggacacctacctccgcacgcctgacgatcattggttt

SEQ ID NO: 3357 - DNA, 282 bp, Zea mays
gtcaaaagcaaggtttgcactgatgcattatttggaagaagcctctttgaaaggttgagttcacttggacacgaaaagcatctacttaatatgcaatacagaatgcatccttccattagtattttcccgaacactagcttttatgaagggaggatctcagatgccactaatgtcatggaaaaagaacaccgaaggatgtatcttccaggttctatgtttggtccttactcatttataaatattgaagatggaagggaggaacgtgatgaacttggccatagc

SEQ ID NO: 3358 - DNA, 282 bp, Zea mays
ggcagaaccctactgaggctgagcttcaggacatgatcaatgaggttgatgctgatggcaatggaaccatcgactttcctgagtttctcaacctgatggcgcgcaagatgaaggacaccgactccgaggaggagctcaaggaggccttccgtgtgttcgacaaggaccagaacggcttcatctccgctgctgagcttcgccatgtcatgaccaacctaggcgagaagctgacggacgaggaggtggacgagatgatccgtgaagccgatgtggacggtgatg

SEQ ID NO: 3359 - DNA, 282 bp, Zea mays
ggacgaagcggatggacggcatcgtggtgttcgccgacgagaacagcatcctccgcaccgagctgttcgacgaggcgcagaaggtgaccaccgtgggcgccgtgcccgtcggcatcctgggcgaggacgacggcgccagcgagtccttcctacaggcgccgtcgtgcgacgcggaagggaatctggtgggctaccgcgtctcggaggagaccgtgctgccggcgaaccggagcgacatgctgatggccagcaggctggagtggtccggcttcgtggtgaacg

SEQ ID NO: 3360 - DNA, 280 bp, Zea mays
agcattccctcccacaacaccgagacgccaggataacggcgcagactgcggaggagctcgccacccagatcgagcagcagaacctcgaggagcagaagaccgaggcagaggaggttgtggtggaggatgaggaggacgacgacgatgaggacgatgacgatgatgatgaacttgacggacaagaaggggatgccagcggcaagtcaaagcaaagcaggagtgagaagaagagccgtaaggccatgctgaagcttggcatgaagcccatcactggtgtcag

SEQ ID NO: 3361 - DNA, 281 bp, Zea mays
attggacttgcactggtgcttgctcataattactagttcatcagcaaacaacaaacaatggcaccgaggctagcgtgcctcctagctctggccatggcagccatcgtcgtggctccgtgcacggcccagaactcgccgcaggactacgtggacccgcacaacgcggcgcgcgccgacgtgggcgtcgggccggtgtcctgggacgacaccgtcgccgcgtacgcgcagaactacgcggcgcacgccagggcgactgccagctgatccactccggcgggccc

SEQ ID NO: 3362 - DNA, 280 bp, Zea mays
ggtttccagtgggcatcgaaggagggcgcactggctgaagagaacatgcgtgggatttgctttgaggtctgtgatgtcgttcttcatgctgatgctatccacaggggtggtggccaggtcattccaactgccaggagggtcatttatgcttctcagctcacagccaagccaaggctgctggaaccagtttacctggtggagatccaggccccagaaaatgcactgggtggcatatacggtgttctgaaccagaagagaggacatgtattcgaggagatgc

SEQ ID NO: 3363 - DNA, 270 bp, Zea mays
ccggaacagagcgaggcgacgccgaggcacctcatctccggcgaagggaaatggcgaccgttccaggggatctgatctggcagattgtgaggaagaacaactccttcctggtgaagcagtttggcaacggcaatgccaaggtgcagttcaccaaggagcccaacaacctctacaatgtacactcctacaagtactctggcttagcaaacaagaaaactgtaacgatccagccagctgctggaaaggactcggctgtggtcctctctacta

SEQ ID NO: 3364 - DNA, 281 bp, Zea mays
cacagaagcggcggcggcggacaaaagcaggcgaaggcgagggtgcgagggaaggtgcaccagccatggtgcacgtcaacttctaccgcaactatggtaagacgttcaagaaaccaaggcgtccttatgagaaggagcgtcttgatgctgaactgaagctggtcggtgagtatgggctgaggtgcaagcgtgagctttggagggtccagtatgcactgagcaggatccgtaatgctgcaaggcacttgctcacccttgacgagaagaacccccgtcgtatc

SEQ ID NO: 3365 - DNA, 238 bp, Zea mays
gaaccgggaggcgtaacagtgcagcaacgattcctgcaagaagaggatataccctagaattgatccggttgtgatcatgttggtcattgataaagaaaatgatcgggcactcttaagccgccagtcaagatttgtgcctcgtatgtggagttgtcttgctggtttcatagagccaggagaaagcctggaagaggcagtgagacgaggaaccttgggaggaactctggaaccgaagttg

SEQ ID NO: 3366 - DNA, 184 bp, Zea mays
tgccatcagcagctagcgcgctcctcgagcccagcagagaaaggccggctgcgctaatcgtaatagccatgggctccaccgctggctacgtggccgctgtggtggacgaggaggcgtgcatgtacgcgatgcagctggcgtcgtcgtccatcctgcccatgacgttgaagaacgccatcgatct

SEQ ID NO: 3367 - DNA, 274 bp, Zea mays
gatctaggcacaacgaattcctgcgtctccgtcatggaaggaaagacaccacgggtgattgaaaatgcagaaggcgcgaggacgacaccctccattgttgccaagaatcagaatggtgacctgttgattggtatcacagcgagccggcaggcagtaaccaatgcccagaacacaatccgtgggtcaaagcgtctgatcggtaggacttttgatgacccacagacccagaaggagatgaagatggtgccttacaagattgtcaaggcgccgaatg

SEQ ID NO: 3368 - DNA, 274 bp, Zea mays
atggcaatgagttccagggaggttatggtggcggaggctatggggatggtgctgtaactggtggatctgatggagaaagggagagagagactcgtcccccgtaccgtggcggaggcagacgtggtggttacaggaatgttgagtttgctgatgactctgagaggccaccacggagaaactatgagcgccacagcgggactggccatggctatgagatgaagcgtgatggcgcagggcgtgggaactggggcactgccactgatgaacttattgc

SEQ ID NO: 3369 - DNA, 277 bp, Zea mays
cggctcgagggctccgtcgtcgcgtgccatcctagggtttctttccccgtcggcgcctccccagatttggccgccgccgccgctgacccaggttgtcttgatggcgcccgctgtagaagccgtgaaggagacaggcaccttccagaaggttcctgccttgaacgaaaggatactgtcatccatgtccaggaggtctgttgctgcacacccttggcatgatctggagataggtcctggtgctccaaccatattcaactgcgtaaggccaccctgtcat

SEQ ID NO: 3370 - DNA, 252 bp, Zea mays
  unsure (1)..(252): unsure at all n locations
ctggaacggagtgnagatgcacgcgaaccatttcctggtcacggattttctcaagaacaagctcaagtttaggggttttgtgatttccgactgggagggcattgatcggatcactactcctcctcacgccaactactcttactcaattgaggctggtgttggtgctggaattgacatgatcatggttccattcagatacacagaattcatcgacgatctgacgacacaagttcagaacaagtcatcccatga

SEQ ID NO: 3371 - DNA, 295 bp, Zea mays
ctgggcccccagatcgaggtcatccgcgccgccaccaagtccatcgagcgcgaggtcaactccgtgaacgacaacccggtcatcgacgtccaccgcggcaaggcgctgcacggcggcaacttccagggcacccccatcggcgtgtccatggacaacgcccgcctcgccatcgccaacatcggcaagctcatgttcgcgcagttctccgagctcgtcaacgagttctacaacaacgggctcacctccaacctggccggcagccgcaaccccagcctggactacggcttcaagggca

SEQ ID NO: 3372 - DNA, 297 bp, Zea mays
tgggtcgagtttgagacttcaatgtcggattcttccagcttcgtatcttcctccaaatatcagtccgagcgttcatcctgttgtggttgcggcacacccttcggaagcaagccagtttgctctagggctgactgatggtggtgtttttgtgttggaacctttggaatcggagagaaaatggggaaatcctccaccagtagagaatgggtctgctagcaacttgtccacaccgcctcctaatggagcttcaagttcgacaaccagaaagatgattaagaagttggaactggtagattt

SEQ ID NO: 3373 - DNA, 300 bp, Zea mays
cgcgtcccgagagcgcaaatcattccgcgcgacgcaaaaaccctagcctagccaccgatccctctcatggcaaccaccaccacccaggcgagcctcctcctccagaagcagctaagagatctcgcgaagaccccgtggatgggttctctgctgggctggtcgacgacagcaatgtcttcgagtggcaggtcaccatcatcggaccgcctgacaccctatatgatggaggttacttcaatgcaataatgagcttcccacaaaattacccaaacagcccgccatcagtcagatttacctctg

SEQ ID NO: 3374 - DNA, 297 bp, Zea mays
ctccgccacaacccggtgaccaagaaggtgcccgtgctcgtccacgacggcaagccggtcgcggagtccaccatcatcgtggagtacatcgacgaggtctggaagggcggctaccccatcatgccgggcgacccctacgagcgcgcccaggcgaggttctgggccaggttcgcggaagacaagtgcaacgctgctctgtacccgatcttcaccgcgaccggcgaggcgcacgcaaggcggtgcacgaggcccagcagtgcctcaagaccctggagacggccttggaggggaagaagt

SEQ ID NO: 3375 - DNA, 305 bp, Zea mays
atcgatacgacttccgtccgagtctgagctcatctccacgcgccgcagccgccgctcgacgcccaccgcgcaccatggcggaacagactgagaaggctttcctcaagcagcctaaggtgttcctcagctcaaagaaatctggcaagggtaagaagccaggcaagggtggcaatcgattttggaagagcattggccttggtttcaagactcccagggaagcaattgaagggacctacattgacaagaaatgtccattcactggaaccgtttctatcagaggcagaattattgctggaacatgccac

SEQ ID NO: 3376 - DNA, 298 bp, Zea mays
tcgacagtccgaccacaaggtcttgtgcgggatccacagaaggatgagtgaagaggataagactgctgcttctgctgagcagccgaagagggcccctaagctcaatgaaaggatcctctcttctctgtccaggaggtccgtagctgctcatccatggcatgatcttgagatcggtcctgatgctcctgctgttttcaatgttgttgttgagatcacaaagggaagcaaagttaaatatgagcttgacaagaaaactggactgattaaggttgatcgagtcctgtactcatcagttgta

SEQ ID NO: 3377 - DNA, 296 bp, Zea mays
aagagcttacgctgctggggttatgggcgagcccgttcgtgctccgggcgcgcatcgcgtcagcctcaaaggcctcacctacgcttactccgaggagaacctcgacgacaagagcgagtttctcctcagctccaaccccgtgctcaagaaggtgcccgtgctcatccaccacggcaagcccgtctgcgagtcccagatcatcgtgcagtacgtcgacgaggctttccccgccgccgcacctaatttccttccatccgacccctacgaccgcgccattgctcgcttctgggcctcct

SEQ ID NO: 3378 - DNA, 295 bp, Zea mays
caggcagaggcagcatagcagcagccaactccatccatcctctttcccctcctcgcttcgcttcctcggcggattcctcctccctcgaccgtccccgtccccgtccccttccggcgcgcgagctcgcccgagatggcaaacgctagatcgggtgtcgctgtgaatgacgagtgcatgctcaagttcggcgagctgcagtcgaagaggctgcaccgcttcctaactttcaagatggacgacaagttcaaggagatcgttgtggaccaggtcggggatcgcgctaccagctacgagg

SEQ ID NO: 3379 - DNA, 295 bp, Zea mays
cgcatgtcaagctgggcctgagcatcgacgaggacgaggaggctccggacgctgacaccgacatgctccctctggaggatgacgctggcgagagcaagatggaggtcgtcgactaagctgggtttattcttatggaggaaagagagagaacatcgggtctgttctgtgggtcttaccacttatgctattatgcaatctgttgttggtatgctagtgctactattgtctctgctgtcttctagttaattttgttgttgttttgcgtggtcagtttctcatcgcatcagtggtagaa

SEQ ID NO: 3380 - DNA, 293 bp, Zea mays
acgaggaacaacgggaaaacggttttacactcagcagcaagaatgggccacgtggaagttgtaagatcgttgctgaataaggatcccaggattggtttgaggacagacaagaaggggcaaactgcgctgcatatggcttcgaaagcgcagaatgctgagatcgtggtcgagttgttgaagccagatgtctcggtcatccatatcgaagacaacaagggaaacaggcccttgcatgttgctactcggaaggggaatatcattgtaggtgaactctactttgcctgttatagttt

SEQ ID NO: 3381 - DNA, 253 bp, Zea mays
gcaccaagaagcaccattttttccttaagattaacttagaataaagcctgacgggggtaacagcatccatcgatccgcagtccatgctgtttgatgcatgggtctgctgataccgaggatgaacacagcactaacaactgacacagagcgaccttgcaatcaaaaacacagatgggcaacaacaaacacgacacgaacgaagataaaccctctggactagggtaaacatcacggtagcgaacaggataacttg

SEQ ID NO: 3382 - DNA, 291 bp, Zea mays
tacgctggcgatttcggtctggcaaggcttattcccgacgacggaacggaccacgaaaagatagccagcagcgagagccagcgaggctaccttgctcccgagtacgccgccatgtccggcaaaccaactgcaggctgcgatgtatacagcttcgggatcatactgctggagcttgcgagcggcagaaggccagtcgagaagtcgggttctggcaaggcttgtggaatccgaagctgggtgctcccgctcgcaaggcagggcaggtacgacgagattgcggactcaaagctg

SEQ ID NO: 3383 - DNA, 291 bp, Zea mays
  unsure (1)..(291): unsure at all n locations
gcncgtcagcccctctcgtttttcatccgccttcgcctccaaccgcgtgcgctccacgcctcctccaggaaagcgagacttctgcataagaacaacaaatcaaaagcttgatcagctcggtgcctacaaaacctcaacaaccaagtttcatgtctgatctcgacgtccagcttccatctgcctttgatccgtttgctgaggcaaatgctgaggactctggtgctggtcctggaacgaaggattatgtgcatgtgcgcatccagcagcgcaacggcagaaagagtctgacta

SEQ ID NO: 3384 - DNA, 290 bp, Zea mays
cagcaatccctagcagaagccttccatcctcactcgctcgatggcccgcacgaagcagacggcgaggaagtccaccggcggcaaggcgccgaggaagcagttggcgactaaggcggcccgcaagtctgcccctgcgaccggcggagttaagaagccccaccgcttccgccccggtaccgtcgcgctccgggagatccgcaagtaccagaagagcacagagctgctgatccgcaagctgccgttccagcgcctggtgcgggagatcgcgcaggacttcaagaccgacctac

SEQ ID NO: 3385 - DNA, 287 bp, Zea mays
gccatggctacctcctctggttcttgccttattattagcctgttggtggtggtggtggcggcggcgctgtcggcctcaacggcgtcggcacagctgtcgtcgacgttctacgacacgtcgtgccccagcgcgatgtccaccatcagcagcggcgtgaactccgccgtggcgcacaggctcgtgtgggggcgtcgctgctccggctccacttccacgactgcttcgtccaaggctgcgacgcgtccattctgctgaacgacacgtccggggagcagacccagccgccg

SEQ ID NO: 3386 - DNA, 282 bp, Zea mays
accaacgtgcctttggagggcagagcttagattttggcaaaggtggacaagcctaccgttgtgcctgtgctgctgacagaacaggacatgctatgctgcacacactatatggtcaagcaatgaagcacaacactcaattttttgtggaatactttgctttggaccttctcatggacaatgaaggaaaatgtcagggaatcattgccttaaacatggaggatggaactcttcaccgtttccgtgcttctaatacaattctagccacaggaggttatggcaggg

SEQ ID NO: 3387 - DNA, 282 bp, Zea mays
ctcggtgctgctggccggcctgcgcgcgggctccaccatcgtgatcatgcgcaagttcgacctgtgcgcgctggtggacctggtgcgcaggtacgtgatcaccatcgcgcccttcgtgccgcccatcgtggtggagatcgccaagagcccccgcgtgaccgccggcgacctcgcgtccatccgcatggtcatgtccggcgccgcgcccatgggcaaggagctccaggacgccttcatggccaagattcccaatgccgtgctcgggcaggggtacgggatgac

SEQ ID NO: 3388 - DNA, 268 bp, Zea mays
cgcagcctccaaagccactcccaaacccccgcttccagaaccttctcgaagctccccgccgcctcctccactcgcaccgatggcgaaggaaccaatgcgcgtgctcgtcactggcgccgcagacaaattggatatgccctggttcccatgattgctaggggtgttatgcttggtgcagaccagcctgttattctgcacatgcttgacattccgccagcagctgaagcccttaatggtgttaagatggagttggttgatgctgcgtttc

SEQ ID NO: 3389 - DNA, 267 bp, Zea mays
agactccgaaactccgacagtccgaccacaagaaggatgagtgaagaggataagactgctgcttctgctgagcagccgaagagggcccctaagctcaatgaaaggatcctctcttctctgtccaggaggtccgtagctgctcatccatggcatgatcttgagatcggtcctgatgctcctgctgttttcaatgttgttgttgagatcacaaagggaagcaatgttaaatatgatcttgacaagaatactggactgatgaaggttgat

SEQ ID NO: 3390 - DNA, 273 bp, Zea mays
cggctcgaggctgctgcagcacctcttctggtccaacgggccggagacgtgcgcagccgggccccgggaacaagcagtgcgccgccaaggaggtggtggtggacacggcgtgcatgctgctggccgagctgttccggcgctacgacgacttcgaggtggagggcactccttcaccaagctcgtcaagcgccaggcgtcgccgagcgtggcgcaggcagcagcggcggcggatcgcacagtgtagtgcgctgtataggatccatcggtggcgtg

SEQ ID NO: 3391 - DNA, 222 bp, Zea mays
  unsure (1)..(222): unsure at all n locations
gggngaagcttccgaagcacaacaatataccatggcgtggtaactcttgcatgaaggacggactttctgatcctgcaattcggcgaagctggtcggcgggtactatgatgctggcgacgctgtcaaattcaatttcccagctgccttctccatgaccctcctcagctggagcgtcattgagtacagtgctaagtacgatgctgctggggaacttggccatgt

SEQ ID NO: 3392 - DNA, 211 bp, Zea mays
gctgggcatcaagtcagtgatgcttactggggatagttctgcagcagcttcatatgcacagaaccagcttgggaacatacttgatgaggttcactctgagcttcttccagaggacaaggtgaggatcgtcgacgagctcaggcaaagcatggcccgactctgatgatcggcgacggcatgaacgatgccccagcgctggccaaggccgacg

SEQ ID NO: 3393 - DNA, 276 bp, Zea mays
agcagctacacacagcaagacaagaacttagtcatgcactctaccagcatgacgctgcctgccgtgttatagccaggttgaagaaggacagagatgaggctagagcacttttggctcaagctgagagacagattccagcatcagttgcaggagctgctcctgcagctgttgtttccaatggaaaaagagcaatggaagatgaaattggccctgacggaaagaagattcgtcctggtatcaaccctgtcatgattgatgaacttacagagtgtaata

SEQ ID NO: 3394 - DNA, 273 bp, Zea mays
gctattccccatctccggaccagcgccgcctccagtcgctgtccacgggcaccccgggcgcgcctcctccgagcccagactcgagctccatcccgccgtggatcaccgcgtgaggtggggcgcaccgaccggaccccggagggccagatggtgtccggcgccggacggggcgagtagcgcggtcggcggccacgaacggattggcggcggcgcggcgaggcgtcggtcggagcgggggccaccatgtctgctgtagtgtgcggcaagaggtcc

SEQ ID NO: 3395 - DNA, 271 bp, Zea mays
tgctcaacgtctaatctctgggaacccatctcttggacaccggatcacggtcatcaagggcaaggttgaggaagtagtgcttccagagaaagctgacatactgatttctgaacctatgggaacccttttggttaatgagaggatgctagagtcttatgtcatagctagagacagattacttgctccagatggtaaaatgtttccaacaaccggaaggattcatatggctccattttctgacgaatacctttatgttgaaatggcaaacaag

SEQ ID NO: 3396 - DNA, 271 bp, Zea mays
agtgtggccgtcgtctcccgttcggaacgccaagcccccctccggcgaaatggcccccaagcgaggtggcagggcgccggtgccggccaagaagaagacggataaggtgacgaaccctctgtttgagaagaggccgaagcagttcggcatcggcggcgcgttgccgcccaagaaggacctgcaccggttcgtcaagtggcccaaggtcgtgcgtatccagcgccagcgccgcatcctcaagcagcgcctcaaggtaccaccggcgctcaac

SEQ ID NO: 3397 - DNA, 266 bp, Zea mays
caatctttttctttttttattaatatttattataaactgatttggtttcatataaaaattagttttgattattttttaaacttgtgtcacagctgataaaagtttgcattcagaaactaaattaaaatgagtgatcattctgacaaaaatgtgtatcaaactccgctttcattgcgatatgctagcaaagaaatgggatacaacttttcggaccgcaaaaagttcactacatggcgtcttttgtgggttaatttagctgctgctca

SEQ ID NO: 3398 - DNA, 158 bp, Zea mays
tgtttgccgttaagtctgaccccagggcgaacaagagtgatgcatccaaatatctggctgttcatctccggtttgagattgatatggttgcatactcattgtgttactttggtggtggcaaagatgaggaagacgaactagaagcttatcgccaaatt

SEQ ID NO: 3399 - DNA, 268 bp, Zea mays
tggatattgccccggatgggaagactcttgaagaaacaaattctaacttggatgagatagtccagctggcaaagcagctgcagggtgagaccaatataaagccattgtggggtaccgcacagctctttatgcatccacgttacatgcatggcgctgctacgagcccagaggttaaagtatatgcttatgcggctgcacaagttaagaagctttggaggtcactcactacctaggtggtgaaaactatgtgttctggggtggaagagag

SEQ ID NO: 3400 - DNA, 232 bp, Zea mays
ctctgttgagccagctgatgagaggaggcctttccgtgctctcttggatgttggccttatcaggactacaacagggaaccgtgtctttggtgccctcaagggagcattggatggaggcctggatattcctcacagcgagaagaggtttgctggattcaagaaggacgacaagcagttggatgctgatacccaccgcagtagcatctatggtggccatgttgctgactacatg

SEQ ID NO: 3401 - DNA, 268 bp, Zea mays
tgcgaccaccggagcgcggaggaggcacaggcgccgatctaaagacgatggccgccgcgggctcctcgccgtccttctcctcctcgagtaagcggctggaagggaaggtggccctcgtcactggtggcgccaccggcatcggtgaggccatcgttcgcctcttcatggagcacggcgccaaggtctgcatcgcggacatccaggatgaggctgggcagcagctgcgcgacgccctgggaggtgacgcgcagggcgccatgttcgtcca

SEQ ID NO: 3402 - DNA, 261 bp, Zea mays
atcgtcgataccccacctatgatcgttgttggtcttgtgggatacatcgagactccccgaggcctgcgatccctcaccaccgtctgggccgagcatctgggcgacgagcttaagcgccgattctacaagaactggtacaagagcaagaagaaggctttcaccaagtacgccaagaagcactccgagaacagcggtgcctctatcacccgcgagctcgagcgcatcaagaagtactgcaccgtcgtccgtgtcctcgcccac

SEQ ID NO: 3403 - DNA, 211 bp, Zea mays
acaacggcaagaaggtcatggctgtccgcatcatcaagcataccctggagatcattcacctgctcaccgatgccaaccccatccaggtcgtcgtcgacgcgatcatcaacagtggcccccgtgaggatgccacccgtattggttccgctggtgttgtgagaaggcaggccgtggatatctcacccctgaggagggtgaaccaggccatcta

SEQ ID NO: 3404 - DNA, 261 bp, Zea mays
tgcctcctgttgcggttctctgatggttccttcactacaagctttattaccacaattggtattgactttaagatacggacaatagaattggatggtaagcgtataaagctacagatttgggatacagcgggccaagaacgcttccgtactattaccactgcgtactaccgtggagctatgggtatcttgctggtttatgatgtcaccgatgaatcttctttcaacaacatccgaaactggattcggaacattgagcaacat

SEQ ID NO: 3405 - DNA, 222 bp, Zea mays
gggaaatggtcgtcggcaagcaggcagggctacaacctgagggacggcgtttcgcggtacactgttcaggtgtaccccagatcgtggacggcgatttacatgcccctggacaacgtgggcatgtggaacgtccggtcggagaactgggccaggcagtacctggggcagcagttctacctccgcgtctggacgcggtcacgtcgttgcgcgacgagtacccca

SEQ ID NO: 3406 - DNA, 237 bp, Zea mays
atttgctatccttggcccgagagacagcgagtttgagggtggaatctatcatggcaggatccagcttccctcggattatccattcaagccgccgtccttcatgctactcacgccaagtggacgctttgagattcagaagaagatttgtttgagcatatccaattatcaccctgagcactggcagccatcatggagtgtgcgcacagcgttggtgcgccttatagcattcatgccaac

SEQ ID NO: 3407 - DNA, 256 bp, Zea mays
tgcgccgccgcagccaaagtcgggcctcttcgttggcatcaacaagggtcatgtcgtcaccaagcgcgagcagcctccccgcccgtgccaccgcaaggggaaatcaacgaagagggtgtctatggtcaggggcctgatcagagaggttgctgggtttgctccttatgagaagcgtatcactgagcctctgaaggttggcaaggacaagcgtgccctgaagcttgctaagagaaaccttggactcacaagagggcaa

SEQ ID NO: 3408 - DNA, 267 bp, Zea mays
caggtaagcagcagcaggaaccctagcaccgccgcatccgcagccatgggtatcgacctcgttgccggtgggaggaacaagaagaccaagcgcacagcgccgaagtccgacgatgtttatctcaagctccttgtcaagctctaccgtttcttggtcaggaggaccaagagcaacttcaatgctgtcattctcaagaggctcttcatgagcaaaaccaatcgcccaccaatctccatgcgccgccttgtcaagttcatggaaggaaag

SEQ ID NO: 3409 - DNA, 172 bp, Zea mays
gcgccattggccagctagagccaaccagaagagcttgcagttactgagagtgtgtgtgagagagaggatgggtggcagcggcagggctgctctgctgctggccctggtggtggtggccgtgagcctggccgtggagatccaggccgacgccgggtacggttacggcggcggg

SEQ ID NO: 3410 - DNA, 290 bp, Zea mays
cgacgaggtctacgccgttcacttcaagtgcaacaagaagctgctgagggagtacccaaacctgttcaactacaccaaggacatataccagatccccggcatcagcagcaccgtcaacatggaacacatcaggaagcactactacggaagccatccgtccataaacccatacgggattatccccgctggacccaacatcgactacaatgccccacatgacagggagaggttcagcgcctgactgcgcgtgggaccttgttgcttcctttctctctctctctctctctctc

SEQ ID NO: 3411 - DNA, 220 bp, Zea mays
cgcggatctgaacgctgcgctccgtgtcgccgctcgaatccgccatgaacggggccaaatccaagggcgccgccaaggccgatgccaagctggcggtgaagagcaagggggcggagaagcccgccaaggagaggaaagggaaggccggcaaggaccccaacaagcctaagagggctcccagcgctttcttcgtgttcatggaggaatttcgcaaggagtt

SEQ ID NO: 3412 - DNA, 286 bp, Zea mays
tatggatgaaccagttgccatgcagaaagtaactgtagataatcatgcatcacaacatcttctttcattgttgcaaaaaggaacagataataagggagcaccttccctgggtttccagagagaatcaactgatgaacctctgagtgttgacacaaatttaatggcaaatggtggaatatctggaagtgatccggttaacagtgttgaaaatgttcctacttctgggaaggacttgacattggaagcgttattcggggctgcatttatgaatgagctccactcgaaa

SEQ ID NO: 3413 - DNA, 285 bp, Zea mays
ctcgtgctcacctcatccgtccgacaaatccacacgaatcctctgattcagagcagggtgttggcattgatcagacgcctgccatggcggatcagttcgtggattcggcgaacaatgtgatcattgaggaggtgaacaagggcctgaacccaggaatggtggttctgcttgtggttgcaagcttcctgctgctcttctttgtggggaactatgcgctgtatgtgtatgcgcagaagacgctcccgccaaagaagaagaagccggtgtcgaagaagaagctgaaga

SEQ ID NO: 3414 - DNA, 285 bp, Zea mays
caaatggataaatgtgagagcagggacctgctgcatatgctgtgagactccgattgactcccttctgtacagatgtgggcacatgtgcacttgctcgaaatgcgcaaacgaattggttcgaggtggagggaaatgcccgttgtgccgcgcacccataatcgaggtcatccgagcatacttcatcatgtagatacaaaaggaagacagcaagaagatagaagaggcccaaattgtttttggtctgtgtggagtcgttagcgggttgtgtattcaattttgttcatt

SEQ ID NO: 3415 - DNA, 218 bp, Zea mays
gttcgggaagagtaagagaggattgatcatggggatatggaacgcacacacctctgtcgggaatatagcaggctcgctgctcgccgcgttcctcctgaagttcgggtggggctggtcgtttgccgtccccagccttatcatggcgctcgttgggttgatggtgtatgttttcctgccggttagtcctgaggccatggagattgacagtgacggcggtg

SEQ ID NO: 3416 - DNA, 284 bp, Zea mays
tttgaggataagcttggcatcacaattacatgctcccaagagactgagcccttaggaaccgctggccctcttgctctagcaagggacaagcttgcggatggatctggccagccattctttgtcctcaacagtgatgtcataagcgaatacccatttgctgaactcatcaaatttcacaagtgtcatggtggtgaggcaacaattatggtcactaaggtggatgaaccatcaaaatacggtgttgtggttatggaggaggcaactggcagggtggaaaggtttgt

SEQ ID NO: 3417 - DNA, 283 bp, Zea mays
gccgtctcctccgacctgctcgctgggaacaaggccgcgcaggccgccgccgcgcatccggcggttacccgggaagaggcactggagctgtatgaggacatggttcttggccgtgtattcgaggacatgtgtgcacaaatgtactaccgtggcaagatgtttggtttcgtccacctttacaatggccaggaggctgtctccactggcttcatcaaacttctgaaccaagctgactgtgttgttagcacataccgtgatcatgtccatgcgctgtccaagggtg

SEQ ID NO: 3418 - DNA, 270 bp, Zea mays
ttcgtcatctcttctccggcgaagaacccccagtcgcccaccagatcacttgttaaactttgttgaggggtgatggcggtttctttcgcaaacctcaactccgaggcagggcttaaaaagcttgatgagtaccttctcactcgcagctacatcactggctaccaagcttccaaggatgacttggctgtcaacacttcgttttcggttgttccttcgtccaggtatatcaacgtagcaaggtggtttaaccacattgatgcgctcgtaagg

SEQ ID NO: 3419 - DNA, 282 bp, Zea mays
ctgagaagtacctcgacgagaagaccatcttccacctcaacccgtccgggcgcttcgtcatcggcggggcccaaggtgaaggcgggcttaacgggcggaaagatcatcatcgacacgtacggcggctggggagcccacggcggtggcgccttctccggcaaggaccccaccaaggtggaccgcagcggcgcctacgtggccaggcaggccgccaagagcatcgtggccagcggctcgcccgccgctgcctcgtgcaggtgtcgtacgccatcggcgtgccgg

SEQ ID NO: 3420 - DNA, 283 bp, Zea mays
gcaccacacctcttcctcctcttcctcctcctagcacagctagcgcctgctccccttcgtctgtgatcatgtcttgcagcagcggcaagtgcaactgcggctccagctgctcctgcggcagctcatgcaactgcatgtcccctgacgtggagaccgccgccgccagcagcatcaagaccatggtcctcgctgcgccgaccaccaaggccagcgccggcggcttcgaggcggccaccgagggcggcggctgcgactgcaacacctgcaactgcggcaccagctg

SEQ ID NO: 3421 - DNA, 279 bp, Zea mays
tgttctactacatctttggcttcctgttcctggtgttcattatcctcatcgtcacctgtgcggagatcacaatcgtgctgtgctatttccaactgtgcagtgaggactacctgtggtggtggaggtcctttctgacttcaggatcatcagcaatctacctcttcctgtatgccgggttctacttcttcactaagctgcagatcactaaggtggtgtcgggcatgctgtactttggctacatgcttcttgcctcgttcgctttctgtgtgctcaccggta

SEQ ID NO: 3422 - DNA, 279 bp, Zea mays
cggcaaggccaatccgaaatctcgagcgctcgcgccggcgaccacagcaaagaggaggccgcagcacgacagcgccccagggttcctactctcgtcgcagcggcagcactggtagcggcagcagtgaggggaagatgtcgtcggtgttcagcggcgatgagaccgcccccttcttcggcttccttggcgccgccgccgcgctcgtcttctcatgcatgggggcggcgtacgggacggccaagagtggcgtcggcgtggcgtccatgggtgtcatgcgcc

SEQ ID NO: 3423 - DNA, 278 bp, Zea mays
cgccaccgccacctgccccagcgcgccgccgccgcagccaccatgggtcgcgtccgcaccaagaccgtgaagaagacctccaggcaggtgatcgagaagtactactcccgcatgaccctcgacttccacaccaacaagaaggtgctcgaggaggtctcgattctgccctcgaagcgcctccgcaacaaggtggctggcttcagtacccacctgatgcgccgcatccagcgcggcccagtccgcggcatctcgctcaagctgcaggaggaggagcgcga

SEQ ID NO: 3424 - DNA, 280 bp, Zea mays
ctcagttttacagctgaaaaacaggacccatgctatctaccagtggaatagaaacgatgatgggaatcctgttccagcagacaccgtaatgttccataaccaatattggacgagcagcacgcgccgcaggaggctgaagaagaaccatctccatctcgaggaccttgaggatttgatctccctattatagaaaaccgggttcgcaggacgcatgaactgtgtgtgggggaataatcgcaggttagcactgttgctagtgtgcccgcctctcttggaatgg

SEQ ID NO: 3425 - DNA, 278 bp, Zea mays
cgccgaggagatcatgggccaggccatccgggacctgggctggcgccgctccgacgtcgtcatctccaccaagctcttctggggcggccattgccccaacgacaagggcctctcccgcaagcacgtcgtcgagggcctccgcgcctcgctccgccgcctcgacatggactacgtcgacgtcgtctactgccaccgccccgacgcctccacgcccgtcgaggagacggtgcgcgccatcaactgggtcatcgaccagggctgggccttctactggggca

SEQ ID NO: 3426 - DNA, 279 bp, Zea mays
  unsure (1)..(279): unsure at all n locations
agacgttctttggtcctccggatgttggtgtgtatagtccatccgtacaaaatacgctatacctcatggccaaggaagtccttacaaggttcccagatatatcgtcagtccagcttagaatgccgaaccttcactttctgcctgtcaacttggggagcaaagaagctccgctggtgaagtttgctgatgatgtgtacctgccgacggatgaaccacacgggacgattgaagcaaccttaataagccgtcncatgtcaaagctgtanaaaaaatgtagtc

SEQ ID NO: 3427 - DNA, 277 bp, Zea mays
aaactctgtagcgcgtctcattcacatgctgcacaatgatgatcctgaagagatgctgaagatcttatgtactgtacagaagcatatacttcagggaggccccaagcgtctaactttcactgtgccttcgttagtattctcttctcttaagctggtcaggcgattacaaggccaagatggagatgtcactggggaggatgttcctgcaactccaaagaaaatattccagatattgcatcagactattgaagcactttcttgtgttccttctccagag

SEQ ID NO: 3428 - DNA, 266 bp, Zea mays
ggcggacggcaccgacgtgtcgccggagtcggaggcgacgcgcacggcaagggcggggagatctggggaacgctggagactgctcctggcgtgcgccgtgacgcggcacggcacggcgagctgggactcggtggccatggaggtgcagacacggatccccgtggcggcgcggcccggcctcacgccgcacagctgccgcctccgcttccgccacctccaccgccgcttctccaccgtcggcagcggcggggacgaggaggccgagg

SEQ ID NO: 3429 - DNA, 280 bp, Zea mays
acacaagtcatatctagctagtagctccctgaaaagttcactagagaagcatttgcccggaggagccatgtctgaggagaagcaccaccaccacctgttccaccaccgcaaggcagaggaggaggaaggcgcctccggcgaggtcgactacgagaagaaggagaagcaccacaagcacatggagcagctcggccagctcggcgccatcgccgccggcgcgtacgctctgcacgagaagcacaaggccaagaaggacccggagaacgagcacggccaccgg

SEQ ID NO: 3430 - DNA, 273 bp, Zea mays
cttaatttctctcttcttttaatcttttctttcttctaatctcatatcatcattcacttttttttcatctactcttttaaataagttcattatttcatttaaaatggccgctgttgttcatccaaataacactttcgaacctaacgatgaagaccgtaaattatttgttggtggtttgagctggaacactaccgaagatgatctatttcaatatttcaatcaatttggatctattgctaatgttaacattaaatataacccagagggtaaatc

SEQ ID NO: 3431 - DNA, 276 bp, Zea mays
caacatccagaaggagagcaccctccaccttgtgctccgtctcaggggaggcatgcagatctttgtgaaaaccctgaccggcaagactatcaccctcgaggtggagtcctctgacaccattgacaacgtcaaggccaagatccaggacaaggagggcatccctccagaccagcagcggctcatctttgctgggaagcagcttgaggacgggcgcacgcttgccgactacaacatccagaaggagagcaccctccacttggtgctgcgcctcagggg

SEQ ID NO: 3432 - DNA, 207 bp, Zea mays
cggctcgagctcaggtttggggggaaaaggcctcgcgggtcgcaaaccgctctctgttgatttgggatttgggaggcgctcgagttttcaggtaaaccatagtttagtgacccatggctcgtactaagcaaactgctcgcaagtccactggagggaaggctcctaggaagcaacttgccaccaaggctgcccgtaagtctgcaccca

SEQ ID NO: 3433 - DNA, 296 bp, Zea mays
atatgatgttgctgcaattttaacttctatccagtccctgctgtgtgatccaaacccaaactcccctgcaaactcagaagcagcaagactgttcagcgagaacaagcgggagtacaaccgcaaagtccgtgagatcgtggagcagagctggacagccgactagtgcataaggatgctcgtcgtgcccgataggggcacaataagaaagcgtgaaaaaaaaaacacacccactccttgtgtttctggttcgccaggcttgtcgaaacattgaagaaccccagtgattggtttgtagt

SEQ ID NO: 3434 - DNA, 293 bp, Zea mays
tgtttggaggtttacagatgggttatgtgccgcagtacaatggatttggctaccagccacaaggaacctacgggcttatgcaataccctcctctatctcctgtgcaaaatcaagctgccttccagaatatggttcagcctgttaatcaaggaagctcgatccatggagctaattctgaagtttcgcctaatccagttcctagatcatttaattccgcgcagttgggaagcccctattcgcctttgcctggtttgcagtatcctggagtgtatcctggtggtcctattaatcat

SEQ ID NO: 3435 - DNA, 295 bp, Zea mays
tggtgaatccttccactttgctcacagatggaatggagaatccttacgtgaaagcatcaagcgacatgagcattttcttgccctgcaacttggtttgaaaccaggaatgaaggttttagatgtgggctgtggaataggtggaccactgagagaaattgcaagatttagctcaacttcagttaccggattgaataacaacgaataccagataaccaggggaaaggagctcaaccgtttagcaggaattagtggaacatgtgattttgtcaaggcggacttcatgaagatgccgttc

SEQ ID NO: 3436 - DNA, 205 bp, Zea mays
  unsure (1)..(205): unsure at all n locations
ccagctttgaccgccgcctcncttccccctccgctactgctcctccccaccccactcccccgcaggagcggcggcggcggcggcgaggtcgtaccccacatcggcgagcggcggcggcaccgccggaggcaaaggcaagatgttcgggcgcgcgccgaagaagagcgacaacaccaagtactacgagatcctcggggtgcccaag

SEQ ID NO: 3437 - DNA, 236 bp, Zea mays
caagcaacaaacttggcattcttgcctgttcttaattattgccaggacaggagaaacaaagatgaggcctcagctgatactcgtcggcactctggctgttctcgccatcctcgcagctctcggcgaaggctcgtcgtcctggccctgctgcaacaactgcggtgcttgcaacaagaagcagccgccggagtgccagtgcaatgacgtgtcggtcaacgggtgccatccggagtgca

SEQ ID NO: 3438 - DNA, 216 bp, Zea mays
ctttccccttccctccctccctctccccgcgggccgccagaggcagtctcgccctcgattcgaccccgattcgtccgcccgcgaccgggattccctccgccaagcgcggatctgaacgctgcgctccgtgtcgccgctcgaatccgccatgaagggggccaaatccaagggcgccgccaaggccgatgccaagctggcggtgaagagcaagggggc

SEQ ID NO: 3439 - DNA, 287 bp, Zea mays
agaagaactacaaccgcgacatgtttctgtttctttacattcttcttgtcgtcgcatcaacgattacctcactcaagaagcaccctgaaaattcagtagtttcaggaaagaccgttttctatcttaatcgcaaccaaactgatgaatggagagggtggatgcaggtcttgtttctgatgtaccactatttcgctgcctcggaaatatacaatgcaatccgtgtgttcattgcttgctatgtctggatgactggatttgggaatttctcatactactacaagaagaaa

SEQ ID NO: 3440 - DNA, 281 bp, Zea mays
tggctcgaggttatccaaaagctgaatctgagaggtgggtttcctgcattaggatcttggatccaaggagtagggacacaacctgtctgctggaattgcaggacaatgaggctgctgtcagtatctgcactgtgaatttccatgataaggagcatggaactctactggctattggcactgccaagggtttgcagttctggccaaggaggacccttgctggtggattcatccacgtatataagtttgtggatgaagggaggtcacttgaacttctacacaag

SEQ ID NO: 3441 - DNA, 286 bp, Zea mays
  unsure (1)..(286): unsure at all n locations
atcccctttgcaagtatagtctctctgctaagcgacgancttcaagctagtctcggcggctctagaagacgatgggcaaggacgacgtgatcgagagcggcgctggcggcggcgagttcgctgccaaggactacacggaccctcccccggcgccgctgatcgacgcggcggagctggggtcctggtcgctgtaccgcgccgtgatcgccgagttcatcgccacgctgctgttcctgtacatcacggtggccacccgtgatcgggtacaagcaccagacggacgcgt

SEQ ID NO: 3442 - DNA, 274 bp, Zea mays
  unsure (1)..(274): unsure at all n locations
tcggtactggcgccggtttattcgaagttgttaaaattggagatgaatacttttcatttattaatgattgcaaaaatccaaaagcatgtaccgttatgttgcgaggtgcatccaaagatatgctaaatgaattggaacgtaatttacaggatgctatgagtgttgcaaagaatttgcttattgaaccttacatcgttccaggtggtggagctactgaaatgttggttggaaagtatttacttgaaatctanaagtattactgatgtggcacaat

SEQ ID NO: 3443 - DNA, 225 bp, Zea mays
taggagtcggagggaaccgaaaactcagggtctcgaatttcctaggagcggaggcgatggctggtaagggaggaaaaggattgctcgccgcgaagacgacggcggccaagtcggcggagaaggacaaggggaagaaggcccccatctcacggtcctcccgcgcgggcctccagtttcctgttggacgaatccaacgtcagctgaagcaaagggctcaagcaaatt

SEQ ID NO: 3444 - DNA, 274 bp, Zea mays
tgaaagaacaagaggatctccaagggaaagaagggtggcaagaaaaagaccgtcgaccctttctctaagaaggattggtatgacatcaaggcaccgtcggtgttcagtgtgcgcaacatcgggaagactctcgtatccaggacacagggtaccaggattgcttctgagggtctgaagcacagagtctttgaggtttgcctagctgatcttcagggcgacgaggatcaagcttacaggaaaatcaggctccgtgctgaagatgtgcagggcagga

SEQ ID NO: 3445 - DNA, 277 bp, Zea mays
cactaagcaaaggctatttactcccagaaggtgctgctcgtcttccaggatttcatacttgtgttggtgctaatgatgagttactgacaccgaaatggtacaaagaacaaggcattgaacttgttcttggaacaaaagtgatttctgctgatgtgaggcgcaagacattgcttacaggcactggtgaaactatcagctacaaaactctaattattgcgacaggtgctcgggctttgaagctgcaagaatttggaatacaaggttcagatgcttcaaa

SEQ ID NO: 3446 - DNA, 272 bp, Zea mays
tgcgccggcaccaagccgcccacctacactccgacgccgccggtgtctcacacccccagcccgccgccaccttactactagaaaccgatgcctaccataccacactgctgtcagtctctggagcatttaggtggtctcgatcgatggaagaattgtgtcctagccagccggcaaaggtgacctgctgatgatgatgatgagaggcgagtcctacgccctagtcctactactaccctctttgtgtgctgccatccatccgtccccgctagacg

SEQ ID NO: 3447 - DNA, 275 bp, Zea mays
ggagaagaacgccgtgatattcgagagagtcaacgcgatgtcggcgaggaaggggtgcacgccgtcgcagctggcgttggcctgggtacaccaccagggagccgacgtgtgccccatacccgggacgacgaaggtcgagaacttcaacagcaacgtggcggcgctttcggtggagctcacgcctcaggacatggctgagctcgagtcttacgcgtcggcgggcgtccagggcgatcgctacaatgacttcttaaacacttggaaggattcagaga

SEQ ID NO: 3448 - DNA, 267 bp, Zea mays
  unsure (1)..(267): unsure at all n locations
ccgcgtccagtgtgtccgctactccgctccccctcagtcctcagttcctcacctagcggtagcgtngcgcgcgggagacgtagatggcggcttcggaggcggcagcggcggcggcaacaccggtgacgccgacagaggggacggtgatcgcgatccacagcctggaggagtggagcatccagatcgaggaggccaacagcgccaagaagctggtggtgatgacttcactggcaacatggtgtcctccgtgccgcgccatggctccaa

SEQ ID NO: 3449 - DNA, 267 bp, Zea mays
gcgtcttcgtactcgcctatctccgcgactcaaagctttccccaattcccccgtctctcccatttctcaccaccgccgccgctccccccgttcaacaacaccatgagggagtgcatctcgatccacatcggccaggctggtatccaggtcggaaacgcgtgctgggagctgtactgcctcgagcatggcattcaggctgatggccagatgcccggtgacaagaccattgggggaggtgatgatgctttcaacatcttcagtgagact

SEQ ID NO: 3450 - DNA, 268 bp, Zea mays
ccctaagcagggagttgatttatccgctgcagccatgagtaagttgcagtctgagtctgtcaaggatgccatctcccagattgttggggatgccaaggagaagaataggaagttcactgagactgtggaacttcagattggtctgaagaattatgatccacagaaggacaagcgtttcagtggctctgttaagttgccccatatccctcgtcccaagatgaaggtgtgcatgcttggtgatgcccagcatgttgaggaggccgagaag

SEQ ID NO: 3451 - DNA, 278 bp, Zea mays
tcatgataatgctaggggacctatgaagggtggaatcagataccaccatgaggttgatcctgatgaagttaatgccttggcacaattgatgacttggaaaacagcagtagctaacataccatatggaggagccaaaggtggtattggatgtagccctggagacctgagcatctctgagcttgagaggcttacccgagtttttactcagaaaatccatgacttgattggcatccatactgacgttccagctccagatatgggcaccaactcacagacaa

SEQ ID NO: 3452 - DNA, 282 bp, Zea mays
taaggctggcatgactcacattgtccgtgaggttgagaagccaggatccaaactccataagaaggaaacttgtgaggctgttaccatcattgaaacccctcctcttgtcattgttgggctcgtggcatatgtgaagactcctcgtggcctccgcacactcaactctgtttgggcccaacatcttagtgaagaagtgaggagaaggttctacaagaactggtgcaagagcaagaagaaggctttcacaaagtatgctctcaaatatgaaaatgatgctggcaa

SEQ ID NO: 3453 - DNA, 197 bp, Zea mays
tcggcacgcaggctagcagcacagcagcagccagagccatcccctctcctcgctacgcttcgcttcctcggcgccgattcctcctcctcctcctccaccctcgtccgtccccttccggcgcgcgagctcgcccgagatggcgaacgcgagatcgggtgtcgctgtgaacgatgagtgcatgctgaattttagcgagc

SEQ ID NO: 3454 - DNA, 271 bp, Zea mays
cagctcggcgccatcgccgccggcgcgtacgctctgcacgagaagcacaaggccaagaaggacccggagaacgagcacggccaccgggtcaaggaggaggtggccgccgtcgccgccgtgggctccgccgggttcgccttccacgagcatcacgagaagaaggacgccaagaagcacgcccacaactgatccgtcgcaggctgcctcagccgaagcagcagcacatcgtcgcggttgctgtttcatctgttctcccagcctcgtcttcgtt

SEQ ID NO: 3455 - DNA, 197 bp, Zea mays
tggaatctgcaagtttaagaatgagaatgttggagtcaaggttttggactcggttaacatcaccctgggtgctgaggatgaactgaaggatgctgttggtctggttcgcccagttagcgttgccttcgaggtgatcactggtttcaggctgtacaagagcggagtttacactagcgaccattgtgggactacaccga

SEQ ID NO: 3456 - DNA, 266 bp, Zea mays
tgccacgggcggcggcgacgtctggatcaacgagcgccgcttccgcgtccttcgccagatcggcgagggcgggttcgccttcgtctacctcgtcagagagcaccagcccgcctccgatgccgcgttcgctaggcgtgaccccgcccacgtctcagaggatggaacgtatgccatgaagaaggtgctgatacagagcaaggagcagttggatctggtgagggaggagatccgtgtgtcgtccttattcaatcaccccaaccttctgc

SEQ ID NO: 3457 - DNA, 291 bp, Zea mays
tggatgcacggttgaggatgaggcttttgttggcatgggggcaaccctattagatggtgtcgttgttgaaaagcatgggatggtagctgcaggatcccttgtaagacagaatactaggatcccttgtggagaggtatggggagggaaccctgccaaatttctgaggaagctcacagatgacgagatcgcatttatcacggaatcagcttccaactattccaatctgtccaaggtgcatgctgccgagaatgccaagcctcttgaaaagattgagtttgagaaggtgttgcg

SEQ ID NO: 3458 - DNA, 297 bp, Zea mays
gcaaagaatctccttgaactggacccatttgatgactcggcctatgttcttttgtcaaacttatatgctacaaatgcaagatgggtagatgttgacaaattaagaagtcacatgaagactattaagttaaacaaaagacctgcctgcagctggcttaagttgaagaatgaggtgagcacctttggtataggtgaccggagtcatatgcacgcagaaaagatctatgtgaagttggatgaaatcttgctagagctcagagaagtaggttacgtcgctgatacctcatctgcactacat

SEQ ID NO: 3459 - DNA, 292 bp, Zea mays
accgaccgaactcaaactgtgtgttacagagggagaggggccatggaaaacccggcgccgccgaccaacccggcctccgccacgccgtcgccgtcgcggcagctgccggacttccagcagtcggttcgtctcaagtacgtgaagctggggtaccattacctcatcacccacggcatgtacctgctgctcaccccgctgatggtgctcgtggccgtgtacctctccacgctctccccgcgcgacgtcgccgacctgtgggcgcacctccgcctcaacctcatctccgtgctcg

SEQ ID NO: 3460 - DNA, 293 bp, Zea mays
ctgatgatggctcagctatgctgacttttgagtctctctctgaaactgccgaatttgctagaaagtgggttcccttttgtaagaagcacaatattgaaccaagagctccagaattttactttgctcaaaaaatagattacctgaaggacaaaattcaaccttcatttgttaaggaaagacgagcaatgaagagagagtatgaagaattcaaaataagaatcaatgcccttgttgccaaagcacagaaagtgcctgaacaggggtggaccatggctgatggaactgcttggcct

SEQ ID NO: 3461 - DNA, 290 bp, Zea mays
gctttgctgcattccaaaccaaaatcaacagttggaactccagcatacatagcccccgaggttctttccagaaaagagtatgatggaaaggtagcagacgtttggtcctgtggtgtcacgctgtacgtgatgctcgtgggatcatatccatttgaagatcctgaggatccaaggaacttccggaaaacgatcagcagaattcttggcgtgcaatactccatcccggattatgtgagagtgtcttcagactgcagacgccttctgtctcagatattcgttgccgatccttc

SEQ ID NO: 3462 - DNA, 290 bp, Zea mays
tgcgtctccttgcccgcttcgccgctcgccgtttgcccctcgtctccgcaccgcgcgctgttgtccatccttgtgcagcaaaaatgacggctggctacattgttggctcactggtcggatcctttgccattgcatacctgtgtgacacatttatctctgacaagaaggcatttggaggtagcacccccaagactgtttctgagaaggagtggtggcaagccacagacaccaagttccaggcctggcctcgcactgctgggccaccggttgtcatgaaccccatcagccgc

SEQ ID NO: 3463 - DNA, 288 bp, Zea mays
cggctcgagtgttcctgcggaggatcctgaccggcgggggcggcctggcggccctgagggcggcgcgcgccgtgaaggagacgacggggatcgtgggccttgaggtggtgcctaacgcgcgagaggttctggtagggctctacgagcgcacgctcaaagagatcaaggccgtccccgaagacgagggctaccgcaaggccgttgaatccttcaccggtcaccgcctccagatctgccaggaggaggaggactggaagcgcatcgaggaccgaatcggatgcgggcagg

SEQ ID NO: 3464 - DNA, 286 bp, Zea mays
ggcaaaatgattgttctcgatctttacgctgaagttaaaccagtgtggataaattctgatcagttatatggtgttccctacatctggtgcatgctccacaatttcgctgcagattttgaaatgtatggtgttttagatgctttggcttctgggcctattgatgctcgattaagtgataactccacaatggttggagttggtatgtctatggaaggtattgagcaaaatcctattgtttatgaccttatgtcagaactggccttccatcacagacaagttgatcttc

SEQ ID NO: 3465 - DNA, 292 bp, Zea mays
cgccaagctcggcggctacgacatccccgccgagagcaagatcctcgtcaacgcctggtacctcgccaacaaccccgacagctggaggcggcccgaggagttccggcccgagcgattcctcgaggaggagaagcacgtcgaggccaacggcaacgacttcaggtacctgcccttcggcgtcggccgcacgagctgccccgggatcatcctcgccctgcccatcctcggcatcaccatcggccgcctcgtccagaacttcgagctgctcccaccgcccgggcaggacaaggtc

SEQ ID NO: 3466 - DNA, 288 bp, Zea mays
cggctcgagatcgacatggctatgcagcagcagcatgaagctgagcttgctgcagcagctgcacaacctcttcctgatgacgatgatgatctgattgagtagaaaggatcatgagtcttgaacttgagcaggagttgtgccttgcgtgttttaagttgttctagggtgaactcttgagttctcattgtctggatcatctttttctccttggatgtgttgcatcttttgagtgtggaaatggatggtactcctcgccatgaatttgctggctactttatacattgcttt

SEQ ID NO: 3467 - DNA, 284 bp, Zea mays
ctgagcttttgttgggtgctactaactatggtgctgctgttgatctatggagtgccggttgcattcttgctgagttgctatcagggaagcctatcatgccaggacgaactgaggtggaacagttgcacaaaatttttaagctctgcggttcaccatcagaggagttttgggctaatttgaagttatcccgagctaccatattcaagcctcagcatccgtaccgccgatgtgtgaatgatgtatataaggactttcctactactgctttaacacttttggaccat

SEQ ID NO: 3468 - DNA, 276 bp, Zea mays
gcggcctggacgcgtgcgagacacttgaccaagcagcagcagcagggatggcgcctctgaagctgtacgggatgccgctgtcccccaacgtggtgcgcgtggccaccgtgctcaacgagaagggcctcgacttcgagatcgtccccgtcgacctcaccaccggcgcccacaagcagcccgacttcctcgccctcaaccctttcggccagatcccggctctcgtcgacggagacgaatcctcttcgagtcccgtgcgatcaaccggtacatcgccag

SEQ ID NO: 3469 - DNA, 280 bp, Zea mays
ctcgacttcttcctgcgcgagtgccccaaggggatgaagaccatgagcacggggctgttcctcagcaccctgtcgctgggattcttcgtcagctccgcgctcgtcgccgccgtgcacagggtcacgggcgaccgccacccctggatcgccaacgacctcaacaagggccgcctcgacaacttctactggctgctcgccgccgtctgcctcgccaacctactagtctacctcgtcgccgcccgctggtacaagtacaaggcgggccgccccggcgccgacg

SEQ ID NO: 3470 - DNA, 281 bp, Zea mays
ggagaaactgcagcttgcagcgagggttatcgttgccatcgagaacccgcagacatcatcgtccagtccgcccgcccctatggccagcgtgctgtcctcaagttcgctcagtacactggcgctcatgccatcgctgggaggcacacccctggtaccttcactaaccagctccagacctccttcagcgagcctcggctgctcatccttaccgacccaaggactgaccatcagccaattaaggagtctgctctggggaacatccccaccattgccttctgtga

SEQ ID NO: 3471 - DNA, 271 bp, Zea mays
gtccaacccgggcctggcctacaacttctacaagaacagctgccccagcgtggactccatcgtccgcagcgtcacctgggcgcaggtcgccgccaaccctgccctcccggctcgcctcctccgcctccacttccatgactgcttcgtcaagggctgcgacgcgtcgatcctgctggacaccgcgcagagcgagaagacggcggcgccgaacctgtcggtgggcgggtacgaggtgatcgacgcgatcaaggcgcactgcgagagggcgtgc

SEQ ID NO: 3472 - DNA, 265 bp, Zea mays
gcactgccgccactcaccagcaaattcccaagccgccccttcccccatctctttcgcgccccatttgatcgattcctgatggcgcccaaggccgagaagaagcccgcggagaagaagccggcggaggagaaggccgagaagaagccaagggcggagaagcgcgtgccgagcaaggagggcgccgagaagagggaaaagaggaggccgagaagcaccttcgggacgtacaagttctacttcttcaaggtgctcaatcagttccacc

SEQ ID NO: 3473 - DNA, 277 bp, Zea mays
tgcctcctcaagaagaaattagtggcatgggtatgtctaaggttatcagggcagatcagaaaaggttcttcttcgacctgggcagcaacaacaggggccattatttgaggatttctgaggtggctggagctgatcgttcgtctattatcttgccgctctcgggtttgaagcaattccatgaaatggttggtcactttgtagatataatgaaggacaggcttgaaggaatgacaggagctaacgtgcgcactgtcgagcccagccagagatgattacc

SEQ ID NO: 3474 - DNA, 279 bp, Zea mays
gctgcctccgcctctcgagtctcgtccacccgtcgtcctcctagctcctctactcgccagtcgccatgggcaagattaagatcggaatcaacggcttcggaaggatcggcaggctcgtggccagggtcgccctccagagcgaggatgtcgagctcgtcgccgtcaacgaccccttcatcaccacggactacatgacctacatgttcaagtacgacaccgtccacggccactggaagcacagcgacatcacactcaaggactccaagacccttctcttcg

SEQ ID NO: 3475 - DNA, 278 bp, Zea mays
agtttctggtggatagctacaacaagcccgtccctgctattctggagatcccatccaaggaccatccatatgatccagcgcacgactctgtgctctctcgagtgaaatatctgttctctgcagaatcggtggcgtctgataggcgatgaaggcatccttgcgtagcagtacccttcgatgcatctattttgttatggtattgaaaagaagatggcacgtaccattgggtgcgagcgagccagcatgaataataatgagcttgcaaacaatgattggtt

SEQ ID NO: 3476 - DNA, 275 bp, Zea mays
gccggtacaacacattctcctgggtgcacaatgcacatcttaaggccatgcttgagaagctccgggctaagcaccccaatgtgagaatcatatatggcgattactacactccagtcgtccagttcatgcttcagcctgagaagtttggttttgccagacaactgcccagggcatgttgtggggcgccatcgactcctgagagagcagcttacaacttcaatgtcacggccaaatgcggtgagcctggtgcaactgcctgtgctgatccgacaacc

SEQ ID NO: 3477 - DNA, 277 bp, Zea mays
cttctattggaatgtggcagttgctatttgctgaaaggaactggcctcttctggatcattggtgtcagtttttacaggtcagacacaataaagccatatctagagacacatggtcccagctgctggaatttgtgaagacgaccgatccacagttatccaactacgacgacgaaggtgcctggccctacctcatagacgaatttgtggaatatctgactgagaacggactcgtccagcgtaaaagatgaacaacggggagatgcatctccaaacaatg

SEQ ID NO: 3478 - DNA, 190 bp, Zea mays
atctcccaagacctcctcagacccgagaagcgcactgcgtgccatggacgccaccggcactggagctggagggaaggcgaagaagggagcggccggtcgcaaggccggcgggccgaggaagaagtcggtgacgaggtccgtgaaggccgggctctagttccccgtcggccgcatcgggcgctacctaaag

SEQ ID NO: 3479 - DNA, 278 bp, Zea mays
ctcgagttcagatcgagcgcgcgccaagcaagtcttccggccggccgcgaagagcgcaatcaagcaagacaagatggtgaagctcgccttcggaagcgtcggcgactccttcagcgccacctccatcaaggcctacgtggccgagttcatcgccaccctcctcttcgtcttcgccggcgtcggttccgccatcgcctacgggcaactgacgaatggcggcgcgctggacccggcgggcctggtggcaatcgctatcgcgacacgctctggcgctgttc

SEQ ID NO: 3480 - DNA, 225 bp, Zea mays
gtgaactcggaggggtgcctgttcgacaagcacgcgcggacggcgctggccttcgtgacgctcaagcacgacggggagcgcgagttcatgttctacaggaacccgagcgcggacatgctgctgacgaaggcgaacctgaacttgggcttgttccgcgcgccaaggtgttccactacggctccatctcggtcatcttcgagccgtgccgctcggcgaaaatggccg

SEQ ID NO: 3481 - DNA, 274 bp, Zea mays
tcgcccatcaaaatctgcggtgatgtccatggccagtactctgatctcctgaggctattcgattatggtggctatccgcctcaggccaactaccttttcttgggtgattatgtggatcgtggaaagcaaagcttggaaacaatatgtcttcttttggcctacaaggtcaagtacccagagaacttctttcttctaaggggaaaccatgaatgcgcatcagtaaatcgcatctatggtttttatgacgagtgcaaacgcagattcagtgtaaagc

SEQ ID NO: 3482 - DNA, 273 bp, Zea mays
tgaaggaaccagcacctggccttgtatttttccacattccactaccagagttcagcagttttacggcatccaatttcacaggagtaaagcaggagggtatcagctcagcatcaattaactctgggttctttgcctccatggtggaggctggagatgtgagagctgcctttgtgggacatgatcacattaatgacttctgtgggaagctcagtggtattcagctctgctatgctggtggatttggttaccatgcctatgggaaagctgggtggt

SEQ ID NO: 3483 - DNA, 274 bp, Zea mays
gctaaaacatggcaggtccctgaaaccctccctgaggaagtgcttggaaagatgggcgcaccccctaagcctgacgtgccagtcatcacgccgcaagaactcgcagaggccgacggaatcctcttcgggttcccaacgaggttcggaatgatggcagcgcagatgaaggcgttcttcgatgccactggtgggctctggagggagcagagccttgccggcaagcctgccggcgtcttcttctgcactggatcccagggtggtggccaggagacga

SEQ ID NO: 3484 - DNA, 274 bp, Zea mays
cgcctccatcgcccgccacgtctacctccgcaagaccgtcggtgttggccgtctccgcaaggtccacggcactgccaagaaccgtggcagccgtccctccaagcacgtcgatgcctccggctccgtcgaccgaaaggtcatgcaggctcttgagaagatcggtgtccttgagcaggacgaggacaagggtggccgccgcatcacccaggccggacagcgtgatttggaccgaattgcccagaccaccgctgaggccgaggaggaggaggatgac

SEQ ID NO: 3485 - DNA, 271 bp, Zea mays
gcacaattggggttgattttaaaattcggacagtagagcaagatgggaagaccataaaacttcaaatttgggatactgctgggcaagagcgcttcaggaccatcactagcagctactaccgtggagctcatggaatcattattgtatatgacgtgacagaccaagaaagcttcaataatgtgaagcaatggttaaatgaaattgatcgttatgcaagtgacaatgttaacaagctccttgttgggaacaagagcgacctaactgccaacaa

SEQ ID NO: 3486 - DNA, 274 bp, Zea mays
cggccaccacctgctgctgcgtctccgagtaccgcggcaaatgcctcgcatacggctgctgcgagctggagaacgccacctgctgcgaggaccactcgtcctgctgcccgcacgactaccccgtctgcagcgtccgggacgggacctgccgtaagagcgccaacagcccgatgatggtgaaggctctgcagcgcaagccggcgatgtatactggcggcggcggcggcggcgagcaaagcgcgaggagcagctggtgaggagattgagactgtgg

SEQ ID NO: 3487 - DNA, 273 bp, Zea mays
gtttggcaagtttgacagcgtgcttgagccaggatgccactgcatgccttggttcgccggcaagcgtgtagctgggcatctcacactcaggctgcagcaactggatgtgcgctgtgagacaaaaacaaaggacaatgtttttgtgaatgtggtggcatctattcagtaccgcgctctggctgacaaagcaagtgacgctttctacaaactgagcaacacaaggtcccagatccaagcctacgtctttgacgtgatcagagcaagcgttcccaa

SEQ ID NO: 3488 - DNA, 274 bp, Zea mays
tatctgaccatggccgcgccggggtcagcgatcaagcacaccttttcttctctcctgaagcaaaaaccaccaaagactagtcctacaaaatctaggggttctatggctgtttcaatgagggaggtggatcctgtttttcaaggtgcaggtcaaaaagatggattggaaatatggcggattgaaaagttacaggctgttcctgttcccaaggaatcatatgggaaatttttcacaggagattcctacatagtactgaagacaactgcccttaaga

SEQ ID NO: 3489 - DNA, 264 bp, Zea mays
tccgatgccaaccccatccaggtcgtcgtcgagcgatcatcaacagtggcccccgtgaggatgccacccgtattggttccgctggtgttgtgagaaggcaggccgtggatatctcacccctgaggagggtgaacaaggatatatatcctcacaactggtgccagggagagtgctttccggaacatcaaaaccattgccgagtgccttgcagatgagctgatcaacgctgccaagggctcatccaacagttacgccatcaagaag

SEQ ID NO: 3490 - DNA, 187 bp, Zea mays
tggttgctgtcctctgcatcacaaaatctggtgaggttatcaactatcaagccttcacaaactccaagggcgtgtatactgtcgccgagactatgccggagagcgacaggtgggactcgtgcttggcgaggcctatgagcagcttccatctaaattgcacagggcggggtaatgcccactctggggt

SEQ ID NO: 3491 - DNA, 247 bp, Zea mays
ggcggaccaggtaagcagcagcaggaaccctagcaccgccgcatccgcagccatgggtatcgacctcgttgccggtgggaggaacaagaagaccaagcgcacagcgccgaagtccgacgatgtttatctcaagctccttgtcaagctctaccgtttcttggtcaggaggaccaagagcaacttcaatgctgtcattctcaagaggctcttcatgagcaaaaccattcgcccacaattctcaatgcgc

SEQ ID NO: 3492 - DNA, 267 bp, Zea mays
acgtcattttggaatgatccaagtgaatttcaagacatatttgacgttgaacattttataatctctctaagagatgaggttcgcatacttagagaattgccaccaagagtaaaacggagagtggagttaggaaagttctactcagtgcctcctgttagttggtcggatatctcctattaccataagaagattctacctgcaattcagaaatataaggtactccatcttaatagaactgatgctaggcttgctaataatggtctgcct

SEQ ID NO: 3493 - DNA, 268 bp, Zea mays
  unsure (1)..(268): unsure at all n locations
tgagaacaacacgatcatcgacacacacgggctgctgagcatccatatgcctccttactacaactctatcatccgaggtgtctccacggtcatggtctcctactccagctggaacggagtgnagatgcacgcgaaccatttcctggtcacggattttctcaagaacaagctcaagtttaggggttttgtgatttccgactgggagggcattgatcggatcactactcctcctcacgccaactactcttactcaattgaggctggtgtt

SEQ ID NO: 3494 - DNA, 122 bp, Zea mays
cgcccctctccacactgccaactcgctccgaagagggaggaggacgacgccggttgccactgccactgccgcgccgcgccgctcccgtctcccctccctccgcgggaactcgacgccaccat

SEQ ID NO: 3495 - DNA, 274 bp, Zea mays
cgcacgcatacacagcacagagtgaggtaagcatccgaaaaaagctgtgatctgatcgacatggccgccgccaccatggctctcacctcccgcgcgctcgtcggcaagccggcgaccagcaccagggacgtcttcggcgaggggcgcatcaccatgcgcaagactgctggcaagcccaagccagcggcgtccggcagcccctggtacggggccgaccgcgtcctgtacctgggcccgctgtccggccagcccccaagctacctgaccggcgagt

SEQ ID NO: 3496 - DNA, 270 bp, Zea mays
cccagagataatggttcctcttgttggaacaccacaggaactggggcatcaagtgactcttatccgccaagttgctgagaaagtgttcgccaatgtgggcaagactatcgggtacaaagttggaacaatgattgagatccccagggcagctctggtggctgatgagatagcggacaggctgaattcttctccttcggaacgaacgacctgacgcagatgacctttgggtacagcagggatgatgtgggaaagttcattcccgtctatctt

SEQ ID NO: 3497 - DNA, 248 bp, Zea mays
gcgccactccttcgtgcacaacgggcagaaggtgttcgagtgggaccagacgctggaggaggtcaacatgtacatcgagctcccgaacgctgtgccaaccaagctatttcactgcagcatccaggctagccacgtcgaggtcggcatccgcggcaacccgccatacctcaaccatgacctgacacacccagtgaagactgactcgtcgttctggacaatagaagacggtgagatgcatataacactgc

SEQ ID NO: 3498 - DNA, 269 bp, Zea mays
  unsure (1)..(269): unsure at all n locations
ggaggatattgggatacaccttatggtcactttttccttgagtggtattcaggaatgcttcttctccatggagagaggctatgcatgatagctgatgcaatcttctctggtactggtgtgaccatctcagggaaggttgctggcatacattggcactactatacttgttcacatccatctgaactgacagctggctactacaatacactactaagagatggctatcttcctatagctcaaatgtttgccanatacaaagctgcattgtg

SEQ ID NO: 3499 - DNA, 276 bp, Zea mays
gttgttgctcatggcgtgtcttgggcttttgcctttcctggagctgttgcgaactggacaatgcagtttgctgcaaggataaccggtactgctgccctcatgactatcctgtttgtgatacaggtcgcgggcagtgtctcaaggccagcggcaacttctctgctatagaaggaatcaggaggaaacagtctttctctaaagctccctcgtggactggctggctggagttgatggaccaatgagcgtataatcagacatggatagtagcttcatgca

SEQ ID NO: 3500 - DNA, 272 bp, Zea mays
ttcttcgcgaaggctgggctggattacgtttcttgctcccctttcagggttccgattgctaggctagctgcagctcaggtgcttgtctgaggctgcctcctcattggcaaccggattgcctgctgctggtggatgtggtgatcaacagtattattacagagccatgctatgtgaacattactagtagcagtgctcataaaagctacaatcccatgtcctttttttccccagtcatgtaaaacttccaaactgctccatggttcaaaactctg

SEQ ID NO: 3501 - DNA, 273 bp, Zea mays
gacgagctcgccatggcctccctctcctctgccgccgtcaccgccccttccttcgccgcaccagcgccagcccgcgccgtggtcagaaggaggtccttcaccgtgcgcgcctctctccgcaaggccaccggcaccgccgccgtggcaatggctgccagcgccctgcttgccggcggtgccatggcccaggaggtgctgctgggcgcaggcgacggcgggctcgtcttcgagcccagccagttcaccgtcaaggccggcgacaccatcacattc

SEQ ID NO: 3502 - DNA, 100 bp, Zea mays
gcttctcctccccctccggttcgggttcgggttcgtgaagttctccggggttcgggttcgtgggttagcggatcgagatggcggcgtcggatgttgagta

SEQ ID NO: 3503 - DNA, 267 bp, Zea mays
gtgaacctgaaacttgcggtgtcactggctggtacagctgagtgtgagtgagtgatcgagctagctgagctccgatcctcgctagctagctaggataccgccataccacaagtcttcttcacaagtttaggagtgacagcaacaagagatcgatggcctctgccaccgtgctcaagtcctccttccttcccaagaagtccgaatggggcgccaccaggcaggccgccgcgcccaggccgcccaccgtctccatggtcgtccgcgcct

SEQ ID NO: 3504 - DNA, 267 bp, Zea mays
ctagctgaccaccaacctcagcacatcgaggagaggaggagtggccatggcttcgtcggtggccgccgcggcgagcacattcctgggcacccgcctggcggacccggcgccgcagaacgggcgcatcgtggcccggtttgggttcggcggcggaaagcccaaggctgccgtcccgaagaaggtggcgaagacgtcgatctcctctgaccggccgctgtggttccccggcgccgtggcgcccgactacctcgacggctcgctggtcgg

SEQ ID NO: 3505 - DNA, 266 bp, Zea mays
cccggagcaggtggccgcgtacaccctcaagctcctccaccgccggatccccccttccgtgcccgggatcatgttcctctccggcgggcagtcggaggtggaggcgacgcagaacctcaacgccatgaaccaggggcccaacccgtggcacgtgtccttctcctacgcgcgggcgctgcagaacacctgcctcaagacctggggcggcgagccggagaaggtcaaggcggcgcaggacgcgctgctgctgcgcaccaaggccaact

SEQ ID NO: 3506 - DNA, 265 bp, Zea mays
  unsure (1)..(265): unsure at all n locations
caaggagagtacgtggaggagcagccatggcttcatcggtggccgccgcggcgagcacattcctgggcacccgcctggcggacccggcgccacagaacgggcgcatcgtggcccggttcgggttcgggttgggcggcaaggcgaactgnctccgaagaaggtggcgaagacatcgacctcctctgaccggccgctgtggttccccggcgccgtggcgcccgactacctggacggctcgctggtcggcgactacgggttcgacccg

SEQ ID NO: 3507 - DNA, 270 bp, Zea mays
gtcgaggatggacctaaagacattcgcattgaaagaatagatgactttggcagagtgatgacacctaaggaggcattccgtcatctttcgcacaagtttcatggcaaggggcctggtaaaatgaaacaagaaaaacgccagaagaaatatcatgatgagctgaaaaccaagcatatgaaatcttctgacacaccattattggccgcggaaaagatgagagaggctcaatctcgtaatcaaacaccatacctcattttaagtggcaatgca

SEQ ID NO: 3508 - DNA, 271 bp, Zea mays
ataaactactacacctcaatattctccaaacatatcgacatctcaccaaaatactcgcctgttctcaacactgacgacgcctacgctagtcaagaaacgtatgggcctgacgggaaacccattggtcctcctatgggaaatccgtggatctacttatacccagaaggcctaaaggatatccttatgatcatgaagaacaaatatggaaacccacctatctacatcactgagaacggaatcggggatgttgatacaaaggagaaacctctac

SEQ ID NO: 3509 - DNA, 261 bp, Zea mays
ataaaccgcagcagatggcgtcgacgatcatggccgccacctcccgcatcgtcgcggccaagacgccgtttcttggccagggtcgcgccgccgccaatgccagccccctccgcgacgtcgccgccgccgctgctggcggccggatcaccatgggcaacgacctgtggtacggcccggaccgcgtcaagtacctgggcaccttctccgcccagacgccctcgtacctgaccggcgagttccccggcgactacggctgggaca

SEQ ID NO: 3510 - DNA, 262 bp, Zea mays
  unsure (1)..(262): unsure at all n locations
cctctctcggcctcccaccgccaccggcgtcgacgagtaactcgcccgctgaccccagcaggcagccatgggagggcacggcgggttgaacatcctgccgcagaagcggtggaacgtctataacttcgacaaccgtgagaaggtgcaaaaagacgaggccgccgccgcccgggaggagcagctccagcgcgaggcggaacgcgnccgcgagtcggatctacgcctcgctgcactacgccgtaaccgcggcctggtccaggcg

SEQ ID NO: 3511 - DNA, 260 bp, Zea mays
gctcaacgggatcgcgctccgggtgcccaccccgaacgtctccgtcgtcgacctcgtcgtgcaggtctccaagaagaccctcgccgaggaggtgaaccaggcgttccgcgacgccgcggccaacgagctcacgggcatcctcgaggtctgcgacgtgccgctcgtgtccgtcgacttcaggtgctccgacgtctcctccaccatcgacgcctccctcaccatggtcatgggcgacgacatggtcaaggtcatctcctggt

SEQ ID NO: 3512 - DNA, 261 bp, Zea mays
gtcctccgacaccattgacaatgtgaaggccaagatccaggacaaggagggcatccccccggaccagcagcggctcatcttcgccggcaagcagctcgaggacggtcgcaccctcgccgactacaacattcagaaggagtccaccctccacctggtgctccgcctccgcggtggcgccaagaagcgtaagaagaagacgtacaccaagcccaagaagatcaagcacaagcacaagaaggtgaagctctccgtgctgcagtt

SEQ ID NO: 3513 - DNA, 261 bp, Zea mays
gcggcgacggcttcaagctgctgatcccgtccaagtggaaccccagcaaggagcgggagttccccgggcaggtgctccgctacgaggacaacttcgacgccaacagcaatgtgtccgtcatcatccagcccacgtccaagaagaccatcgccgactacggctctcccgaggagttcctctcccaggtcgactacctgctcggtcagcaggcctacggcggcaagaccgactccgagggcgggttcgagaccggcgccgtgg

SEQ ID NO: 3514 - DNA, 260 bp, Zea mays
cacgcatactgcatacacaacacagagcatcagaaggagctacgatctgatcgacatggctgccgccaccatggctatcacctcccgcgcgctcgtcggcaagccggcggctggcacgagggacgtcttcggcgagggccgcatcaccatgcgcaagaccgccgccaagcccaagccggcggcctccggcagcccctggtacggtgccgaccgcgtcctgtacctgggcccgctgtccggctcacctccgagctacctga

SEQ ID NO: 3515 - DNA, 260 bp, Zea mays
caccactccgcgctagctgaggacggtacagcggcacagaggtgcgacgtacgacgacgacgacgcaggcgccacacatggcatcccagctctccgccgccgtgccccggttccacggcctccggggctacgccgcgcccaggtccgcggtggcagcgctgccgtccgtgagggtgggcaggaagaggtcgtcgtcgcagggcatccgctgcgactacatcggctccgccaccaacctgatcatggtgacgacgacgacg

SEQ ID NO: 3516 - DNA, 257 bp, Zea mays
gtcatatccttcttcttcgcgcgcggctttgtcaaaaccggactcggcgaccgcgtcgcacctacttcgtcaaatggctggggcgcacactttgggcctatcctatgggcttgccatcagcgaggctctcatctcccctgccatgcccagcaccacggccagggctggaggtgttttccttcccatcgtcaagtcgctatcgctctcgtccggaagcaagcccaacgatccatcggcgaagaaactcggctcttatc

SEQ ID NO: 3517 - DNA, 273 bp, Zea mays
ccatcacataaaaccagtgcaagcagaagcagcgcaatggcgagcagcaccatggccctctcctccacagccttcgccggcaaggcagtgaacgtgccgtcgtctcacttcggcgaggcccgcgtgacgatgcgcaagacggcggcgaaggcaaagccggcggcgagctccggcagcccgtggtacggccccgaccgcgtgctctacctgggcccgctgtccggcgcgcccccgagctacctgacgggcgagttcccgggcgactacggctgg

SEQ ID NO: 3518 - DNA, 270 bp, Zea mays
tgcctttttcccactcaggtcgagcatcttcgacgccaaggccgggatcgctctgaacgaccacttcgtcaagcttgtctcgtggtacgacaacgagtggggctacagcaaccgcgtcgtcgacctgatccgccacatgttcaagacccagtagagggttttccccctgcttctcatggatggttgctgcttgtgtatgccgagaataaatgtggatgtcgccaggttcatgctgagtctggacatgttttgcacttttgtttccatttc

SEQ ID NO: 3519 - DNA, 273 bp, Zea mays
gaagaacctcggagctgagatggcacaagccatggcgtcgatgaccggcctctcgcagggcgtcctgcccagcaggcgcgccgacagcagaaccaggacggccgtcgtcatcgtcagggcgtccgctgagggctgacgcgttgcgcaggctggccgccgcgccgtgatcgggctggtggccactggcatcgtcggcggcgtcttgtcgcaggcggcgcgcgccgagaccgtcaagaccatcaagattggagccccgccgccgccctccggtgg

SEQ ID NO: 3520 - DNA, 267 bp, Zea mays
gttgccaatgagggcctgagggcgattggccgcagctgcgtgaagctgcaagctagtgaacatcaagaactgccctcttgttggtgaccaaggcatttccagcctggtgtgctctgctaccgctgctcttacaaagatccggctccagggattgaacataactgatgcttcgcttgctgtgattggatactatgggaaagccatcactgaccttacacttactcgtctcgctgctgttggtgagaggggtttctgggtgatggctaa

SEQ ID NO: 3521 - DNA, 267 bp, Zea mays
accggactcttcattcggttcgcggatggaggagtccgtcaagacgacggtggccgacaaccccgttgtcatctactccaagtcatggtgctcatattgcatggaggtgaaggcgctcttcaagcggatcggtgtgcagccccatgttatcgagcttgaccatctcggtgctcaaggaccacaaatacagaaggtattagagaggctgactggacagtctactgttcctaatgttttcatcggtggaaagcatgttggtggctgtac

SEQ ID NO: 3522 - DNA, 267 bp, Zea mays
agatcctgctggacggcgagcacggcatcgagcgcacgttcgaggtggcgcagaaggtgtgggccgaaaccttctacgccatggcggagaacaacgtcatgttcgagggcatcctgctgaagccgtccatggtgacgcccggcgcggaggccaaggacagggccaccccggagcaggtggccgcgtacaccctcaagctcctccaccgccggatccccccttccgtgcccgggatcatgttcctctccggcgggcagtcggaggtgg

SEQ ID NO: 3523 - DNA, 265 bp, Zea mays
gacgacaaacatggggaagcctgcgaagatcggagagtggggtggatacgccggcgatcgtcgggatctgagggctactccggaccggctgatcgaggtgaaggtcacggcggacaacagcagctgcatccgctccatctccttcatctacatcggagccgatggcaaaccgtacgaggaggggccatggggtttcggccatgctggcacggagtacaagattgatctgtgcaggttcgacgagagcttgacggagatctccggg

SEQ ID NO: 3524 - DNA, 265 bp, Zea mays
ccaccatgtagttggtggtgttctaaacccgaatgctgcgtaccttatccttcgaggtatgaagacactgcatctccgtgtgcaatgtcagaacgacactgctcttcggatggcccagtttttagaggagcatccaaagattgctcgtgtctactatcctggcttgccaagtcaccctgaacatcacattgccaagagtcaaatgactggctttggcggtgttgttagttttgaggttgctggagactttgatgctacgaggaaa

SEQ ID NO: 3525 - DNA, 257 bp, Zea mays
gccaaaaggcatcaccgccgcgacgacgatggcagcctcgctccaagccgcggccaccctgatgcagccggccaagatcggcggccgggcgccctttgcctcgctgccgtcccgcccgtcgtcgcaactcgcctgcagggcgttcggcgtcgacgccggcgccgccaggatcacgtgctccctgcaggacgtcgccagcaggtgcgtcgacgccgcgaactcgccggcttcgcgctcgccacctcggcgctcctcgt

SEQ ID NO: 3526 - DNA, 261 bp, Zea mays
ccaggacgtacgtacgtacgtagatcgatccatcgatcgctagctagctgacgaccatggcgtccctctcctctgccgccatcaccgccccttccttcacggccgcgcccgctcgcgcagtggtcagcaggaggtccttcaccgtgcgtgcctctctccgcaaggccactgccaccgccgccgtggccgttgccgccagcgtcctgcttgccggcggcggcgccatggcccaggaggtgctgctgggcgcaggcgacggcg

SEQ ID NO: 3527 - DNA, 260 bp, Zea mays
atcgatctgcaagtctcgctacgtagcagtgcaatacaaaaaaagcagccgcaatggcgagcagcaccatggccctctcctccacggccttcgccggcaaggccgtgaacgtgccgtcgtcgtccgccttcggctaggcccgcgtgacgatgcgcaagacggcggcgaaggccaagcctgcggcggcgtccgggagcccgtggtacggccccgaccgcgtgctgtacctgggcccactgtccggcgagccaccgagctac

SEQ ID NO: 3528 - DNA, 258 bp, Zea mays
ttgacatggacattttatcttctatctaagtatccaaaggtaatggccaagctccaagatgaggctgatagtgttctaggtgatggtttgccaacaattgaggatgtgaagaaactaaagtacacgactcgggttattaatgaatcattgagactatatccacagccgccggttttaattcgtaggtcacttgaggacgatatcctgggagggtaccaattggccgaggagaagatatttttatttctgtctggaatc

SEQ ID NO: 3529 - DNA, 282 bp, Zea mays
caaaggttggggacgaatcatatgcttcctacaaggcagagaaagatggaatccttcagtctttagctcgccgtgcaaaggcactggaagatgcattcaacacgcttgagggattttcatgtaacaaggctgaaggagcaatgtaccttttccctcagatccatctgccacataaggcaattgaggctgctaaagctgccaagaaagcacctgatgcattctatgcgctccgtctccttgaatcaactggaattgttgtggttcctggatctggatttggcc

SEQ ID NO: 3530 - DNA, 287 bp, Zea mays
gaccgcgattgctctcagaaggcactagcacgcaaaaaccccacgagagagacgaatcttccgaatctctcggtggcgatggcgctctccgaccgctcccgcgagtcgctcctcccgagcttcctctacgcctcctcggcgcgctctttcgctgccacaggagccgccgcgcgcctccctgtctcctccccagcgcctgccacggctggagcaggaggcggcgtgccgttctcgatccaggcgcccaaggagaagatcgagatgtactcgccggccttctatgccgc

SEQ ID NO: 3531 - DNA, 281 bp, Zea mays
cacaacttaatagggatgtcgacaagaagctggtgacggttccagaaatccgtgaaatcggagagtatgttgcagagatcaagcttcacccagacgtgacagcgcgagtaaggctgaatgtctatgcgaaatgagctcagcagttacagaacctcgagtaatggactttggcgaacatgatgtttgccagagattttgctgaaagtgccaggtgctgcggtagacatgaggcctggtctggccgtgacttgcctggttttgatacacaattcactggctca

SEQ ID NO: 3532 - DNA, 275 bp, Zea mays
gtcgaccgcgacggcaccgtcacctacggcggctactccagcagcgtggtggtgcacgagcgcttcgtggtccggttccccgacgcgatgccgctggatcggggggcgccgctgctgtgcgcgggcatcacagtgtacagccccatgaagtaccacggcctgaacgtgccggggaagcacgtcggcgtgatggggctgggaggcctgggccacgtcgccgtcaagttcgccaaggcgttcggggccaaggtcacggtcatcagcacgtcgcctgg

SEQ ID NO: 3533 - DNA, 197 bp, Zea mays
cccgccgggggcagaggtgacgaggaggagctccagaaggagaacatcaagaacgccgcctcctccaccggcaacatcacgttgagcgtcaccaagagcaacccggagaccggcgaggtcatcggcgtcttcgagagcgtgcagccgtccgacaccgacctcggggccaaggcgcccaaggatgtcaagatccaggg

SEQ ID NO: 3534 - DNA, 281 bp, Zea mays
cagccatggcgacctccgcggcgctctccaccgccgccaatcccacccagctctaccggtcccgcgcttcgctgggcaagccggtgaaggggcttggcctgagcatgggccgcgagcgcgcccagcggagcattgtgtgccaggcggcgagcagcatctccgccgaccgcgtccccgacatggagaagcggaagccgatgaacctcctcctcctcggcgccatctcgttgcccaccgtcggcatggtcgtcccctacggcgccttcttcgtccctgccggc

SEQ ID NO: 3535 - DNA, 279 bp, Zea mays
  unsure (1)..(279): unsure at all n locations
gcttacaaccacgaagggtgtcactaccatcatcggcggcggcgactctgttgctgctgtcgagaaggctgggctggccgacaagatgagccacatttcgaccggcggcggtgcgagcttggaactcttggaaggcaagactctacctggtgtccttgccctcgatgacgcctagatnnnnnnnnnnnnnnnnnnnncaggttctgccagctttgcgtgtcatcttgtttcggaccttggtgtagcactgcaaggctaaggtttactcctccgcacatg

SEQ ID NO: 3536 - DNA, 278 bp, Zea mays
gtattcgtcgcatttgcaggcagatctgagttagccggcggatccgatccgtgcgcctgctgtgtgtgtgtcggtggagatggccacagcttacgctcccatggcgagccaggtgatgaagagcagcctcgtcgtgcactcgaggccgaggggcctgtcaggcgctgctgcgctcacgatgcggccccggttcaccgtcaaggccatccagcccgagaaggcaacgtaccatgtggtgcagcccatcaacggcgaccccttcatcggcagcctggaga

SEQ ID NO: 3537 - DNA, 280 bp, Zea mays
cgcatactgcatacacaacacagagcatcagacggagctacgatctgatcgacatggctgccgccaccatggctatcacctcccgcgcgctcgtcggcaagccggcggctggcacgacggacgtcttcggcgagggccgcatcaccatgcgcaagaccgccgccaagcccaagccggcggcgtccggcagcccatggtacggtgccgaccgcgtcctgtacctgggcccgctgtccggctcgcccccgagctacctgaccggcgagttccccggcgacta

SEQ ID NO: 3538 - DNA, 283 bp, Zea mays
cgcttgtggcggaagaactcaagccctttgggaagcagctcagggacaaatacgtggagacacagcagcttctcctccagatcgctgggcacaaggatattcttgaaggcgatccattcctgaagcaggggctggtgctgcgcaacccctacatcaccaccctgaacgtgttccaggcctacacgctgaagcggataagggaccccaacttcaaggtgacgccccagccgccgctgtccaaggagttcgccgacgagaacaagcccgccggactggtcaagct

SEQ ID NO: 3539 - DNA, 279 bp, Zea mays
agaagatcggccaagttgcgatcgggggaccgggtggaaaccctttcttggggcaacagatgtcaagccagaaggactactctatggcaacagcggatgttgtggacgccgaggtgagggaactcgtggagaaggcctactctagagcaaggcagataatcaccacgcacatcgacatcctccacaagctcgcccagctcctgatcgagaaggagaccgtggacggggaggaattcatgagcttgttcattgacggccaggccgagctgtttgtcgctt

SEQ ID NO: 3540 - DNA, 247 bp, Zea mays
ccatctaccagcgactcagcgagcgagagcagcacacacgcagctagctaggagcagcagcagcggcggcggcgatggcggcctccatgatctcctcgtcagctctggcggtggcgcctcagggcctgccgcccctcggccgccgcgcctcctccttcgccgtcgtctgctccaagaagaagatcaagaccgacaagccctacgggatttggggtgggctgaccgtcgacgtcgacgccaaccggag

SEQ ID NO: 3541 - DNA, 275 bp, Zea mays
gctggactcgtcacgtgatgttggtgcctctaataatcgcaggcttgcagctttgtactgcaatagggtttctggatttgaggaaattatgggattggtggatagtattgtcaaagttgtcagagctccacatgttaactttggcgagacttactatgtacctacagatgaacctgagttcttcccgaaaagacaatgtaaaattgtgacaagtgatggcaagcaagttggctacttaggaattgtccatgctgaggtcctaaggaaatttggca

SEQ ID NO: 3542 - DNA, 277 bp, Zea mays
gcgccgcattcaagttcgccatcgacaaggacgtcaggaacttccaggtcctcaaagagatgtacaacgagtggccattcttcagggtcaccctggacctgctggagatggttttcgccaagggagaccccggcattgccggcttgtatgacgagctgcttgtggcggaagaactcaagccctttgggaagcagctcagggacaaatacgtggagacacagcagcttctcctccagatcgctgggcacaaggatattcttgaaggcgatccattcct

SEQ ID NO: 3543 - DNA, 279 bp, Zea mays
ccgccacctcggcgctcctcgtctcgggcgcgagcgccggagggcacgcccaagacgctgacctacgacgagatccagagcaaaacgtacatggaggtgaagggcacgggcacggcgaaccagtgcccgaccatcgacggcggcgtggagtcgttcccgttcaaggccggcaagtaccagatgaagaagctgtgcctggagccgacgtccttcaccgtcaaggcggagggcatcgccaagaacgccccgcccgagttccagaagaccaagctcatgacc

SEQ ID NO: 3544 - DNA, 275 bp, Zea mays
cggcgtcaggcgctgcggcccctgtcgttcagaccctggtgctgaaggtggccatccactgccatggctgcaagacgaaggtccggaaggtgctcaggagcgtcgaaggcgtgcagaacgtgacggtggacgcctcgcagaacaaggtgactgtcgtcggcaccgtggacgccgacacgctcatccagaggttgtacaagtccggcaagaagggagagccctggcagtgccacccgcccatcaagaagagcgagcccgcgccggaggcccgccga

SEQ ID NO: 3545 - DNA, 274 bp, Zea mays
gccaaccaggaggatgccctcgcgcgacttgaaaagctttcagaagtaaacccgatgcttggcttccgtgggtgcaggcttggtatatcgtaccctgaattgacagacatgcaagcccgggtcatttttgaagctgctatagcaatgaccaaccagggtgttcaagtgttcccagagataatggttcctcttgttggaacaccacaggaactggggcatcaagtgactcttatccgccaagttgctgagaaagtgttcgccaatgtgggcaaga

SEQ ID NO: 3546 - DNA, 275 bp, Zea mays
ccccactcagttcttaggtttgcatttattgagttctctgatgaagagggtgcaagaactgcacttaacctcggaggcacaatttttggtttctaccctgttagagttttgccttcaaagacagctatcttacccgttaatccaaagtttcttcccaggacggacgatgagaaggaaatggtcatgcgaactgtctattgtacaaacatagataagatggttactcaattagatgtaaagacattctttgaagaactttgcggtgaggtctctcg

SEQ ID NO: 3547 - DNA, 199 bp, Zea mays
  unsure (1)..(199): unsure at all n locations
cacgctagcgcttatcgcttgtcagccatggccaccgccgccgcgtctagcctcctcaagtcctccttcgccggctcccggctcccggccgccacgcggaccacaccggcgtccctcgtggtggccaccggcccgcgccgcgccggcgcggggcccatctgggngtccatgtccatgtcctcctccaacccgccctacg

SEQ ID NO: 3548 - DNA, 276 bp, Zea mays
ctggttgccaaggtatacctccagctcttgccggaccttttcggcctaagcagtttctgcaagcagtggctgggggtcctgagccggatggagaagtacgtcaaggtcaaggtccgaggcaagcggaccaaccggctgcaggaggtggtcccggacctgctcaagaacatcctgctcgtgatgaagagcaagggcatccttgcgaagaggagcacgatcgggggcgacagcttgtgggagctgacgtggcttcacgcgaacaacatctcgaccagt

SEQ ID NO: 3549 - DNA, 278 bp, Zea mays
ccatccactactttactcaaagtctagagctagcttttgctttgctcaccagacaaacagcagcagatggcgtcgacgatcatggccgccacctcccgcatcgtcgcggcaaagacgccgtttcttggccagggtcgcgccgccgccaatgccagccccctccgcgacgtcgccgccgccgctgctggcggccggatcaccatgggcaacgacctgtggtacggcccggaccgcgtcaagtacctgggccccttctccgcccagacgccctcgtacct

SEQ ID NO: 3550 - DNA, 277 bp, Zea mays
aaggccatcgcggacgggagcctcctggacctcctgcgccaggtgttcacgttcgggctctccctggtgaagctggacatccggcaggagtcggagcggcacaccgacgtgatcgacgccatcaccacgcacctcggcatcgggtcgtaccgcgagtggcccgaggacaagaggcaggagtggctgctgtcggagctgcgaggcaagcgcccgctgctgcccccggaccttccccagaccgacgagatcgccgacgtcatcggcgcgttccacgtcc

SEQ ID NO: 3551 - DNA, 271 bp, Zea mays
gggctggactacctcggcaacccgagcctggtccacgcgcagagcatcctggccatctgggcgtgccaggtggtgctcatgggcgccgtcgaggggtaccgcgtcgccggcggcccgctcggagaggtggtcgacccgctgtaccctggcggcagcttcgacccgctcgggctcgccgacgacccggaggcgttcgccgagctcaaggtgaaggagatcaagaacggccgcctcgccatgttctccatgttcggcttcttcgtgcaggcta

SEQ ID NO: 3552 - DNA, 272 bp, Zea mays
ccgccgcctccaagcaggccacggaggcactccagggcgccggcctcgaccccgcccccgttctgtccgtcgccaagaccgcagcggagcagagcacgaaggtgatcgacgccgcgaacccgtggcctcggcggccgtggagaccatcacgtcgctgggccccgaggactacgtcgtggccgccggagccacgtttctcgcgtacctcctcgtgccgccggtctggtcgctggtctcgtccagcctccgcggttacaaaggcgacctgaccc

SEQ ID NO: 3553 - DNA, 274 bp, Zea mays
cccagttgcagcatcccaggctccaaatcaagctgctgcatttccagatctcaagctgacagaggtgtcaaaagaaaatgtaagtgaaaagaaagattctgagattgttcgttcgcctagagctccaacccattctttcaagaagccgattggtgctaaaaagcctggaaataagactggtggacttggtgcacggaagcttacatcaaagccaaatgaaagcctctatgagcagaagcccgaggaaccagctcccgtcctgccatcatcggtg

SEQ ID NO: 3554 - DNA, 271 bp, Zea mays
caacgagggcgactacgaccacagcgtcgccgacatcatcagcaacgcgtcctgcacgaccaactgcctcgcgccattcgtcaagatcttggacgaggagttcggaatcgtgaaggggaccatgacgacgacgcactcgtacaccggcgaccagaggctgctggacgcgtcccaccgcgacctccggcgggcccgcgctgcggcgctgaacatcgtgccgacgagcacgggcgccgccaaggccgtggcgctggtgctgccgcagctcaag

SEQ ID NO: 3555 - DNA, 272 bp, Zea mays
gcaagcagaagcagcgcaatggcgagcagcaccatggccctctcctccacagccttcgccggcaaggcagtgaacgtgccgtcgtctctcttcggcgaggcccgcgtgacgatgcgcaagacggcggcgaaggcaaagccggcggcgagctccggcagcccgtggtacggccccgaccgcgtgctctacctgggcccgctgtccggcgcgcccccgagctagctgacgggcgagttcccgggcgactacggctgggacaccgcggggctgtc

SEQ ID NO: 3556 - DNA, 272 bp, Zea mays
aacgcacacaccgcccggtctccgatctccgatccccgatcccctcgtcgatccaagatgcagatcttcgtcaagactctcactggaaagactatcaccctcgaggtggagtcctctgacaccattgacaacgtcaaggccaagatccaggacaaggaaggcattcccccggaccagcagcggctcatcttcgctggcaagcagctcgaggacgggcgcacacttgccgactacaacatccagaaggagagcaccctccaccttgttctccg

SEQ ID NO: 3557 - DNA, 260 bp, Zea mays
cacgcatactgcatacacaacacagagcatcagaaggagctacgatctgatcgacatggctgccgccaccatggctatcacctcccgcgcgctcgtcggcaagccggcggctggcacgagggacgtcttcggcgagggccgcatcaccatgcgcaagaccgccgccaagcccaagccggcggcgtccggcagcccatggtacggtgccgaccgcgtcctgtacctgggcccgctgtccggctcgcccccgagctacctga

SEQ ID NO: 3558 - DNA, 264 bp, Zea mays
gaagaagacgagtgtcaagtgaacctgaaacttgcggtgtcactggctggtacagcctgagtgtgagtgagtgatcgagctagctgagctccgatcctcgctagctagctaggataccgccataccacaagtcttcttcacaagtttaggagtgacagcaacaagagatcgatggcctctgccaccgtgctcaagtcctccttccttcccaagaagtccgaatggggcgccaccaggcaggccgccgcgcccaggccgcccacc

SEQ ID NO: 3559 - DNA, 266 bp, Zea mays
ctagacactactttactcaaagtctagagctagcttttgctttgctcaccagataaaccgcagcagatggcgtcgacgatcatggccgccacctcccgcatcgtcgcggccaagacgccgtttcttggccagggtcgcgccgccgccaatgccagccccctccgcgacgtcgccgccgccgctgctggcggccggatcaccatgggcaacgacctgtggtacggcccggaccgcgtcaagtacctgggccccttctccgcccagac

SEQ ID NO: 3560 - DNA, 266 bp, Zea mays
gtccgacccggctccctcggtccctccctcggtccctcccggtctcgcagttcctccccgtcgtcttccaccgcaaatcgccgaagcaagcaggcgagctcgggaccagatccactgcgggcagctggagcggaagggccatggggacgccgccgcctttccaggagtccggccactgcgacgtctgccgctgcaccttcaacaccttccgccgccgtcatcactgccgcagctgcggacggacgctctgtcacgagcattcttcg

SEQ ID NO: 3561 - DNA, 265 bp, Zea mays
ggagcacctgtgcttccagactctgcagcgcttcacggccgccacgctggagcacggcatgcacccgccggtctctcccaagcccgagtggcgcaactcatggacgagatggcggtcgtggccacggaggagtaccgctccgtcgtcgtcaaggagccgcgcttcgtcgagtacttcagatcggctacaccggagaccgagtacgggaggatgaacatcggcagccggccagccaagaggaggcccggcggcggcatcacgaccc

SEQ ID NO: 3562 - DNA, 282 bp, Zea mays
ccactttcaggcgtactacttgtcagtgcctttccctgttgagaaggcagctacccacaagatcccactctctgaggacacgaagaagaatggggtgaccgtgtccaagctgataaattatcctgtgagaggcctggtatttgagggagggaacaccctggacgacctggccactgtggtttctaatgcttgcatttggctgcaagacaacaatgtgccttacaatgtgctcatttctgactgtggcaagagggttttcctgttcccccagtgctacgcaga

SEQ ID NO: 3563 - DNA, 283 bp, Zea mays
cgtggaagaagatgtcgtacctgctgccgcatctgcactcggggtgggcggtggaccaggccatcctcgccgaggaggagcgcctcgtcatcatccgcttcggccatgactgggacgagacctgcatgcagatggatgaagtgctggcagcagtagctgagaccataaagaactttgcggtcatctaccttgttgacatcacagaggtccctgatttcaacaccatgtatgagctgtacgacccttcgacagtgatgttcttcttccggaacaagcacatcat

SEQ ID NO: 3564 - DNA, 280 bp, Zea mays
ctccatcttcccacccttcaccagcatcagaaagatctctgcgcacatcgctgcagccgtggctgcaaaagcctacgagctcggtctggcgacccgtctgcctccccccagcgacctggtgaaatatgcagagaactgcatgtacactcccgtctaccgcaactaccggtagtgctgcggggatcaattttgcagtaataaaaaatctatcaacgcggatggtactctgttgtttatagtccctgctgctaaccacccttgttgctggtgctgctggaga

SEQ ID NO: 3565 - DNA, 276 bp, Zea mays
gaatgccacaagagaattcttgtggctacagatttagttggcaggggcattgacattgagcgtgtcaacattgtgataaactatgacatgccagactcagctgatacttatttgcacagggttggaaggactggacgttttggcacgaagggacttgcaattacctttgtttcctctgcttcggattctgatgttcttaaccaggtgcaagaaaggtttgaggtagacataaaggaactgcctgagcaaattgacacctcgacctacatgccatca

SEQ ID NO: 3566 - DNA, 274 bp, Zea mays
gtgtgttattggtgtttgctaacaagcaagacatgaggggagcaatgactccgatggaagtgtgtgagggccttgggctgtatgacctgacgaaccgcatctggcacatccagggcacctgtgctctaaaaggcgatggcctgtatgaagggttggactggctagcgactactctggacgaaatgcgtgcctctggacggttaacctcagcatcatcatcggcatcctgaatcacgtgtaacaggagggacaaacgatttgatcctcgtgatac

SEQ ID NO: 3567 - DNA, 276 bp, Zea mays
ctacacgttcggagggtcctcttaagcccgccattgctccgccccgtccatcgaccggccggaacgtgttcttggattaactacgatctctatgagcctggggatggatcaacccgtcgtgcgtggtctcgttttgtgatgagtgggagagagagagagagaggatgacaagatcgatcctttgttaatggagatctcgttaattaggagagctaccgctgggacttggtggtttgtataatatatgatccaaccagtgatgaattaatgcattca

SEQ ID NO: 3568 - DNA, 275 bp, Zea mays
ggtactcttcaccttattgggttgttgagtgatggtggtgtccactcccgtcttgatcaactgcagttacttctgaaaggtgtcagttagagaggggcgaaaaaaatccgtgtgcacatccttactgatggacgtgatgttttggatggaagcagtattggtttcgtggagaccctagagaatgatcttttggagcttagagcgaagggtgttgatgcacaaattgcatctggtggtggaaggatgtatgttacgatggaccgttatgagaatga

SEQ ID NO: 3569 - DNA, 276 bp, Zea mays
ctctggtccgtggccatggcgtcgtccatgctctccgctaccaccgtgccactccagcaggggggcggcctgtccgagttctccgggctcaggagctccgcgtcgctgccgatgcgccggaatgccacctccgacgacttcatgtctgccgtctccttcagaacccacgcggtcggcacgagcggcgggccgcggcgggcgccgacggaggcgaactgcaaggtggccatcaatgggttcggccgcatcgggcgcaacttcctgcggtgctggcac

SEQ ID NO: 3570 - DNA, 274 bp, Zea mays
aagaagacgagtgtcaagtgaacctgaaacttgcggtgtcactggctggtagcctgagtgtgagtgagtgatcgagctagctgagctccgatcctcgctagctaggataccgccataccacaagtcttcttcacaagtttaggagtgacagcaacaagagatcgatggcctctgccaccgtgctcaagtcctccttccttcccaagaagtccgaatggggcgccaccaggcaggccgccgcgcccaggccgcccaccgtctccatggtcgtccg

SEQ ID NO: 3571 - DNA, 273 bp, Zea mays
gcgaggccgtctggttcaaggccggctcccagatcttcagcgagggcgggctggactacctcggcaaccccagcctgatccacgcgcagagcatcctcgccatctgggcctgccaggtcgtgctcatgggtgccgtcgagggctaccgcattgccggcgggccgctcggcgaggtcgtcgacccgctgtaccctggcggcagcttcgaccccctcggcctggccgacgaccccgaggccttcgccgagctcaaggtgaaggagctcaagaacg

SEQ ID NO: 3572 - DNA, 254 bp, Zea mays
cagaggtgcgacgtacgacgacgacgacgcaggctccacacatggcatcccagctctccgccgccgtgccccggttccacggcctcctgtgcaacgccgcgcccaggtccgcggtggcggcgctgccgtccgtgagggtgggcaggaagaggtcgtcgtcgcagggcatccgctgcgactacatcggctccgccaccaacctgatcatggtgacgacgacgacgctaatgctgttcgctgggcggttcgggctg

SEQ ID NO: 3573 - DNA, 274 bp, Zea mays
aacccaccgaagcagcaccctcactacctcacgctcgctgacttcgacggcatggttaacagcaacgcgccctttgcaaggaagttcgggagagaagaccccgtgctggacaagatcgaccaggagctactgggccgccggcctgatgggtttgtgcccggtggatggacgtatctactgaatgcgacgagtgaggaagggagacccttcgccgttgagcgcgtgcaggatctccgcccagggcctggtgtggacagattgaagaaactggtca

SEQ ID NO: 3574 - DNA, 275 bp, Zea mays
tggggacgcacaggcctctcgccctccgcgcggctccacaggagagcaaaaatggcgaccctctccatggtctccgtccccatcgcaccctcctccttgtccctttccacccggggccgcagctcctccgcatccttccccgctaagaagggaggaatcggtcacggtggcttgcggatcgagtgcatccgtattggtggtgttgagattccaaaccacaagagggtggagtactcgctgcagtacatacatggcattggacgctcacgctcacg

SEQ ID NO: 3575 - DNA, 270 bp, Zea mays
tcgcaagtacccaccatcatcttaggtatggatgtttcacatggtcatccaggacaagatagaccttcggttgcagcggtggttagttctcgtcaatggcctcttatctctagatatagagcatcagtgcacacccaatctgccagactagaaatgatgtcctcgttgtttaagccgcggggtactgatgatgatggcctcatccgggaatcactgatcgacttctacactagctctggaaagcgaaaaccagaacacataattattttc

SEQ ID NO: 3576 - DNA, 272 bp, Zea mays
agcatctgcttggatatcctacagaaccagtggagtcctatatatgatgttgctgcaatcttgacttctattcagtccctgctgtgtgatccaaacccgaactcccctgcaaactcagaagccgcaagactgttcagcgagaacaagcgggagtacaaccgcaaagtccgcgagattgtggagcagagctggacagccgactagtgcaggaggatgctcatcgtgcccgaaagggcacaataaggaaccatgaaaaaacatccttgtgtttg

SEQ ID NO: 3577 - DNA, 272 bp, Zea mays
gcaacgacctgtggtacggcccggaccgcgtcaagtacctgggccccttctccgcccagacgccctcgtacctgaccggcgagttccccggcgactacggctgggacaccgccgggctgtccgcggacccggaggcgttcgcgcggaacagggcgctggaggtgatccacgggcggtgggcgatgctgggggcgctgggctgcatcaccccggaggtgctggagaagtgggtgcgcgtggacttcaaggagcccgtgtggttcaaggccggc

SEQ ID NO: 3578 - DNA, 265 bp, Zea mays
tacctaggcaccaagtctgtgggtttcctggagaagtacccggccctggtcactggcttcttcttcttcatgtggtacttcctcaacgtcatattcaacatcctcaacaagaagatctacaactacttcccctatccatactttgtgtccttgatccatctagtagtgggtgtcgtatactgcctcatcagctggagtgtcggtctccccaagcgagcgcctatcaatggcacgctcctgaagcttctctttccagtcgccctgt

SEQ ID NO: 3579 - DNA, 264 bp, Zea mays
accagataaaccgcagcagatggcgtcgacgatcatggccgccacctcccgcatcgtcgcggccaagacgccgtttcttggccagggtcgcgccgccgccaatgccagccccctccgcgacgtcgccgccgccgctgctggcggccggatcaccatgggcaacgacctgtggtacggcccggaccgcgtcaagtacctgggctccttctccgcccagacgccctcgtacctgaccggcgagttccccggcgactacggctggga

SEQ ID NO: 3580 - DNA, 269 bp, Zea mays
atccacttctgaaagggtcaccatgtctgcctttgtggggaagtacacagatgagctgatcaagaccgccaagtgcctcgcaacgccgggcaagggcatcctggcctccgacgagtcgacgggcaccatcggcaagcgcctgtccagcatcaacctcgagaacgtggagtcgaaccggcaggcgctccgcgagctgctcttcacggcgcccggcgtgttcgactacctctccggggtcatcctcttcgaggagacgctgtaccagaaga

SEQ ID NO: 3581 - DNA, 269 bp, Zea mays
cgactacctcggcaacccgagcctggtccacgcgcagagcatcctggccatctgggcgtgccaggtggtgctcatgggcgccgtcgaggggtaccgcgtcgccggcggcccgctcggggaggtggtcgacccgctgtaccctggcggcagcttcgacccgctcgggctcgccgacgacccggaggcgttcgccgagctcaaggtgaaggagatcaagaacggccgcctcgccatgttctccatgttcggcttcttcgtgcaggctatcg

SEQ ID NO: 3582 - DNA, 268 bp, Zea mays
ggatggactcccggtgaccatccgactcctggaccctcccctccacgagttccttccagaagggaacatcgaggacattgtaagtgaattatgtgctgagacgggagccaaccaggaggatgccctcgcgcgaattgaaaagctttcagaagtaaacccgatgcttggcttccgtgggtgcaggcttggtatatcgtaccctgaattgacagagatgcaagcccgggccatttttgaagctgctatagcaatgaccaaccagggtgtt

SEQ ID NO: 3583 - DNA, 267 bp, Zea mays
ctccagcatgcgctacatgtgcagcaagcctctgagcagacagcactgagaaggctgaaggctttctcgtacatgcgacatgccatcgacaaacctctctcaggtatgctctattctagggaaacactcaagggcacaggcctggatgaagagcagatgaggcaggttcgtgtcgcggataattgccatcgccagctaaacaagatactcgccgacttagatcaagataacattactgacaagtcgagttgcttggatttggacatg

SEQ ID NO: 3584 - DNA, 267 bp, Zea mays
caatggccaccgtcctaggcagcccccgctcgccggccttcttcttctcgccgtcctccctccgtgccgcgccggcgcccaccgccgtggcgctgcctgcggccaaggtgggcatcatgggccgtagcgccagcagcaggggcaggctgcgcgcgcaggccacctacaacgtgaagctgatcacgccggacggggaggtggagctgcaggtgcccgacgacgtgtacatcctggaccaggccgaggaggacggcatcgacctgccct

SEQ ID NO: 3585 - DNA, 266 bp, Zea mays
ctctgatagcttgctccaggacgtacgtacgtagtagatcgatccatcgatcgctagctagctgacgaccatggcgtccctctcctctgccgccatcaccgccccttccttcacggccgcgcccgctcgcgcagtggtcagcaggaggtccttcaccgtgcgtgcctctctccgcaaggccactgccaccgccgccgtggccgttgccgccagcgtcctgcttgccggcggcggcgccatggcccaggaggtgctgctgggcgcag

SEQ ID NO: 3586 - DNA, 267 bp, Zea mays
tctcactcctcgccatcacataaaaccagtgcaagcagaagcagctcaatggcgagcagcaccatggccctctcctccacagccttcgccggcaaggcagtgaacgtgccgtcgtctctcttcggcgatgcccgcgtgacgatgcgcaagacggcggcgaaggcaaatccggctgcgatctcttgcagcccgttgtacggccccgaccgcgttctctacctgggcccgctgtccggcgcgtccccgagctacctgacgggcgagttc

SEQ ID NO: 3587 - DNA, 269 bp, Zea mays
cttgctctgatagcttgctccaggacgtacgtacgtacgtagatcgatccatcgatcgctagctagctgacgaccatggcgtccctctcctctgccgccatcaccgccccttccttcacggccgcgcccgctcgcgcagtggtcagcaggaggtccttcaccgtgcgtgcctctctccgcaaggccactgccaccgccgccgtggccgttgccgccagcgtcctgcttgccggcggcggcgccatggcccaggaggtgctgctgggcgc

SEQ ID NO: 3588 - DNA, 262 bp, Zea mays
cgcacgtcaaggggaagctgaacggcatcgcgctgcgggtgccgaccccgaacgtgtccgtggtggacctggtgatcaacaccgtgaagactggcatcacggccgacgacgtgaacgcggcgttccgcaatgccgccgccggcccgctgcagggcatcctggaggtctgcgacgtgccgctcgtgtccgtcgacttcaggtgctccgacgtgtcctgcaccatcgacgcgtcgctcagcatggtcatgggcgacgacatggt

SEQ ID NO: 3589 - DNA, 259 bp, Zea mays
gacaaccgttgcttaagatacttcaaaggacacaaagacagggtcgtttcattatgtatgtcgcctgtcaatgatagctttatgtcaggatcacttgatcacagtgtcagaatatgggatcttcgcgtaaatgcttgtcagggcatactaaggctgcgcggtagaccttctgtcgcatatgatcagcagggacttgtttttgctgtagcaatggaaggaggtgctattaagttatttgattcccggtcatatgacaagg

SEQ ID NO: 3590 - DNA, 261 bp, Zea mays
tcccaagccagtacccacagtcctacgagcagtcgcacgcaaggtcaagagacgaaacggtcgacatggctcgcacgcaatctgccgtagcggtcgccgtggtggccgctgtgctgctgctggcagctgcggcgacgacctcggaggccgccatcacctgctggcaggtgagctccgccatcgcgctctgcctctcctacgcccgcggcacggggtccggcccctccgcgtcctgctgtagcggcgtcaggaacctcaaga

SEQ ID NO: 3591 - DNA, 263 bp, Zea mays
gacctagatgcgcttctcgacatgtccacggacgacctcgtccagctcttccccgcgcgcgccaggagaaggttccagaggggtctgaagaggaagcccatggcgctcatcaagaagctgcgcaaggcgaaaaaagatgctcctgctggtgagaaaccagagccagtcaagacacatctccgtaacatgatcattgtccctgagatgattggaagcattgttggtgtctacaacggcaagaccttcaaccaggttgagatcaa

SEQ ID NO: 3592 - DNA, 262 bp, Zea mays
gttgacgcactgacagaccctcgcgtgacccatgaacaccgtaccatttggatctcctactggtcccagtgcgacgccgctcttggccagaagctggcttctaggctgaacctgaagccgagcatgtaagatcgacgaggaagaaagcaggcaccggtggccaaggatgcaacgcaacatggagcgtgtgatgtttacaccaatataattgaataaacaggggatgtgcgcgtcgttgtacttatgctgatgctgatggtcg

SEQ ID NO: 3593 - DNA, 261 bp, Zea mays
tgcctccctagcagatctttatgttaacgatgcatttggaacagcccacagggcgcatgcatcgaccgagggagttaccaagtttttgcagccttctgttgcagggttccttctgcagaaggaactcgactaccttgtcggagctgtttcaagccctaaacgcccttttgctgccatcgtgggtggttcaaaggtgtcatccaagatcggggttattgagtccctgttggagaagtgtgatatccttctcttgggtggtgg

SEQ ID NO: 3594 - DNA, 261 bp, Zea mays
cttcttgaagaagagcttggtcagccttggcaagcaatctactcagagttatccccctccccaatcgctgcagcatctctgggacaggtttataagggccgcttgaaagaaacgggagaactagtagctgtcaaagttcagaggccatttgtacttgagactgttaccatcgatttattcatcattagaaacttgggtttggtactcaggagatttccacaggtgtccatcgatgttgttggcctggtagatgagtgggct

SEQ ID NO: 3595 - DNA, 265 bp, Zea mays
ccttcctctttctccacccgccgtcggcgcagtcgcgccatcttcgcatccctttcgccgtccttctcctcctcggaggagccgctgctggtgcgcgcggcgcggggcgaggacggcctcccacgcccgcccgcgtggatgatgcggcaggcagggcggtacatggcggagtaccaggcgctggccaagcgccacccctcgttccgggagcgctccgagaacacggacctcatcgtcgagatcacgctgcagccgtggcgtgcct

SEQ ID NO: 3596 - DNA, 254 bp, Zea mays
gacggttgctctagatccgttcatcctggtggttttgtgaggtcgaaagcggcgagcgaattagaagatgctggacaagctgtgggacgacgtggtggccgggcctcgccggagacgggcctcgagaagctccgcaaggccaccaccgcccgcccgctcgtcatcaacaaagacgcggacggcggcagctacaagcgggcgcagtcgatgccgtcgaccccgacgacgccggtgacgccgtcgtcgtcgtcgtc

SEQ ID NO: 3597 - DNA, 254 bp, Zea mays
ttttcttaagagagtcatggaccgacttccaggagcaaggattgcatttattggagacggaccattcagagctgagctcgagcagatgttctcaggtatgccggtggtgttcacgggcacgttgcaaggggaggagctatcacaggcctatgccagtggggatgtgtttgtgatgccttccgagtcagagacactggggtttgtggtgctggaggccatgtcatcaggagttccggtagtcggggctcgcgccg

SEQ ID NO: 3598 - DNA, 257 bp, Zea mays
agctcgttgtgctcaagcttaacggagggctcgggacgaccatgggctgcactgggcccaagtctgtcattgaagtccgcaatgggttcacattccttgaccttattgtgattcaaattgagtccctgaacaagaagtatggatgcaatgtccctttacttctgatgaactctttcaacacccatgatgacacacagaagattgttgagaagtattccaactccaacatcgaaattcatactttcaatcagagccag

SEQ ID NO: 3599 - DNA, 256 bp, Zea mays
cttcgttcacaataggcaacatggagtcgtcgttctcgtcgtccttgggtaataacagcagcaggatactggtcattggtggtacggggatgatggggcagcacctcgtcaaggccagcctcgccgccggccaccccacggccgtgctcgtccgctcagccagcagcagcaagctagagcttctcgagaccatcaaggccagcggagaaccgttattggaggtgacatctacgaccatgagagcttggtggcggcg

SEQ ID NO: 3600 - DNA, 256 bp, Zea mays
gtagtgtgtagtcgcagcagctagcgcccggccggccagtcgagtgagtccatcctccatcgccatccaatggccgccaccgccctgagcatgagcatcctccgcgcgccgccgccctgcttctcgtccccactcaggctcagggtcgcggttgccaagccgctggcggcccccatgcggcgccactgctgcgcgcgcaggccacctacaacgtgaagctgatcacgccggatggggaggtggagctgcaggtgcc

SEQ ID NO: 3601 - DNA, 257 bp, Zea mays
tgttgctctgtattttgctgcatccagtccacaccttgtaaaaggtgtcacactgcttaatgcaacaccgttttggggattctttcccaaccctgctacatctccccgattgtcaaagattttcccatgggctgggacatttccgcttccatcatttgtgaggaaaattactgaagcagtttggcaaaagataagtgacccaaaaaagtattcaggacatactcaaacaagtatacgctgaccattcaacaaatgtg

SEQ ID NO: 3602 - DNA, 269 bp, Zea mays
agcagagcatcagaagcagctgcgatctgatcgacatggctgccgccaccatggctatcacctgccgcacgctcgtcggcaagccggctgctggcacgagggacgtcttcggcgaggggcgcatcgccatgcgcaagaccgccgccaagcccaagccggctagctccggcagcccatggtacggtgccgaccgcatcctgtagctggtcccgctgtccggctcgcccccgagctacctggccggcgggttccccggctactacgggttg

SEQ ID NO: 3603 - DNA, 267 bp, Zea mays
cagcgccactgtccagtgcgcgcgtcaagcttgcttagctagccgccatggcctccctcgccgccgtctccgtgaagcccgtggccatcaagggtctcgccggcagctccatctccggaaggaagctcgccgtcgccaggccgtcggccgctccatccgcagccccgggcaccgccgtggtggccaagtacggcgacaagagcgtctactttgacctcgacgacatcggcaacaccaccggacagtgggacctctacggctctgacg

SEQ ID NO: 3604 - DNA, 277 bp, Zea mays
cgcactctccaggcgtctgccaatccgaaacgaaacccacccgtaagcaaaccaggactgagattgagcggagagcagcacagtcatggcggggcaggaggtggcgaacaagcgggtggtactgaagcgctacgtgacggggttccccggcgcggacgacatggaggtggtcaccggcaccgcgcgcgtggccgtgccgccggggtcgacggccatggtgctcaagaacctctacgtgtcgtgcgacccttacatgcgcggccgtatgaccaagcac

SEQ ID NO: 3605 - DNA, 274 bp, Zea mays
ctagctcaccaccaacctcagcacgtcgaggagaagaggagtggccagtggcttcgtcggtggccgccgcggcggagcacattcctgggcagccggctggcggacccggtgccgcagaacgggcgcatcgtggcccggttcgggttcggcggcggaaagccgaaggctgccgtcccgaagaaggtggcgaagacgtcgatctcgtctgacctgccggtgtggttccccggcgccgtggcgccggactagctcgacggctcgctggtcggcgact

SEQ ID NO: 3606 - DNA, 270 bp, Zea mays
cgtggatcaccggccagaggaaggaccagtcccccggcaccagggccagcatccccctggtccaggttgatccttccttcgaaggcctggatggcggggctggtagcttggtcaagtggaaccccgtggccaacgtcgacggcaaggacatctggactttcctgcggaccatggacgtacctgtcaacaccctgcatgctcagggctacgtgtccatcgggtgcgagccgtgcaccaggcccgtcctgccagggcagcacgagcgtgaag

SEQ ID NO: 3607 - DNA, 272 bp, Zea mays
ccgctgctgtcactggatcatccgtagccatctgcaggtctgctagagctgcaggtgtcaccacgctgagcggacagtatgtcaaaatagagaacgtcaaggacccatatgtccagggtgtcggcgaatgggctgtcaaggagcacaacaggcagactggtgagagcttgcagttcgccgaggtggtcagtggcatggaacaggtggtcgccggcaccaactacaagctcaacctcgcaaccaaagatccaacgtcgtcttaccaagcagtt

SEQ ID NO: 3608 - DNA, 233 bp, Zea mays
gtgtagcagccggtccagcagtttcacgctgagctgccagcaatgggtggctccaccatggcgatgtcgtccacggcgatggccggcgaccgcgtcgaggtgggctccttcggcgaggggcgcatcaccatgcgcaagaccggtgggcagagcccaaggtggcggcgtccggcagcccctggtgacgccccgaccgcgtcaagtagctcgggcccttctgcggcgagccgccg

SEQ ID NO: 3609 - DNA, 274 bp, Zea mays
gcaaccggtccagcactttcacgctcaggttcagcaatggctgcctccaccatggcgatctcctccacgggcgatggccggcacccccatcaaggtgggttccttcggcgagggccgcatcagcatgcgcaagaccgtgggcgagcccaatgtggcggcgtccggcaacccctggtacggccccgaccgcgtcaagtacctcggccccttgtccggcgagcccgcgatgtacctcgaccggcgagttccccggcgactacggctgggacaccgc

SEQ ID NO: 3610 - DNA, 272 bp, Zea mays
aaggaactcgactaccttgtcggagctgtttcaagccctaaacgcccttttgctgccatcgtgggtggttcaaaggtgtcatccaagatcggggttattgagtccctgttggagaagtgtgatatccttctcttgggtggtggtatgatcttcacgttttacaaggcacaaggtctccctgttggtgcttcattggtcgaggaagacaaactcgagcttgcgacgtctctccttgcaaaggctaaggaaaagggcgtctcccttatgctgcc

SEQ ID NO: 3611 - DNA, 274 bp, Zea mays
cgtcaccggcaaggtcccgctcgagaacctcgctgaccacatcgctgacccagtcaacaacaacgcatgggcctacgccaccaacttcgtccccggcaactaagctcaacggctatgctatgcacacttcattgtctttcggatcggagagggtgtacgtacgtggattgattgatgctgcgagatgcatgtgtgtcttttgtttcacgttgcattgcataggcaagtcgagatgatgagttggcgttgtacactaagatgaaccatgtttgtg

SEQ ID NO: 3612 - DNA, 263 bp, Zea mays
caagaagctagctcctgcctgtaccgccccgtcatggcgatgctatcccgcgcgcgctcctccgctgcccggcgcccgctgctgccgccgcctaggcttctggcggtgagggcgatggcgtcgtcgctcttcggccacgtcgagccggcggccaaggaccccatcctcggcgtcaccgaggctttcctcgccgacgcctcgtccgacaaagtgaacgtcggcgtcggcgcctaccgggacgacaacggccagcccgtcgtgct

SEQ ID NO: 3613 - DNA, 268 bp, Zea mays
attggtcaccactggcatcccaatgctgctgttcacgcagtggttgaagaacagggacgggatgataaagttatagtgaccaagtttcctctggtacttcttcttcttcttgtacttgaacactataactttatcacagacagccaaacacaaggttaagaatcacaggcataagtggatacgaagagtaccctgctgacccaatacttgaccctgctgcagctttaaattaaactgtaagttatgtagttacaaaacggctggtagt

SEQ ID NO: 3614 - DNA, 264 bp, Zea mays
ccgacaaggatgtgcaggctcgaaggtatataaaagggataatgaatcaacttggccttgttgttcgagaagatgctgttggtaacatatttggccgctgggagggttccgagcctggactaggagcagttgcaactggatctcatgttgatgccattccattctcaggcaaatttgatggtgttgttggagttctgggtgctcttgaggcaattagtttgctgaaaaggtctgctttcctgccaaaaagatctttggaggtta

SEQ ID NO: 3615 - DNA, 270 bp, Zea mays
catcaaacaagtttcacaaacataagtctccaacactcacaaacgtaagtctcaagtatctcacaaagtattaccaatattaaaaagttcagaccaagttatttcacaaagtattacctacaccaacaaacataagatcatgtgcacaaagtatttcagcaaggtggacatctggactagttcgacgataggctgggcgatccatgagggttgtttgatgatgctgattgtccctgcacagagaagagattgcatgtatcagactagatg

SEQ ID NO: 3616 - DNA, 270 bp, Zea mays
ctctcgtgcgagtgacatctaggtttccagacgccttcggtgagtacagggaaggaagtcgccatggctgacgacgaacatgcggagaacaaggaggaggtccccgagcttgctccttttgacccaaccaagaaaaagaagaagaagaaggtggtaatacaagagccatcagatgaggtggataacttggcagagaagacagagagcttgactgtaaccgagtctagtgagccaagctttgcgggcatgaaaaagaagaagaagaaacat

SEQ ID NO: 3617 - DNA, 270 bp, Zea mays
cgcgcccgacgcccgccgcgccgctctgctcggcctggcggccgtcttcgccgtcacggccaccaccgggtcggccaaggccacgatcttcgatgagtacctcgagaacagcaaggccaacaaggagctgaacgacaagaagaggctggccaccactggagccaactttgcgcgcgcctacaccgtggagttcggcagctgccagttcccctacaacttcactgggtgccaggacctcgccaagcagaagaaagtccccttcatcagcga

SEQ ID NO: 3618 - DNA, 190 bp, Zea mays
ataaaccgcagcagatggcgtcgacgatcatggccgccacctcccgcatcgtcgcggccaagacgccgtttcttggccagggtcgcgccgccgccaatgccagccccctccgcgacgtcgccgccgccgctgctggcggccggatcaccatgggcaaccacctgtggtaccgcccggaccgcgtcaagta

SEQ ID NO: 3619 - DNA, 261 bp, Zea mays
gcgcaaggacctcattggcgccgctcagcccatcacgcccgtcatgctcgacttcaagacgcacgccgacaacgcctccctctataacaccccgccctgcttcgccatctacgtctgcggcctcgtcttcgaggacctgctcgcgcagggcggccttgccgaggtcgagaagaagaacgcgcgcaaggccggcgccctctacgacaccatcgacgccagcggagggtactacgtctgccccgtcgacaagtccgtgcgctc

SEQ ID NO: 3620 - DNA, 252 bp, Zea mays
caccaccaccggacgctagctcaccaccaacctcagcacatcgaggagaagaggagtggccaatggcttcgtcggtggccgccgcggcgagcacattcctgggcacccgcctggcggacccggtgccgcagaacgggcgcatcgtggcccggttcgggttcggcggcggaaagcccaaggctgccgtcccgaagaagctggcgaagacgtcgatctcctgtgaccggccgctgtggttccccggcgccgtgg

SEQ ID NO: 3621 - DNA, 262 bp, Zea mays
atagtaaccttgttcctggatttcttggttcgttgattgggattcgtgctggtgagactagatcatttcctatccagttccccgagtcatttgagcgagaaagtctacgaggtgtccgtgcacagtttactgttgtgtgtaaagagctgttctacagagagttgccagtaatggatgactcacttgctgtaaagcttcttccaggatgcactacaatagacgaggttcgagagcgtattttgaaaagatgtaaagaagtgga

SEQ ID NO: 3622 - DNA, 262 bp, Zea mays
ggatcaccataattacaaggatgggggcagagaacatgagggtgaagttgcctcatctcatccgtgctgttcgcaatgctggactgattgtcacatggattactgatcctatgcatggaaacaccatcaaggccccttgtggcctgaagactcgtccatttgactccattctggctgaagtgcgtgccttcttcgatgtgcatgaccaagaaggaagccaccctgggggcgtccaccttgaaatgactgggcagaacgtgac

SEQ ID NO: 3623 - DNA, 265 bp, Zea mays
gcgccgagccgtggctcgtggtgctgtacgcgccctggtgcccgttctgccaggccatggaggcctcctacgtggagctggccgagaagctggcggggtccggggtgaaggtggccaagttccgcgcggacggcgagcagaagccgttcgcgcaggccgagctgcagctgcagagctttcccaccgtgctcctgttcccgggccgcaccgccaggcccatcaagtacccgtcggagaagagggacgtcgactcgctcctcgcctt

SEQ ID NO: 3624 - DNA, 267 bp, Zea mays
cgcacgagatggcgtcgacgatcatggccgccacctcccgcatcgtcgcggccaagacggcgtttcttggccagggtcgcgccgccgccaatgccagccccctccgcgacgtcgccggcgccgctgctggcggccggatcaccatgggcaacgacctgtggtacggcccggaccgcgtcaagtacctggggcccttctccgcccagacgccctcgtacctgaccggcgagttcgccggcgactacggctgggacaccgccgggctgt

SEQ ID NO: 3625 - DNA, 270 bp, Zea mays
ccgcgcctctacatttcttctctctctgctcctccgcctccgcctgatccatccaagacagggatcgccatgtcggactcggaggagcaccacttcgaatcgaaggccgacgctggggcgtccaagacctacccgcagcaggctggcaccgtccgtaagaacggcttcatcgtcatcaagaaccgtccctgcagagttgtggaggtttctacctccaagactggtaagcatggccacgccaaatgccactttgtcgccatagacatattc

SEQ ID NO: 3626 - DNA, 270 bp, Zea mays
gccatggcctccctctcctctgccgccgtcaccgccccttccttcgccgcacccgcaccagcccgcgccgtggtcagaaggaggtccttcaccgtgcgcgcctctctccgcaaggccaccggcaccgccgccgtggcaatggctgccagcgccctgcttgccggcggtgccatggcccaggaggtgctgctgggcgcaggcgacggcgggctcgtcttcgagcccagccagttcaccgtcaacgccggcgacaccatcacattcaagaac

SEQ ID NO: 3627 - DNA, 267 bp, Zea mays
  unsure (1)..(267): unsure at all n locations
cgaacgcngcggagagaccgaagaagcgggagagatggctcgtaccaagcagactgctcgcaagtccacgggagggaaggctcccaggaagcagcttgccaccaaggctgcccgtaagtctgcccccaccactggtggagtgaagaagcctcaccgctaccgccctggaactgttgccctccgtgagatccgcaagtatcagaagagcactgagctgctgatcaggaagctgccttccagaggctcgtcagggaaattgcacaggac

SEQ ID NO: 3628 - DNA, 259 bp, Zea mays
gccaaccatctaccagcgactcagcgagcgagagcagcacacactgcacgcagctagctaggagcagcagcagcggcggcgatggcggcctccatgatctcctcgtcagctctggcggtggcgcctcagggcctgccgcccctcggccgccgcgcctcctccttcgccgtcgtctgctccaagaagaagatcaagaccgacaagccctacgggattgggggtggcctgaccgtcgacgtcgacgccaacgggagacagg

SEQ ID NO: 3629 - DNA, 256 bp, Zea mays
ctggaggtctgccacgtgccgctcgtgtccgtcgacttcaggtgctccgacgtgtcctgcaccatcgacgcgtcgctcagcatggtcatcggcgacgacatggtcaaggtcgtcgcctggtacgacaacgagtgggggtacagccaacgcgtggttgatctggcgcacctggtggcggccaagtggcccggcgcggcggcggccggcagcggcgaccctctggaggacttctgcaaggacaaccccgagaccgacg

SEQ ID NO: 3630 - DNA, 267 bp, Zea mays
cggcaagaagtccgtcaagaacagccccaacccaaggaactactaccggtgctccacggaagggtgcaacgtgaagaagcgggtggagcgggacagggacgaccccggctacgtggtcaccacgtacgaggggacgcacaaccacgccagccccagcacggtgtactacgccagccaggacgccgcctccggccgcttcttcgtcgccggcacgcagccgccggggccggggctgtaatgagatgtacagagtctgtcccaatggat

SEQ ID NO: 3631 - DNA, 268 bp, Zea mays
gtgccgacgagcacgggcgccgccaaggccgtggcgctggtgctgccgcagctcaaggggaagctgaacggcatcgcgctgcgggtgccgaccccgaacgtgtccgtggtggacctggtgatcaacaccgtgaagactggcatcacggccgacgacgtgaacgcggcgttccgcaaggccgccgccggcccgctgcagggcatcctggaggtctgcgacgtgccgctcgtgtccgtcgacttcaggtgctccgacgtgtcctgcacca

SEQ ID NO: 3632 - DNA, 259 bp, Zea mays
ctgcaagtctcgctacgtagcagtgcaatacaaaaaaagcagccgcaatggcgagcagcaccatggccctctcctccacggccttcgccggcaaggccgtgaacgtgccgtcgtcgtccgccttcggcgaggcccgcgtgacgatgcgcaagacggcggcgaaggccaagcctgctgcggcgtccgggagcccgtggtacggccccgaccgcgtgctgtacctgggcccactgtccggcgagccaccgagctacctgac

SEQ ID NO: 3633 - DNA, 261 bp, Zea mays
ccggcgaacgcgcagaggcacaagatcgaggccggcgtggcaacggcggcggcgctgggcgcggcgcgtacgcgtaccacgagcaccgcgagcagaaggaggcccactacgagagcaggcagcaggagcacagggtgccgcacgggcacgggcacgggcacggctactcctactactgcgactgaaacgactgatcatcccatcgatcgagatatgcatgcagaactcgatatatatacggcccctagcgccgtacacgtg

SEQ ID NO: 3634 - DNA, 109 bp, Zea mays
taaccagtgcaagcagaagcagcgcaatggcgagcagcaccatggccctctcctccacagccttcgccggcaaggcagtgaacgtgccgtcgtctctcttcggcgaggc

SEQ ID NO: 3635 - DNA, 259 bp, Zea mays
ctcacctatcatcgccgctgcgccgtctcctccgctcccgtcgtccggaaagatggcgtcccacattgttggataccctcgcatgggccccaagagggagctcaagtttgcacttgagtctttctgggatgggaagagcaccgctgaggatctggagaaggttgctaccgacctcagggccagtatctggaagcagatggctgatgctgggatcaagtacatccccagcaacactttctcgtactatgaccaggtcctt

SEQ ID NO: 3636 - DNA, 259 bp, Zea mays
atctagagctccctaactgcaccggccgccacaccaccgtaccccgacccctcgacaacaatggccaccgtcctaggcagcccccgcgcggcggccttcttcttctcgcggtcctccctccgtgccgcgccggcgcccaccggcgtggcgctgcctgctgccaaggtgggcatcatgggccgtagcgccactagcaggggcaggctgcgcgcgcatgccacctagaacgtgaagctgatcacgcctgagggggaggtgg

SEQ ID NO: 3637 - DNA, 280 bp, Zea mays
cgtgggctaccgctcgcaggaggaggcctgggctgctggtggcagcggcgtgctgctcaagaccacaaacggagggaagagctggatgcgcgacaaggctgccgacaacatcgccgccaatctctactccgtcaagttccttgatgacaggaaaggcttcgtgctgggcaacgacggcgtgttgcttcggtatcttggctgacattctatgtatatgtgtgtacagcgaacggcatgtgctgctgctactactactgtaaaaggctgcttactgtgcttg

SEQ ID NO: 3638 - DNA, 271 bp, Zea mays
tcgatctgcaagtctcgctacgtagcagtgcaatacaaaaaaagcagccgcaatggcgagcagcaccatggccctctcctccacggccttcgccggcaaggccgtgaacgtgccgtcgtcgtccgccttcggcgaggcccgcgtgacgatgcgcaagacggcggcgaaggccaagcctgctgcggcgtccgggagcccgtggtacggccccgaccgcgtgctgtacctgggcccactgtccggcgagccaccgagctacctgacgggcgag

SEQ ID NO: 3639 - DNA, 274 bp, Zea mays
cagcgactcagcgagcgagagcagcacacacgcagctagctaggagcagcagcagcggcggcggcgatggcggcctccatgatctcctcgtcagctctggcggtggcgcctcagggcctgccgcccctcggccgccgcgcctcctccttcgccgtcgtctgctccaagaagaagatcaagaccggcaagccctacgggattgggggtggcctgaccgtcgacgtcgacgccaacgggagaaagggcaagggcaagggcgtgtaccagttcgtcg

SEQ ID NO: 3640 - DNA, 133 bp, Zea mays
ctgtggtttgtgtgtcatgaatcgtggttgtggcttcgttggtttaatggacctgttgtgtcctctgtgttgtacccaaaactcttctgcagcagtatggcttgaatccttatgaagtttgatatttgaactt

SEQ ID NO: 3641 - DNA, 274 bp, Zea mays
gggctcgcaggaggatgctgcttcaaccaagttacttattgatattctccttagtgagtgggaggacaggatgactcgaggcttattccgctacgatgtcactgcctgtgagaccaaggtcattcctggcaaccttgggtttgttgcacaactcaatgaagggcgccatcttaagaagcgccctactgagtttcgtgtggaccgtgtgctccagccgtttgaccctgccaaattcaatttcacaaaagttggccaggaagaggttctcttccaa

SEQ ID NO: 3642 - DNA, 280 bp, Zea mays
gcaaccggtccagcactttcacgctcagctccagcaatggctgcctccaccatggcgatctcctccacggcgatggccggcacccccatcaaggtgggctccttcggcgagggccgcatcaccatgcgcaagaccgtgggcaagcccaaggtggcggcgtccggcagcccctggtacggccccgaccgcgtcaagtacctcggccccttctccggcgagcccccgagctacctcaccggcgagttccccggcgactacggctgggacaccgacgggctgt

SEQ ID NO: 3643 - DNA, 275 bp, Zea mays
atgtctgtctgaacattctgcgcgaagattggaagcctgttctcaacatcaacactgttatttatggcctgaatcttctttttacgcaaccaaacgacgaggatcctctgaaccacgaagctgcagttgtccttcgcgacaatccaaagatgtttgaggcaaatgtgagaagagccatggctggaggctacgtcggccaacactatttccaaagatgtgcttgacttgatgtggtggtggcttgaaaacgatcaacagagcccctccccctgtat

SEQ ID NO: 3644 - DNA, 274 bp, Zea mays
ggccctcagtcctcgaatcatcgcagaagttgctagattcaagcctgacattattcacgcctcttcacctgggataatggtatttggcgcgcttatcatagcaaagttgctctgcgtccctctggtaatgtcataccacacccacgttccaatttatatacccagatatactttcagctggcttgtcaagcccatgtggctaataataaaattcttgcaccgagctgcagacctcacactggtaccatctgttgctatcggcagggatcttcaa

SEQ ID NO: 3645 - DNA, 269 bp, Zea mays
catcctcgcgccgctccccataggcttcgccgtcttcctcgtgcacctggcgaccatccccatcaccggcaccggcatcaaccccgcgcgcagctcggcgccgccatcgtctacaacaggtcccacgcatggaacgaccactggatcttctgggttggccccttcatcggtgctgctcttgccgccatctaccacgtggtcatcatcagggccctccccttcaagagccgtgactgattatacgtacattgtttattaccaacagcaac

SEQ ID NO: 3646 - DNA, 271 bp, Zea mays
gtgacggccggcgtacacgtacgtgcaggtggagctggtggacgggtcctcctacctgggccagccgctgccgttctccatctcgacgctcatctggatcgaggtgctcgtgatcggctacatcgagttccagcgcaacgccgagctcgacccggagaagaggctgtaccccggcggctcctacttcgacccgctcggcctggcggccgaccctgagaagaaggagcggctgcagctggcggagatcaagcacgcgcgcctcgccatggtc

SEQ ID NO: 3647 - DNA, 274 bp, Zea mays
atccactgcggcctggacgcgtgcgagagacttgaccaagcagcagcagcagggatggcgcctctgaagctgtacgggatgccgctgtcccccaacgtggtgcgcgtggccaccgtgctcaacgagaagggcctcgacttcgagatcgtccccgtcgacctcaccaccggcgcccacaagcagcccgacttcctcgccctcaaccctttcggccagatcccggctctcgtcgacggagacgaagtcctcttcgagtcccgtgcgatcaaccggt

SEQ ID NO: 3648 - DNA, 271 bp, Zea mays
gcgcatcctattgccctcgcgccaccgtcgccgccgctgcagcgagccaccgccctgccgtcgcctgaggtagacaccaagccaccgccatggggcgtatgcacagccgcgggaagggtatctcttcatcggcgctgccgtacaagaggactcctccgatctggctcaagacagctaccaccgaggtggaggagatgattaccaaggctgcgaagaagggccagatgccgtcgcagattggtgttctgctccgtgaccagcacggcatccc

SEQ ID NO: 3649 - DNA, 270 bp, Zea mays
ggccgcggcggctccaccggctacgacaacgccgtcgcgctccccgccgggggcagaggtgacgaggaggagctccagaaggagaacatcaagaacgccgcctcctccaccggcaacatcacgttgagcgtcaccaagagcaacccggagaccggcgaggtcatcggcgtcttcgagagcgtgcagccgtccgacaccgacctcggggccaaggcgcccaaggatgtcaagatccagggggtctggtacgctcagctcgagtgattcgag

SEQ ID NO: 3650 - DNA, 267 bp, Zea mays
gcagataccgtcaggacgccaatctaatatcttggacactcgtgttcagttccaccaagatcaaatgcactttcttgttgtgcatgaaacccagattgccatctatgaaactacaaaactagaaccagtgaagcagtggcctgttcgagagaattcacctccaatcacacatgctgcattctcgtgtgacagtcaactgatctatgcaagctttatggatgccactgttggcatatttaatgcatcgagtttgagacttcaatgtcg

SEQ ID NO: 3651 - DNA, 245 bp, Zea mays
caacagtattattacagagccatgctatgtgaacattactagtagcagtgctcataaaagctacaatcccatgtcctttttttccccagtcatgtaaaacttccaaactgctccatggttcaaaactctgttcttcaatacatcatcaattatcgattatatacgtggcaaaaaaaaaaaaaaaaaaaaaaaaaaaaaaaaaaaaaaaaaaaaaaaaaaaagaaaaagaagaaacagcggaggac

SEQ ID NO: 3652 - DNA, 260 bp, Zea mays
gtcgagcgccttcaacgccccgtactggaccaccaactccggcgcccccgtgtggaacaacgacagctccctcaccgtcggcgcacgaggtcccatcctgctggaggactaccacctggtggagaagctagccaacttcgaccgcgagcgcatcccggagcgcgtggtgcacgcggtggcgccacgccaagggcttcttcgaggtgacccacgacatcacccacctgacgtgcgccgacttcctgcgcgcgcccggggtg

SEQ ID NO: 3653 - DNA, 268 bp, Zea mays
gagcttttgctgaggcttctatgacaactgcttatgagaagaaatggccactctaccttagcaccaaaaacacaatcctgaaaaaatatgatggcaggtttaaggacattttccaggaggtctatgaagctgactggaagtccaaatttgaggctgctggaatatggtatgagcatcgtcttattgatgacatggttgcgtacgcgcttaagagcgaaggaggctatgtgtgggcttgcaagaactacgatggagatgtgcagagtga

SEQ ID NO: 3654 - DNA, 272 bp, Zea mays
gctctgatagcttgctccaggacgtacgtacgtacgtagatcgatccatcgatcgctagctagctgacgaccatggcgtccctctcctctgccgccatcaccgccccttccttcacggccgcgcccgctcgcgcagtggtcagcaggaggtccttcaccgtgcgtgcctctctccgcaaggccactgccaccgccgccgtggccgttgccgccagcgtcctgcttgccggcggcggcgccatggcccaggaggtgctgctgggcgcaggcga

SEQ ID NO: 3655 - DNA, 271 bp, Zea mays
cttggttggactgttctaccatctgtataaccagattgctacaaacaccttggagcgagtggctcctctgacacatgctgtcggcaatgtgttgaaacgtgtttttgtcatcggtttctcaatcattgtttttggcaacaaaattagcacacaaactggaattggcacgtccattgccatagctggtgttgctatgtactcttacattaaggctaagattgaagaggagaaaaggaaaaagagcgcatgactgctgtgaataatattatcg

SEQ ID NO: 3656 - DNA, 263 bp, Zea mays
ggaggtcatcattgacaattgctgtatgacgcttgtgaagaatcctggtctttttgacgtattagtgatgccaaatctctatggtgacattattagtgatctatgtgctggtttgatcgggggcttgggcctaacacccagttgcaatattggtgaaggtggcattgtctggcagaagctgttcatggttctgctcctgatattgctggcaagaacctcgcgaacccgactgctcttatgctgagtgctgtcatgttgttgcg

SEQ ID NO: 3657 - DNA, 272 bp, Zea mays
cgcatactgcatacacaacgcagagcatcagaagcagctgcgatctgatcgacatggctgccgccaccatggctatcacctcccgcgcgctcgtcggcaagccggcggctggcacgagggacgtcttcggcgagggccgcatcaccatgcgcaagaccgccgccaagcccaagccggcggcgtccggcagcccatggtacggtgccgaccgcgtcctgtacctgggcccgctgtccggctcgcccccgagctacctgaccggcgagttcccc

SEQ ID NO: 3658 - DNA, 272 bp, Zea mays
ctagcgcgcgcgatcgcaaagagagcggtgaaagatgaaggtgcagtgcgacgtgtgcgcggccgaggcagcagacaccgccgcctccgctctgcgacatctgccaggagaagcgcgggctcctgttctgcaaggaggaccgggcgatcctgtgccccgactgcgacgtgccggtgcacacggccagcgagctggccatgcgccacacccggttcctgctcacgggcgtgcgcctctccggctctccgcagagcccgccgcgcgcccgccgc

SEQ ID NO: 3659 - DNA, 271 bp, Zea mays
gccatggcctccctctcctctgccgccgtcaccgccccttccttcgccgcacccgcaccagcccgcgccgtggtcagaaggaggtccttcaccgtgcgcgcctctctccgcaaggccaccggcaccgccgccgtggcaatggctgccagcgccctgcttgccggcggtgccatggcccaggaggtgctgctgggcgcaggcgacggcgggctcgtcttcgagcccagccagttcaccgtcaaggccggcgacaccatcacattcaagaaca

SEQ ID NO: 3660 - DNA, 271 bp, Zea mays
ctatagcaaccggtccaacactttcacgctcagcttcagcaatggctgcctccaccatggcgatctcctccacggcgatggccggcacccccatcaaggtgggttccttcggcgagggccgcatcaccatgcgcaagaccgtgggcaagcccaaggtggcggcgtccggcagcccctggtacggccccgaccgcgtcaagtacctcggccccttctccggcgagcccccgagctacctcaccggcgagttccccggcgactacggctggga

SEQ ID NO: 3661 - DNA, 264 bp, Zea mays
gagacgcagaggtcccgcggcttcggcttcgtcaccttctccacggaggacgcgatgcgcagcgccatcgagggcatgaacggcaaggagctcgacggccgcaacatcaccgttaacgaggcccagtcccgcggcggccgtggaggcggcggtggcggatacggtggcgggcgccgtgatggaggcggctacggcggtggcggtggaggctacggcggtggtcgtggaggctacggcggcggtgggggatacggtggtgcaaac

SEQ ID NO: 3662 - DNA, 266 bp, Zea mays
gcagaaggtgtgggccgaaaccttctacgccatggcggagaacaacgtcatgttcgagggcatcctgctgaagccgtccatggtgacgcccggcgcggaggccaaggacagggtcaccccggagcaggtggccgcgtacaccctcaagctcctccaccgccggatccccccttccgtgcccgggatcatgttcctctccggcgggcagtcggaggtggaggcgacgcagaacctcaacgccatgaaccaggggcccaacccgtggc

SEQ ID NO: 3663 - DNA, 263 bp, Zea mays
cgatacgcacccaccagaggaaaagggcaaaagccaaaaggcatcaccgccgcgacgacgatggcagcctcgctccaagccgcggccaccctgatgcagccggccaagatcggcggccgggcgccctttgcctcgctgccgtcccgcccgtcgtcgcaactcgcctgcagggcgttcggcgtcgacgccggcgccgccaggatcacgtgctccctgcaggacgtcgccagcaggtgcgtcgacgccgcgaactcgccggcttc

SEQ ID NO: 3664 - DNA, 265 bp, Zea mays
gtcgtgtagtgtgtagtcgcagcagctagcgcccggccggccagtcgagtgagtccatcctccatcgccatccaatggccgccaccgccctgagcatgagcatcctccgcgcgccgccgccctgcttctcgtccccactcaggctcagggtcgcggttgccaagccgctggcggcccccatgcgtgcgcactgctgcgcgcgcaggccacctacaacgtgaagctgatcacgccggatggggaggtggagctgcaggtgcccgac

SEQ ID NO: 3665 - DNA, 263 bp, Zea mays
ctttcacgctcagcttcagcaatggctgcctccaccatggcgatctcctccacggcgatggccggcacccccatcaaggtgggttccttcggcgagggccgcatcaccatgcgcaagaccgtgggcaagcccaaggtggcggcgtccggcagcccctggtacggccccgaccgcgtcaagtacctcggccccttctccggcgagcccccgagctacctcaccggcgagttccccggcgactacggctgggacaccgccgggct

SEQ ID NO: 3666 - DNA, 262 bp, Zea mays
ataaaccgcagcagatggcgtcgacgatcatggccgccacctcccgcatcgtcgcggccaagacgccgtttcttggccagggtcgcgccgccgccaatgccagccccctccgcgacgtcgccgccgccgctgctggcggccggatcaccatgggcaacgacctgtggtacggcccggaccgcgtcaagtacctgggcaccttctccgcccagacgccctcgtacctgaccggcgagttccccggcgactacggctgggacac

SEQ ID NO: 3667 - DNA, 260 bp, Zea mays
attgacagaattgtagctggtatggaagggaccgtgatgacagacgggaagagcaaaagtcttgttgcttaccatgaagttgggcatgcaatttgcggaactttgacgcctggccatgatcctgtccaaaaggttaccttagttccaaggggtcaagctcgtggtcttacatggtttatcccgatggatgacccaacactcatctccaggcagcaactttttgccagaattgttggcggccttggtggtagagctgctga

SEQ ID NO: 3668 - DNA, 261 bp, Zea mays
ggcaacatcacgttgagcgtcaccaagagcaacccggagaccggcgaggtcatcggcgtcttcgagagcgtgcagccgtccgacaccgacctcggggccaaggcgcccaaggatgtcaagatccagggggtctggtacgctcagctcgagtgattcgagtgtctaactgctaggtgtccgaccgccgtcatggatcttgggaaggtgtatgtataccatggaaaactttggagagcagaggaggaatcgtgtatgtaatgt

SEQ ID NO: 3669 - DNA, 260 bp, Zea mays
cgtggaagaagatgtcgtacctgctgccgcatctgcactcggggtgggcggtggaccaggccatcctcgccgaggaggagcgcctcgtcatcatccgcttcggccatgactgggacgagacctgcatgcagatggatgaagtgctggcagcagtagctgagaccataaagaactttgcggtcatctaccttgttgacatcacagaggtccctgatttcaacaccatgtatgagctgtacgacccttcgacagtgatgttc

SEQ ID NO: 3670 - DNA, 260 bp, Zea mays
cagcgactcagcgagcgagagcagcacacacgcagctagctaggagcagcagcagcggcggcggcgatggcggcctccatgatctcctcgtcagctctggcggtggcgcctcagggcctgccgcccctcggccgccgcgcctcctccttcgccgtcgtctgctccaagaagaagatcaagaccgacaagccctacgggattgggggtggcctgaccgtcgacgtcgacgccaacgggagaaagggcaagggcaagggcgt

SEQ ID NO: 3671 - DNA, 260 bp, Zea mays
ctatagcaaccggtccagcactttcacgctcagctccagcaatggctgcctccaccatggcgatctcctccacggcgatggccggcacccccatcaaggtgggctccttcggcgagggccgcatcaccatgcgcaagaccgtgggcaagcccaaggtggcggcgtccggcagcccctggtacggccccgaccgcgtcaagtacctcggccccttctccggcgagcccccgagctacctcaccggcgagttccccggcgac

SEQ ID NO: 3672 - DNA, 263 bp, Zea mays
cttatttcatttgtgaaggacaaggagtcgtgggacttgaacaatgaagagaagattgaggctgctggtaagaagaaagaggaagggaatgcattgttcaaatcgggcaaatatgctagagcttccaagcgatatgagaaggctgccaagtacattgagtacgacacttcgttcagtgaagatgagaagaagcaatccaagcaactgaagatcagctgcaacctaaacaatgctgcctgcaaactgaagttgaaggattacaa

SEQ ID NO: 3673 - DNA, 271 bp, Zea mays
agcagatggcgtcgacgatcatggccgccacctcccgcatcgtcgcggcagagacgccgtttcttggccagggtcgcgccgccgccaatggcagccccctccgcgacgtcgccgccgccgctgctggcggccggatcaccatgggcaacgacctgtggtacggcccggagcgcgtcaagtagctggtgcgcttctccggccagactgcctcgtacctgaccggcgagttccccggcgactacggctgggacagcgccgggctgtccgccga

SEQ ID NO: 3674 - DNA, 282 bp, Zea mays
cacacacacagacaagtggtttccaaagccaagtgtgtgtactagcaaccagctagctcgggcggcagcaggcagccatcatgtcggaggagaagcaccaccacttcttcaaccaccacaagaaggacgaggagcagcccgccggcgagtacgggtactccgagaccgaggtggtcaccgccaccggcgagggcgagtacgagaggtacaagaaggaggagaaggagcacaagcacaagcagcacctcggcgaggccggcgccatctgcgccggcgccttcg

SEQ ID NO: 3675 - DNA, 278 bp, Zea mays
gtacgcacgcaccgggacaccagcaacccccaacagcgccactgtccagtgcgcgcgtcaagcttgcttagctagccgccatggcctccctcgccgccgtctccgtgaagcccgtggccatcaagggtctcgccggcagctctatctccggaaggaagctcgccgtcgccaggccgtcggctcgctccatccgcagccccgcgcagcgccgtggtggccaagtacggcgacaagagcgtctacttcgacctcgacgacatcggcaacaccaccggaca

SEQ ID NO: 3676 - DNA, 278 bp, Zea mays
tgacgtcttctcgtttggcattgtgatgtgggagctacttacaggtgaagagccttacgccgagctgcactatggggccattataggtggaatcgtgaataacacgctgcgacctccggtgcccgagtcctgtgatccccagtggaggtcactgatggagcggtgctggtcagccgaaccgtcagagaggccgagcttcaccgaggtcggcaagagcctgcgcgccatggcttctcctaccaaggcacaacaatcgaaatagatgctttagccttgcc

SEQ ID NO: 3677 - DNA, 278 bp, Zea mays
gtcatttaccagtatcgaagagttccttgagccacttgagctgtgctacaaatcactgtgtgactgcggcgacaaggccatcgcggacgggagcctcctggacctcctgcgccaggtgttcacgttcgggctctccctggtgaagctggacatccggcaggagtcggagcggcacaccgacgtgatcgacgccatcaccacgcacctcggcatcgggtcgtaccgcgagtggtccgaggacaagaggcaggagtggctgctgtcggagctgcgaggca

SEQ ID NO: 3678 - DNA, 272 bp, Zea mays
gggcggatggcgcacgtgggcgtggccttctccatcatcggcgagatcatcacggggaagggcgcgctggcgactcaacatcgagacgggggtgcccatcaacgagatagagccgctcgtcatcttcaacgtcctcttcttcttcatcgccgccatcaaccccggcaatggcaggttcatcatcggcgaggaagaggaataggctgctggctgctgctgctggcctcggacatgagtcgtgtgcgtttacttttacctgtgactgtgcgtct

SEQ ID NO: 3679 - DNA, 276 bp, Zea mays
tgcagcaggcggagctgcccgacccgatccgtgcgtgtgtgttggtagagatggctacagcagcttacgctcccatggcgagccatgtgatgaagagcagcccggtgcactcgatgccgaggtgcctgtcaggcgctgcgctcacgcggccccggccccggttcagcgtcgtcaaggccgccatccatcccgagaaggcaacgtaccatgtggtgcagcccatcaacggcgacccgttcatcggcagcctggagacgcccgtcacctccagcccgc

SEQ ID NO: 3680 - DNA, 275 bp, Zea mays
tcttcacactcctcgccatcacataaaaccagtgcaagcagaagcagcgcaatggcgagcagcaccatggccctctcctccacagccttcgccggcaaggcagtgaacgtgccgtcgtctctcttcggcgaggcccgcgtgacgatgcgcaagacggcggcgaaggcaaagccggcggcgagctccggcagcccgtggtacggccccgaccgcgtgctctacctgggcccgctgtccggcgcgcccccgagctacctgacgggcgagttcccggg

SEQ ID NO: 3681 - DNA, 274 bp, Zea mays
cagctgagaactcatgcaaggaggcttcagatacctatatttgagaagggttatgagaaagatccggcagttgtagcgagggaggctattcaggaagcaacccggaacaaatcagatgttgttctggttgacactgctggacgtatgcaggacaatgagccactcatgagggcactctccaagctaatcaatctcaatagcccagacctggttttatttgttggagaagcattggttggaaatgatgctgtggatcagctcactaaatttaacc

SEQ ID NO: 3682 - DNA, 274 bp, Zea mays
atggggaggaatctgctggccatgaatgtgatgtggaagtacagggagcaaagatcgttcccgctgagcgaggaggagtacctgctgcggctggacgatgtcgccaacacgctcaagtgctggggagccgtggcgcacgtgcgcaacacgctggagaagctcaaggagaggccgcgcatcggcaaggccgtcagcatcttcatcgacatggaccagaccggaggccgctccaacgaatggatttacaagtagcttcccactccatcgatcatgt

SEQ ID NO: 3683 - DNA, 274 bp, Zea mays
agctgcttccttttgtttacacaccaactgttggtgaggcctgccagaagtatgggtccatctttggacgaccacagggtctgtatgtcagcctgaaggacaaggggaaggtcctagaagttctaaggaactggccacataggaacattcaagttatctgtgttactgatggtgagcgaatcttgggacttggagatttgggttgtcagggaatgggaattcctgtaggcaaacttgctctatacactgctcttggaggagttgacccatcagt

SEQ ID NO: 3684 - DNA, 275 bp, Zea mays
gaaggttcttgaggttcatgttgagaaggggatgcaacacaaccagaagatcaccttccctggtgaagctgatgaagcgcctgatactgtcactggagacattgtattcgtcctccagcagaaggatcactccaaattcaaaagaaagggtgaagatctcttctatgagcacaccttgcctctgaccgaagcactatgtgggttccaatttgttcttacacatctggacaacaggcagcttctcatcaaatcagaccctggtgaagttgttaaac

SEQ ID NO: 3685 - DNA, 277 bp, Zea mays
caagaacggccgcctcgccatgttctccatgttcggcttcttcgtccaggccatcgtcaccggcaaggggcccctcgagaacctgctcgaccacctcgacgaccccgtcgccaacaacgcctgggtctacgccaccaagttcgcaccagggtcttaagctagctaccgggccgcggcgtgccaggacattgtgttgtacactactcgtttctgtcgtgatctgtaccatgaacgaatgcaaatattcttgtgctctcccagaaggaacgaactggac

SEQ ID NO: 3686 - DNA, 267 bp, Zea mays
gcgccactgtccagtgcgcgcgtcaagcttgcttagctagccgccatggcctccctcgccgccgtctccgtgaagcccgtggccatcaagggtctcgccggcagctctatctccggaaggaagctcgccgtcgccaggccgtcggcccgctccatccgcatgccccgcgcaccgccgtggtggccaagtacggcgacaagagcgtctacttcgacctcgacgacatcggcaacaccaccggacagtgggacctctacggctctgacg

SEQ ID NO: 3687 - DNA, 266 bp, Zea mays
aggagagtacgtggaggagcagccatggcttcatcggtggccgccgcggcgagcacattcctgggcacccgcctggcggacccggcgccacagaacgggcgcatcgtggcccggttcgggttcgggttgggcggcaaggcgaagctgctccgaagaaggtggcgaagacatcgacctcctctgaccggccgctgtggttccccggcgccgtggcgcccgactacctggacggctcgctggtcggcgactacgggttcgacccgttc

SEQ ID NO: 3688 - DNA, 265 bp, Zea mays
cagctgctctgatgtcttcaatctatgaagagaacaaggacgaggatgggttcctctacatgacttacagtggtgagaacaccttcggactgctctagatggctcaccgcaatcgggtcgggtagccttgcccatgcctcctgtaaataagacctgccaagcaactgtgtatattctggtttcgtcgttgcaagtggttgcgctctactgctaaagcctacctatcagttgtggagttgtcgtcgatgttatggacacacttaat

SEQ ID NO: 3689 - DNA, 266 bp, Zea mays
cggctctaccctcatcccccgctgcctgtagcagcggcttcgcggaggacttctaccgcagcggcaccgactggtcctccttacgcgcccctccgccgctggggccgcccagaagggcacccggtgtgaaggagagaggaggcggctcggccgtgcagagcagcctcttccaggcgtgggggatcgagaagccgcggcgggacgggcgtggggctggggattcatcgcttgtgcagaggagcctcttccaggcatgggggatcgag

SEQ ID NO: 3690 - DNA, 264 bp, Zea mays
acgacctgcagccaaccatctaccagcgactcagcgagcgagagcagcacacactgcacgcagctagctaggagcagcagcagcggcggcgatggcggcctccatgatctcctcgtcagctctggcggtggcgcctcagggcctgccgcccctcggccgccgcgcctcctccttcgccgtcgtctgctccaagaagaagatcaagaccgacaagccctacgggattgggggtggcctgaccgtcgacgtcgacgccaacgggag

SEQ ID NO: 3691 - DNA, 274 bp, Zea mays
cgcgcagagcatcctcgccgtgctcggcttccaggtcatcctcatgggcctcgtcgagggcttccgcatcaacggcctcgacggcgtcggcgagggcaacaacctctaccccggcggccagtacttcgacccgctgggcctcgccgacgaccccgtcaccttcgccgagctcaaggtcaaggagatcaagaacggccgcctcgccatgttctccatgttcggcttcttcgtccaggccatcgtcaccggcaaggggcccctcgagaacctgctc

SEQ ID NO: 3692 - DNA, 271 bp, Zea mays
gtggctcaccggcgtcacctggcaggacgccggcaaggtggagctggtggacgggtcctcctacctgggccagccgctgccgttctccatctcgacgctcatctggatcgaggtgctcgtgatcggctacatcgagttccagcgcaacgccgagctcgacccggagaagaggctgtaccccggcggctcctacttcgacccgctcggcctggcggccgaccctgagaagaaggagcggctgcagctggcggagatcaagcacgcgcggctc

SEQ ID NO: 3693 - DNA, 102 bp, Zea mays
agtgggttggcttctcctccccctccggttcgggttcaggttcgtgaggttctccggggttcggtttcgtgggtgagaggatcgaaatagtggtgtaggatg

SEQ ID NO: 3694 - DNA, 261 bp, Zea mays
gccggccagggcaaaataaacccactcatcaaggccgccgtgaccccggccttcgtgggccagttcccgggcgtcaacgggcttggcatctctgcggccaggctcgacatcgaggtgggcggcgtcgtgccgctgcacacccacccggcgggctcagagctcctcttcgtgacccagggcaccgtcgccgccggcttcatcagctccggctccaacaccgtctacaccaagacagtgtacgccggcgacatcatggtgttc

SEQ ID NO: 3695 - DNA, 278 bp, Zea mays
gccattacccgcagctagcaaacaaatggccaccgtcctgagcagcccccgcgcgccggccttctccttctccctccgcgccgcgccagcgcccactaccgtggccatgacccgtggcggtggcgccagcagcaggctgcgcgcgcaggccacctacaacgtgaagctcatcacgccggacggggaggtggagctgcaggtgcccgacgacgtctacatcctggactacgccgaggaggaaggcatcgacctgccctactcctgccgcgcggggtcct

SEQ ID NO: 3696 - DNA, 269 bp, Zea mays
ggccatctatccagcagccgctctccccagccccactctctccatctagagctccctaactgcaccggccgccacaccaccgtaccccgacccctcgacaacaatggccaccgtcctaggcagcccccgcgcgccggccttcttcttctcgccgtcctccctccgtgccgcgccggcgcccaccgccgtggcgctgcctgcggccaaggtgggcatcatgggccgtagcgccagcagcaggggcaggctgcgcgcgcaggccacctaca

SEQ ID NO: 3697 - DNA, 265 bp, Zea mays
cttcaacgagaggcctatcatcttttcactgtcaaacccaacctcgcattctgaatgcactgctgaacaagcatatacatggagtcagggccgttcaatctttgccagtggcagtccatttgcccccgtggagtacgaaggaaagacttttgtgcctgggcagtcgaacaatgcctacattttccctggactcggcctcggtcttgtgatctctggagccgtccgtgtccacgaggacatgcttctcgccgcatcgaaagcgcta

SEQ ID NO: 3698 - DNA, 266 bp, Zea mays
actactagctggtacacatactagccatcctgccagccagccagcttgccatggcgcccaccgtgatgatggcctcgtcggcaaccgccgtcgccccgttccagggtctcaagtccgccgccagcctccccgtcgcccgccgcagcaccaggagcctcggcaacgtcagcaacggcggaaggatccggtgcatgcaggtgtggccggcctacggcaacaagaagttcgagacgctgtcgtacctgccgccgctgtcgacggacgac

SEQ ID NO: 3699 - DNA, 267 bp, Zea mays
gcgtgatgttcgagggcatcctgctgaagcccagcatggtgacccctggtgccgagtgcgaggagaaggccaccccggagcaagtagccgagtacaccctcaggctcctgcgcacaaggatccctcccgccgtgccgggcatcatgttcctgtccggcgggcagtctgaggtggaggcgacccagaacctgaacgccatgaaccagagccctaacccgtggcacgtctccttctcctacgccagggcgctgcagaacacctgcctca

SEQ ID NO: 3700 - DNA, 268 bp, Zea mays
cgacatcacggtggaggcgtggctcaacacgcacggtcccaacgaccgcacgctcgcgcaggggctcaagggtgaccccacgtacctggtggtggagcaggacaagacgctggccacctacgggatcaacgccgtgtgcactcacctcggctgcgtcgtgccgtggaacggcgctgagaacaagttcatctgcccctgccacggatcccagtacaacaaccagggcaaggtggtccgtggaccggcgcctctgtcgctggccctggtt

SEQ ID NO: 3701 - DNA, 269 bp, Zea mays
ctcggcagctaacgacctgcagccaaccatctaccagcgactcagcgagcgagagcagcacacacgcagctagctaggagcagcagcagcggcggcggcgatggcggcctccatgatctcctcgtcagctctggcggtggcgcctcagggcctgccgcccctcggccgccgcgcctcctccttcgccgtcgtctgctccaagaagaagatcaagaccgacaagccctacgggattgggggtggcctgaccgtcgacgtcgacgccaacg

SEQ ID NO: 3702 - DNA, 250 bp, Zea mays
ggagaaggcggcagcatggccatggaggaagcggggaagatgacgtgcaggaagaagggtggtctgagaacaatgcccttcatcttcgccaacgaggtggcggagaagctcgccgtggtgggtttctcgaccaacatgctgacgtacctgaccactcagctgcacatgccgctagcgaaggccgccaccacgctcaccaacttcggcggcacctccgccgcgacgcccctcatcggtgccttcctcgccg

SEQ ID NO: 3703 - DNA, 269 bp, Zea mays
ctcctcgccatcacataaaaccagtgcaagcagaagcagcgcaatggcgagcagcaccatggccctctcctccacagccttcgccggcaaggcagtgaacgtgccgtcgtctcacttcggcgaggcccgcgtgacgatgcgcaagacggcggcgaaggcaaagccggcggcgagctccggcagcccgtggtacggccccgaccgcgtgctctacctgggcccgctgtccggcgcgctcccgagctacctgacgggcgagttcccgggcg

SEQ ID NO: 3704 - DNA, 272 bp, Zea mays
aaggatactatggagagtgtggtaaaagaggaggttacatggagattactggcttcagtgctccggtaagagagcagatctacaaggtagcttcagtgaacctgtgctccaatatcactggtcaaatccttgcgagcctcgtcatgaatccaccaaaggttggggacgaatcatatgcttcctacaaggcagagaaagatggaatccttcagtgtttagctcgccgtgcaaaggcactggaagatgcattcaacacgcttgagggattttca

SEQ ID NO: 3705 - DNA, 261 bp, Zea mays
ccgccgctctgtcgcgctcccgctcttccaagtccgcgttccagcgccaggttgtcccgaccagccgggcgtcgtcgtgcaggtccgtccgcgcgcgctccgctgcagccgccgcgccggctgcgggaggcatctccgggcatagcaattacacggttggtgacttcatgacaagaagggacaatgtccatgttgtccaacgtagtacaccagttgaccaagccgtggagctggtggtgcaacacaggatgtgtggcttcc

SEQ ID NO: 3706 - DNA, 246 bp, Zea mays
gtgcactgggatcacgttgagccctgttcaagccgagagaggaaatgctctcgctgcagcgcaggggttgtcggatcaggttactctgcaagttgctgatgctctggagcaaccgtttcctgacgggcagttcgatctggtgtggtccatggaaagtggcgagcacatgccggacaagagaaagtttgttagctgagtaacacgcctggcgggtcctggaaggaccataatcatcgtgacatgttg

SEQ ID NO: 3707 - DNA, 262 bp, Zea mays
gttcagtaatatatatatatatattacaaaactatccaagtaatatatatattcacctcctcgatcctatgccggcctcgcgcctagctagcaatagcaaagagttgctttctacttgaagaaggagccagtcttcatggacgtcctcgttggcttcaccaagagcagcctcgttgaggtagctgtcagcaagctgcacacgcttgacgttctcctgctccgccaccagcatgtgtccgtactccaagagcttctcgatcgt

SEQ ID NO: 3708 - DNA, 110 bp, Zea mays
catacacaacgcagagcatcagaagcagctgcgatctgatcgacatggctgccgccaccatggctatcaactcccgccccctcgtcggcaagccggcggctggcacgagg

SEQ ID NO: 3709 - DNA, 258 bp, Zea mays
aacggcgtcaagttcggcgaggccgtctggttcaaggccggctcccagatgttcagcgagggcgggctggactacctcggcaaccccagcctgatccacgcgcagagcatcctcgccatctgggcctgccaggtcgtgctcatgggtgccgtcgagggctaccgcattgccggcgggccgctcggcgaggtcgtcgacccgctgtaccctggcggcagttcgaccccctcggcctggccgacgaccccgaggcttcgc

SEQ ID NO: 3710 - DNA, 281 bp, Zea mays
atcgcgagcgcaacacgtacgttgtcggaagctcaagttagaagaagcaccagtgcctgatcgatggcggcccaggctctcctctccggccggcagctgctgggccgccccgtgcagtcggccgtctctaggtcgtcggcgaggaaggcgcccttcgtcgtcagggccagctccagccctccagccaagcaaggtgccgacaggagctgtggttcgcgtccaagcagtccctctcctacctcgatggcacgctgcccggcgactatggcttcgacccgctg

SEQ ID NO: 3711 - DNA, 280 bp, Zea mays
ccaaggagagtacgtggaggagcagccatggcttcatcggtggccgccgcggcgagcacattcctgggcacccgcctggcggacccggcgccacagaacgggcgcatcgtggcccggttcgggttcgggttgggcggcaaggcgaacatgctccgaagaaggtggcgaagacatcgacctcctctgaccggccgctgtggttccccggcgccgtggcgcccgactacctggacggctcgctggtcggcgactacgggttcgacccgttcggtctcgggaa

SEQ ID NO: 3712 - DNA, 282 bp, Zea mays
ctcggcattgacatcgtcatcgagggcaccggagtcttcgtcgacggccccggcgccggcaagcacatccaggccggcgcgaagaaggtgatcatcacggctcccgccaagggcgccgacatcccgacctatgtcgtcggcgtcaacgagggcgactacgaccacagcgtcgccgacatcatcagcaacgcgtcctgcacgaccaactgcctcgcgccattcgtcaagatcttggacgaggagttcggaatcgtgaaggggaccatgacgacgacgcactcg

SEQ ID NO: 3713 - DNA, 279 bp, Zea mays
cggctcgagctgctcgccgtcatcagcgccatcaacctcgtcctcttcacgttcgccgccaggggctacgtctataaggagaagcgcctggccgacgccggcatcgagctcgccgacgaggagtctattgccgtcggccactgatgctgctgccagtgccacaaccctgcatgcatggagatggcaatggggacccgatccccgattccccgcggggaattcctctattaggggatggggatggggaattttcttcccccacggggatgtaaatgggga

SEQ ID NO: 3714 - DNA, 281 bp, Zea mays
ccgagctacctcaccggcgagttccccggcgactacggctgggacaccgccgggctgtccgccgaccccgagacattcgccaagaaccgcgagctggaggtgatccactcccgctgggccatgctcggcgcgctcggctgcgtcttccccgagctgctctcccgcaacggcgtcaagttcggcgaggccgtctggttcaaggccggctcccagatcttcagcgagggcgggctggactacctcggcaaccccagcctgatccacgcgcagagcatcctcgc

SEQ ID NO: 3715 - DNA, 281 bp, Zea mays
cgatctgcaagtctcgctacgtagcagtgcaatacaaaaaaagcagccgcaatggcgagcagcaccatggccctctcctccacggccttcgccggcaaggccgtgaacgtgccgtcgtcgtccgccttcggcgaggcccgcgtgacgatgcgcaagacggcggcgaaggccaagcctgcggcggcgtccgggagcccgtggtacggccccgaccgcgtgctgtacctgggcccactgtccggcgagccaccgagctacctgacgggcgagttcccgggcga

SEQ ID NO: 3716 - DNA, 276 bp, Zea mays
gcaaccggtccagcactttcacgctcagctccagcaatggctgcctccaccatggcgatctcctccacggcgatggccggcacccccatcaaggtgggctccttcggcgagggccgcatcaccatgcgcaagaccgtgggcaagcccaaggtggcggcgtccggcagcccctggtacggccccgaccgcgtcaagtacctcggccccttctccggcgagcccccgagctacctcaccggcgagttccccggcgactacggctgggacaccgccggg

SEQ ID NO: 3717 - DNA, 271 bp, Zea mays
gaagacgagtgtcaagtgaacctgaaacttgcggtgtcactggctggtagcctgagtgtgagtgagtgatcgagctagctgagctccgatcctcgctagctaggataccgccataccacaagtcttcttcacaagtttaggagtgacagcaacaagagatcgatggcctctgccaccgtgctcaagtcctccttccttcccaagaagtccgaatggggcgccaccaggcaggccgccgcgcccaggccgcccaccgtctccatggtcgtcc

SEQ ID NO: 3718 - DNA, 272 bp, Zea mays
tgcttgttggctgccttcccttcgacgacaggaacctcgtcgttctttatcagaagattttcaagggagactgtcagatccccaagtggctttcgcctgccgcgcaggaccttctcaagaggatcctccaaccgaatccgatgaagaggatcaacgtcgcggggatcagggaccacgagtggttcaagaaggactacgtgcctgctgttccgcacgatgatgacgaagacgtccttcctagtccagctccctcgataaagccaatcgatgag

SEQ ID NO: 3719 - DNA, 271 bp, Zea mays
gacgagtgtcaagtgaacctgaaacttgcggtgtcactggctggtagcctgagtgtgagtgagtgatcgagctagctgagctccgatcctcgctagctaggataccgccataccacaagtcttcttcacaagtttaggagtgacagcaacaagagatcgatggcctctgccaccgtgctcaagtcctccttccttcccaagaagtccgaatggggcgccaccaggcaggccgccgcgcccaggccgcccaccgtctccatggtcgtccgcg

SEQ ID NO: 3720 - DNA, 270 bp, Zea mays
tctagatcgctagctgccgcccttttttttttttttttttttttttttttttttttgaaaattatcattaatttatgatgttcatgtaactatagtcataggataaggcaggtccggtttggtttcatcacgcggatgggagcaccttcttgacgatctcatcactgagcgaggcgatctgggcgtcgagcgccttaacagcctcctccttctgcgcctcgaggttggcgagcgcctctacgatctcggcctccacacggctgcgtccct

SEQ ID NO: 3721 - DNA, 272 bp, Zea mays
cggctcgagacgcgaggtcgccgcagctggacatcgtcgccgaggtgcagctgccagcgcgcgtcccctatggcttccacggcatgtttgtcacgcaggccgagctccaggcgcacagcaatgatcaaagcaccgaacactcgtccagtgtttacgtgctggggatctgtagcacatgataccaggagaaacacacacaaacacccatcaggtgcatactgaatagattgtagtaagaacaactctaggccacatagcattcacgaattata

SEQ ID NO: 3722 - DNA, 262 bp, Zea mays
ctcagatcaaggctagccgtaatcacgccactctgctgactcccggcgagcagtgtaacattttccttcagccatgggcaaggagaagactcacatcaacattgtggtcattggacatgtcgactctggcaagtcgaacaccactggccaactgatctacaagctcggcggtattgacaagcgtgtgattgagaggttcgagaaagacgccgcggacatgaacaagcggtcattcaactatgcctgcgtgcttgacaagctc

SEQ ID NO: 3723 - DNA, 271 bp, Zea mays
ggggattgtgtcacactctgtgatcatcggattgtcactgggagtgtcgcggacccatgcacaatcaggccacttgtcgcagcacttgcattccaccagttcttcgaggggtttgcactaggtgggtgcattgctcaggcacaattcaagaacctttcagcagttctaatggcatctttcttcgccatcacaacaccggcaggaatagctgctggggcaggcatgaccacattctacaatcccaatagcccaagggcccttgtggtcgagg

SEQ ID NO: 3724 - DNA, 274 bp, Zea mays
gaaccgcgagctggaggtgatccactgccgctgggccatgctgggcgcgctcgggtgcgtgttcccggagctgctcgcccgcaacggcgtcaagttcggcgaggccgtgtggttcaaggccgggtcccagatcttcagcgagggcgggcttgactacctcggcaacccgagcctgatccacgcgcagagcatcctggccatctgggcgtgccaggtggtgctcatgggcgccgtcgaggggtaccgcatcgccggtggcccgctcggggaggtg

SEQ ID NO: 3725 - DNA, 268 bp, Zea mays
gcagccatggcttcatcggtggccgccgcggcgagcacattcctgggcacccgcctggcggacccggcgccacagaacgggcgcatcgtggcccggttcgggttcgggttgggcggcaaggcgaagctgctccgaagaaggtggcgaagacatcgacctcctctgaccggccgctgtggttccccggcgccgtggcgcccgactacctggacggctcgctggtcggcgactacgggttcgacccgttcggtctcgggaagcccgtgga

SEQ ID NO: 3726 - DNA, 265 bp, Zea mays
ctggcctgccgtcgtcggactggctgacgtacgtacgtacgtaccggtggactacggtggttgcaggtcgggaggccggtggtgttctccctggcggcggcgggcgaggccggcgtgtccaacgtcctgcgcatgctgcgggacgagttcgagctcaccatggcgctcagcggctgcacctccctcgccgaaatcacccgcaagcacatcatcaccgagtccgccaagctcagcgccatcccgtcgcgcttgtagatgaggcaaa

SEQ ID NO: 3727 - DNA, 265 bp, Zea mays
tgacaggttgttacttgtggaaatttccccctcgaatcctcgttccaaagggttccaagatgcgtatacacttctactggcttgtatgagtacaggggttgggattccaaagctgccaataccgaacatcggcgttttacatggggtttacgttcaatggagcgacatgcggttgatttctacatttcagattttcagtccgggcttcgagcattggtgaaaacaggatatggtgcacgtgtgaccccatacgttgatgaatctg

SEQ ID NO: 3728 - DNA, 267 bp, Zea mays
cgtcccccaaggagcaggtgttcgagatgcccaccggcggcgccgccatcatgccggagggccccaacctcttgaagctggcgcgcaaggagcagtgcctggcgctcggcaccaggttgcgctccaagtacaagatcacctaccagttctaccgcgtcttccccaacggcgaggtgcagtacctccaccccaaggacggcgtctacccggagaaggtcaaccccggcagggagggcgtcggccagaacttccgcagcatcggcaaga

SEQ ID NO: 3729 - DNA, 265 bp, Zea mays
ggagagtacgtggaggagcagccatggcttcatcggtggccgccgcggcgagcacattcctgggcacccgcctggcggacccggcgccacagaacgggcgcatcgtggcccggttcgggttcgggttgggcggcaaggcgaagctgctccgaagaaggtggcgaagacatcgacctcctctgaccggccgctgtggttccccggcgccgtggcgcccgactacctggacggctcgctggtcggcgactacgggttcgacccgttc

SEQ ID NO: 3730 - DNA, 267 bp, Zea mays
cagcgactcagcgagcgagagcagcacacacgcagctagctaggagcagcagcagcggcggcggcgatggcggcctccatgatctcctcgtcagctctggcggtggcgcctcagggcctgccgcccctcggccgccgcgcctcctccttcgccgtcgtctgctccaagaagaagatcaagaccgacaagccctacgggattgggggtggcctgaccgtcgacgtcgacgccaacgggagaaagggcaagggcaagggcgtgtaccag

SEQ ID NO: 3731 - DNA, 268 bp, Zea mays
ctcaccgacgccacagcttgtgttgtgcgcgcgcaatggcactcgtgtccgcctcctcgtcctccaccaccgccgtcgcggcgctccccaggaatgggcagcagcgggcgtcgtcgtcgttgttctcctcctcctcctcttcctccttcctcgtcggcaagacgctgctgaggcaggccgaggcagcccggccgtcgttcgccgtgcgcgccgcggcggattccgacaggccgatctggttccccggcagcacccctccaccgtggct

SEQ ID NO: 3732 - DNA, 295 bp, Zea mays
caccaccggacgctagctcaccaccaacctcagcacatcgaggagaagaggagtggccaatggcttcgtcggtggccgccgcggcgagcacattcctgggcacccgcctggcggacccggtgccgcagaacgggcgcatcgtggcccggttcgggttcggcggcggaaagcccaaggctgccgtcccgaagaaggtggcgaagacgtcgatctcctctgaccggccgctgtggttccccggcgccgtggcgcacgactacctcgacggctcgctggtcggcgactacgggttcga

SEQ ID NO: 3733 - DNA, 291 bp, Zea mays
gccaggcagccatggcgcccaccgtgatgatggcctcgtcggccaccgccgtcgctccgttccaggggctcaagtccaccgccagcctccccatcgcccgccgctcctccagaagcctcggcaacgtcagcaacggcggaaggatccggtgcatgcaggtgtggccggcctacggcaacaagaagttcgagacgctgtcgtacctgccgccgctgtcgacggacgacctgctgaagcaggtggactacctgctgcgcaacggctggataccctgcctcgagttcagcaagg

SEQ ID NO: 3734 - DNA, 286 bp, Zea mays
ccaaaaggcatcaccgccgcgacgacgatggcagcctcgctccaagccgcggccaccctgatgcagccggccaagatcggcggccggtcgccctttgcctcgctgccgtcccgctcgtcgtcgcaactcgcctgcagggcgttcggcgtcgacgccggcgccgccaggatcacgtgctccctgcaggacgtcgccagcaggtgcgtcgacgccgcgaactcgccggcttcgcgctctgcacctcggcgctcctcgtctcgggcgcgacgcggagggcacgccaaga

SEQ ID NO: 3735 - DNA, 287 bp, Zea mays
gtgtcgtgtagtgtgtagtcgcagcagctagcgcccggccggccagtcgagtgagtccatcctccatcgccatccaatggccgccaccgccctgagcatgagcatcctccgcgcgccgccgccctgcttctcgtccccactcaggctcagggtcgcggttgccaagccgctggcggcccccatgcggcgccagctgctgcgcgcgcaggccacctacaacgtgaagctgatcacgccggacggggaggtggagctgcaggtgcccgacgacgtctacatcctggact

SEQ ID NO: 3736 - DNA, 288 bp, Zea mays
cggaagaactcaagccctttgggaagcagctcagggacaaatacgtggagacacagcagcttctcctccagatcgctgggcacaaggatattcttgaaggcgatccattcctgaagcaggggctggtgctgcgcaacccctacatcaccaccctgaacgtgttccaggcctacacgctgaagcggataagggaccccaacttcaaggtgacgccccagccgccgctgtccaaggagttcgccgacgagaacaagcccgccggactggtcaagctgaacccggcgagcg

SEQ ID NO: 3737 - DNA, 286 bp, Zea mays
cacatacatagtttcttctactacacgacgacaaacatggggaagcctgcgaagatcggagagtggggtggatacgccggcgatcgtcgggatctgagggctactccggaccggctgaccgaggtgaaggtcacggcggacaacagcagctgcatccgctccatctccttcatctacatcggagccgatggcaagccgtacgaggaggggccatggggtttcggccatgctggcacggagtacaagattgatctgtgcaggttcgacgagagcttgacggagatct

SEQ ID NO: 3738 - DNA, 274 bp, Zea mays
gaagacgagtgtcaagtgaacctgaaacttgcggtgtcactggctggtacacctgagtgtgagtgagtgatcgagctagctgagctccgatcctcgctagctagctaggataccgccataccacaagtcttcttcacaagtttaggagtgacagcaacaagagatcgatggcctctgccaccgtgctcaagtcctccttccttcccaagaagtccgaatggggcgccaccaggcaggccgccgcgcccaggccgcccaccgtctccatggtcgt

SEQ ID NO: 3739 - DNA, 287 bp, Zea mays
cgggagccaaccaggaggatgccctcgcacggatcgaaaagctttcggaagtaaacccgatgcttggcttccgtggctgcaggcttggtatatcgtaccctgagctaacagaaatgcaagcccgtgccatctttgaagctgctataacgatgaccaaccagggcgttcaagtctttccagagataatggttcctcttgttggaacaccgcaggaattgggacatcaggtggcccttatccgtcaagtcgctaacaaagttttcaccagtatgggtaaaactattggg

SEQ ID NO: 3740 - DNA, 279 bp, Zea mays
cggtacagcggcacagaggtgcgacgtacgacgacgacgacgcaggcgccacacatggcatcccagctctccgccgccgtgccccggttccacggcctccggggctacgccgcgcccaggtccgcggtggcagcgctgccgtccgtgagggtgggcaggaagaggtcgtcgtcgcagggcatccgctgcgactacatcggctccgccaccaacctgatcatggtgacgacgacgacgctgatgctgttcgcggggcggttcgggctggcgccgtccgcg

SEQ ID NO: 3741 - DNA, 281 bp, Zea mays
ggcctctgcactgcatgcacccgtacatgcattcatggctgcgatgtcgggactctgccggacatcacaccagcgagtaactgcttccagttcatcgcctacttcgccgtgtcgactaacctggttaactacctcaaggaccgcctgcatcagggcagcaaagccgccgcgaactgcgtcaccaactggatggtcacgatctccatcacgccgctcgtcgccgccttcctcgccgacgccttcctcggcagatacttgatcatcgcgctcttcctggtcat

SEQ ID NO: 3742 - DNA, 276 bp, Zea mays
agctaatgcagcatggatttagtgatgccattgcaaaagtaggtttgacaaagtttgtcagtgacctattcttggttggactgttctaccatctgtataaccagattgctacaaacaccttggagcgagtggctcctctgacacatgctgtcggcaatgtgttgaaacgtgtttttgtcatcggtttctcaatcattgtttttggcaacaaaattagcacacaaactggaattggcacgtccattgccatagctggtgttgctatgtactcttaca

SEQ ID NO: 3743 - DNA, 277 bp, Zea mays
cttgcagcaggcggacgcccgacccgatccgtgcgtgtgtgttggtagagatggctacagcagcttacgctcccatggcgagccaggtgatgaagagcagcccggtgcactcgaggccgaggggcctgtcaggcgctgcgctcacgcggccccggccccggttcagcgtcgtcaaggccgccatccagcccgagaaggcaacgtaccaggtggtgcagcccatcaacggcgacccgttcatcggcagcctggagacgcccgtcacctccagcccgct

SEQ ID NO: 3744 - DNA, 280 bp, Zea mays
caggcccccgcgacggcgccgccgggtctgacggagggcatcgcggggctgtacgacgagtcgtcggggctgtgggagaacatctggggcgaccacatgcaccacggcttctacgactcgagcgaggccgcctccatggccgatcaccgccgcgcccagatccgcatgatcgaggaggcgctcgccttcgccggtgtcccagcctcagatgatccagagaagacaccaaaaacaatagtcgatgtcggatgtggcattggtggtagctcaaggtacttgg

SEQ ID NO: 3745 - DNA, 278 bp, Zea mays
cgcttgtttcccttgctcgccttcacccctcgccgccgccgccgccgtcgccgtcgcaagcgacgatgctcgacatcaacttgttccgcaccgacaagggcggcaacccagaccttattcgcgagtcccagcgcagtcggttcgcctccgtcgagctcgtcgacgaggtcatcgccctcgacaaggcatggcgcgaaaggcagttcgagctggacaagatccggcaggagctcaacgctaccagcaagaagatcggcaagctcaaagccagcaagcaa

SEQ ID NO: 3746 - DNA, 274 bp, Zea mays
cattactcctactctgttgtacgtggatgtgaccgtatagtccccgtggacatctacgtccctgggtgcccaccaactgctgaggcactgctgtacggtgttcttcagctccaaaagaagatcaacaggcgtaaggatttccttcactggtggaccaagtgaagcatgcttctgctgttgctcgcttgctacgtttctttgcactcgacctacctgtcttatctgaaataaggacggactttgctcggattcacaaatttgttgtgcctggaag

SEQ ID NO: 3747 - DNA, 273 bp, Zea mays
caaggacccattcaggaggggcaacaacatccttgtcatgtgcgattgctacaccccagctggcgagccaattcccaccaacaagaggtacagcgccgccaagatcttcagcagccttgaggtcgctgccgaggagccctggtatggtatcgagcaggagtacaccctccttcagaaggacaccaactggcccctcgggtggcctattggcggcttccctggccctcagggtccttactactgtggaatcggcgcggagaaatcgttcgggcg

SEQ ID NO: 3748 - DNA, 269 bp, Zea mays
agtcgctgactgcggacagctctcctagatctctctgatctggtctgttccgccgccctccctccgtcatcgtcgactccccctgcgtccgttcctttggatctgaataagatggtggtgatctgagtggtggtcttagtttatcatgtatcgctcgcagtttaatttagcggcttaggtgtggatctgtgaaccccatggcgcctctgcttgattcgtgtttcacctgttatgttctgagattcatgataatgctatgagaactgaaa

SEQ ID NO: 3749 - DNA, 272 bp, Zea mays
aagcaagcagcgagtacatacatactaggcagccaggcagccatggcgcccaccgtgatgatggcctcgtcggccaccgccgtcgctccgttccaggggctcaagtccaccgccagcctccccgtcgcccgccgctcctccagaagcctcggcaacgtcagcaacggcggaaggatccggtgcatgcaggtgtggccggcctacggcaacaagaagttcgagacgctgtcgtacctgccgccgctgtcgacggacgacctgctgaagcaggt

SEQ ID NO: 3750 - DNA, 268 bp, Zea mays
cgggtacccagggacaagaagagcaagaacggcaagctgcggcttctctacgagtgcgcccccatgagcttcatcgtcgagcaggccggtggcaagggctctgacggccaccagagaattcttgacatcacacctacagagatccaccaaagagtgcctctgtacattggcagcgtggaggaagtggacaaggtggagaaattcctggcttgaatgccagagctctctcatcagatggactcccgaagacatcaagtttagggaggga

SEQ ID NO: 3751 - DNA, 271 bp, Zea mays
attcacgcgaacgcacacgcacccacacgacacatccagatgatgcttagggtttccccgtccccggccgccgcggtgccaacccagctctccggtgcgcccgcgacccctgctcccgtcgtcagggtggcggcgccgcgcggagtcgcctcgccgtccgctggcgccgcgtgcagggccgcgggcaatgggaaggaggtgctcagcggggtcgtgttccagcccttcgaggagatcaagggggagctcgccctcgtgccccagtccccag

SEQ ID NO: 3752 - DNA, 269 bp, Zea mays
gagattgtaaattcggtgcagtgtgcaagttccatcatccccgggtgagatcactgccccctccagattgtgtcttaagtccaatgggtcttccactacgtccaggtgaagaactgtgcaaattctattctcgttacggcatctgcaagttcggcgccaactgtaaattcgaccatcctacagtggttgctccaatggtctatgcgtatggtttctccgcgtctgcttcccctgcatccgcttcgactaatgtacctatggcgcgacgc

SEQ ID NO: 3753 - DNA, 258 bp, Zea mays
ctcgcgttcttcgtcgaggccacgcccggcaaggcgacgggcgccgccgccgctgctgacggcggcgacgacctgcacaacaccctccggctcacgcgcgacaacatcaaggccatcatcatggacgtgatgttcggcgggacggaaacggtggcgtcggcgatcgagtgggccatggcggagatgatgcacagccccgacgacctgctcctggtgcagcaggaactcgccgacgtcgtgggcctccaccgcaacgtg

SEQ ID NO: 3754 - DNA, 269 bp, Zea mays
ctcctcgccatcacataaaaccagtgcaagcagaagcagcgcaatggcgagcagcaccatggccctctcctccacagccttcgccggcaaggcagtgaacgtgccgtcgtctcacttcggcgaggcccgcgtgacgatgcgcaagacggcggcgaaggcaaagccggcggcgagctccggcagcccgtggtacggccccgaccgcgtgctctacctggggccgctgtccggcgcgcccccgagctacctgacgggcgagttcccgggcg

SEQ ID NO: 3755 - DNA, 256 bp, Zea mays
ggccggctcccagatcttcagccagggcgggctggactacctcggcaaccccagcctgatccacgcgcagagcatcctcgccatctgggcctgccaggtcgtgctcatgggtgccgtcgagggctaccgcattgccggcgggccgctcggcgaggtcgtcgacccgctgtaccctggcggcagcttcgaccccctcggcctggccgacgaccccgaggccttcgccgagctcaaggtgaaggagctcaagaacggc

SEQ ID NO: 3756 - DNA, 266 bp, Zea mays
tgatgatggtcaggaacagcagtacaatgtgcctcaagtcaagggtcatcgacttagaggtgggccacagatgattcagctgagcttggatggcaagaggatatacgtgacaaactcacttttcagccgatgggatgagcagtttttcggtgatgatcttgtcaagaagggctcccacatgttgcagatcgatgtcgacaccgagaaaggaggcctggctgtcaaccccaacttcttcgtcgattttggcaccgagcctgatggtc

SEQ ID NO: 3757 - DNA, 264 bp, Zea mays
aattgtcaaccgactctatctagctctcttcgcaagccagtaggtcaccactcaccactcaaaagcttgtgaagcaggtgagatgggcaaggaggtggatgtgtccactctagaggtcggcggcgtccgtgaccgtgactacgcggaccctccgccggcaccgctgatcgacatcgacgagctcggcaagtggtccctgtaccgcgccgtgatcgccgagttcgtggccacgctgctgttcctgtacatcacggtggccacggt

SEQ ID NO: 3758 - DNA, 261 bp, Zea mays
ccatccggaagaacatgccggtcgacgagggcgggccgggcgaggagatggagaagttcctcaagcagccggagacgacgctgctggacatgctgcccacgcagatgcaggccatcaaggtcatgacgacgctggacatcctctcgtcgcactcgcccgacgaggagtacatgggggagttcgcggactcgtcgtggctggcggagccatggtgaaggcggcgttcgagaagttcggcggcaggatgaaggagatcgaggg

SEQ ID NO: 3759 - DNA, 260 bp, Zea mays
cggctcgagcggctcgaggatttgcaccctctgatcattgagagatctgagggttcctatgtctatgacattaatgggaacaagtatctggactctcttgcaggattatggtgcacagctttaggtggtagcgagcctcgattagtcaaagcagctactgagcaattaaacaaactacccttctaccattccttctggaaccgtacaacaaaaccttcgttggatcttgcacaggagatccttagcatgttcactgcaag

SEQ ID NO: 3760 - DNA, 259 bp, Zea mays
ggatggtctgctcctaattactgctacaggtgtggcaatattgctgcaatcctagagctggatgagaacctgaataagcagttccgcgtatttgaagctgctccacatgaatcaagaggtgttcctgctaagaggccagcaccagattactttctgtgatgctacacagcgaacgcttgagcttactgtgctttcaagcgctggacctcatgttgcaagaagactcaggccctacagctttccagccaggaggtggttt

SEQ ID NO: 3761 - DNA, 255 bp, Zea mays
gtgcttccagactctgcagcgcttcacggccgccacgctggagcacggcatgcacccgccggtctctcccaagcccgagtggcgcaagctcatggacgagatggcggtcgtggccacggaggagtaccgctccgtcgtcgtcaaggagccgcgcttcgtcgagtacttcagatcggctacaccggagaccgagtacgggaggatgaacatcggcagccggccagccaagaggaggcccggcggcggcatcacgac

SEQ ID NO: 3762 - DNA, 257 bp, Zea mays
ccaccaaccaattcgcttctccgtcaacttcacttcctcgtcgacgcctccgtcccaccaaccatgccggcggccatggcggctgcggcggcgcagaggctcctcgcggcgagcacgaaaatcatcggcgttgggcgcaactacatagcccacgccaaggagctcggcaatccggtccccaaggagcccgtcctgttcctgaagccgacctcgtcgtttctccacgctggtgtggccaccgccgccgtcgagatccc

SEQ ID NO: 3763 - DNA, 256 bp, Zea mays
caaggagtccgcgcccatggcgagcaccaacatggcgtcggccacctcgcggttcatgctggccgcgggcgtgcccaccggcagcagcggcggccgcgtcaacttcgcctcggcgcccaaccggcttggcaggaggctcgtggcccgggccgacaacgaggccgccgcagctgatgcggcggaaggtgagggtgccgtggccaccaagcccaaggccgataagccgccgccgatctgtcccaagaacggcgccaag

SEQ ID NO: 3764 - DNA, 256 bp, Zea mays
ccgattgtcacaaactctcatcacaaagagctagccaagcatgctccttgaccaaaagctagataggcaaccatgtcggaggagaagcaccaccacctattccaccaccacaagaaggacgaggagcagcccaccggccggcgagtactcagagaccgtggccaccgaggcggtgaccaccggcgacggtgagaacgagtacgaggggtacaagaaggagcacaagcacaagcagcacctcggcgaggccggcgct

SEQ ID NO: 3765 - DNA, 252 bp, Zea mays
gctcatagcttctcctgaaatgcagatgtctgcagaaagtacatcagctcaccaaggatggaggaaggttgttgatgcactttgtgatgtcgtttcagcctcaccaaccaaggcatcagctgctatcgttctccaggccgagaaggacttgcagccttggattgctagagatgacgaacaaggtcagaagatgtggagagtcaaccagcgtatagtgaagcttatagctgagcttatgaggaaccatgacag

SEQ ID NO: 3766 - DNA, 249 bp, Zea mays
gggcctctcggacccggaggcaccgggggcttcatcgagcccaagtggctggcctatggcgaggtgatcaacggccgctacgccatgctgggcgcggtgggcgccatcgccccggagatcttcggcaagatgggcatcatccccccggagaccgcgctgccgtggttcaagacgggcgtcatcccgcccgcgggcacctacaactactgggccgactcctacacgctcttcgtcttcaacatggcgctc

SEQ ID NO: 3767 - DNA, 255 bp, Zea mays
gaagatgggcttggaggagtatatcaaggatgtatccactgatgatgcggctgaacaggcttccaatttaaggtctcagataaacattttatggggtatgctcctttatgaacgttcagttgtggaatttaaattaggtctcccaatgtgggaggattgtttgatggctgctattgaaaagttcaaacttcggggagcttctgccacagatattgctgtgctggtgaaaaaccactgtgccaatgaaactgctca

SEQ ID NO: 3768 - DNA, 285 bp, Zea mays
ggcttgatgaggactacaactaaaatgttgatggatctagggctgtctgtttaccaggacgattttgaaaggccatttcttgaggtctctgctagtttctatagtggtgagtcacagcaactcattgagtgctgtgcttgtggtgagtatctgaagcaggctgagaggcgcctctctgaagaatcagagcgtgtgtcacagtacttggatgttaaaaccaatgagaaaattactgctgtcgtggtgaaagagatgctagcaaatcacatgcagaggttgattctt

SEQ ID NO: 3769 - DNA, 281 bp, Zea mays
caacagcgccactgtccagtgcgcgcgtcaagcttgcttagctagccgccatggcctccctcgccgccgtctccgtgaagcccgtggccatcaagggtctcgccggcagctctatctccggaaggaagctcgccgtcgccaggccgtcggcccgctccatccgcagccccgcgcagcgccgtggtggccaagtacggcgacaagagcgtctacttcgacctcgacgacatcggcaacaccaccggacagtgggactctacggctctgacgcggcctcgcct

SEQ ID NO: 3770 - DNA, 285 bp, Zea mays
gtggtacctaggtcatctaaaaagctctatgaagacaacgaatatgctctctacactgtgacactatttgctaaggttgttgacaactttaaggtccgtgctcgcgagaagggttttcagatccgtgatttcgagtacagtcctgaagcacaggaaagccggatgcaggagatggagaagctactgcgagaccaagaagctatgaggaccactcttcttcagtggtgttatgccagctacagcgaggtattcagttcctggatgcacttttgtgctgtgcgtgtc

SEQ ID NO: 3771 - DNA, 277 bp, Zea mays
gaagacgagtgtcaagtgaacctgaaacttgcggtgtcactggctggtagcctgagtgtgagtgagtgatcgagctagctgagctccgatcctcgctagctaggataccgccataccacaagtcttcttcacaagtttaggagtgacagcaacaagagatcgatggcctctgccaccgtgctcaagtcctccttccttcccaagaagtccgaatggggcgccaccaggcaggccgccgcgcccaggccgcccaccgtctccatggtcgtccgcgcct

SEQ ID NO: 3772 - DNA, 170 bp, Zea mays
gtcatgaatccaccaaaggttggggacgaatcatatgcttcctacaaggcagagaaagatggaatccttcagtctttagctcgccgtgcaaaggcactggaagatgcattcaacacgcttgagggattttcatgtaacaaggctgaaggagcaatgtactttttccctca

SEQ ID NO: 3773 - DNA, 285 bp, Zea mays
catggcgtcgtccatgctctccgctaccaccgtgccactccagcaggggggcggcctgtccgagttctccgggctcaggagctccgcgtcgctgcccatgcgccggaatgccacctccgacgacttcatgtccgccgtctccttcaggacccacgcggtcggcacgagcggcgggtcgcggcgggcgccgacggaggcgaactagaaggtggccatcaacgggttcggccgcatcgggcgcaacttcctgcggtgctggcacgggcgcggcgaccctcgcccctc

SEQ ID NO: 3774 - DNA, 289 bp, Zea mays
agaacatctatgttgacaacaagaaatttaactctttcaagaagattgcaagatccatgggatacggcgaggatgatctccctctagtatcatttcagtctgtctccaaaggatactatggagagtgtggtaaaagaggaggttacatggagattactggcttcagtgctccggtaagagagcagatctacaaggtagcttcagtgaacctgtgctccaatatcactggtcaaatccttgcgagcctcgtcatgaatccaccaaatgttggggacgaatcatatgcttc

SEQ ID NO: 3775 - DNA, 282 bp, Zea mays
aggcagtgaacgtgccgtcgtctctcttcggcgaggcccgcgtgacgatgcgcaagacggcggcgaaggcaaagccggcggcgagctccggcagcccgtggtacggccccgaccgcgtgctctacctgggcccgctgtccggcgcgcccccgagctacctgacgggcgagttcccgggcgactacggctgggacaccgcggggctgtcggcggacccggagacgttcgccaagaaccgggagctggaggtcatccactcccgctgggccatgctgggcgcgt

SEQ ID NO: 3776 - DNA, 280 bp, Zea mays
tctccatctcgaccgtcgctcaccgggaagctacgctacgacgaagcatggcgtccgtcaccgcccgctccccggtcgcagccctgcgcccgtcgtcgtcgtcggccttccttggccactctagccgcctcggccgcactgctaccgcgtcgccgacgaggcgcagcctaaaggcggaggccaagggcgagtggctcccgggccttccctcccccgcctacctcgacggcagcctgccgggtgacaatggcttcgacccgttgggcctggcggaggaccc

SEQ ID NO: 3777 - DNA, 277 bp, Zea mays
gatttattggcactggatacaatatcaggagctggaccggctgaagcagacatatttcctgaggtggatagcacttggaagacatttcatgagatacagaagcttttgagcaaaaccaacgggaaggttattgctgatgttatgaccccagcgcctctcgtggtgcgtgaaacaactaaccttgaagatgctgcaaggttactccttgtgactaagtaccgcagcttccagtggtcgatagctcaggcaaactggttgggatcattacaagagggaa

SEQ ID NO: 3778 - DNA, 281 bp, Zea mays
aaagcttcttccaggatgcactacaatagacgaggttcgagagcgtattttgaaaagatgtaaagaagtggagaagacggccatagaacaagcaacagacaacgcgatccttgaccagctcgggaagttggtcgaggtcgacgtccctcgtgccttgtttcaagagcaagggcagcagctttatggagccaagcttctgcagcttcaggcggaaaggaagctggataaagaccagctagcttcgttatcaaccaagaggtcagtgcaggcgtacctagaag

SEQ ID NO: 3779 - DNA, 193 bp, Zea mays
ctgtgacattattgacacttggatcggtctttactactttcattggtgaaagaatatctgatctgaaacttggaaatggaacatcacttcttatatttacaagtataatatcatatttgcctgcatcatttgggaggacagttgcgcaggcatttcaagatgggaattatgttggacttctcacaatcatatt

SEQ ID NO: 3780 - DNA, 277 bp, Zea mays
gggaaaagccactatacaagatcttgatttacggtgtgaagagctaatcaaagaagagtttggcgcagattgcaattttgatgttcatgatgctataaagaagttagagaagcttagcattgttcatcgggattcgattggaaggatcttatgcgttccgttgaagcgtgcgaatgagatcattggtacgacgaccgaagaactggtgatgcgagcacaacagaaccttgcttcctgattccatttccagtcacgatggattgctgtaccttccctg

SEQ ID NO: 3781 - DNA, 276 bp, Zea mays
ctactactactactactagctggtacacatactagccatcctgccagccagccagcttgccatggcgcccaccgtgatgatggcctcgtcggcaaccgccgtcgccccgttccagggtctcaagtccgccgccagcctccccgtcgcccgccgcagcaccaggagcctcggcaacgtcagcaacggcggaaggatccggtgcatgcaggtgtggccggcctacggcaacaagaagttcgagacgctgtcgtacctgccgccgctgtcgacggacga

SEQ ID NO: 3782 - DNA, 273 bp, Zea mays
cgcatactgcatacacaacgcagagcatcagaagcagctgcgatctgatcgacatggctgccgccaccatggctatcacctcccgcgcgctcgtcggcaagccggcggctggcacgagggacgtcttcggcgagggccgcatcaccatgcgcaagaccgccgccaagcccaagccggcggcgtccggcagcccatggtacggtgccgaccgcgtcctgtacctgggcccgctgtccggctcgcccccgagctacctgaccggcgagttccccg

SEQ ID NO: 3783 - DNA, 273 bp, Zea mays
gaacgccaagaaaactgtgtttattattggtgctacaaacaggcctgacatcattgatcctgctcttctgaggccagggcgtcttgaccagctgatctacattccactgcctgatgagcagtctaggctccagatcttcaaggcctgcctaaggaagtcccctgtggcaaaggatgtggacctgaatgctcttgctaagtacacacaagggttcagtggagcagatatcacagaaatttgccagcgtgcgtgcaaatatgcaatcagagagaa

SEQ ID NO: 3784 - DNA, 276 bp, Zea mays
atctccatctcgaccgtcgctcaccgggaagctacgctacgacgaagcatggcgtccgtcaccgcccgctccccggtcgcagccctgcgcccgtcgtcgtcgtcggccttccttggccactctagccgcctcggccgcactgctaccgcgtcgccgacgaggcgcagcttaaaggcggaggccaagggcgagtggctcccgggccttccctcccccgcctacctcgacggcagcctgccgggtgacaatggcttcgacccgttgggcctggcggag

SEQ ID NO: 3785 - DNA, 275 bp, Zea mays
ctcatctacgtggagagccatctaagcaacctttcaaccaagttctacggagaggtgacacaacaaatgctaaagcatgcagacttcccaggtagcaacaacgggacacgtctcttccagaccatcattggactgaagattagagacctctatgaacagattgttgctgagagggctggtgtaccagcggaagcagcaaaagtttaacgatctatgcattcagatgtcctaaaactacagctctccgaactcaatgggagtcacaccttcgatct

SEQ ID NO: 3786 - DNA, 277 bp, Zea mays
ggctttgccaacatgcgggctaggaattacagcattcctgaagttgacaaattgaaggcaaagttcatagctggaagaatcatcccagccatcgccacctcaactgcaatggccaccggccttgtctgcctggagctttacaaagtccttgctggtgggcacaaggttgaagactaccggaacacatttgcgaacctggcgatccccctcttctccatggcggagctgtgccacccaagaccatcaagcaccaagacatgtcctggaccgtgtggga

SEQ ID NO: 3787 - DNA, 278 bp, Zea mays
gttctagatcgccggcggccgctcgcgatctagatcaagtgactcttatccgccaagttgctgagaaagtgttcgccaatgtgggcaagactatcgggtacaaagttggaacaatgattgagatccccagggcagccctggtggctgatgagatagcggacaggctgaattcttctccttcggaacgaacgacctgacgcagatgacctttgggtacagcagggatgatgtgggaaagttcattcccgtctatcttgctcagggcatcctccaacatg

SEQ ID NO: 3788 - DNA, 276 bp, Zea mays
gacaataccagtttggattggtctatacagagctctctcaaatgtagctaatgagggacttctgactgaaggctttttttggataccttctctggctggtcctacaacaattgctgctcgacaaaacggccaggggatatcatggctttttccttttactgatggccatccacctcttggctggtcagatactttggcatacattgtgttaccagttcttcttgtcatttcacagtacatatctactcaagtaatgcagccaccacagagcaatga

SEQ ID NO: 3789 - DNA, 268 bp, Zea mays
gcgagtggcttcaagagggcttttaaaattaaggattttggtgacagcatacctgggcatggtggaattactgacagaatggattgtcaaatggttatggcagtgtttgcatacatataccaccaatcattcattgcacctcagaacttctctgttgagataatcttggatcagattataagaaacctaacctatgaggagcaaaaatatgtatatgaacaacttggggaaatgttccgtgagaggcaattggctcattggctgaaac

SEQ ID NO: 3790 - DNA, 279 bp, Zea mays
gtatatctctgatggtgatagcaatggtgttatctactatgctggaacatcatttggaaaacatcagtggatgaatcctgtgttaaccaagaatatcactgtggtggcaagcagtccaaattcaaggcacacagatccaaaggctttggtttcaaagaattaccaggggacatgttttgctgggccttgtgttgaaaatggcaagagggtttcttggtggatggtagacatcggacaggagcaccagttgatgtgcaactactacacggtgaggcagga

SEQ ID NO: 3791 - DNA, 268 bp, Zea mays
cgcagatggcgacgccgtcgtcgtcgctttgctccagcttcgcctccctgcggaccgcctccatcggccacccccgtggcatcgcctcctccacgcccaggaaggcattccatgtgagggcatcagctcgggttgacaagttctcaaagagtgacatcatcgtgtccccttcgattctgtctgcaaactttgcgaacttcggtgatcaggtaaaagctgtggaggtggcaggatgcgactggattcatgtcgatgtcatggatgggcg

SEQ ID NO: 3792 - DNA, 255 bp, Zea mays
ccggacgctagctgaccaccaacctcagcacatcgaggagaggaggagtgggggtggcttcgtcggttgccgccgcggcgaacacattcctgggcacccgcctggcggacccggcgccgcagaacgggcgcatcgtggcccggtttgggttcggcggcggaaagcccaaggctgccgtcccgaagaaggtggcgaagacgtcgatctcctctgaccggccgctgtggttccccggcgccgtggcgccggactagc

SEQ ID NO: 3793 - DNA, 267 bp, Zea mays
  unsure (1)..(267): unsure at all n locations
acgatattgccttgagggtagcggctactttgatgtgagggaccaagatgatcagtggatccgtgtagcggtaaagaaagggggcatgatcgttttgcctgcaggaatgtatcatcgctttacgttggatagtgacaactacatcaaggcaatgcgtctatttgtgggtgagctgtctgganccatacaatcgtccgcatgaccatctcccggctaggaaggagtacgtcgagaaaatcatcaaccgaggtggaaccaagccgtcga

SEQ ID NO: 3794 - DNA, 275 bp, Zea mays
gatgtgcatgactggtctggacaagaagaaagcttctgtctttttcaagactaatgctgatgggaacacagcatgtgccaaggaaatgacaaagctctctggcatctctgaaatcatccccgagatggagatctgcgattttgactttgaaccctgtggctactccatgaatgcgatccatggctctgcattctctacaatccatgtgacgcccgaggacggtttcagctatgccagttacgaggttatgggcttggatgccactgctctatctt

SEQ ID NO: 3795 - DNA, 268 bp, Zea mays
atccagttgagataacaccattggcaaaaccacatcggagtcatgttggccttactgagcgattcgaacttttcatttgtggtcgtgagattggcaatgcgttttctgagctcacagacccaattgatcagagaagccgttttgaaaatcaaataaaacagcacaatgctaagcgtgctgcaatggctaaggaggtcaaatctaccgagggtgaaggcgacgacgattactcgtatgaagtttctttagacgaggacttcttgacttc

SEQ ID NO: 3796 - DNA, 263 bp, Zea mays
gcaaggagtatgtctttgttgcaaactcagacaacttgggtgctatagtcgacatcaagatcctaaaccatctgatcaataaccagaacgagtactgcatggaggttactccaaagacgctggctgacgttaagggtggcactctcatctcttacgaaggaagagttcagcttttggagattgcccaagtacccgatgagcatgtgaatgaatttaaatcaatcgagaagtttaagatattcaacactaacaacttgtgggtg

SEQ ID NO: 3797 - DNA, 265 bp, Zea mays
cacccagcagccagcaccgatcgagtcatccttaattaccgtatgtgctcttcctgctcttattagctgctacttatttctttgcagctttgctcttattagttacgaacatgccagtgaagaagtaaaccctgggcctgtttggttcagcttttttctgaccagtttttctgaagatctggctatgcggagaatctggctgtgggaaaaatctgagtatcattacgattacgtgtggaggaaaataaatttgttcatagggctc

SEQ ID NO: 3798 - DNA, 264 bp, Zea mays
ctgaagagtattttacaagtaagtcaatgtttgacgtgagggaactgaaggaaaatcacccagaatttgctttgttgttagaaacaagtggagaagaatctgtacagttttcaaatctaagttacaccaaggttcctgtgcacgatcttgatgtgggttctcatatcttggttagagctggcgaggctgtgcctgttgatggtgaagtctaccaaggttcatcaactgtcacaattgagcacctaactggtgaaacaaaacctt

SEQ ID NO: 3799 - DNA, 266 bp, Zea mays
gccgagctcatcggcgagatcgccaagtcgtccgagctgcagccgcacgtcgtcaacttcctcaacgtcgtcgtcgacaacttccgcgcgtccatcgtgccgcagatcgtcgtcgagttcgagaacgtctacaactcgctcaccggcaccgaggtcgccaccgtcacctccgtcgtgcagctcgagtcgcaggacctcgcgcagatcgcgcagacgtccagaagatgaccggcgccaagaacgtccgcctcaagacgcagctcgac

SEQ ID NO: 3800 - DNA, 269 bp, Zea mays
ccccctcgccgccggcgccttcgccctgtacgagacgcacgaggcgaagaaggacccggagcacgcgcacggcacaagatcgaggagggcgtggcggcggtggctgccctgggcagcggcggcttcgcgttccacgagcaccacgacaagaaggaggccaaagacgcggcggaggacgccgcggaggaggaggagtccggccgccgcggcgaggggaagctgaagcaccacttcttcggctgatcgggctgctgctcgatcgatctact

SEQ ID NO: 3801 - DNA, 283 bp, Zea mays
gtgatattccgtggaaaagacggaaggcctgggtgtgttcagaacacatgtgctcacagggcttgcccgctgcatcttggttcagtgaacgagggtaggatccagtgcccttaccatggttgggagtactctactgatgggaaatgtgaaaaaatgccatcaacaaagatgctcaacgtgcgcatccagtcattgccatgctttgagcaggaaggaatggtctggatttggcctggggatgaccaccaaaggctacaatcccttctcttctgcctccttcagg

SEQ ID NO: 3802 - DNA, 130 bp, Zea mays
caaggagagtacgtggaggagcagccatggcttcatcggtggccgccgcggcaagcacattcctgagtcaccgcctatcggactctgcggcacagaacgggcacatcgtggcacgtttcgggttcgggtt

SEQ ID NO: 3803 - DNA, 105 bp, Zea mays
ctggaactggtattgcagaacttattgctcttgagatttcgaaacagacgaatgctccaattgaagagtgccgcaagaaggtttggctggtggactcaaagggtt

SEQ ID NO: 3804 - DNA, 242 bp, Zea mays
gtctagagctagcttttgctttgctcaccagacgaacagcagcagatggcgtcgacgatcatggccgccacctcccgcatcgtcgcggcaaagacgccgtttcttggccagggtcgcgccgccgccaatgccagcgccctccgcgacgtcgccgccgccgctgctgtctgccggatcaccatgtgcaacgacctgtggtagggcccggaccggatcaagtacctgggctccttctgcggcga

SEQ ID NO: 3805 - DNA, 282 bp, Zea mays
ctagtcagctacctccatccaccagaccagaccagaccaatggccctgcgcctaccaatctcatcgtcccacgggctggcctccacgccggcgccaatctccacgacgacgtgccggccggccgtcttggcgacggccgcggcccagaagaggagcctgctgctggcgacggcctccgagacgaggggagtcgcgccggtgaggtccagcgggatcgagacgagcacggtgggtctgggatgtgaggccgtcaccgggcaggtcacggaggtcaacaaggac

SEQ ID NO: 3806 - DNA, 284 bp, Zea mays
aaatggtggaaggttcgacgcttagctgcttcgctggtacgcatgactacatggctcctgagcttgcgtattctctaaacgcgactgagaagagcgatgtttacaacttcggtgtcgtactgctagagttgcttacaggacatagcccaactgatcaacaatttggcggtgaaaaagacattgtgtcctgggtttcattccatttggcagagaaagaccctgctgctgttcttgacccgaaagtaagcaatgatgcatcggatcacaatcacatgatgaaggcg

SEQ ID NO: 3807 - DNA, 277 bp, Zea mays
acgggcttcaccgtccttaacgcgaccaccgacgctgcagtgacgggatgcagcaacaaagttccttacgaccctaacctgattaccggcatccaaggcctgaatcagtactggagcaacatcaggtgccccagcaacaacgggcagagcagctggaagaacgcctggaagaaggccggcgcctgctccggcctcagcgagaaagactacttcgagactgccctctccttccgtagccggatcaacccactcgttcgcctcaaagccaaaggtatcg

SEQ ID NO: 3808 - DNA, 86 bp, Zea mays
cccacactcttatctcacgtgggattcaccaagcgtggagacaccccataactacagctcttgcacaacccggcctgccggccccg

SEQ ID NO: 3809 - DNA, 102 bp, Zea mays
gttcaaaggtgtcatccaagatcggggttattgagtccctgttggagaagtgtgatatccttctcttgggtggtggtatgatcttcacgttttacaaggcac

SEQ ID NO: 3810 - DNA, 279 bp, Zea mays
tcttcagagcctgcaagaccgtgaagtacgcttattcaatccggaactggctgtggacagcattcacctacactgccatggtggactacccgaccccagccaacttcctggagaacctgcctgcctacccagtcaaggagatgtgcaagaccatcgacgcgttccccgcgggcgcagacgtcctggagaaggcgttcgcggcggcgagcctgtactacaactacacgggagaccagacctgcaacaagatagaggacggagacgacccgcacggcctcg

SEQ ID NO: 3811 - DNA, 274 bp, Zea mays
atggcgtcgtccatgctctccgctaccaccgtgccagtccagcaggagggcggcctgtccgagttctccgggctcaggagctccgcgtcgctgcccatgcgaccggagatgccacgtccggcgacttcatgtccgccgtctcgttcaggacccacgcagtcggcacgagcggcgggtcgcgtcgggcggcgacggaggcgaactggaaggtggccatcaacgggttcggccgcatcgggcgcgacttcctgcgggtactggcacggacgcggcg

SEQ ID NO: 3812 - DNA, 270 bp, Zea mays
cggctcgaggggcggtgaccccgagaagttcaaggagctcgcacaagcctatgaggttttgagtgatccagagaaacgtgagatttatgatcagtatggtgaagatgcccttaaggaaggaatgggcggtggaggatcccatgttgatccatttgacatcttctcatcattttttggaccctcttttggaggaggtggtggaagcagcaggggaagaaggcaaaggaggggagaagatgtagttcacccacttaaagtttctctggaaga

SEQ ID NO: 3813 - DNA, 183 bp, Zea mays
ggcgagttcgcgggcaactactgctgtgataccactgtgctatctgcgtacccggagactttcgccaagaaacgggagctggagatcatccagtcccgctgggccatgatgtacgcgttgagctgcgtgttgccggagctgctcacacgcaacggcgtcaaattctggctaggcatgtggttc

SEQ ID NO: 3814 - DNA, 268 bp, Zea mays
tccacgcgcagagcatccttgccatctgggcctgccaggtcgtgctcatgggcgccgtcgagggctaccgcatcgccggcggcccgctcggcgaggtcgtcgacccgctctaccccggcggcagcttcgacccgctcggcctcgccgacgaccccgaggccttcgccgagctcaaggtcaaggagctcaagaacggccgcctcgccatgttctccatgttcggattcttcgtccaggccatcgtcaccgggaagggcccgctcgagaa

SEQ ID NO: 3815 - DNA, 274 bp, Zea mays
ctctggcggtggcgcctcagggcctgcagcccctcggccgccgcgcctcctccttcgccgtcgtctgctccaagaagaagatcaagaccgacaacccctacgggattgggggtggcctgaacgtcgacgtcgacgccaacgggagaaagggcaagggcaagggcgtgtaccagttcgtcgacaagtacggcgcgaacgtcgacggatacagcccaatctacaacgaggatgactggtctcccaccggcgacgtctacgtcggtggaaccactgg

SEQ ID NO: 3816 - DNA, 274 bp, Zea mays
ccgagctgcgtgcgtcgtcagataaggcagccgccggcacggcaatgccggttccgcttgctccgtacccagctcctccggcgccattcacgccgcccagtggggcccagagccagctcgtctgcaccgggtgccggaacctcctcatgtacccagctggtgcgacgtcggtctgctgcgccgtctgcagcaccgtcaccgccgtgccggctccaggaactgagatggcgcactagtgtgcggaggatgccacaccctcctcatgtacatacgc

SEQ ID NO: 3817 - DNA, 140 bp, Zea mays
caattacgtacgtagtgcaacgactgtcgattcgttgggtgaggaacatatatgtgaatgcaagctccggctaccatacatgtgtaatgtgtaatagatatatatacaaaactgccgaggcgccgacaatactttaaaaa

SEQ ID NO: 3818 - DNA, 271 bp, Zea mays
atcccaccctgccacccaaccttgcttcttctccgatagctatttctctgctttctctccaatcttcccgggtttccctgattaaagatggctgaatcctttgttctcagtaccggctcgaggatcccatcggttgggcttggcgtatggcaaatacaacctgacgctgccaacgacgccatctacgctgctgtcaaggctgggtatcggcatattgactgtgcagcagcatacaacaatgaggaggaggtgggcctggctttgaagaaat

SEQ ID NO: 3819 - DNA, 281 bp, Zea mays
atcctgctgaagccgtccatggtgacgcccggcgcggaggccaaggacagggccaccccggagcaggtggccgcgtacaccctcaagctcctccaccgccggatccccccctccgtgcccgggatcatgttcctctccggcgggcagtcggaggtggaggcgacgcagaacctcaacgccatgaaccaggggcccaacccgtggcacgtgtccttctcctacgcgcgggcgctgcagaacacctgcctcaagacctggggcggccagccggacaaggtcaa

SEQ ID NO: 3820 - DNA, 271 bp, Zea mays
gccatcctgaaggtggttttcgagtacgccaaggacaggcctatacttttctccagttttcagcccgacgctgcgcagctcatgcgcaaattgcaaggcacataccctgtctacttcttgacgaacggagggacggagctatacgccgacgtgaggaggaactcgctggaggaggccgtcaagctgtgccttgccggtggcctgcacggaatagtttcagaagcccgcgggatcttcaggcaccctgccgccgtgccaaagatcaaggaag

SEQ ID NO: 3821 - DNA, 265 bp, Zea mays
agcggacaggctgaattcttctccttcggaacgaacgacctgacgcagatgacctttgggtacagcagggatgatgtgggaaagttcattcccgtctatcttgctcagggcatcctccaacatgaccccttcgaggtcctggaccagaggggagtgggcgagctggtgaagtttgctacagagaggggccgcaaagctaggcctaacttgaaggtgggcatttgtggagaacacggtggagagccttcgtctgtggccttcttcg

SEQ ID NO: 3822 - DNA, 271 bp, Zea mays
gtgaataccgatcgtccgggcatattctaccaaaaggacagggccaagtgggatgcctggaaggctgttgaaggcaaatcgaaggatgaggcgatgaatgactacatcaccaaggtgaagcagctccaggaggaggctgccgcctcttaaaagtctcttaatagtgttgccaaacagctatttgtcagatgagctttgtgccatttcctcattagaagtatatcattcgatccattggggatctgtgaaccatgtacctgtttatgtaact

SEQ ID NO: 3823 - DNA, 267 bp, Zea mays
cggctcgagcgaagacatcgacctcctctgaccggccgctgtggttccccggcgccgtggcgccgactacctggacggctcgctggtcggcgactacgggttcgacccgttcggtctcgggaagcccgtggagtacctgcagttcgagttggactcgctggaccagaacctggccaagaatgaggccggcggcatcatcggcacccggttcgagtcctccgaagtcaagtccaccccgttgcagccctacagcgaggtgttcggcct

SEQ ID NO: 3824 - DNA, 179 bp, Zea mays
cggccaccccggagcaggtggccgcgtacaccctcaagctcctccaccgccggatccccccctccgtgcccgggatcatgttcctctccggcgggcagtctgaggtggaggcgacgcagaacctcaacgccatgaaccaggggcccaacccgtggcacgtgtccttctcctacgcgcgg

SEQ ID NO: 3825 - DNA, 262 bp, Zea mays
gacaaggtggagctgctctactccaagttcgtgtcgctggtgcgctccgaccccatcatccagacgctgctccccatgtcgcccaagggcgagatctgcgacgtcaacggcgtctgcgtggacgccacggaggacgagctcttccgcctcaccaccaaggaggggaagctcaccgtggagcgcgagaaggtgaagatcgagacgcatgccttctcccccgtggtgcagttcgagcaggaccccgtgcagatcctggacgcgc

SEQ ID NO: 3826 - DNA, 265 bp, Zea mays
cgacgagatccagagcaaaacgtacatggaggtgaagggcacgggcacggcgaaccagtgcccgaccatcgacggcggcgtggagtcgttcccgttcaaggccggcaagtaccagatgaagaagctgtgcctggagccgacgtccttcaccgtcaaggcggagggcatcgccaagaacgccgcgcccgagttccagaggaccaagctcatgacccgcctcacgtacacgctggacgagatcgagggcccgctcgaggtcggctcc

SEQ ID NO: 3827 - DNA, 264 bp, Zea mays
gaagaacgaggacgtggagtcgctcaagaagctcatcgacgagactacgttttacgataggcagtggcaggctacctggcaagatgaccccaccgaggggccaaagaattagttccgcgttgggggtgccaacgcagaatgctcgcttcttgtggtgtgtcttgcctatttcttcggcccctttttgtttcaccgtttagtcaggcttggaggaactttttgatgatcgtcataatctatctatctacgtgatcttgtgcaaaa

SEQ ID NO: 3828 - DNA, 265 bp, Zea mays
cacagcagcttctcctccagatcgctgggcacaaggatattcttgaaggcgatccattcctgaagcaggggctggtgctgcgcaacccctacatcaccaccctgaacgtgttccaggcctacacgctgaagcggataagggaccccaacttcaaggtgacgccccagccgccgctgtccaaggagttcgccgacgagaacaagcccgccggactggtcaagctgaacccggcgagcgagtacccgcccggcctggaagacacgct

SEQ ID NO: 3829 - DNA, 263 bp, Zea mays
tgcagaacaaaggaatccattacaagagtaccaggtggctcatatccctggtgctttgttctttgatgttgatggaatatccgacagaacatctagtttaccacacatgctgccatctgaaaaggcattttcagctgctgtatctgctcttggcatctacaacaaagacgggatagtagtttatgatggaaaggggctgttcagtgctgctcgtgtttggtggatgttccgtgtatttggacatgataaagtttgggtgttgg

SEQ ID NO: 3830 - DNA, 261 bp, Zea mays
gtgggattatgtgatgaccgacctggtttgggaaatatttgtgcagatcgagcagatttggaaggctgcagggagtgaagtgtgcgattgcaggaaggaacttgtacatgaggttcagctgcagcacaggggatgccatggggatgaacatggtctccaagggtgtgcagaacgtgctggactacctccaggccgacttccctgacatggatgtcatcagcatatcaggtaacttctgttctgacaagaagtcagctgctg

SEQ ID NO: 3831 - DNA, 255 bp, Zea mays
gcctcctccactcgcaccgatggcgaaggaaccaatgcgcgtgctcgtcactggcgccgcaggacaaattggatatgccctggttcccatgattgctaggggtgttatgcttggtgcagaccagcctgttattctgcacatgcttgacattccgccagcagctgaagcccttaatggtgttaagatggagttggttgatgctgcgtttcctcttctgaagggagttgttgctacaactgatgttgtggaagcctg

SEQ ID NO: 3832 - DNA, 253 bp, Zea mays
gtacactcgaccaaccccgtcgatccggctgcggcgcggcgtgctatatcgctaccgaccatggtggtggaggagatcgccgagggggtgtagaacctaaccgtcaccggagatgcggcggcttcaggcggagaggggcataggagtggcggcggcggcacagcaaccgcatccaggtgtccaacaccaaaaaacccctcttcttctacgtcaacctcgccaagaggtatatgcaacagcacggcgatgtaga

SEQ ID NO: 3833 - DNA, 249 bp, Zea mays
ctcaaagtctagagctagcttttgctttgctcaccagataaaccgcggcaggtggcgtcgaggatcgtggccggcacgtcccgcatcgtcgcggccaagacgccgtttcttggccagggtcgcgccgccgccaatgccgaggccctccgcgacgtcgccggcgccgctgctggcggccggatcaccatgggcaacgagctgtggtacggcccggaccgcgtcaagtacctggagcgcttctccggcgag

SEQ ID NO: 3834 - DNA, 250 bp, Zea mays
gaaggagggccagaatgacatctactacatcactggcgagagcaagaaggccgtggagaactcccccttcctcgagaagctgaagaagaagggctatgaagtcctgtacatggtggacgccatcgatgagtatgctattggccagctcaaggagttcgagggcaagaagctcgtctcggccaccaaggagggcctgaagctcgacgagagtgaggatgagaagaagcggaaggaggagctcaaggagaag

SEQ ID NO: 3835 - DNA, 245 bp, Zea mays
gctcgctatccaggtcctcgtccagttcgacaagtccatgacggatgctctggagaaccaagtgaagagcaaggttactgtcaagggtcacctgcacacctacaggttctgtgacaatgtgtggaccttcatcttgacagacgcaagcttcaagaacgaggaggccacggagcaggtgggcaaggtgaagattgtggcatgtgattccaaattgctcggacaataggcctgtgtaccctcgaggt

SEQ ID NO: 3836 - DNA, 250 bp, Zea mays
gccgcaatggcgagcagcaccatggccctctcctgggcggccttcgccggcaaggccgtgaacgtgccgtcgtcgtccgccttcggcgaggcccgcgtgacgatgcgcaagacggcggcgaaggccaagcctgcggcggcgtccgggatcccgtggtacggccccgaccgcgtgctgtacctgggcccactgtccggcgagccaccgagctacctgacgggcgagttcccgggcgactacggctgggaca

SEQ ID NO: 3837 - DNA, 249 bp, Zea mays
acgccgtgagggcgcccgcagaggcgaactggaagggggcgatcaacggcttcggcagcatcggccggaacttcctccggtgctggcacggccgcgaggactcgccgatcgacgtcgtcgtcgtgaacgacagcagaggcgtcaggaacgcgtcccacctcctcaagtacgactcgatgctcggcaccttcaaggccgacgtcaagatcgtggacgacacgaccatcgacatcgacggcaagcccatca

SEQ ID NO: 3838 - DNA, 248 bp, Zea mays
agatgataagattatagcagtctgtgctgatgaccctgaattccgtcactacacggacatcacggacctcccaccgcatcgccttcaagagatccgccgcttttttgaagattataaaaagaacgaaaacaaggaggtcgcagtgaatgagttcctgccagcgaaagatgccatcaacgcaatcaagtactcgatggacctgtatggctcatacgtcatcgaaagcctgaggaagtgatctccagctg

SEQ ID NO: 3839 - DNA, 244 bp, Zea mays
gtggtacggccccgaccgcatgctctacctgggggggctgtccggcgcgcccccgaactacctgacgggcgagttcccgggcgactacggctgggacaccgcagggctgtcggcagacccggagacgttcgccaagaaccgggagctggaggtcatccactcccgctgggccatgctgggcgcgttgggctgcgtgttcccggagctgctcgcccgcaacggcgtcaagttcggcgaggccgtg

SEQ ID NO: 3840 - DNA, 242 bp, Zea mays
ccgccgccgcgcctgcggtggcggtgaggacggcttcggaggaggccgtgtacgaggtggtgctgcggcaggcggcactcgtggaggccgcgacgccacagaggcgccggacgcggcaccgaggtgggcggaggaagaggaggaggagagggtcctcggctggggcctcctcggcgacgcctacgaccgctgcggcgaggtctgcgccgagtacgccaagacttttacctcggcacgcagct

SEQ ID NO: 3841 - DNA, 244 bp, Zea mays
gcgcgaccgccggggaggcggtgaccgaggaggcgcccaaggggttcgtggccccgcagctggaccccagcacgccgtccccgatcttcggcggcagcacgggcgggctgctccgcaaggcgcaggtggaggagttctacgtcatcacgtgggtgtcccccaaggagcaggtgttcgagatgcccaccggcggcgccgccatcatgcgggaggggcccaacctcctgaagctggcgcgcaagga

SEQ ID NO: 3842 - DNA, 244 bp, Zea mays
ggcgaccttcagaaggctcaggagttcctgaggaagaagggcctctcatccgcagacaagaaatcctctcggctagccgccgaaggactggtcggctcctacatccacgacagccgcatcgggtgcatgatcgaggtcaactccgagaccgacttcgtggcccgcaacgacaagttcagggagctggtgaacgacctcgcgatgcaggtggtagcgtgtccgcaggtcgactacgtctcggtgg

SEQ ID NO: 3843 - DNA, 237 bp, Zea mays
gaaggaccccgagacggagatgcgcgagggccacaactacgtgccccgcgacgagcagttctcggaggtgaagcagctcacgttcggggccaccacgctgcgctccggcctgcacgcgctgctgccggcgctccgcccgctgctcatcaacaagaaggatctgcgcttcccgcacttccccgccatcgacgacctcttcagcgacggcatcccgctgccggcgcagaccgggttcga

SEQ ID NO: 3844 - DNA, 234 bp, Zea mays
gttgaactggccctgatgaagcttccgaagtctgaagcactgtcagctaggatgcttctgattggtgctggtaaaatgggaaagctagtgatcaaacatctggttgccaaaggatgcaagaaggttgttgtggtgaaccgctccgtggaaagggtggatgctattcgtgaggagatgaaagatatagagatcgtgtacaggcctctctcagacatgtatcaagctgctgctgaa

SEQ ID NO: 3845 - DNA, 236 bp, Zea mays
gcggcggtttccagggccatctgcgtccagaaaccgggctccaaatgcagcagggacagggaagcgacctccttcgcccgccgaacggtcgcggcgccgaggcccccgcgcgccaaagccgccggcgtcatccgctccgactccggcgcgggacggggccagcagtgctcgccgctgagggccgtcgttgacgccgcgtcgatacagacgaccaaaaagagcaaatggcgcctcag

SEQ ID NO: 3846 - DNA, 232 bp, Zea mays
ccacgtccaagaagcaggccatgcacacgcggctgcgcggcgtggagtggtggatgaagcgcaagaaactgccgcggacttccgcggccgggtgcgccagttcgagcgccacgtctgggccgccacgcgcggcgtcgacgagtgccagatcgtgcgcgacctccccgagggcctccgccgggacatcaagtaccacctctgcctcgacctcgtccgccaggtcccattcttc

SEQ ID NO: 3847 - DNA, 231 bp, Zea mays
ttcgacgccctccacggcgacaagtggcacggcggcgtccgtgacggcaccgacgtcgtgctctggaagtggtgcgagggcgacaaccagcgctggaagatccagccctactactgaaccaacggatgatatgaccatcgcgcccatcgatcgtgcacatgcatgcatacgtactagcagaataacaggggtcttatctcccgaggcgtcttttgcatgcatgccagcagt

SEQ ID NO: 3848 - DNA, 232 bp, Zea mays
caagcacaagcagcacctcggcgaggccggcgccatcgcgccgggccttcgcactctacgagaagcacgaggcgaagaaggacccggagcacgcgcaccgccacaagatcgaggaggaggtcgcggcggcggcggccgtcggctccggcggcttcgccttccacgagcaccacgagaagaagaaggaccacaaggaggccgaggaggccggcggcgagaagaagcaccactt

SEQ ID NO: 3849 - DNA, 232 bp, Zea mays
actactactactactagctggtacacatactagccatcctgccagccagccagcttgccatggcgcccaccgtgatgatggcctcgtcggcaaccgccgtcgccccgttccagggtctcaagtccgccgccagcctccccgtcgcccgccgcagcaccaggagcctcggcaacgtcagcaacggcggaaggatccggtgcatgcaggtgtggccggcctacggcaacaagaa

SEQ ID NO: 3850 - DNA, 231 bp, Zea mays
ggaggagcagccatggcttcatcggtggccgccgcggcgagcacattcctgggcacccgcctggcggacccggcgccacagaacgggcgcatcgtggcccggttcgggttcgggttgggcggcaaggcgaacatgctccgaagaaggtggcgaagacatcgacctcctctgaccggccgctgtggttccccggcgccgtggcgcccgactacctggacggctcgctggtcg

SEQ ID NO: 3851 - DNA, 234 bp, Zea mays
gcgtcaagcttgcttagctagccgccatggcctccctcgccgccgtctccgtgaagcccgtggccatcaagggtctcgccggcagctctatctccggaaggaagctcgccgtcgccaggccgtcggcccgctccatccgcaggccccgcgcagcgccgtggtggccaagtacggcgacaagagcgtctacttcgacctcgacgacatcggcaacaccaccggacagtgggacct

SEQ ID NO: 3852 - DNA, 226 bp, Zea mays
tgcgctgctgctgcctggcttgctcgctcgctcgctcgtgcatcacatcaacaaccaggtcggcacgagcggcgggtcgcggcgggcgccgacggaggcgaactagaaggtggccatcaacgggttcggccgcatcgggcgcaacttcctgcggtgctggcacgggcgcggcgacgctcgcccctcgacgtaatcgccatcaacgacaccggcggtgtcaagcagg

SEQ ID NO: 3853 - DNA, 228 bp, Zea mays
ccaccatcgatctgcaagtctcgctacgtagcagtgcaataaaaaaagcagccgcaatggcgagcagcaccatggccctctcctccacggccttcgccggcaaggccgtgaacgtgccgtcgtcgtccgccttcggcgaggcccgcgtgacgatgcgcaagacggcggcgaaggccaagccagcggcggcgtccgggagcccgtggtacggccccgaccgcgtgctgt

SEQ ID NO: 3854 - DNA, 227 bp, Zea mays
cgtggacccagaccaggttccacctccccgtgtggctgggagtcgacgccgcattcaagttcgccatcgacaaggacgtcaggaacttccaggtcctcaaagagatgtacaacgagtggccattcttcagggtcaccctggacctgctggagatggttttcgccaagggagaccccggcattgccggcttgtatgacgagctgcttgtggcggaagaactcaagccc

SEQ ID NO: 3855 - DNA, 230 bp, Zea mays
cccagatcttcagcgagggcgggcttgactacctcggcaacccgagcctgatccacgcgcagagcatcctggccatctgggcgtgccaggtggtgctcatgggcgccgtcgaggggtaccgcatcgccggtggcccgctcggggaggtggtcgacccgctgtaccccggcggcagcttcgacccgctcgggctcgccgacgacccggaggcgttcgcggagctcaaggtc

SEQ ID NO: 3856 - DNA, 276 bp, Zea mays
gcgacaacatgattgagaggtccaccaaccttgactggtacaaaggcccaaccctgcttgaggctcttgaccagatcaccgagcccaagaggccttcagacaagcccctgcgtctgcccctccaggatgtgtacaagattggtggtattggaactgtaccggttggtcgtgtggagactggtgtcatcaagcctggtatggtagtcacctttggtccaactggcctgactaccgaggtgaagtctgttgagatgcaccacgaggcacttcaggagg

SEQ ID NO: 3857 - DNA, 281 bp, Zea mays
caatgtttaaggtgttgcgcacggacccaccaattccagataacctgtcccctgaagggaaggattttctgagatgctgcttcaagagaaaccctactgagcgaccaacagcaaacaagttgctcgaacacccatttatccaaactttgaaccactacagcccacatagcgttgtacattcattttcgggaattaaatctccagatactgtgcacagcagtgcaagagataaagtaccctggaaaagtgattcatatatgagagggaaacatgcaaatggt

SEQ ID NO: 3858 - DNA, 273 bp, Zea mays
ccgccatctcacaggacaacgggcttgtgccgatcgtggagccggagatcctgctggacggcgagcacggcatcgagcgcacgttcgaggtggcgcagaaggtgtgggccgaaaccttctacgccatggcggagaacaacgtcatgttcgagggcatcctgctgaagccgtccatggtgacgcccggcgcggaggccaaggacagggccaccccggaccaggtggccgcgtacaccctcaagctcctccaccgccggatgcccccctccgtgc

SEQ ID NO: 3859 - DNA, 276 bp, Zea mays
gctcgatctactactactactactagctggtacacatactagccatcctgccagccagccagcttgccatggcgcccaccgtgatgatggcctcgtcggcaaccgccgtcgccccgttccagggtctcaagtccgccgccagcctccccgtcgcccgccgcagcaccaggagcctcggcaacgtcagcaacggcggaaggatccggtgcatgcaggtgtggccggcctacggcaacaagaagttcgagacgctgtcgtacctgccgccgctgtcga

SEQ ID NO: 3860 - DNA, 276 bp, Zea mays
gaagaggctggtctacaccaacgatcagggggaggtcgtcaaaggagtctgctcgaacttcctctgtgacttgaagccaggcgctgaggtgaagatcacagggccagtgggcaaggagatgctcatgcccaaagaccccaacgcaacaatcatcatgctcgcaacgggtaccggcatcgctccgttccgctccttcttgtggaagatgttcttcgaggagcacgaggactacaagtacaccgggctggcgtggctgttcctgggcgtcccgaccag

SEQ ID NO: 3861 - DNA, 274 bp, Zea mays
attcaaccgtggttccatttcacggtcattggttaattatctgttgttcatttcgttttttttttctttaaatataggccacttcttataaatatgtaggagggctaatatgtactttctttactgtgtccttttcaggatcctaggactgagaataatccttatcttggtttcatctacacctccttccaagagcgggcgaccttcatctcacacgggaacactgctcgtcacgccaaggactttggcgacttaaagcttgcacaaatctgcg

SEQ ID NO: 3862 - DNA, 275 bp, Zea mays
cgtgactatttggaggaacattcgacgactcaggttcctgatttcttgaatgccaaaattgatggaagaccagtgaaagaagtcattaaggataccaagtggttagaggaagagttcaccctcacagttcaaaagcgtggaggtgtgctcatccaaaaatggggcagatcatcagctgcatcgaccgctgtttcgatagtggatgctattagatccctcgtaactcctaccccagaaggtgactggttttctacaggggtttatacgactggaaa

SEQ ID NO: 3863 - DNA, 269 bp, Zea mays
gttcccgatgtcaaccagatcatagtgaaggagaagggcatcttcaccaacgtgacgtccccgacggccaaggccaagctgcggctcctcttcgaggtggcgcccctgggcttcttgatggagaaggccggcgggtacagcagcgacggcaagcagtcggtgctggacagggtgatcaacgagctcgacgagcggacccaggtggcctacgggtccaagaacgagatcatccggttcgaggagaccctctacggctcgtccagtctcgc

SEQ ID NO: 3864 - DNA, 271 bp, Zea mays
accagaccaatggccctgcgcctaccaatctcatcgtcccacgggctggcctccacgccggcgccaatctccacgacgacgtgccggccggccgtcttggcgacggccgcggcccagaagaggagcctgctgctggcgacggcctccgagacgaggggagtcgcgccggtgaggtccagcgggatcgagacgagcacggtgggtctgggatgtgaggccgtcaccgggcaggtcacggaggtcaacaaggacaccttctggcccatcgtcg

SEQ ID NO: 3865 - DNA, 269 bp, Zea mays
ggctggcgtaccatttttctcaatttcaggttctgagtttgtggagatgtttgttggtgttggtgcttccagagtacgtgaccttttcaagaaggccaaggagaacgctccttgcatagtgtttgtcgatgaaattgatgctgttggaaggcaaagaggtacaggtattggtggtggaaatgatgaaagggagcagactctaaatcaactactaactgagatggatggttttgagggcaacaccggaattattgttattgctgccacta

SEQ ID NO: 3866 - DNA, 272 bp, Zea mays
caacatcatcatcatcatcttctcgctagtcgagcgagcccttatagttaattaagctagtcgatcgatccaagagaagaagaagaagcagcagacaggaatggcgtcgctctcgatgacgacgagcgcacgcctccgcgcgcagtggacgcctaggcagaacaagctgttcgagaagccgctggcggtgtacggacaaggacacgcccgaccgctggcacaacatcgcctgcgccgtcggcggcgggaagtccgcggacgacgtcaggcgc

SEQ ID NO: 3867 - DNA, 235 bp, Zea mays
caggaactggggcatcaagtgactcttatccgccaagttgctgagaaagtgttcgccaatgtgggcaagactatcgggtacaaagttggaacaatgattgagatccccagggcagctctggtggctgatgagatagcggacaggctgaattcttctccttcggaacgaacgacctgacgcagatgacctttgggtacagcagggatgatgtgggaaagttcattcccgtctatct

SEQ ID NO: 3868 - DNA, 236 bp, Zea mays
ggcaacgaaggtccacctgttcttcttgtgcatggttttggagctttcctggagcattttcgtgacaatatagacaagattgctgctacgggccaccgagtttgggcaattactcttgttggctttgggaaatcagagaaaccaaatgtcaactattcagaacttttctggtctgaactactgagggattttattgttgaaattgtgagggagcctgttcatcttcttggcaactc

SEQ ID NO: 3869 - DNA, 237 bp, Zea mays
gctagctgaccaccaacctcagcacatcgaggagaggaggagtggccatggcttcgtcggtggccgccgcggcgagcacattcctgggcacccgcctggcggacccggcgccgcagaacgggcgcatcgtggcccggtttgggttcggcggcggaaagcccaaggctgccgtcccgaagaaggtggcgaagacgtcgatctcctctgaccggccgctgtggttccccggcgccgtgg

SEQ ID NO: 3870 - DNA, 236 bp, Zea mays
ggccgtgtggttcaaggccgggtcgcagatcttcagcgagggtgggctggactacctcggcaacccgagcctgatccacgcgcagagcatcctcgccatctgggcctgccaggtcgtgctcatgggcgccatcgaggggtaccgcgtcgccggcggcccgctcggagaggtcgtcgacccgctctaccccggcggcagcatcgacccgctcggcctcgccgacgaccctgaggcct

SEQ ID NO: 3871 - DNA, 233 bp, Zea mays
ggaaagaatacccctgagtgcccaacttcctgggaacatggtttacataaaagctactggggagcagagcgcagagatggttaccgatgagggagcaatctatgttacctctaaccgtggatacaactggaaggctgccgtgcaggagaccgtttcagctactctgaacagaacagtttcaagtggcattagcggtgcaagctactacactgggactttcaacacggtgaaca

SEQ ID NO: 3872 - DNA, 232 bp, Zea mays
gcaaccggtccaacactttcacgctcagcttcagcaatggctgcctccaccatggcgatctcctccacggcgatggccggcacccccatcaaggtgggttccttcggcgagggccgcatcaccatgcgcaagaccgtgggcaagcccaaggtggcggcgtccggcagcccctggtacggccccgaccgcgtcaagtacctcggccccttctccggcgagcccccgagctacc

SEQ ID NO: 3873 - DNA, 233 bp, Zea mays
agcgacgccgccgccgcaagccgtccgccttgcccctcgaaggcttggtcctcctccttgtatcccgacctcccccgcgacagacccgtttccccgctaggctagagttatcgttcctctgcagcgatggcgatcaagcggaccaaggcggagaagaagatcgcgtacgacaagaagctgtgcagcctgctcgatgagtacaccaaggtgctcatcgccctcgccgacaacgt

SEQ ID NO: 3874 - DNA, 233 bp, Zea mays
ctaccagcgactcagcgagcgagagcagcacacacgcagctagctaggagcagcagcagcggcggcggcgatggcggcctccatgatctcctcgtcagctctggcggtggcgcctcagggcctgccgcccctcggccgccgcgcctcctccttcgccgtcgtctgctccaagaagaagatcaagaccgacaagccctacgggattgggggtggcctgaccgtcgacgtcgacg

SEQ ID NO: 3875 - DNA, 231 bp, Zea mays
cacaagcgcactctagcaatggcttctgaggttgtccgccctagcgacgccgagctactaaaggcacaagccgacatatggcggctcagcctctcctacctcacgcccctgtcactgaggtgcgccgtggagcttggcatccctacggcgatctaccgccatggcggggctgcctcagccgctgagctggtcacggcgctgtctctcccctccactaagctgccgttcctc

SEQ ID NO: 3876 - DNA, 230 bp, Zea mays
agtatgatctgtacggaagcgtggcgttccctaagcatcacaatcaggctgacgtcccggagatctatcgcctcgcggccaaaatgaagggcgtcttcatcaaccctgctctcgttgagccgtttggtctcaccctgatcgaggctgcggcacacggactcccgatagtcgctaccaagaatggtggtccggtcgacattacaaatgcattaaacaacggactgctcgtt

SEQ ID NO: 3877 - DNA, 230 bp, Zea mays
gaagaaaggaatctacatccagactacgaccacctcacaccggcggacgacgctatatagatcagaagcagaagatcgacatgcaaaagctggccaaagttgctaacaagtcacacagggaccgtatccaggacttcaaccagtatctggcgaacctcagcgagcactatgacatccctaaagttggccctggctaacaaacatagccaaactgctgtgtacgcacaaac

SEQ ID NO: 3878 - DNA, 228 bp, Zea mays
gaagaagacaaacgccggcacgcgcacgcagacacgatggcgatctgcagcgcgcacactaccacctccctgcgctccccatgcacgaccgtctcgaacgcaggtctgaggcagaagcaagtcatcttcgtcaccagcaacaggaggagcggcggcggcaggaggcacggaggggcaaggagcttccaggtctcgtgctccgtcgacaagccggtggtgattggcctg

SEQ ID NO: 3879 - DNA, 228 bp, Zea mays
gtgcaagcagaagcagcgcaatggcgagcagcaccatggccctctcctccacagccttcgccggcaaggcagtgaacgtgccgtcgtctcacttcggcgaggcccgcgtgacgatgcgcaagacggcggcgaaggcaaagccggcggcgagctccggcagcccgtggtacggccccgaccgcgtgctctacctgggcccgctgtccggcgcgcccccgatctacctga

SEQ ID NO: 3880 - DNA, 228 bp, Zea mays
gcagcgagtacatacatactaggcagccaggcagccatggcgcccaccgtgatgatggcctcgtcggccaccgccgtcgctccgttccaggggctcaagtccaccgccagcctccccgtcgcccgccgctcctccagaagcctcggcaacgtcagcaacggcggaaggatccggtgcatgcaggtgtggccggcctacggcaacaagaagttcgagacgctgtcgtac

SEQ ID NO: 3881 - DNA, 227 bp, Zea mays
tgctctgatagcttgctccaggacgtacgtacgtacgtagatcgatccatcgatcgctagctagctgacgaccatggcgtccctctcctctgccgccatcaccgccccttccttcacggccgcgcccgctcgcgcagtggtcagcaggaggtccttcaccgtgcgtgcctctctccgcaaggccactgccaccgccgccgtggccgttgccgccagcgtcctgcttg

SEQ ID NO: 3882 - DNA, 226 bp, Zea mays
gcaaccggtccagcactttcacgctcagctccagcaatggctgcctccaccatggcgatctcctccacggcgatggccggcacccccatcaaggtgggctccttcggcgagggccgcatcaccatgcgcaagaccgtgggcaagcccaaggtggcggcgtccggcagcccctggtacggccccgaccgcgtcaagtacctcggccccttctccggcgagcccccga

SEQ ID NO: 3883 - DNA, 226 bp, Zea mays
acattatccaaacattatctccaagaagcagaatggtttcatcatggttgcactccaagcttcaaagatcaagtgaatgtttctgtcataacggggggcgctcaggtactaagcattggtttgcttgttggcatgggtcatgaggcaaccagagaggcattcgagtgggccatcggtgacactgatgctatatgggcttgtggagaggtgtcacgtttcatggatg

SEQ ID NO: 3884 - DNA, 228 bp, Zea mays
caggtgttcaagatcttctgccgcgccaacgagaactactgcctggccgtccgctacggcgccgtcgtgctggccccggtcaaccccaaggacgaccaccagcactggtacaaggacatgcgcttcatcacccgggtcaaggacgaggaaggcatgccggcgttcgcgctcgtcaacaaggccacggggctcgcaatcaagcactccctcggccagtcccacccggtc

SEQ ID NO: 3885 - DNA, 285 bp, Zea mays
agctcgcagcgacaggcacaggcagcaaggctggtttccttcctcgtcgaacgtctgccgctgctcgcgatggccggacgcggaggaggtagcaagagtagcctgtacgcggcgctgggcgtggccagcgactgctccgacgccgagctgcgcacgccgtaccgcaagctcgccatgaaatggcacccggacaagtgcgccggcgcagggagctccggcggcggcgcggacgccgccaaggccaggttccagaagatccagggagcgtacgccgtcctgtcggac

SEQ ID NO: 3886 - DNA, 281 bp, Zea mays
attccctcaagagagggcgatgctgaacaaggagcgtgcagtcgacatgtacaagctcagtgcatacttcttggccaggacgacgagtgatctaccgcttgaccttttcctccccatcatattcatggtgatcgtatacttcatggcaggcctcaaagcaactgccacacatttctttctcagcatgttgaccgtctttctcagcataattgctgctcagggactcggattggcaattggagctactctgttggacatcaagaaggcgacaactctagctt

SEQ ID NO: 3887 - DNA, 279 bp, Zea mays
gttcggcgaggccgtgtggttcaaggccggctcccagatcttcagcgagggcgggctggactacctcgggaacccgagcctcatccacgcgcagagcatccttgccatctgggcctgccaggtcgtgctcatgggcgccgtcgagggctaccgcatcgccggcggcccgctcggcgaggtcgtcgacccgctctaccccggcggcagcatcgacccgctcggcctcgccgacgaccccgaggccttcggcgagctcaaggtcaaggagctcaagaacgg

SEQ ID NO: 3888 - DNA, 277 bp, Zea mays
gtttcacagttttacgtgcccttatgaatgagtaccgggtcccagagctcaatgtccagaatggtgttctgaagtcactctctttcctctttgagtatattggtgagatgggcaaagattacatatatgccgtcacccccttacttgaagatgctttaatggatagagatctggttcaccggcagactgctgcatctgctgttaagcacatggctctaggtgttgctggcttgggttgtgaggatgctcttgttcatctgcttaactatgtttggcc

SEQ ID NO: 3889 - DNA, 97 bp, Zea mays
ggaacagcgcgctcgggtgcgtgttcccggagctgctcgcccgcaacggcgtcaagttcggcgaggcggtgtggttcaaggcgggctcccaggtctt

SEQ ID NO: 3890 - DNA, 275 bp, Zea mays
tcggcaacggatatctcggctctcgcatcgatgaagaacgtagcaaaatgcgatacctggtgtgaattggagaatcccgcgaaccatcgagtttttgaacgcaagttgcgcccgaagccttctggcggagggcacgtctgcctgggcgtcacgccgaaagacactcccaacacccccccgcagggcgaggaacgtggcgtctagccccccgcgccgcacggcgaggtgggccgaagcaggggctgccggcgaaccgcgccgggcgcagacgtggt

SEQ ID NO: 3891 - DNA, 280 bp, Zea mays
aggtggtcatggatatttggttatgatgaagaaaaaggatggggatgcagttgatgatgatgaggaggaggatggacctcgtgatccaggccctgatgggagaatagaaaagtatatcggtgtgaaagtcaaggtatcatttactggcaagggagaaactcagtctatgaaacaattgtcaggcggacagaagacggtggtcgcactaacactgattttcgctatccaacgatgtgacccagctccattttatctgttcgacgagatcgatgctgctctg

SEQ ID NO: 3892 - DNA, 275 bp, Zea mays
cgctaccagagcatggcgggagcttcgtcgtggtcgtcgtcttcatcctgcgcggcgtcgttcggatcgcccgaccacgacgtcgtctgcatcaccgagccggactctggtggacgccgcagccgtcgccgtcgccgacgccgagggaagcgtcaagttcctgtggagctacggcggcaggatggtggcccgccgcaccgacggcacgctgcgctacgtcggcggcgacagaccgggtcctgtgcgtcgaccgtcgcatccggttttacgtgttg

SEQ ID NO: 3893 - DNA, 274 bp, Zea mays
ggtttgcgactttggactttcacggttaaagcacagtacgtttttgtcatccaaatccactgctggaacacctgagtggatggcacctgaggttctacggaatgaacaatcgaatgaaaagtgcgacgtttacagctttggtgtcatattatgggagctggcaacgcttagaatgccatggagtgggatgaatccaatgcaggttgtgggggcagttggtttccaggatagacggcttgatattcccaaggaagttgatcctctggtagcaagg

SEQ ID NO: 3894 - DNA, 231 bp, Zea mays
gcaaccggtccaacagtttcacggtcagcttcagcaatggctggctccaccatggcgatgtcctccacggcgatggccggcacccccatcaaggtgggttccttcggcgagggccgcatcaccatgcgcaataccgtgggcaagcccaaggtggcggcgtccggcagcccctggtacggccccgaccgcgtcaagtacgctcggccgcttctccggcgagcccccgagcta

SEQ ID NO: 3895 - DNA, 270 bp, Zea mays
ggcgactatggcttcgacccgctgggcctctcggacccggaggcaccgggggcttcatcgagcccaagtggctggcctacggcgaggtgatcaacggccgctacgccatgctgggcgcggtgggcgccatcgccccggagatcttcggcaagatgggcatcatccccccggagaccgcgctgccgtggttcaagacgggcgtcatcccgcccgcgggcacctacaactactgggccgactcctacacgctcttcgtcttcaacatggcgc

SEQ ID NO: 3896 - DNA, 168 bp, Zea mays
agccgccgcatcggcctcccaggtaagcagtagcgtccaccccagccgccgccatgaagcgcaacccccgcgtcacgagctcccgccggaagtgccgcaagcgcacttcacggccccgtcctccgtccgccgcgtgctcatgtccgcggcgctatcgacggagctccg

SEQ ID NO: 3897 - DNA, 143 bp, Zea mays
atagcaaccggtccagcacttgcacgctcagcttcagcaatggctgcctccaccatggcgatgtcctccacggcgatggccggcacccccatcaaggtgggttccttcggcgagggccgcatcaccatgcggcaagaccgtgg

SEQ ID NO: 3898 - DNA, 272 bp, Zea mays
gttgcaccagccttgtaaatcttgaactcctgacaaaaccaccaagcaatagagctgctgataacccatggccccagtggccaagaattttccgtgttgactatgggcatcaagaagctgctaccaagtttggaaaggatccaagaacttatgaagtcttgacaaagcgttttattggcgatgaaaatggcaaggtgaaggctcttgagttagtgcgtgtgaagtgggagacagtagatggaagatttcaactcaaggagatccaaggatca

SEQ ID NO: 3899 - DNA, 269 bp, Zea mays
cagcgactcagcgagcgagagcagcacacacgcagctagctaggagcagcagcagcggcggcggcgatggcggcctccatgatctcctcgtcagctctggcggtggcgcctcagggcctgccgcccctcggccgccgcgcctcctccttcgccgtcgtctgctccaagaagaagatcaagaccgacaagccctacgggattgggggtggcctgaccgtcgacgtcgacgccaacgggagaaagggcaagggcaagggcgtgtaccagtt

SEQ ID NO: 3900 - DNA, 268 bp, Zea mays
cagcgactcagcgagcgagagcagcacacactgcacgcagctagctaggagcagcagcagcggcggcgatggcggcctccatgatctcctcgtcagctctggcggtggcgcctcagggcctgccgcccctcggccgccgcgcctcctccttcgccgtcgtctgctccaagaagaagatcaagaccgacaagccctacgggattgggggtggcctgaccgtcgacgtcgacgccaacgggagaaagggcaagggcaagggcgtgtacca

SEQ ID NO: 3901 - DNA, 267 bp, Zea mays
agccacctggtacagcttgtccatcctcagtttgagaacccgtcggcgtacaaggatcaagtcattgccagtggtctgccagcctcacctggggctgctgtgggccaggttgtgttcactgctgaggatgctgaagcatggcattcccaagggaaagctgctattctggtaagggcggagaccagccctgaggacgttggtggcatgcacgctgctgtggggattcttacagagaggggtggcatgacttcccacgctgctgtgatc

SEQ ID NO: 3902 - DNA, 266 bp, Zea mays
gaggactacaagttcagcggccttgcgtggctgttcttgggagtcccgacgagcgacacctgctgtacaaggaggagctggagaagatgaaggagatggcgccggacaacttccggctggacttcgcggtgagccgggagcagacgaacgcggcgggggagaagatgtacatccagacgcgcatggcggagtacagggaggagctgtgggagctgctgaagaaggacaacacctacgtctacatgtgcgggctcaagggcatggag

SEQ ID NO: 3903 - DNA, 277 bp, Zea mays
agtccgtgctctggaccgagagccgcgacgtcggcaacggcttccgctgcgtccgcatggtcaacaacatctacctcaacttcgacgccttccacggcgacaaggcccacggcggcgtccatgacggtaccgagatcgtgctctggaagtggtgcgagggcgacaaccagcgctggaagatcctcccttggtgaacgaacgaaagaaactactagctggtaccctaataataattctgctggctgcggcgatcccaaaataaaagaggccgggtgcg

SEQ ID NO: 3904 - DNA, 275 bp, Zea mays
gagctttcattcaactggactggcttcatcaatgccatgatatcaaacatctcattcacttacaggagcatttattccaagaaagctatgactgacatggatagcaccaacgtgtatgcttacatctcaataatcgctctaattgtttgcattccacctgcattgatctttgaagggcccaagctaatgcagcatggatttagtgatgccattgcaaaagtaggtttgacaaagtttgtcagtgacctattcttggttggactgttctaccatct

SEQ ID NO: 3905 - DNA, 276 bp, Zea mays
aaccgccggtctcttgctctgatagcttgctccaggacgtacgtacgtacgtagatcgatccatcgatcgctaactagctgacgaccatggcgtccctctcctctgccgccatcaccgccccttccttcacggccgcgcccgctcgcgcagtggtcagcaggaggtccttcaccgtgcgtgcctctctccgcaaggccactgccaccgccgccgtggccgttgccgccagcatcctgcttgccggcgacggcgccatggcccaggaggtgctgctg

SEQ ID NO: 3906 - DNA, 276 bp, Zea mays
cttgcgtccatctttggcacggagaaggaccgcgtgaactgccccttctacttcaagatcggcgcatgccgccacggcgaccggtgctcccgcctgcacaacaagccttccatctccccgacgctgctgctctgcaacatgtaccagcggccggacatgatcaccccgggcgtggacgcgcagggcaaccccatcgacccggagcggatccaggaggacttcgaggacttctacgaggacatcttcgtggagctgagcaagcacggcgagatcgag

SEQ ID NO: 3907 - DNA, 275 bp, Zea mays
cgacacgatcgcgagcgcaacacgtacgttgtcggaagctcaagttagaagaagcaccagtgcctgatcgatggcggcccaggctctcctctccggccggcagctgctgggccgccccgtgcagtcggccgtctctaggtcgtcggcgaggaaggcgcccttcgtcgtcagggccagctccagccctccagccaagcaaggtgccgacaggcagctgtggttcgcgtccaagcagtccctctcctacctcgatggcacgctgcccggcgactatg

SEQ ID NO: 3908 - DNA, 277 bp, Zea mays
cacgcatactgcatacacaacacagagcatcagaaggagctacgatctgatcgacatggctgccgccaccatggctatcacctcccgcgcgctcgtcggcaagccggcggctggcacgagggacgtcttcggcgagggccgcatcaccatgcgcaagaccgccgccaagcccaagccggcggcgtccggcagcccatggtacggtgccgaccgcgtcctgtacctgggcccgctgtccggctcgcccccgagctacctgaccggcgagttccccggc

SEQ ID NO: 3909 - DNA, 276 bp, Zea mays
agcaagaggatgctccatgcggtttaccgtgttggggatctggaccgcacaatcaagtactacacggaatgctttgggatgaaactgctgaggaaaagggatgttcctgatgagaagtacaccaatgccttccttggctttgggccagagaacaccaactttgcagttgaattgacatacaactatggcgttgacaagtatgacattggaacgggctttgggcatttcgcaattgctaatgatgatgtgtacaagttagctgagaatatcaaatcc

SEQ ID NO: 3910 - DNA, 278 bp, Zea mays
ctcctcgccatcacataaaaccagtgcaagcagaagcagcgcaatggcgagcagcaccatggccctctcctccacagccttcgccggcaaggcagtgaacgtgccgtcgtctctcttcggcgaggcccgcgtgacgatgcgcaagacggcggcgaaggcaaagccggcggcgagctccggcagcccgtggtacggccccgaccgcgtgctctacctgggcccgctgtccggcgcgcccccgagctacctgacgggcgagttcccgggcgactacggct

SEQ ID NO: 3911 - DNA, 271 bp, Zea mays
ccatctaccagcgactcagcgagcgagagcagcacacactgcacgcagctagctaggagcagcagcagcggcggcgatggcggcctccatgatctcctcgtcagctctggcggtggcgcctcagggcctgccgcccctcggccgccgcgcctcctccttcgccgtcgtctgctccaagaagaagatcaagaccgacaagccctacgggattgggggtggcctgaccgtcgacgtcgacgccaacgggagaaagggcaagggcaagggcgtg

SEQ ID NO: 3912 - DNA, 270 bp, Zea mays
tttttgacataaaaggccgttgatatttacaccatcgatcacagattcacactaacgaaactgttaccagtagtctctgcaactgcaggtaccgcacctgaaccggtggagccggttcctgtccctgatgacgatgtcccgcccgaagatctccgagatcagggcgctgtacgcgtggcattccttgctcatccggaggttggtcacgaccctcaccggcgccccctccggcgtgctgagcaggccgaacgccatggccagcttctggct

SEQ ID NO: 3913 - DNA, 271 bp, Zea mays
gcaaccggtccaacactttcacgctcagcttcagcaatggctgcctccaccatggcgatctcctccacggcgatggccggcacccccatcaaggtgggttccttcggcgagggccgcatcaccatgcgcaagaccgtgggcaagcccaaggtggcggcgtccggcagcccctggtacggccccgaccgcgtcaagtacctcggccccttctccggcgagcccccgagctacctcaccggcgagttccccggcgactacggctgggacaccg

SEQ ID NO: 3914 - DNA, 270 bp, Zea mays
gcggcaccggatatgactacttcaaggcgtcttgctgacaggaagagtgcaaagttccagaagaacatcacaaagaggggttctgtgcctgagaccacggtgaaaaagagcaatgactaccctgttggacctatagttcttggattcttcatttttgtggtcattggatcatccttgttccagataatcaggacagcgacaagcggtgggctggcctgaattcactgagctaaaaccagaaatttatctgtccgtgagctgggaggcagt

SEQ ID NO: 3915 - DNA, 271 bp, Zea mays
cgggcgttcacgcacgggcccgacgccaccgacgcctggctgtggaagctggccaaggcgcacgtgctgacccacgacacggggtaccaccagctggtgagccactggctgcgcacgcactgctgcgtggagccctacatcatcgccgccaaccggcagctgagccggctgcacccggtgtaccgcctgctgcacccgcacttccgctacaccatggagatcaacgcgctggccagggaggcgctcatcaacgccgacggcatcatcgagg

SEQ ID NO: 3916 - DNA, 268 bp, Zea mays
gtgcaagcagaagcagcgcaatggcgagcagcaccatggccctctcctccacagccttcgccggcaaggcagtgaacgtgccgtcgtctcacttcggcgaggcccgcgtgacgatgcgcaagacggcggcgaaggcaaagccggcggcgagctccggcagcccgtggtacggccccgaccgggtgctctacctgggcccggtgtccggcgcgcccccgagctgctcggccgcaacggcgtcaagttcggcgaagccgtgtggttcaag

SEQ ID NO: 3917 - DNA, 262 bp, Zea mays
tgagtcgatagatgttgctctcccaagggatgataggaggcggatgagcgcagaacaacactgtgttgcaagggatattgttaatttaatcgcatgcgagggtgctgaaagggttgagaggcacgagctgtttggaaaatggaagtcaagatttgcaatggctggatttagaccgtacccactgagttcagttgtgaacaacactatcaacacattgttgcatacctacaacagctactacaggcttgaggagagagatggt

SEQ ID NO: 3918 - DNA, 265 bp, Zea mays
caaaacgtacatggaggtgaagggcacgggcacggcgaaccagtgcccgaccatcgacggcggcgtggagtcgttcccgttcaaggccggcaagtaccagatgaagaagctgtgcctggagccgacgtccttcaccgtcaaggcggagggcatcgccaagaacgccccgcccgagttccagaagaccaagctcatgacccgcctcacgtacacgctggacgagatcgagggcccgctcgaggtcggctccgacggcacgctcaag

SEQ ID NO: 3919 - DNA, 263 bp, Zea mays
ttggcgacttacatcggggcagtttgtcagcgcctgcaagtcttctttggaaagattacaacttgataggctcgggatagggcagctgcattggtctactgctaactatgcacccttgcaggagcgtgccctctgggatggactagttgaaatgtatgaaaagggccttgtaagtgctgtcggtgtcagcaattacgggccgaagcagcttctgaagatccacagctatctagcttctagaggagttcccttgagctcagctc

SEQ ID NO: 3920 - DNA, 250 bp, Zea mays
tattcatataagagctgtcataaaagttggcgtccaattttgtatgttagacagcttgtttgagagtactggaggggactgagagggccaaaatattttagggcttgttcggttattttcaattcatatgtattgggagagattgatatagattggaggagatttgatgtactagaaattgaaacttcctcaatccatatagattggagtaaaactgaatatatctttagggcttgttcggttttaggtg

SEQ ID NO: 3921 - DNA, 265 bp, Zea mays
tattgatgtatgctcgcagtgcaacaactgtaagatgctcatgttgtgacacagtcaatcttgtcagaccagtgagtagcatagctcatgtgaactgtggccagtgccaaacagtgttgatgtatccatacggagcaccgtctgtcaaatgtgctgtttgcaacttcattacaaatgttggcggggtgactcccatgatacctttgccaccaccagcactaactgcatcaagtggaacttcatatatcatcccgtcaatttccgt

SEQ ID NO: 3922 - DNA, 264 bp, Zea mays
cgacgctcatctggatcgaggtgctcgtgatcggctacatcgagttccagcgcaacgccgagctcgacccggagaagaggctgtaccccggcggctcctacttcgacccgctcggcctggcggccgaccctgagaagaaggagcggctgcagctggcggagatcaagcacgcgcgcctcgccatggtcgccttcctcggcttcgccgtgcaggccgccgccaccggcaaggggccgctcaacaactgggccacccacctgagcg

SEQ ID NO: 3923 - DNA, 264 bp, Zea mays
cgtcacggagcggtacccatcttcccggagatacagatcgtcatgcagcccatgggcatggtgacgggcggcgcgcccgtggggtctgactccggcaaggtgccccggctcggcgtgctcccgaagtacgccacggacgagtcggagatgcggtggttcgaggtgccgggcttcaacatgatgcactcgctgaacgcgtgggaggaggccgacggcgaggagctggtgctggtggcccctaacgtcctgtccgtggagcacgcg

SEQ ID NO: 3924 - DNA, 265 bp, Zea mays
ctatagcaaccggtccaacactttcacgctcagcttcagcaatggctgcctccaccatggcgatctcctccacggcgatggccggcacccccatcaaggtgggttccttcggcgagggccgcatcaccatgcgcaagaccgtgggcaagcccaaggtggcggcgtccggcagcccctggtacggccccgaccgcgtcaagtacctcggccccttctccggcgagcccccgagctacctcaccggcgagttccccggcgactacgg

SEQ ID NO: 3925 - DNA, 266 bp, Zea mays
tcctctccccccccacccgtccatcgcccctccctccggtctgcgctcccacagcctcacccctgcgcccccgccgattcgcgtcgccctttgttggaaggaacgatggagcagaccttcatcatgatcaagcccgacggcgtccagcggggcctgatcggggacatcatcagtcgcttcgagaagaaagggttctacctcaaggggatgaagttcatgaacgtggagaggtccttcgcgcagagcactacgctgacctttccgac

SEQ ID NO: 3926 - DNA, 276 bp, Zea mays
gctccaagaagaagatcaagaccgacaagccctacgggattgggggtggcctgaccgtcgacgtcgacgccaacgggagaaagggcaagggcaagggcgtgtaccagttcgtcgacaagtacggcgcgaacgtcgacggatacagcccaatctacaacgaggatgactggtctcccaccggcgacgtctacgtcggtggaaccactgggcttctgatctgggccgtcaccctcgctgggatcctcggcggcggcgccctcctcgtctacaacacca

SEQ ID NO: 3927 - DNA, 276 bp, Zea mays
gtgtggttcaaggccggcgcgcagatcttctcggagggcgggctggactacctgggcaaccccaacctggtgcacgcgcagagcatcctcgccgtgctcggcttccaggtcatcctcatgggcctcgtcgagggcttccgcatcaacggcctcgacggcgtcggcgagggcaacaacctctaccccggcggccagtacttcgacccgctgggcctcgccgacgaccccgtcaccttcgccgagctcaaggtcaaggagatcaagaacggccgcctc

SEQ ID NO: 3928 - DNA, 274 bp, Zea mays
gagaaagagagagaaagtggaggggaaaagcttttgagagcactaaaagggaaaaggcctaatcacggttcggacatgtggataacttcttttcaagcacttctatccaaacacaactcctttgggatattccagtccttcaagtcccttttgattgcctcctcccatgtcaagtttggtcgccctctacctctcttcacattattgtcccgtcttatgatgcctctgtgcaccggtgcctctgagggtctccggtggacatgcctaaaccatc

SEQ ID NO: 3929 - DNA, 277 bp, Zea mays
gcttgatctccctccgccactccatccatctcctcgctcccagtccccgggaagcatggcgtccgtcaccgcccgcgccccggtagcggcccttcgcccgtcgtcggcatcgctcaagtcgtcgtcggccttccttggccactctagccgcctcggccgcaccgcgtctcccacgaggcgcacctcaaggcggaggccaagggcgagtggctccccggccttccctccccctcctacctcgacggcagcctggcgggtgacaatggcttcgacccgt

SEQ ID NO: 3930 - DNA, 273 bp, Zea mays
caaagtctagagctagcttttgctttgctcaccagacaaacagcagcagatggcgtcgacgatcatggccgccacctcccgcatcgtcgcggcaaagacgccgtttcttggccagggtcgcgccgccgccaatgccagccccctccgcgacgtcgccgccgccgctgctggcggccggatcaccatgggcaacgacctgtggtacggcccggaccgcgtcaagtacctgggccccttctccgcccagacgccctcgtacctgaccggcgagtt

SEQ ID NO: 3931 - DNA, 277 bp, Zea mays
gaacaagcccgccggactggtcaagctgaacccggcgagcgagtacccgcccggcctggaagacacgctcatcctcaccatgaagggcatcgccgccggcatgcagaacactggctaggcggcttctcttcactcacctgcagagtgcaccgcaataatcagcttccggatggtggcgttttgtcagttttggatggaaatgccgaactggcagcgtctgttttccctatgcatatgtaatttcctgcctctttatattcactcttgttgtcaagtc

SEQ ID NO: 3932 - DNA, 272 bp, Zea mays
tgcacctattcctattggcaaagtggagtctgcaacctccattgttgaacgtttttgtactggtggaatgtccctaggagccatttcaagggaaacgcatgaagctattgcaattgcaatgaatagaataggtgggaaatctaattcaggagaaggtggtgaggatccaatccgttggaatcccctcactgatgttgtagatggttattctccaacacttcctcatctcaagggtcttcagaatggtgacacagccacaagtgccattaagc

SEQ ID NO: 3933 - DNA, 274 bp, Zea mays
cgcggacgagggcggagagtacggctcctcccgggacgactcggagaagtacaggaaggaggagaaggagcacaagcacaaggagcacctcggcgagatgggcgccctcgccgccggcgccttcgccctgtacgagaggcacgaggcgaagaaggacccggagcacgcgcacggcacaagatcgaggagggcgtggcggcggtggcggccctgggcagcggcggcttcgcgttccacgagcaccacgacaagaaggaggccaaagacgcggcgg

SEQ ID NO: 3934 - DNA, 272 bp, Zea mays
agcctggtccacgcgcagagcatcctggccatctgggcgtgccaggtggtgctcatgggcgccgtcgaggggtaccgcgtcgccggcggcccgctcggagaggtggtcgacccgctgtaccctggcggcagcttcgacccgctcgggctcgccgacgacccggaggcgttcgccgagctcaaggtgaaggagatcaagaacggccgcctcgccatgttctccatgttcggcttcttcgtgcaggctatcgtcaccggcaagggccccctcga

SEQ ID NO: 3935 - DNA, 272 bp, Zea mays
gctgatggaagcatctgcttggatatcctacagaaccagtggagtcctatatatgatgttgctgcaatcttgacttctattcagtccctgctgtgtgatccaaacccgaactcccctgcaaactcagaagccgcaagactgttcagcgagaacaagcgggagtacaaccgcaaagtccgcgagattgtggagcagagctggacagccgactagtgcaggaggaggatgctcatcgtgcccgaaagggccaataaggaaccatgaaaaaccat

SEQ ID NO: 3936 - DNA, 271 bp, Zea mays
gaaggatcttcttgggggagctttgggtgccaaagcttcagaagatttgaggctgaggattatcgaacataatatcttggttgtatccaagtactatgcaagggttaccctcgagaggcttgctgatcttctttgcctgactttgcaggaggcagagaagcatctctcagacatggttaactcgaaatctctagtggcaaagatcgacaggccgatgggagttgtcagcttccggacgacccaagacagcaatggcacactgaactcatgg

SEQ ID NO: 3937 - DNA, 270 bp, Zea mays
agcagctggaggatggccgcactctcgcggactacaacatccagaaggagagcacccttcaccttgttctccgcctcagaggtggtatgcagatctttgtaaagaccctgactggaaaaaccataaccctggaggttgagagctcggacaccatcgacaatgtgaaggcgaagatccaggacaaggagggcatccccccggaccagcagcgtctgatcttcgccggcaaacagctggaggatggccgcaccctagcagactacaacatcc

SEQ ID NO: 3938 - DNA, 268 bp, Zea mays
gatcgagctagctgagctccgatcctcgctagctaggataccgccataccacaagtcttcttcacaagtttaggagtgacagcaacaagagatcgatggcctctgccactgtgctcaagtcctccttccttcccaagaagtccgaatggggcgccaccaggcaggccgccgcgcccaggccgcccaccgtctccatggtcgtccgcgcctccgcctacgccgatgagctcgtgaagaccgcgaaaacgatcgcgtcgccggggcgggg

SEQ ID NO: 3939 - DNA, 265 bp, Zea mays
gggacggccatggcatgcagtgggtgcagctgcgaggcggcggcgggggcgatggcgtcggaggcgtacctggagggggcgccggtgcgggaggcgcgggagctggtggcggactctgtcggcacttctacgcgcagggatgggtcacgggcaccggcggcagcatcaccgtcaaggtcaacgaccccgccgtgccgctcgccgaccgcctcatcgttatgtcaccctccggtgtgcagaaggagaggatggtagcagaggacat

SEQ ID NO: 3940 - DNA, 268 bp, Zea mays
ggctccctatgtagccaaggctaacaagctcaagctcgagtacaacaaggccatcgctgcctacaacaagggcgagagcactgcagctaagaaggctcctgccaaggaggaagaggaggaagatgaagaggagtctgacaagtccaagtcggaggtcaatgacgaggatgatgaagagggtagtgaggaggatgaagatgatgacgagtgatggagctcctcgagacaatggaccgtgcttcatccaacaatggagcggctacacaag

SEQ ID NO: 3941 - DNA, 266 bp, Zea mays
cacaaatccatttctcagatgcattgatattgaacatgtatcaaatatgtgccatagcaagggagcgttgctttgtatcgacagtacttttgcctcccctatcaatcagaaggcactgactttaggcgctgacctagttattcattctgcaacaaagtacattgctggacacaacgatgttattggaggatgcgtcagtggcagagatgagttggtttccaaagtccgtatttatcaccatgtggttggtggtgttctaaacccga

SEQ ID NO: 3942 - DNA, 281 bp, Zea mays
cccaactacccccagcctcggaaggaaccttccagaagcgcaagactctaaggccgtcaccttcccattcttcctcgccgcgggggtcgcctgagatcacataaacaatggtgaaggctgttgctgtgcttggtagcagcgatggtgtcaagggcaccatctttttcacccaagagggagatggccctaccgctgtcaccggaagtgtctctggcctcaagcctggcctccatgggttccatgtacatgcacttggtgacaccaccaatggatgcatgtca

SEQ ID NO: 3943 - DNA, 280 bp, Zea mays
ctcttttgacgacatggttgagatgggcaaagatgctggccatgagctgaaggcaaaggctgggcctggcttctttgatagcttgcaatgaaaagaatgagcgaccatgagcaatttcaattgtcactcttttggttagaaacagagggcccaagtagagtgtggagaggtttgtttttgtttcttctttctcctgctaattctgctagagaagggtgtacctggtgtagtggtgagccgagtcatcaggtcgcgggttcgaagcatccagtctccgtat

SEQ ID NO: 3944 - DNA, 228 bp, Zea mays
gcaacccccaacagcgccactgtccagtgcgcgcgtcaagcttgcttagctagccgccatggcctccctcgccgccgtctccgtgaagcccgtggccatcaagggtctcgccggcagctctatctccggaaggaagctcgccgtcgccaggccgtcggcccgctccatccgcagccccgcgcagcgccgtggtggccagtacggcgacaagagagctactcgacctcg

SEQ ID NO: 3945 - DNA, 65 bp, Zea mays
cgcaccggtccaaccctttcacgctcagcttcagcaatggctgcctccaccatggcgatctcctc

SEQ ID NO: 3946 - DNA, 277 bp, Zea mays
tcgatctgcaagtctcgctacgtagcagtgcaatacaaaaaaagcagccgcaatggcgagcagcaccatggccctctcctccacggccttcgccggcaaggccgtgaacgtgccgtcgtcgtccgccttcggcgaggcccgcgtgacgatgcgcaagacggcggcgaaggccaagcctgcggcggcgtccgggagcccgtggtacggccccgaccgctttctgtacctgggcccactgtccggcgagccaccgggctacctgacgggcgagttcccg

SEQ ID NO: 3947 - DNA, 281 bp, Zea mays
ggcaaaagtgccgtgaagatcgccgtggacatggttaacgagggccttgttgagccccgctcagcgatcaagatggtagagccaggccacctggaccagcttctccatcctcagtttgagaacccgtcggcgtacaaggatcaagtcattgccactggtctgccagcctcacctggggctgctgtgggccaggttgtgttcactgctgaggatgctgaagcatggcattcccaagggaaagctgctattctggtaagggcggagaccagccctgaggacgt

SEQ ID NO: 3948 - DNA, 286 bp, Zea mays
gcagccggcaaggtcgtctccggctccgtggaccagtccgaccagagctacctcgacgacggccagatcgccgccggctgggtgctcacctgcgtggcgtaccccacctccgacgtcgtcatcgagacgcacaaggaggatgaccttatctcctaagcaaattaataaagcaccgccaattatcacgtcgacttgcaagcacaggagagtagaagatgtctcaatactggctgtgcatgtaatttttttgtccgtttcaaactgtattgtaaactattacctctgt

SEQ ID NO: 3949 - DNA, 285 bp, Zea mays
caacctcagcacatcgaggagaggaggagtggccatggcttcgtcggtggccgccgcggcgagcacattcctgggcacccgcctggcggacccggcgccgcagaacgggcgcatcgtggcccggtttgggttcggcggcggaaagcccaaggctgccgtcccgaagaaggtggcgaagacgtcgatctcctctgaccggccgctgtggttccccggcgccgtggcgccgactacctcgacggctcgctggtcggcgactacgggttcgaccgttcgggctcggga

SEQ ID NO: 3950 - DNA, 278 bp, Zea mays
gaagaagacgagtgtcaagtgaacctgaaacttgcggtgtcactggctggtagcctgagtgtgagtgagtgatcgagctagctgagctccgatcctcgctagctaggataccgccataccacaagtcttcttcacaagtttaggagtgacagcaacaagagatcgatggcctctgccaccgtgctcaagtcctccttccttcccaagaagtccgaatggggcgccaccaggcaggccgccgcgcccagggcggtcagggtctccatggtcgtccgcgc

SEQ ID NO: 3951 - DNA, 275 bp, Zea mays
cgatctgcaagtctcgctacgtagcagtgcaatacaaaaaaagcagccgcaatggcgagcagcaccatggccctctcctccacggccttcgccggcaaggccgtgaacgtgccgtcgtcgtccgccttcggcgaggcccgcgtgacgatgcgcaatacggcggcgaaggccaagcctgcggcggcgtccgggagcccgtggtacggccccgaccgcgtgctgtacctgggcccactgtccggcgagccaccgatctacctgacgggcgagttccc

SEQ ID NO: 3952 - DNA, 277 bp, Zea mays
atctctttctcttctcccattccttccttccacccccccgcccagcgccaccatggcctcctccgtcgcggtgtccctccgcgccctcgctgccgccccgctccccaagtccagccccgccacttcctgccccttcttcgtgctccttgcgtcggcgctgctccgacgcctgctccgcctccgctccgcacgccgcctgccgctcgccccgctcgccgcctccgattccgccttcgagtcctccgtcggagttaactacgcgtgagccgacgactcg

SEQ ID NO: 3953 - DNA, 276 bp, Zea mays
gcgtcgccggcggcccgctcggggaggtggtcgacccgctgtaccctggcggcagcttcgacccgctcgggctcgccgacgacccggaggcgttcgccgagctcaaggtgaaggagatcaagaacggccgcctcgccatgttctccatgttcggcttcttcgtgcaggctatcgtcaccggcaagggccccctcgagaacctcgccgaccacatcgccgaccccgtcaacaacaacgcctgggcttacgccaccaacttcgtccccggcaagtgag

SEQ ID NO: 3954 - DNA, 272 bp, Zea mays
agggtcctcttaagcccgccattgctccgccccgtccatcgaccggccggaacgtgttcttggattaactacgatctctatgagcctggggatggatcaacccgtcgtgcgtggtctcgttttgtgatgagtgggagagagagagagagaggatgacaagatcgatcctttgttaatggagatctcgttaattaggagagctaccgctgggacttggtggtttgtataatatatgatccaaccagtgatgaattaatgcattcacttgtgta

SEQ ID NO: 3955 - DNA, 269 bp, Zea mays
cacccgcaccagcccgcgccgtggtcagaaggaggtccttcaccgtgcgcgcctctctccgcaaggccaccggcaccgccgccgtggcaatggctgccagcgccctgcttgccggcggtgccatggcccaggaggtgctgctgggcgcaggcgacggcgggctcgtcttcgagcccagccagttcaccgtcaaggccggcgacaccatcacattcaagaacaacgccggcttcccgcacaacgtcgtcttcgacgaagacgaggtgccg

SEQ ID NO: 3956 - DNA, 266 bp, Zea mays
gcacgtcgtcaacttcctcaacgtcgtcgtcgacaacttccgcgcgtccatcgtgccgcagatcgtcgtcgagttcgagaacgtctacaactcgctcaccggcaccgaggtcgccaccgtcacctccgtcgtgcagctcgagtcgcaggacctcgcgcagatcgcgcacacgtccagaagatgaccggcgccaagaacgtccgcctcaagacgcagctcgacccggcgctcatcgccggcttcaccgtgcagtacggccgcgacgg

SEQ ID NO: 3957 - DNA, 265 bp, Zea mays
ggcagctctggtggctgatgagatagcggacaggctgaattcttctccttcggaacgaacgacctgacgcagatgacctttgggtacagcagggatgatgtgggaaagttcattcccgtctatcttgctcagggcatcctccaacatgaccccttcgaggtcctggaccagaggggagtgggcgagctggtgaagtttgctacagagaggggccgcaaagctaggcctaacttgaaggtgggcatttgtggagaacacggtggag

SEQ ID NO: 3958 - DNA, 266 bp, Zea mays
cgggtccatccgtgtgacggtgcagggcgaggtcatcgagttctgcttcggggaggagcacctgtgcttccagactctgcagcgcttcacggccgccacgctggagcacggcatgcacccgccggtctctcccgagcccgagtggcgcgactcatggacgagatggcggtcgtggccacggaggagtaccgctccgtcgtcgtcaaggaggcgcgcttcgtcgagtacttcagatcggctacaccggagaccgagtacgggaggat

SEQ ID NO: 3959 - DNA, 270 bp, Zea mays
tgaaaaatttgctgaaaacttcaaaaaattggattatgtgaaggttcctgaaatttactgggcacacactactcctcaggttttaacaatggaatatgtcccaggaattaaaattaacagaataaagcagttagataagttaggagtcgatagacaaagattaggtcgttatgctgttgagtcctaccttgagcagatcttatcccatgggtttttccatgctgacccgcatccaggaaacattgctgttgatgatgtccatggagggag

SEQ ID NO: 3960 - DNA, 168 bp, Zea mays
ctttgcgtgcggttgatctcgtcggaggcccggccgcggttccccaatccgccatcgaattcgatggcggccaacgccgggaataagatccgcaacgccaagctggttcttcttggagatgtcggcgctggccaatctagcgtggttcttcggattgttaagggacag

SEQ ID NO: 3961 - DNA, 257 bp, Zea mays
actagacactactttactcaaagtctagagctagcttttgctttgctcaccagataaaccgcagcagatggcgtcgacgatcatggccgccacctcccgcatcgtcgcggccaagacgccgtttcttggccagggtcgcgccgccgccaatgccagccccctccgcgacgtcgccgccgccgctgctggcggccggatcaccatgggcaacgacctgttgtactgcccggaccgcgtcaattacctgggcccttctc

SEQ ID NO: 3962 - DNA, 268 bp, Zea mays
atcgcgagcgcaacaccgtacgttgtcggaagctcaagttagaagaagcaccagtgcctgatcgatggcggcccaggctctcctctccggccggcagctgctgggccgccccgtgcagtcggccgtctctaggtcgtcggcgaggaaggcgcccttcgtcgtcagggccagctccagccctccagccaagcaaggtgccgacagcagctgtggttcgcgtccaagcagtccctctcctacctcgatggcacgctgcccggcgactatg

SEQ ID NO: 3963 - DNA, 269 bp, Zea mays
caccactcctcgctacttgaggacggtacatctgcacagaggttcgacgtacgacgacgacgacgcatgtttcacacatggcatcccagctctccgccgccgtgccccggttccacggcctccggtgctacgtcgcgcccaggtccgcggaggcagcgctgccgtccgtgtaggtgggcaggaatatgtcgtcgtcgcatggcatccgctgctactacatcggctccgccatcaacctgatcatggtgacgacgacgacgctgatgctg

SEQ ID NO: 3964 - DNA, 260 bp, Zea mays
gaggtccttcgcgcacagcactacgctgacctttccgacaagcctttcttccccgggttggtggagtacatcatttccggccccgtggtggcgatggtgtgggaggggaaggacgtcgtgttgactggccgcaggatcattggggccaccaggccttgggaggcagcccccggtaccattcgtggggactacgccgtggaagtcggcaggaatgtcatccatggaagcgactccgtggagaacgggaagaaggagatcgc

SEQ ID NO: 3965 - DNA, 260 bp, Zea mays
gaacaacgccggcttcccgcacaacgtcgtgttcgacgaagacgaggtgccgagcggcgtcgacgcctccaagatctcgcaggaggagtacctcaacgcgccaggcgagacctactccgtcaccctcaccgtgccgggcacctacggcttctactgcgagccgcaccaaggagcaggaatggtcggcaagatcacagtcaactaaagctagctatccattccatgcatctcgatctgtatgtactccgcccgtcgatgga

SEQ ID NO: 3966 - DNA, 258 bp, Zea mays
gtgaggggtttctctgcatcaaggcaaaatggtctgttcatcaactcatgttttgctcattgccagagcgagagacaggatacttggtacgcgaacaactcgccacgtcttggtaacaagaaaatcgctgacgctgttggggactggttcttcgagagggggaacgccaagtacacagactgcccatacccttgcgatggcacttgccatcaccttgtgttcaggggagaccactaagatcattcttcagcaccaaca

SEQ ID NO: 3967 - DNA, 258 bp, Zea mays
ccgacgccttccaccgcgtcatcggcttcgacaacatcaagcagacgcatgcgtcagcttcatcgcctacaagcccccgggcagcgactagaccgcgcccgccggccgccccccgccggctagctagctagctagctcctgcgtgactagtagctaactccatgcgtcgtctctgtcgttcggttttgcttcgggtcaccgtgtaccctttgcttgcttggtttcttctttccttttttccttttttttcttcttttc

SEQ ID NO: 3968 - DNA, 263 bp, Zea mays
ccgacgtccttcaccgtcaaggcggagggcatcgccaagaacgccccgcccgagttccagaagaccaagctcatgacccgcctcacgtacacgctggacgagatcgagggcccgctcgaggtcggctccgacggcacgctcaagttcgaggagaaggacggcatcgactacgccgccgtcaccgtgcagctcccggggggcgagcgcgtgccgttcctcttcaccgtcaagcagctcgtcgccaccggcaagcccgagagctt

SEQ ID NO: 3969 - DNA, 261 bp, Zea mays
ctggagctgaaaaatccatttgttcgtaactggatcgatcttctgtgctttctacttgctggagttaaatctgatggtgctctttctgcagaaatggtttatatgtttgcagaatggtacaaaccaggatgcttgcttgagtaccctctgggtggaactggagcaataatagatgcccttgtgagcggtattgaaaaatttggtggcagacttgctcttcgttctcatgttgaaaagatcttaatagagaatggtcgagca

SEQ ID NO: 3970 - DNA, 272 bp, Zea mays
gtgcaagagttgagaacaacaagttctgtgtatctgtacattaccgcaacgtagcagagaaggactggaaagtggtcgcaggactcgtgaaacaagtcttggaggccttccctcgtctcaaagtaaccaacgggcgaatggttttagaggttcgcccggtgatcgactgggacaagggaaaggctgtcgagttcctgcttcggtcgctcggcctaagcgactccgaagatgtggttcctatctaaatcggagacgatcgaacagacgaagac

SEQ ID NO: 3971 - DNA, 254 bp, Zea mays
gggaaataatattctgaggagaacaaaggatgctgtaatcactctgcaaagcgtactggaagggaagcacaatactgaaatcgatgaatctctaactcagtatcaggtcccagctgatcgatggtggtcttcactttacaaagtgatcgaaggcctcgccacaatgagcagattgggccgcaaccgtctgcagcaaccttcttataattttgagaacaacaattctattgactgggaccaaatgtagatgtaga

SEQ ID NO: 3972 - DNA, 258 bp, Zea mays
cttcctccttcctcgtcggcaagacgctgctgaggcaggccgaggcagcccggccgtcgttcgccgtgcgcgccgcggcggattccgacaggccgatctggttccccggcagcacccctccgccgtggctcgacggcagccttcccggcgacttcggctttgatccctggggcctcggatctgacccggagagcctgcggtggaacgtgcaggcggagctggtgcactgccggtgggcgatgctcggcgcggcgggta

SEQ ID NO: 3973 - DNA, 227 bp, Zea mays
gcacaccaaggagagtacgtggaggagcagccatggcttcatcggtggccgccgcggcgagcacattcctgggcacccgcctggctgacccggcgccacagaacgggcgcatcgtggcccggttcgggttctggttgggcggcaaggcgaacttgctccgaagaaggtggcgaagacatcgacctcctctgaccggccgctgtggttccccggcgccgtggccccga

SEQ ID NO: 3974 - DNA, 282 bp, Zea mays
agcgactcagcgagcgagagcagcacacacgcagctagctaggagcagcagcagcggcggcggcgatggcggcctccatgatctcctcgtcagctctggcggtggcgcctcagggcctgccgcccctcggccgccgcgcctcctccttcgccgtcgtctgctccaagaagaagatcaagaccgacaagccctacgggattgggggtggcctgaccgtcgacgtcgacgccaacgggagaaagggcaagggcaaaggcgtgtaccagttcgtcgacaagtacg

SEQ ID NO: 3975 - DNA, 279 bp, Zea mays
tggcgagctacctactatttgggtagtatcttctcttcttccaattgttggtggtgttgcattggcatctcttactgaggcatcctttaactgggctggcttttggagtgcaatggcttcaaatgttacctttcaatcccgaaatgtattgagcaagaagctcatggttaagacagaggaatccttggacaaccttaatctcttctctatcattacagtgatgtcatttttccttttggcccctgttaccttctttacagaaggtgtccaaattactcc

SEQ ID NO: 3976 - DNA, 281 bp, Zea mays
tgcatacacaacacagatcatcagaaggagctacgatctgatcgacatggctgccgccaccatggctatcacctcccgctcgctcgtcggcaagccggctgctggcacgagggacgtcttcggcgagggccgcatcaccatgcgcaagaccgccgccaagcccaagccggctgcgtccggcatcccatggtacggtgccgaccgcgtcctgtacctgggcccgctgtccggctcgctcccgatctacctgaccggcgagttccccggcgactacgggtggg

SEQ ID NO: 3977 - DNA, 283 bp, Zea mays
atttatctctgacaagaaggcatttggaggtagcacccccaagactgtttctgagaaggagtggtggcaagccacagacaccaagttccaggcctggcctcgcactgctgggccaccggttgtcatgaaccccatcagccgccagaacttcatcgtcaagtccactgagtaggtttgggctggagaagctggttctgcgacttggtgccgccatgaagccagagttccttttctaaggtcttaatcaattgtaataaaacgaaatacagtcaggatttttttg

SEQ ID NO: 3978 - DNA, 274 bp, Zea mays
actacattgaagggcaaggctccctgatccaagctgtgctgactcctggagatccatacatgccattgccaaacgaggagatcattagtaaggttcaaaagcaggttgtagaactgttcccatcttcccggggcttggaagttacatggtccagtgtggtaaagatcggacaatcgctgtaccgtgaggctcctggaaacgacccattcaggcctgatcagaagacgcccgttaaaaacttcttcctctctggatcttacacgaaacaggacta

SEQ ID NO: 3979 - DNA, 274 bp, Zea mays
gcgccactgtccagtgcgcgcgtcaagcttgcttagctagccgccatggcctccctcgccgccgtctccgtgaagcccgtggccatcaagggtctcgccggcagctctatctccggaaggaagctcgccgtcgccaggccgtcggcccgctccatccgcacgccccgcgcagcgccgtggtggccaagtacggcgacaagagcgtctacttcgacctcgacgacatcggcaacaccaccggacagtgggacctctacggctctgacgcgccctc

SEQ ID NO: 3980 - DNA, 278 bp, Zea mays
gccccggcgccggcaagcacatccaggccggcgcgaagaaggtgatcatcacggctcccgccaagggcgccgacatcccgacctatgtcgtcggcgtcaacgagggcgactacgaccacagcgtcgccgacatcatcagcaacgcgtcctgcacgaccaactgcctcgcgccattcgtcaagatcttggacgaggagttcggaatcgtgaaggggaccatgacgacgacgcactcgtacaccggcgaccagatgctgctggcacgcgtccaccgcgac

SEQ ID NO: 3981 - DNA, 280 bp, Zea mays
cccgcagctagcaaacaaatggccaccgtcctgagcagcccccgcgcgccggccttctccttctccctccgcgccgcgccagccctcactaccgtggccatgacccgtggcggtggcgccagcagcaggctgcgcgcgcaggccacctacaacgtgaagctcatcacgccggacggggaggtggagctgcaggtgcccgacgacgtctacatcctggactacgccgaggaggaaggcatcgacctgccctactcctgccgcgcggggtcctgctcctcct

SEQ ID NO: 3982 - DNA, 269 bp, Zea mays
tggctcggcagctaacgacctgcagccaaccatctaccagcgactcagcgagcgagagcagcacacacgcagctagctaggagcagcagcagcggcggcggcgatggcggcctccatgatctcctcgtcagctctggcggtggcgcctcagggcctgccgcccctcggccgccgcgcctcctccttcgccgtcgtctgctccaagaagaagatcaagaccgacaagccctacgggattgggggtggcctgaccgtcgacgtcgacgcca

SEQ ID NO: 3983 - DNA, 260 bp, Zea mays
gctccaacgggatgtaggggcgcgatctagaggtgagcagcgtgcccaccgtcaaggactcgcaggccatctgcgacctcgtctactcgctcttcgtctccgaggaggtggacaaggtggagctgctctactccaagttcgtgtcgctggtgcgctccgaccccatcatccagacgctgctccccatgtcgcccaagggcgagatctgcgacgtcaacggcgtctgcgtggacgccaccgaggacgagctcttccgcctc

SEQ ID NO: 3984 - DNA, 264 bp, Zea mays
aaccggtccaacactttcacgctcagcttcagcaatggctgcctccaccatggcgatctcctccacggcgatggccggcacccccatcaaggtgggttccttcggcgagggccgcatcaccatgcgcaagaccgtgggcaagcccaaggtggcggcgtccggcagcccctggtacggccccgaccgcgtcaagtacctcggccccttctccggcgagcccccgagctacctcaccggcgagttccgcggcgactatggctggga

SEQ ID NO: 3985 - DNA, 268 bp, Zea mays
gaagaactcaagccctttgggaagcagctcagggacaaatacgtggagacacagcagcttctcctccagatcgctgggcacaaggatattcttgaaggcgatccattcctgaagcaggggctggtgctgcgcaacccctacatcaccaccctgaacgtgttccaggcctacacgctgaagcggataagggaccccaacttcaaggtgacgccccagccgccgctgtccaaggagttcgccgacgagaacaagcccgccggactggtca

SEQ ID NO: 3986 - DNA, 269 bp, Zea mays
ctgacaaccatttagttctggtgaatctcaagaataaggggatagatggttcaagggtggagaaggttttagaaagtgtgcatattgcagcaaacaagaacacagttcctggtgatgtttcagctagggtgccaggaggcatcaggatgggaaccccagcccttacgtcgagaggatttgttgaagaagatttcgctaaagttgctgacttcttcgatgcagcagtgaatctggccttgaagattaaggctgcaacgacaggtggaaca

SEQ ID NO: 3987 - DNA, 264 bp, Zea mays
cagccggcagcacgagcagcacgccgtgccgctccaaccatctcgcttccgtgcttagcttcccgccgcgccatggcgtcgaccaaggctcccggccccggcgagaagcaggactccatggggggggagtggggggaggtggggcccaggcgagtctgcgggggggacaaggtggtcgagtaggggggggggggcgtggggcgcttcctcgagatccggcaggagctccacgggccggggcttcgcgaatttgtccaggagtgc

SEQ ID NO: 3988 - DNA, 266 bp, Zea mays
aagatgttcttcgaggagcacgaggactacaagtacaccgggctggcgtggctgttcctgggcgtcccgaccagcgacaccctgctgtacaaggaggagctggagaagatgaaggagatggcgccggacaacttccggctggacttcgcggtgagccgggagcagacgaacgcggccggggagaagatgtacatccagacgcgcatggcggagtacaaggaggagctgtgggagctgctcaagaaggacaacacctacgtctacat

SEQ ID NO: 3989 - DNA, 263 bp, Zea mays
cgccgccgccctccggtggactccccgggactctgaactctgaccaggcgagggacttcgacctccccttgaaggagcggttctacctgcagccgctgccgccggcggaggcggtggcgagggtgaagacgtcggcgcaggacatcatcaacctcaagccactcatcgacaagaaggcgtggccgtacgtccagaacgacctccgcctccgggcctcctacctgcgctacgacctcaagaccgtcatcgcttccaagcccaag

SEQ ID NO: 3990 - DNA, 260 bp, Zea mays
gttttccttctttcacttctccagctttgtggacctgtcaagagttggaagcgtgccgaagatccaagtaatggaaaacctaaaggttttgggttttgtgagtttgaatctgctgaaggcatccttcgtgcgacacggcttctcaacaaattgagccttgatggtcaggaactggtgattaatataaatgatgccaccaaggagtacctgaagaaacatgttgaggaaaagaagagagcacaagtgaagtcaaaagatgc

SEQ ID NO: 3991 - DNA, 260 bp, Zea mays
tctagagctccctaactgcagcggccgccacaccaccgtaccccgacccgtcgacaacaatggccaccgtcctatgcagcccccgctcgccggccttcttcttctcgccgtcctgcctccgtgccgcgccggcgcccaccgccgtggcgctgcctgcagccaaggtgggcatcatgggccgtagcgccacagcaggggcaggctgcgcgcgcaggccacctacaacgtgaagctgatcacgccggatggggaggtggagc

SEQ ID NO: 3992 - DNA, 257 bp, Zea mays
gggcagctctggtggctgatgagatagcggacaggctgaattcttctccttcggaacgaacgacctgacgcagatgacctttgggtacagcagggatgatgtgggaaagttcattcccgtctatcttgctcagggcatcctccaacatgaccccttcgaggtcctggaccagaggggagtgggcgagctggtgaagtttgctacagagaggggccgcaaagctaggcctaacttgaaggtgggcatttgtggagaaa

SEQ ID NO: 3993 - DNA, 260 bp, Zea mays
agaagaagacgagtgtcaagtgaacctgaaacttgcggtgtcactggctggtagcctgagtgtgagtgagtgatcgagctagctgagctccgatcctcgctagctaggataccgccataccacaagtcttcttcacaagtttaggagtgacagcaacaagagatcgatggcctctgccaccgtgctcaagtcctctttccttcccaagaagtccgaatggggcgccaccaggcaggccgccgcgcccaggccgcccaccg

SEQ ID NO: 3994 - DNA, 271 bp, Zea mays
caggaaggccgccatggtctccaacaccctccgcaacatgctcacatccccaggcggcttctctgagacgcgccagggcgaggtccgcttcccagagatccccaccaacatcctcgagaagatctgccagtatttctattggtcgctccattactccagtgggaaggagacagcggagtttccaatcgaaccggagataaccctggagcttatgatggccgcaaactatctggacacttgatgaggagcctgaggggtataatcctagttt

SEQ ID NO: 3995 - DNA, 270 bp, Zea mays
ggaattcatcactttctagatcctgagccttatgaacaactttatcttcctacacacataatcgtaatgatactcagattctcccacagccagattctccccacagccagattttcagaaaagttggtcagaaaaaagctgaaccaaacagccccataatatttagatgttgttgtcctcggccataccaactgagcagcatgggccaagaattgaactgatggaaaatatgtatcattaggacaaattccgccagaataagttgttcct

SEQ ID NO: 3996 - DNA, 269 bp, Zea mays
cgaatatgaggacggagaccagataagaacccttccgtgcaagcacgagttccacctgcaatgcgttgacaagtggctgaaagaaatacacagggtgtgccctctgtgccgtggagacgtctgcgaagtcgcctcgtgaagaccttggcgctgccatccttccgatgtggcgccggtggatagggcaccaccgccaggcgccagctgttccgtggttgaagctggttcggtcaggcaatggtgatccaacttggacagttgacaccgca

SEQ ID NO: 3997 - DNA, 268 bp, Zea mays
cacaaatcaattgaggattgcagagctgccggaatacatgttatggtggcaacaagagacaacaaagaaacaacagaggccatttgccgtaagattggggtttccagccctatgaaggtcaaactggcatggtccggcatggatcctgccttgcccacctgggaggatgctacagctttgaaggaacgctccctgcacgcgtcggcttggggacaagccgcatttgaagaccgggggaatgtcagcactgatgatccacaagagaagg

SEQ ID NO: 3998 - DNA, 267 bp, Zea mays
ctccaggacgtacgtacgtagtagatcgatccatcgatcgctagctagctgacgaccatggcgtccctctcctctgccgccatcaccgccccttccttcacggccgcgcccgctcgcgcagtggtcagcaggaggtccttcaccgtgcgtgcctctctccgcaaggccactgccaccgccgccgtggccgttgccgccagcgtcctgcttgccggcggcggcgccatggcccaggaggtgctgctgggcgcaggcgacggcgggctc

SEQ ID NO: 3999 - DNA, 267 bp, Zea mays
gaaccattgatggtgatcgttagtgagctactaccagggatgtcactgaaaagttacctgcatagcatacggcctagccaactagatacacacactgcaataagctatgcactggacatagctcatgcaatggactgtttacatgccaatggcataatacatagagacctgaaacctgataatttattgcttacagcaaatcgcaagaagctgaaacttactgattttggacttgcacgtgaagaaactgtgactgacatgatgact

SEQ ID NO: 4000 - DNA, 265 bp, Zea mays
ggttaagggtatcaaaatctttggatgccgttgggatgttgagctactctcagaggccaatccaaactctgagtggtgggcagaaacagagagttgcaattgctggtgcgttactgaagcatccaaagtattactgctggacgaactgaccacattcttagatgaacatgaccagataggcgtgataaatgcagtgagggactctgtggctgccgatgggtaggtcgccgcattatgggtgactcatcggttggaagagctgaaa

SEQ ID NO: 4001 - DNA, 266 bp, Zea mays
cgtcattcctgggaataacaatagctttgataaatgccgccgtagatttgaccttggagatgcagattatcttagatatcgtggtatgcaagagtttgaccaggcaatgcagcaccttgagggaaaatatgaattcatgacatctgatcactcatatgtatcacggaagcatgaggaggataaggtgatcatctttgagagaggagatttggtcttcgtgttcaacttccactggagcaatagctattttgactatcgcgttggtt

SEQ ID NO: 4002 - DNA, 269 bp, Zea mays
gtcttcacgctcctcgccatcacataaaaccagtgcaagcagaagcagcgcaatggcgagcagcaccatggccctctcctccacagccttcgccggcaaggcagtgaacgtgccgtcgtctcacttcggcgaggcccgcgtgacgatgcgcaagacggcggcgaaggcaaagccggcggcgagctccggcagcccgtggtacggccccgaccgcgtgctctacctgggcccgctgtccggcgcgcccccgagctacctgacgggcgagt

SEQ ID NO: 4003 - DNA, 271 bp, Zea mays
cccgcagctagcaaacaaatggccaccgtcctgagcagcccccgcgcgccggccttctccttctccctccgcgccgcgccaggcgccactaccgtggccatgacccgtggcggtggcgccacagcaggctgcgcgcgcaggccacctacaacgtgaagctcatcacgccggactggggaggtggagctgcaggtgcccgacgacgtctacatcctggactacgccgaggaggaaggcatcgacctgccctactcctgccgcgcggggtcct

SEQ ID NO: 4004 - DNA, 264 bp, Zea mays
ggtccgtggccatggcgtcgtccatgctctccgctaccaccgtgccactccagcaggggggcggcctgtccgagttctccgggctcaggagctccgcgtcgctgcccatgcgccggaatgccacctccgacgacttcatgtccgccgtctccttcaggacccacgcggtcggcacgagcggcgggtcgcggcgggcgccgacggaggcgaacttgaaggtggccatcaacgggttcggccgcatcgggcgcaacttcctgcggt

SEQ ID NO: 4005 - DNA, 260 bp, Zea mays
tatggccctatcagtgataatgctggaggaatagctgaaatggctgggatgagccataggattcgtgagagaactgatgctctagatgctgcaggaaataccacggctgcaattgggaagggttttgccattggctctgcagccttggtttcccttgcactatttggtgcgtttgtaagccgggctgctatctccactgttgatgttctgactcctaaagtattcatcgggcttattgtcggtgctatgctcccgtactg

SEQ ID NO: 4006 - DNA, 261 bp, Zea mays
ccatctaccagcgactcagcgagcgagagcagcacacacgcagctagctaggagcagcagcagcggcggcggcgatggcggcctccatgatctcctcgtcagctctggcggtggcgcctcagggcctgccgcccctcggccgccgcgcctcctccttcgccgtcgtctgctccaagaagaagatcaagaccgacaagccctacgggattgggggtggcctgaccgtcgacgtcgacgccaacgggagaaagggcaagggca

SEQ ID NO: 4007 - DNA, 258 bp, Zea mays
ggataaactcgagctcgcaacttctcttattgagaaggcgaaggcaaagggggtttctcttttgcttcccactgatattgtagtagcggacaagtttgcagccgatgctgagagcaagattgtccctgccactgctatccctgatgactggatgggtcttgatgttggccctgatgccaccaaaacattcgacgaagcattggacaccaccaagactgttatttggaacggccccatgggagtgtttgagttccagaa

SEQ ID NO: 4008 - DNA, 263 bp, Zea mays
aaccggtccaacactttcacgctcagcttcagcaatggctgcctccaccatggcgatctcctccacggcgatggccggcacccccatcaaggtgggttccttcggcgagggccgcatcaccatgcgcaagaccgtgggcaagcccaaggtggcggcgtccggcagcccctggtacggccccgaccgcgtcaagtacctcggccccttctccggcgagcccccgagctacctcaccggcgagttccccggcgactacggctggg

SEQ ID NO: 4009 - DNA, 258 bp, Zea mays
ggccagtcccacccggtcaagctcgcgcctttcagcccggaccaggaggacgcgtcggtgctgtggacggagagcaaggacgtgggcaagggcttccgctgcatccgcatggtcaacaacacccgcctcaacttcgacgccttccacggcgacaaggaccacggcggcgtgcacgacggcaccgccgtcgtgctctgggagtggtgcaagggcgagaaccagagctggaagatcctgccgtggggtcccgaggccaac

SEQ ID NO: 4010 - DNA, 255 bp, Zea mays
gcaccgtgccagggccgcttccgaggacacgtcggcctccggcggcgacgagctcatcgaagacctcaaggcaaagtgggacgccgttgaggacaagcccaccgtcctcctgtacggcggcggcgcgtcgtcgcgctatggttgacgtccgttgtcgtcggcgccatcaacgccgtgccgctgctccccaagatcctggagctcgttggcctcggctacaccggctggttcgtctaccgctacctcctcttcaag

SEQ ID NO: 4011 - DNA, 255 bp, Zea mays
ctccatccactagacactactttactcaaagtctagagctagcttttgctttgctcaccagataaaccgcagcagatggcgtcgacgatcatggccgccacctcccgcatcgtcgcggccaagacgccgtttcttggccagggtcgcgccgccgccaatgccagccccctccgcgacgtcttcgccgccgctgctggcggccggatcaccatgggcaacgacctgtggtacggcccggaccgcgtcaagtacctg

SEQ ID NO: 4012 - DNA, 256 bp, Zea mays
cgtcaaggccggcgacaccatcaccttcaagaacaacgccggcttcccgcacaacgtcgtgttcgacgaagacgaggtgccgagcggcgtcgacgcctccaagatctcgcaggaggagtacctcaacgcgccaggcgagacctactccgtcaccctcaccgtgccgggcacctacggcttctactgcgagccgcaccaaggagcaggaatggtcggcaagatcacagtcaactaaagctagctatccattccatgc

SEQ ID NO: 4013 - DNA, 259 bp, Zea mays
ggcttcggcaagaccgagaaggagatgaatgagctcaagctcaaggagatcaagaacggcaggctcgccatgctcgccatcctcggttacttcatccaggggctcgtcaccggcgtcggcccgttccagaacctgctcgaccacctcgccgaccccgtcaacaacaacgtgctcaccagcctcaagttccactagaacgtggtgcatcagcatacctgctgctgccgccgccgccgccagttgtttgctgtggaaagct

SEQ ID NO: 4014 - DNA, 261 bp, Zea mays
ggccatgcaggtggtgcgcaacctcgacctggagcggtaccggggcggtggtacgagatcgcgtgcttcccgtcccggttccagcccaagacgggcaccaacacgcgcgccacctacacgctgaacccggacggcactgtgaaggtggtgaacgagacgtgggccgacgggcgccgcggccacatcgagggcacggcctggcgcgccgaccctgccagcgacgaggccaagctcaaggttcgcttctacgtgccgcccttc

SEQ ID NO: 4015 - DNA, 253 bp, Zea mays
ccactggggcggctcgttcgagatcgccgatggcgcggcggaggacgaccacagccgcaacatggacctggaccgcggcgcgctctcggcgcggcagcaccacgagctggacgagacccagcagagctggctgctgggcccgccggaggccaagaagaaggacaagtacgtggacctcggttgcatcgtcgtcaagcgcaagatgctctggtgggccttgtggtgcgtcgtcgccgctttcgtcctcatcggc

SEQ ID NO: 4016 - DNA, 251 bp, Zea mays
gcgaaggacaagctgggcaacgacatcacggtggaggcgtggctcaacacgcacggtcccaacgaccgcacgctcgcgcaggggctcaagggtgaccccacgtacctggtggtggagcaggacaagacgctggccacctacgggatcaacgccgtgtgcactcacctcggctgcgtcgtgccgtggaacggcgctgagaacaagttcatctgcccctgccacggatcccagtacaacaaccagggcaaggt

SEQ ID NO: 4017 - DNA, 253 bp, Zea mays
ggaggccgacaagctgcagaccgccgacggctgggccaagttcaccggggggttcttcttcggcggcatctccggcgtgctctgggcctactttctcctctacgtgctcgacctcccctacttcttcaagtagaaatcatcaaagatgcgtatatatatagctccggccgatcctcctctctagctgcatggtatgtaggtggtgtggtccttgtttcatttcactccagcggtgatcagcgccgtgtataaa

SEQ ID NO: 4018 - DNA, 253 bp, Zea mays
gagaacctcgctgaccacatcgctgacccagtcaacaacaacgcatgggcctacgccaccaacttcgtccccggcaactaagctcaacggctatgctatgcgacttcattgtctttcggatcggagagggtgtacgtacgtggattgattgatgctgcgagatgcatgtgtgtcttttgtttcacgttgcattgcataggcaagtcgagatgatgagttggcgttgtacactaagatgaaccatgtttgtgca

SEQ ID NO: 4019 - DNA, 254 bp, Zea mays
gatggcgtccccgagctccaggatcttgggggactcggtggcggtgcacgcgacggcgaagaccgccacgtgcctgcgcctcgccctcctactgctgctcctgtgggaacccagagcgagcagcccgcgcccgcggcgcagacgcctccgcggagggccctgccctcggcggggaagcgcaccatatgccgtcggagacgccgcggaacacctcatgaaggtcatgaaacgcggaggaccatatatgctccctc

SEQ ID NO: 4020 - DNA, 256 bp, Zea mays
agcgccactgtccagtgcgcgcgtcaagcttgcttagctagccgccatggcctccctcgccgccgtctccgtgaagcccgtggccatcaagggtctcgccggcagctctatctccggaaggaagctcgccgtcgccaggccgtcggcccgctccatccgcatgccccgcgcaccgccgtggtggccaagtacggcgacaagagcgtctacttcgacctcgacgacatcggcaacaccaccggacagtgggacctct

SEQ ID NO: 4021 - DNA, 250 bp, Zea mays
tttgcaggcagatctgagttagccggcggatccgatccgtgcgcctgctgtgtgtgtgtcggtggagatggccacagcttacgctcccatggcgatccaggtgatgaagagcatcctcgtcgtgcactcgaggccgaggggcctgtcaggcgctgctgcgctcacgatgcggccccggttcaccgtcaaggccatccagccctagaatgcaacgtaccaggtggtgcagcccatcaacggcgaccccttc

SEQ ID NO: 4022 - DNA, 249 bp, Zea mays
cactactttactcaaagtctagagctagcttttgctttgctcaccagataaaccgcagcagatggcgtcgacgatcatggccgccacctcccgcatcgtcgcggccaagacgccgtttcttggccagggtcgcgccgccgccaatgccagccccctccgcgacgtcgccgccgccgctgctggcggccggatcaccatgggcaacgacctgtggtacggcccggaccgcgtcaagtacctgggcccctt

SEQ ID NO: 4023 - DNA, 248 bp, Zea mays
cacgcatactgcatacacaacgcagagcatcagaagcagctgcgatctgatcgacatggctgccgccaccatggctatcacctcccgcgcgctcgtcggcaagccggcggctggcacgagggacgtcttcggcgagggccgcatcaccatgcgcaagaccgccgccaagcccaagccggcggcgtccggcagcccatggtacggtgccgaccgcgtcctgtacctgggcccgctgtccggctcgcccc

SEQ ID NO: 4024 - DNA, 246 bp, Zea mays
attctcagccgccgccaatcccttcccgtgctccgcaaccgctgagtgagaagaagagatggccggcaagggcgatggcccggctatcggcatcgatctcggcacgacgtactcttgcgtcggcgtgtggcagcacgaccgcgtcgagatcattgccaacgaccagggtaaccgcaccacgccctcgtacgtcgccttcaccgactccgagcgcctcatcggagatgcggccaagaaccaggtcgc

SEQ ID NO: 4025 - DNA, 247 bp, Zea mays
aaaggacagggccaagtgggatgcctggaagctgttgaaggcaaatcgaaggatgaggcgatgaatgactacatcaccaaggtgaagcagctccaggaggaggctgccgcctcttaaaagtctcttaatagtgttgccaaacagctatttgtcagatgagctttgtgccatttcctcattagaagtatatcattcgatccattggggatctgtgaaccatgtacctgtttatgtaactttttttttt

SEQ ID NO: 4026 - DNA, 249 bp, Zea mays
caataatccaacgcccagtgtccatagctgttcgtttcctcccaaaccaatttccgactcatcttggattaaagctcgcccgaatgcaccggcactgacgtaagcccatgaacctggaagcattcccaaccaactgcccaagacatacggcaagaacttcactgaagtaaggccatatagatagttcccaagggagaaaggtaacaggggactcaagcgtacaagagtaacaaccttaaacccattttc

SEQ ID NO: 4027 - DNA, 250 bp, Zea mays
cgcttcgctctcacgctcgcgtcaccggagctctccagaaccgaaccccaactgcccaagggcgagcgatccgaacccctcggcggcttcgtcaacgacgccgagaacactttgaggaatggctgaagaggatgtccagccccttgtgtgtgacaatggcactggaatggtcaaggcgggtttcgctggtgacgacgcaccgagagctgtctttcctagcattgtaggcaggccacgccacactggtgtg

SEQ ID NO: 4028 - DNA, 245 bp, Zea mays
cctgaacacctacgacggccgcaccatccgctaccccgacccgctcatcaaggccaacgacaccatcaagatcgatctggagaccaacaagatcatggacttcatcaagtttgacgtcggcaacgtggtcatggtgaccggcgggaggaacaccgggcgtgtaggtgtgatcaagaacagggagaagcacaagggcggcttcgataccatccacgtcgaggactccatgggccaccagttcgcca

SEQ ID NO: 4029 - DNA, 240 bp, Zea mays
gaggaggctcagcgtaacctgcaagctcagtgtggtcgtgaaccaacagttgaagagtgggctcaagccgtaggaatgagctgcagggagctgcaatcctgtgtgcgcaccggaagacggtgccgagagaagatggcccgctccaacttccgccttgtgatacatgttgctaggaaatatgaaggatgtggccttgacattcaggacctggttcaggatggatgctgtgggttgatgaaa

SEQ ID NO: 4030 - DNA, 241 bp, Zea mays
gcggagaacaacgtcatgttcgagggcatcctgctgaagccgtccatggtgacgcccggcgcggaggccaaggacagggccaccccggagcaggtggccgcgtacaccctcaagctcctccaccgccggatccccccttccgtgcccgggatcatgttcctctccggcgggcagtcggaggtggaggcgacgcagaacctcaacgccatgaaccaggggcccaacccgtggcacgtgtcct

SEQ ID NO: 4031 - DNA, 243 bp, Zea mays
gcaaggcgcctgggccacaactttgttggaactgagcagatcctcttgggtctgattggagagggcactggtattgcagctaaggtgctcaagtccatgggaataaatcttaaggatgcacgtgtggaggtggagaagattattggccgcggcaatggttttgttgctgttgaaataccattcacaccacgtgcgaaacgtgttttggagctctccttggaggaagctcgccaattaggacat

SEQ ID NO: 4032 - DNA, 244 bp, Zea mays
gaagactgtccgcctcaaacaagaggagtattttggtggagcgaagtttatgaagggcatggaggtactgctggtaacaagttctggatgtcattaggtctaccattgatagctactgtgaactgtgctggtaacactggagccaagaacctctacatcatttctgtgaagggaatcaagggcgccttaacaggcgtccttctgcctgtgttggtgaccatggagaatggaaagcctaacctta

SEQ ID NO: 4033 - DNA, 245 bp, Zea mays
gctccatatgcacactgggctgaggtgctgatactcggcatcccctccttcgtcgggccagccattgttccaggccacatgatcacattctggctctggattatactccgtcaggtggaggctatcgagacacatagcggctttgatttcccattcaccccgacaaagtatattccattctatggaggagcagaataccatgactatcatcattatgtaggaggccagagccaaagcaattttgc

SEQ ID NO: 4034 - DNA, 139 bp, Zea mays
cgcagaggcgaactagaaggtggcgatcaacggcttcggccgcatcggacgggacttcctccggtgctggcacggccgcgaggactcgccgatcgacgtcgtcgtcgtgaacgacagcggaggcgtcacgaacgcgtcc

SEQ ID NO: 4035 - DNA, 262 bp, Zea mays
aaaggacagggccaagtgggatgcctggaaggctgttgaaggcaaatcgaaggatgaggcgatgaatgactacatcaccaaggtgaagcagctccaggaggcggctgccgcctcttaaaagtctcttaatagtgttgccaaacagctatttgtcagatgagctttgtgccatttcctcattagaagtatatcattcgatccattggggatctgtgaaccatgtacctgtttatgtaactttttttttttttcgaaagagcgc

SEQ ID NO: 4036 - DNA, 264 bp, Zea mays
gccgatcgatcgagtctctccggattccagagaggcccaactgccgaagccatcgatcgccgccacctcttcgagcagaatagttgagaatggctgacgaggatatccagcctatcgtatgtgacaatggcactggaatggtcaaggccggtttcgctggtgatgatgcgccaagagctgtcttccccagcattgtgggaagaccacggcacaccggtgtcatggtcggcatgggccaaaaggatgcctacgtaggtgatgagg

SEQ ID NO: 4037 - DNA, 260 bp, Zea mays
caggaagacgtcgacgtcgcagggcatccgctgcgactacatcggctccgacaccaacctgatcatggtgacgacgacgacgctgatgctgttcgcggggcggttcaggctggcgccgtccgagaaccacaacgcgacggcggggctgaagctggaggcgcgcgactccggcctgcagacgggtgaccccgccgggttcaccctcgccgacacgctggcctgacgcgccgtcggccacatcctcggcgtcggcatcgtgc

SEQ ID NO: 4038 - DNA, 265 bp, Zea mays
gccctgaagaatatcggcatcaatgagcgccttccctacaatgtttctctcattcggttctcttcttggatgggtggtgaccgcgatggaaatccaagagttaccccggaggtgacaagagatgtatgcttgctggccagaatgatggctgcaaacttgtacatcgatcagattgaagagctgatgtttgagctctctatgtggcgctgcaacgatgagcttcgcgttcgtgccgaagagctccacagttcgtctggttccaaag

SEQ ID NO: 4039 - DNA, 94 bp, Zea mays
cacacgcatactgcatacacaacgcagagcatcagaagcagctgctatctgatcgacatggctgccagcaccatggctatcacctcccgctctg

SEQ ID NO: 4040 - DNA, 268 bp, Zea mays
gcaaccggtccagcactttcacgctcagctccagcaatggctgcctccaccatggcgatctcctccacggcgatggccggcacccccatcaaggtgggctccttcggcgagggccgcatcaccatgcgcaagaccgtgggcaagcccaaggtggcggcgtccggcagcccctggtacggccccgaccgcgtcaagtacctcggccccttctccggcgagcccccgagctacctcaccggcgagttccccggcgactacggctgggaca

SEQ ID NO: 4041 - DNA, 263 bp, Zea mays
cgacaagccctacgggattggcggtggcctgaccgtcgacgtcgacgccaacgggagacagggcaagggcaagggcgtgtaccagttcgtcgacaagtacggcgcgaacgtcgacggatacagcccaatctacaacgaggatgactggtctcccaccggcgacgtctacgtcggtggaaccactgggcttctgatctgggccgtcaccctcgctgggatcctcggcggcggcgccctcctcgtctacaacaccagcgccctct

SEQ ID NO: 4042 - DNA, 259 bp, Zea mays
aaacagacgaatgctccaattgaagagtgccgcaagacggtttggctggtggactcaaagggtttgattgttgactctcgtaaaggctctcttcagccattcaagaaaccttgggcgcatgagcacgagcccttgaaaaccttgtatgatgctgttcagtccatcaaacctacagttctgatcgggacatctggagttggaagaacattcacaaaagaaatcattgaggtcatgtcttccttcaacgagaggcctatca

SEQ ID NO: 4043 - DNA, 261 bp, Zea mays
gccaaccatctaccagcgactcagcgagcgagagcagcacacacgcagctagctaggagcagcagcagcggcggcggcgatggcggcctccatgatctcctcgtcagctctggcggtggcgcctcagggcctgccgcccctcggccgccgcgcctcctccttcgccgtcgtctgctccaagaagaagatcaagaccgacaagccctacgggattgggggtggcctgaccgtcgacgtcgacgccaacgggagacagggcaa

SEQ ID NO: 4044 - DNA, 261 bp, Zea mays
cgtcaaacccaacctcgcattctgaatgcactgctgaacaagcatatacatggcgtcagggccgttcaatctttgccagtcgcagtccatttgcccccgtggagtacgaaggacagacttttgtgcctgggcagtcgaacaatgcctacattttccctggactcggcctcggtcttgtgatctctggagccgtccgtgtccacgaggacatgcttctcgccgcatcgaaagcgctactgactcaggccacacaggacaact

SEQ ID NO: 4045 - DNA, 259 bp, Zea mays
cgacgtcgtcatcgtgggcgccggctccgcggggctgtcctgcgcgtacgagctctccaaggaccccgccgtgagcatcgccatcgtggagcagtcggtgtcgccgggcggcggcgcgtcgctgggcgggcagctgttctcggccatggtggtgcgcaaccggcgcacctgttcctggacgagctgggcgtggcgtacgacgaggccgaggactacgtggtcatcaagcacgccgcgctcttcacgtccacggtcatga

SEQ ID NO: 4046 - DNA, 256 bp, Zea mays
cgcggcgtgggctaggtggaatattttttgatgaccttaatgattacgatcaagaaatgcttctcaactttgctacagaatgtgcggactctgtacttcctgcgtacataccgatcatagaacggaggaagaacactccgttcaacgaggagcacagggcatggcagcaattgcggagaggtcgttatgtggagttcaaccttgtctacgaccgtggtacaacatttggcctaaagactggaggacggattgacag

SEQ ID NO: 4047 - DNA, 256 bp, Zea mays
cgccgcaaatgcaaggcttgctcagaattttacttttcttgagccaaagtgggctagatatttgacactgaacttggtaagccattatggttctgagttctactgtactctcagtatgctcgacgtgtatggcatggatgctgtagaaaagatgcttgacaacttgattccagttgacaataagacaacggaacctgatggcaagataaaggaacccattgagcaaattcctttgacagagtctgctggaggaaag

SEQ ID NO: 4048 - DNA, 256 bp, Zea mays
caaggtgaaggagatcaagaacggccgcctcgccatgttctccatgttcggcttcttcgtgcaggctatcgtcaccggcaagggccccctcgagaacctcgccgaccacatcgccgaccccgtcaacaacaacgcctgggcttacgccaccaacttcgtccccggcaagtgagcgagggcatgatgcttgcatgcgtgtaccgtagacgtaccgtattcctacgtactgcaggttgcaccagtatttgtgaaggga

SEQ ID NO: 4049 - DNA, 256 bp, Zea mays
ccactactttactcaaagtctagagctagcttttgctttgctcaccagacaaacagcagcagatggcgtcgacgatcatggccgccacctcccgcatcgtcgcggcaaagacgccgtttcttggccagggtcgcgccgccgccaatgccagccccctccgcgacgtcgccgccgccgctgctggcggccggatcaccatgggcaacgacctgtggtacggcccggaccgcgtcaagtacctgggccccttctccgc

SEQ ID NO: 4050 - DNA, 256 bp, Zea mays
acgagaactactgcctggccgtccgccacgcgccgtcgtgctggccccggtcaaccccaaggacgaccaccagcactggtacaaggacatgcgcttcagcacccgggtcaaggacgaggaaggcatgccggcgttcgcgctcgtcaacaaggccacggggctcgcaatcaagcactccctcggccagtcccacccggtcaagctcgcgcctttcagcccggaccaggaggacgcgtcggtgctgtggacggagagc

SEQ ID NO: 4051 - DNA, 253 bp, Zea mays
gggatttgatgatgaactagatgtaacagatgacattggagcagctgatgtgattcttgcatcgagttctgaaatgaagcagaatccttggattcataatgttgccaaataccacaagcttcccatatttgttgtcaagactaatacgatggctcaaatagttaaggctatcagaatgattgttggaagggacaacacatcatcaagtaagcaacctgaggttatggagggagagatagagattgaggatgat

SEQ ID NO: 4052 - DNA, 103 bp, Zea mays
ggcgaggcagatcttcgacagccgcggcaaccccaccgtcgaagtggacgtgggcctcagcgacggcagctacgctaggggggccgtacccagcggcgcatcc

SEQ ID NO: 4053 - DNA, 267 bp, Zea mays
ggcggcagtgtgggcagtgacccactaggtagtttctacagggcaaagttgcgccgtgctaatgtgcacttcctgtctaagccggtcaaagatggaacaactggaactgtcattgttctaacaacgccggatgcacagcgtactatgcttgcgtatcagggtacttcgtcaactctgagttacgattcagacttggccagtttagtgtctaaatcaaatgtactaattgtggaaggttatctatttgagctgcctcacacaattgaa

SEQ ID NO: 4054 - DNA, 266 bp, Zea mays
cgttcctgcacgtacgcacgcaccgggacaccagccacccccaacagcgccactgtccagtgcgcgcctcaagcttgcttagctagccgccatggcctccctcgccgccgtctccgtgaagcccgtggccatcaagggtctcgccggcagctctatctccggaaggcagctcgccgtcgccaggccgtcggcccgctccatccgcacgccccgcgcagcgccgtggtggccaagtacggcgacaagagcgtctacttcgacctcga

SEQ ID NO: 4055 - DNA, 266 bp, Zea mays
cgccccggagccctggacagcagcagtgaactcgaggccgctccgccacctcgccactcgcctcttctcgctctcgccaccgggccagggaagggaccatccgatcggctccgtcatggctggagctgctgctctcaatgagggtatcctttcttccgtgtccgagaaaaatgttgctgctcacccatggcatgatttggagataggaccagaggctcctgaagtgttcaattgtgtggttgagattcctagaggcagcaaggtta

SEQ ID NO: 4056 - DNA, 263 bp, Zea mays
cgaccatcagctgggtgccttgtggaagacagctcacatgctcttaccctggcatcaaattttcctatggcccggacacttacttcggaaacgaggtatctgttctggagatggatgggcaattcgacagactagatgagctcatctacgtggagagccatctaagcaacctttcaaccaagttctacggagaggtgacacaacaaatgctaaagcatgcagacttcccaggtagcaacaacgggacaggtctcttccagacc

SEQ ID NO: 4057 - DNA, 266 bp, Zea mays
aacactttcacgctcagcttcagcaatggctgcctccaccatggcgatctcctccacggcgatggccggcacccccatcaaggtgggttccttcggcgagggccgcatcaccatgcgcaagaccgtgggcaagcccaaggtggcggcgtccggcagcccctggtacggccccgaccgcgtcaagtacctcggccccttctccggcgagcccccgagctacctcaccggcgagttccccggcgactacggctgggacaccgccgggc

SEQ ID NO: 4058 - DNA, 261 bp, Zea mays
cttgtgctaacacccaagggaaaatcgttctggaggctttagtgctgacggctggcgtggtggtttctctgactgcgtatgctttctgggcgtcaaagaagggcaaggaattcgggtacctggggcctatcctgtcttccgcgcttactatcctcgtcctaactagctttcttcaggttttcttcccactgggacccgtgtcggtgggcttgttcggtgggctaggggctctggtcttctcaggcttcatcctgtacgaca

SEQ ID NO: 4059 - DNA, 262 bp, Zea mays
aagggcgccaaggtcatcctctcaagccacttgggtcgccctaagggttttacacccaagtttagcttagctccccttgtaggacggttgtctgagcttcttggcattcaggtgcaaaaagccgacgatgttattggccctgaagttgagaagctggtggcggccttgcccaacggtggggttctgctgcttgagaacgtaagattctacaaggaagaggagaagaatgacccagagtttgcacagaagcttgcctccctag

SEQ ID NO: 4060 - DNA, 262 bp, Zea mays
ctccagagaagattgacaatgtctatgccaaatgcaagttcattgcccaatgttttatatatggcgacagtttcaactcttccttagttggtattgttgcagttgaaccagaggttatgaaggcttgggctgcatctgaagggatccagtgcgaagacttgaggcagctttgtgctgaccctagagtaagagctgcagtcctggccgacatggattctgttgggaaggaagcacagctaagaggttttgaatttgctaaagc

SEQ ID NO: 4061 - DNA, 264 bp, Zea mays
cgccacctatgggcaagatcaagatcggcatcaacggattcggaaggatcggcaggctcgtggccagggtcgccctgcagagcgaggatgtcgagctcgtcgccgtcgacgaccccttcatcaccacggattagatgacgtacatgttcaagtacgacaccgtgcacggccaatggaagcacagcgacatcgcactcaaggactccaagacgcttctcttcggcgagaagccggtcaccgtctttggcatcaggaaccccgaag

SEQ ID NO: 4062 - DNA, 263 bp, Zea mays
cttgaatcaactggaattgttgtggttcctggatctggatttggccaagttcctggaacatggcacgtcagatgcacgatcctgccgcaggaagataaaatccccgcggtgatcacccgcttcaaggctttccatgacgcgctcatggctgagtaccgtgactgaactgttacagtggctgagtaccaccgtgcacaccgaaacaaaataaagctcccccctctctctgtgtctgtgcgtgtgtgtgaactgatctctgaatg

SEQ ID NO: 4063 - DNA, 264 bp, Zea mays
gccgccaccaggtgcagagtctttcgtcatctcttctccggcgaagaacccccagtcgcccaccagatcacttgttaaactttgttgaggggtgatggcggtttctttcgcaaacctcaactccgaggcagggcttaaaaagcttgatgagtaccttctcactcgcagctacatcactggctaccaagcttccaaggatgacttggctgtctacacttcgttttcggctgctccctcgtccaagtatatcaacgtagcaaggtg

SEQ ID NO: 4064 - DNA, 261 bp, Zea mays
ctcctcgccatcacataaaaccagtgcaagcagaagcagcgcaatggcgagcagcaccatggccctctcctccacagccttcgccggcaaggcagtgaacgtgccgtcgtctcacttcggcgaggcccgcgtgacgatgcgcaagacggcggcgaaggcaaagccggcggcgagctccggcagcccgtggtacggccccgaccgcgtgctctacctgggcccgctgtccggcgcgcccccgagctacctgacgggcgagtt

SEQ ID NO: 4065 - DNA, 261 bp, Zea mays
  unsure (1)..(261): unsure at all n locations
atcacataaaaccagtgcaagcagaagcagcgcaatggcgagcagcaccatggccctctcctccacagccttcgccggcaaggcagtgaacgtgccgtcgtctcacttcggcgaggcncgcgtgacgatgcgcaagacggcggcgaaggcaaagccggcggcgagctccggcagcccgtggtacggccccgaccgcgtgctctacctgggcccgctgtccggcgcgcccccgagctacctgacgggcgagttcccgggcga

SEQ ID NO: 4066 - DNA, 261 bp, Zea mays
caaccatctaccagcgactcagcgagcgagagcagcacacacgcagctagctaggagcagcagcagcggcggcggcgatggcggcctccatgatctcctcgtcagctctggcggtggcgcctcagggcctgccgcccctcggccgccgcgcctcctccttcgccgtcgtctgctccaagaagaagatcaagaccgacaagccctacgggattgggggtggcctgaccgtcgacgtcgacgccaacgggagaaagggcaagg

SEQ ID NO: 4067 - DNA, 258 bp, Zea mays
ggcagccaggcagccatggcgcccaccgtgatgatggcctcgtcggccaccgccgtcgctccgttccaggggctcaagtccaccgccagcctccccatcgcccgccgctcctccagaagcctcggcaacgtcagcaacggcggaaggatccggtgcatgcaggtgtggccggcctacggcaacaagaagttcgagacgctgtcgtacctgccgccgctgtcgacggacgacctgctgaagcaggtggactacctgctg

SEQ ID NO: 4068 - DNA, 258 bp, Zea mays
gcctcctctgctcctttgtcgtcacccctcgccttgcgagtcccgcggggtacctccgcagcggtgtcacagcgacgctcgccgaccagctgggatcggccgtgtttttctgcagcgggctccccagcagcggggtatccctcgaaatcagcgtctcctttgttgacgcggctgccgtcggggaggaaatagaggtcgagggaaagctgttgcgtgccggcaagtcagtcggtgtcgtctctgtcgatttcaggaaga

SEQ ID NO: 4069 - DNA, 255 bp, Zea mays
tttggatttctcgatgcatttgatcctagctatactccaaatactactgatcttcctgggaagaggtactgttttgcaaatcaacctgatgttggcttgtggaatattgctcagttcactggaccactgtcctctgctgaacttatcagccaagatgaggcaaattatgtgatggagaggtatgggacaaagttcatggatgagtaccaatctatcatgaccaaaaaactgggcttaaccaaatataataagcag

SEQ ID NO: 4070 - DNA, 273 bp, Zea mays
ctggaagtgggtatgagttcaagagtgaaatcaagggaggggcagtgcccaaagaatatgtaccaggagtgatgaaaggattggaagaaagcttacccaatggtgtcctcgccggttacccagttgtggacttccgggctgtgctggttgatggctcatatcacgatgtggattcaagtgtcttagcattccaaattgcagccagaggagccttccgtgagggaatgaggaaagctggtccaaggcttctagagcctataatgaaagttgaag

SEQ ID NO: 4071 - DNA, 274 bp, Zea mays
gtcgacagcgagcgcctcgctcagctcttcgaccaggccggcgtcgtcgaggtcgcagaggtcatttacaacagagaaacagatcaaagtcgtgggtttgggtttgtcactatgagcactgttgaggaggctgagaaggctgtggagatgttccatcgctatgatgtcaatggaaggcttctgactgtaaataaagcagctcctagaggctctcgtgtggacagacctcccagacaatctgggccttctctcagaatttatgttggcaacctgc

SEQ ID NO: 4072 - DNA, 273 bp, Zea mays
ccacagcttgcgcccgcaatggcactcgtctccgcctcctcgtcctccaccaccgccgtcacggcgctccccaggaatgggcagcgggcgtcgtcctccttcctcggcggcaagacgctgctgagacaggccgaggcggcccggccgtcgttcgccgtgcgcgccgcggcggaccccaacaggccgatctggttccccggcagcacccctccgccgtggctcgacggcagccttcccggcgacttcggctttgatccctggggcctcggatct

SEQ ID NO: 4073 - DNA, 272 bp, Zea mays
cgctcaccgacgccacagcttgtgttgtgcgcgcgcaatggcactcgtgtccgcctcctcgtcctccaccaccgccgtcgcggcgctccccaggaatgggcagcagcgggcgtcgtcgtcgttgttctcctcctcctcctcttcctccttcctcgtcggcaagacgctgctgaggcaggccgaggcagcccggccgtcgttcgccgtgcgcgccgcggcggattccgacaggccgatctggttccccggcagcacccctccaccgtggctcg

SEQ ID NO: 4074 - DNA, 266 bp, Zea mays
gcccgggccatttttgaagctgctatagcaatgaccaaccagggtgttcaagtgttcccagagataatggttcctcttgttggaacaccacaggaactggggcatcaagtgactcttatccgccaagttgctgagaaagtgttcgccaatgtgggcaagactatcgggtacaaagttggaacaatgattgagatccccagggcagctctggtggctgatgagatagcggacaggctgaattcttctccttcggaacgaacgacctg

SEQ ID NO: 4075 - DNA, 268 bp, Zea mays
gccctcccaaagtcccaaaggccgccgccgcccgccagcccaccatggccgcgcagtccttcctcctcgccgccactgccgccgccaggtcccccgcggtcttcgccgctccctattcctccgcacgccctttccactcggtccacttcgtcgccggcccgttgggcgccgccgccgccagggcgctcgtcgtcgcggacgccactaagaaggccgtagccgtcctcaagggcgcgtctgaggtcgagggcgtggtcacgctcacgca

SEQ ID NO: 4076 - DNA, 269 bp, Zea mays
gtcaagtccaccccgttgcagccctacagcgaggtgttcggcctccagcggttccgcgagtgcgagctcatccacggccgctgggccatgctcgccaccctcggcgccctctccgtcgagtggctcaccggcgtcacctggcaggacgccggcaaggtggagctggtggacgggtcctcctacctgggccagccgctgccgttctccatctcgacgctcatctggatcgaggtgctcgtgatcggctacatcgagttccagcgcaacgc

SEQ ID NO: 4077 - DNA, 268 bp, Zea mays
cacagtcagggtatcaaaggattgcgtgatgcaattgctgctgggatcacctcacgtgacggattccctgcaaatgcagatgacattttcattacagacggagcaagtcctggggtccacatgatgatgcaattactgattaggaatgagaaagatggcattctgtgcccaattcctcagtaccccttgtactcggcctccatagctcttcatggtggagctcttgtcccctattaccttgatgaaaaaactgggtggggtttggaga

SEQ ID NO: 4078 - DNA, 267 bp, Zea mays
ccttgggttgcccaatcgtgatgatgtcaagactggtgtaatatcctacaaaatttctgctcatgctgctgatttggcgaagggtcatccctatgcacaagcttgggatgatgcacttagcaaggcaaggcttgagtttagatggcttgaccaatttgctttatctctggatccagtaactgctatggctttccatgatgaaacattgccctctgagggtgccaaagtggcacatttctggtcaatgtgtgggcccaagttttgttc

SEQ ID NO: 4079 - DNA, 266 bp, Zea mays
ctcgggcgcaaccccgctgtgccggcagtgttcatcggcggcaggctcgtcggctccaccgacaaggtcatgtcgcttcacctgagcggcaacctcgttccgcttctgcgcaatgccggcgcgctctgggtgtagccgtgttgcatatatatgtagctagccgtgttccattccatatgcatgctatctatcaggagaggagacacacggagggaagtacgtagtaataattaattaagcaggcctttttatctgcaccgtaataa

SEQ ID NO: 4080 - DNA, 267 bp, Zea mays
ctttctttctccccctcccctcccctgcgggcttctctcacgagctcccccggcctcgccgccgccgcctgctccggcgggcgggacccagctcgcagcgtctcccctgcggcgaggtacacgatggagggagcgggaagagatgccaaccctttgagcggttacagaattggcaaaaccctgggaattgggtcgttcggcaaagtgaagatcgcggaacatatattaactggtcataaggtggcgatcaagattctcaatcgcaag

SEQ ID NO: 4081 - DNA, 266 bp, Zea mays
ctcatacccagattaggaagatgaagggtttgaagcagaagaaggctcacctgatggagattcaggtcaatggtggtaccattgctgacaaggtggactacggctataaattttttgagaaagaggtccctgttgatgctgtcttccagaaggatgagatgattgacatcattggtgtgaccaaaggtaaaggttatgagggtgtggtcactcgttggggtgtcacccgccttccccgcaaaacccacaggggtctccgcaaggtt

SEQ ID NO: 4082 - DNA, 258 bp, Zea mays
gcgttgtggccttacctccaagagtttgtcgatggagcccttgcgcatatcctgaacatgtccaaggctctgggagagcaggttggaaatgggaggccagtactgccttacgtgatacatgggcactatgccgatgctggagatgttgctgctctcctttctggtgcgctgaatgtgccaatggtgctcactggccactcacttgggaggaacaagctggaacaactgctgaagcaagggcgcatgtccaaggaggag

SEQ ID NO: 4083 - DNA, 270 bp, Zea mays
ccaaggtggccgcccctaccaccggcccgatccccgccgccgagctgctcggagtcatcgaggccgccgcaaaagctggggccgatgttataatggaagctgttaataagccacgcaatatccactataaaggtgttgcagacctggtgacagacacagacaagttgagtgaatcagtcattttggaagttgtcaccaagaacttcaaagaccacctcatacttggggaggaaggcggccttgttggagattccctatcagagtacctct

SEQ ID NO: 4084 - DNA, 267 bp, Zea mays
cggaggcgttcgccgagctcaaggtgaaggagatcaagaacggccgcctcgccatgttctccatgttcggcttcttcgtgcaggctatcgtcaccggcaagggccccctcgagaacctcgccgaccacatcgccgaccccgtcaacaacaacgcctgggcttacgccaccaacttcgtccccggcaagtgagcgagggcatgatgcttgcatgcgtgtaccgtagacgtaccgtattcctacgtactgcaggttgcaccagtatttg

SEQ ID NO: 4085 - DNA, 129 bp, Zea mays
cactcttgttgtcaagtccaagtggaaaatcttggcatattatacatattgtaataataaacatcgtacaatctgcatgctgttttgtaataattaattaatatcccagcccattggatggacttgttt

SEQ ID NO: 4086 - DNA, 268 bp, Zea mays
gagacgggagccaaccaggaggatgccctcgcgcgaattgaaaagctttcagaagtaaacccgatgcttggcttccgtgggtgcaggcttggtatatcgtaccctgaattgacagagatgcaagcccgggccatttttgaagctgctatagcaatgaccaaccagggtgttcaagtgttcccagagataatggttcctcttgttggaacaccacaggaactggggcatcaagtgactcttatccgccaagttgctgagaaagtgttcg

SEQ ID NO: 4087 - DNA, 270 bp, Zea mays
ctagctcgatctactactactactactagctggtacacatactagccatcctgccagccagccagcttgccatggcgcccaccgtgatgatggcctcgtcggcaaccgccgtcgccccgttccagggtctcaagtccgccgccagcctccccgtcgcccgccgcagcaccaggagcctcggcaacgtcagcaacggcggaaggatccggtgcatgcaggtgtggccggcctacggcaacaagaagttcgagacgctgtcgtacctgccgc

SEQ ID NO: 4088 - DNA, 269 bp, Zea mays
gacacgatggtggccttgaccgcggggatttccgtagccaccggcgtcgtgttcagccccgccggccgccggcgaggccgcggacacgccgcctttcgctgctcgtcgtcctctgccggagagaggcaggctctcttcagccgcatcgcccccgtctacgatcatctgaacgacgtgctcagcctgggacagcaccggacgtggaagcgcatatgcgtctcttggtcgagagcgaagatgggggatcgagttcttgatctctgctgcgg

SEQ ID NO: 4089 - DNA, 265 bp, Zea mays
tgaggacgttggtggcatgcacgcagctgtggggattcttacagagaggggtggcatgacttcccacgctgctgtggtcgcacgtgggtgggggaaatgctgcgtctcgggatgctcaggcattcgcgtaaacgatgcggagaagctcgtgacgatcggaggccatgtgctgcgcgaaggtgagtggctgtcgctgaatgggtcgactggtgaggtgatccttgggaagcagccgctttccccaccagcccttagtggcgatctg

SEQ ID NO: 4090 - DNA, 264 bp, Zea mays
gccggagctcgacaaggacgaccgacgacgcacgcggagatccggcgtactgcaaattttgaaaactgaactgtaagatggcatcagcagagctttcccgtgaggaaaatgtgtacatggcgaactcgctgagcaggcggagaggtacgaggagatggttgagttcatggagaaggtagccaagactgttgactcggaggagctcactgtggaggagcgaaacctcttgtctgttgcatacaagaacgtcattggagcccgccg

SEQ ID NO: 4091 - DNA, 261 bp, Zea mays
atcgatctgcaagtctcgctacgtagcagtgcaataaaaaaagcagccgcaatggcgagcagcaccatggccctctcctccacggccttcgccggcaaggccgtgaacgtgccgtcgtcgtccgccttcggcgaggcccgcgtgacgatgcgcaagacggcggcgaaggccaagccagcggcggcgtccgggagcccgtggtacggccccgaccgcgtgctgtacctgggcccactgtccggcgagccgccgatctacctg

SEQ ID NO: 4092 - DNA, 265 bp, Zea mays
atggccacccacgcagctctcgccgcctcccgcatccccgccggcgtcgtccaggcacggcgtgcagaggctggacttcgccgacttctccgggctcaggccggggtcgtgctccgtgagcgctgccgcgctgggaggcgtccttctccgacgtccttggcgcgcactcagtcgccaaggccaccggggagaacgccgtgagggcgcccgcagaggcgaactgtaaggtggcgatcaacggcttcggccgcatcggccggaactt

SEQ ID NO: 4093 - DNA, 262 bp, Zea mays
cagaagctcctcgggtggttttgccacttgttacttcctccaatattaagcttgaacttgacaaaaagaaagagatggtgactacacagttgcggaatacagtcagtgatctgtcacttgctgcggatgatttgatcattccatggaatgagttgattttaaaggagaagattggtgcaggttctttcggaacagttcatcgtgctgattggcatggatctgatgttgcagtcaaaatacttatggagcaagattttcaccc

SEQ ID NO: 4094 - DNA, 263 bp, Zea mays
gtgcctggtatcaaggtcgacaagggtcttgtgccactcgctggctccaacaacgagtcatggtgccaaggtctcgatggccttgcttcacgtgaggcagcctactaccaggccggtgcccgcttcgccaaatggcgcactgttgtcagcatccccaacggtccatctcaactagccgtgaaggaagctgcctggggcctcgcccgctacgccgccatctcacaggaaaatggtctggtgccgatcgtggagcccgagatcct

SEQ ID NO: 4095 - DNA, 263 bp, Zea mays
gtgctcgttcttgaagtagaccttgacgaggaggtcgaagtggccgatctcgtccaccatgctcgtgggcgtgtacgccgcatgcacagcttcccttcaatgctggcgcagacgaagatgtgcttgccgatggggaggccgagcacctggtcgggcgacggcagcgagaagcggaagaggcggacgtcgcgggacagctccttcttgccgacgaggcggcagtggatcttatcgcgcgggttggagagcgccggggccctgac

SEQ ID NO: 4096 - DNA, 258 bp, Zea mays
gctacatcgagttccagcgcaacgccgagctcgacccggagaagaggctgtaccccggcggctcctacttcgacccgctcggcctggcggccgaccctgagaagaaggagcggctgcagctggcggagatcaagcacgcgcgcctcgccatggtcgccttcctcggcttcgccgtgcaggccgccgccaccggcaaggggccgctcaacaactgggccacccacctgagcgacccgctccacactaccatcttcgaca

SEQ ID NO: 4097 - DNA, 254 bp, Zea mays
gaacttctcctgtcggcctactaatacaactagctgccctcttaggtatactgtgatggccaccttgtcctccacagtagtagttgcacttggtgcacctctcttcttgctccttgtaacgtgtggctcgtgcgcgagaccggtgagctttaacgcctccgacctcaccgccgatcccggctgggatgctgccagggccacctggtacggtgcgcccaccggcgccggtcctgatgacgacggtggtgcctgtg

SEQ ID NO: 4098 - DNA, 257 bp, Zea mays
cacaagccgatgatcctggcgttatcaagaccagacccgaagaagaacatcactaccctcgtcaaagcgtttggagagtgtcgtccactcagggaacttgcaaaccttactctgatcatgggtaacagagatgacatcgacgacatgtctgctggcaatgccagtgtcctcaccacagttctgaagctgattgacaagtatgatctgtacggaagcgtggcgttccctaagcatcacaatcaggctgacgtcccgga

SEQ ID NO: 4099 - DNA, 256 bp, Zea mays
gtcatttttccttttggcccctgttaccttctttacagaaggtgtcaaaattactcctacatttttgcaatctgctggtctgaatgtaaaccaagtccttacaaggtgtcttttcgctggactgtgtttccatgcataccaacaggtgtcttacatgattttggcgatggtgtctcctgtcactcattctgtgggcaactgtgttaaacgtgttgtggtcattgtaacatcagtgctgttcttcaggacacctgtt

SEQ ID NO: 4100 - DNA, 258 bp, Zea mays
gacatggtcaaggtcgtcgcctggtacgacaacgagtgggggtacagccaacgcgtggttgatctggcgcacctggtggcggccaagtggcccggcgcggcggcggccggcagcggcgaccctctggaggacttctgcaaggacaaccccgagaccgacgagtgcaaggtgtacgaagcatgaggccagggttctttccacgacgaaacgtacagcacgggcgcgagggttctttccatagagaataatatacagatt

SEQ ID NO: 4101 - DNA, 257 bp, Zea mays
atccgtgttccgtgtccgcgtccagtgtgtccgctactccgctccccctcagtcctcagttcctcacctagcggtacgtgcgcgcgggagacgtagatggcggcttcggaggcggcagcggcggcggcaacaccggtgacgccgacagaggggacggtgatcgcgatccacagcctggaggagtggagcatccagatcgaggaggccaacagcgccaagaagctggtggtgattgacttcactgcaacatggtgtcc

SEQ ID NO: 4102 - DNA, 261 bp, Zea mays
gaagcaatggccatgagagctctcccgctgaccccttccaggagctcctcgtttggagctcaccaaaccaggccgagcggcggcggccccagatcagtgagagcttatgcgaagggagacgaggagggcgacaagcagtccctcttcggaagcatcaccgaggcgctggacttctcgcaggtccggtcggagaaggacgccgagctgctgtacgaggccagggagtccaccagaggtggagggaggatgacgagggagcag

SEQ ID NO: 4103 - DNA, 274 bp, Zea mays
cgacggctcgctggtcggcgactacgggttcgacccgttcgggctcgggaagcccgtggagtacctgcagttcgaactggactcgctggaccagaacctggccaagaacgaggccggcggcatcatcggcacccggttcgagtcctccgacgtcaagtccaccccgctccagccctacagcgaggtgttcggcctccagcggttccgcgagtgcgagctcatccacggccgatgggccatgctcgccaccctcggcgccctcaccgtcgagtgg

SEQ ID NO: 4104 - DNA, 274 bp, Zea mays
aaatattggacgatggtagggttactgattctcaaggccggaaagtgagcttcaccaacgccatcattatcatgacgtccaacgttgggtcacagtatatactaaacatggatgaagaagatgggtcatctgattcagcctatgagaacataaagaggagggtgatggatgctgcaagatcggtgttccgtccagagttcatgaatcgtgtagatgagtacattgttttcaagcctctcgagagagaacagatcaacagcattgtcaaattaca

SEQ ID NO: 4105 - DNA, 274 bp, Zea mays
gccagagcatgagcatgccaaaagacagttctttgaatatctgcaaggtgaggcagaatcaggattggagcggctacatcaatgtgcagagaaagaacttcaaatataccttgatgcagaatctccctcgaaagacttcaatgatttccgtacaaagttggctggattaactagtgtgactcgcaattattttgaaaacctcgtccgggctctggaaactggattaaatgatgtaggtccttccactagccatggtacatgcagcaaaagcgca

SEQ ID NO: 4106 - DNA, 274 bp, Zea mays
gctccggcagcccgtggtacggccccgaccgcgtgctctacctgggcccgctgtccggcgcgcccccgagctacctgacgggcgagttcccgggcgactacggctgggacaccgcggggctgtcggcggacccggagacgttcgccaagaaccgggagctggaggtcatccactcccgctgggccatgctgggcgcgttgggctgcgtgttcccggagctgctcgcccgcaacggcgtcaagttcggcgaggccgtgtggttcaaggccgggtc

SEQ ID NO: 4107 - DNA, 274 bp, Zea mays
agggcatcgccgccggcatgcagaacactggctaggcggcttctcttcactcacctgcagagtgcaccgcaataatcagcttccggatggtggcgttttgtcagttttggatggaaatgccgaactggcagcgtctgttttccctatgcatatgtaatttcctgcctctttatattcactcttgttgtcaagtccaagtggaaaatcttggcatattatacatattgtaataataaacatcgtacaatctgcatgctgttttgtaataattaat

SEQ ID NO: 4108 - DNA, 243 bp, Zea mays
cacgagctcagcaagagcaccggaaacgctggcggccgtgatgcttgtgggatcatcggactccagggctgaactgaaacaaatggtcgctggacttcgggggcgcctgagagtgccgtcaccagcaggctagaataacatcccgaagacatcgtgaaataataataagagcgcctgatatgtgatcagtggtgtacttgccattaagcacccgatgagctgaactgtgttggactgttggct

SEQ ID NO: 4109 - DNA, 267 bp, Zea mays
gaagcggcggcggcggacaaaagcaggcgaaggcgagggtgcgagggaaggtgcaccagccatggtgcacgtcaacttctaccgcaactatggtaagacgttcaagaaaccaaggcgtccttatgagaaggagcgtcttgatgctgaactgaagctggtcggtgagtatgggctgaggtgcaagcgtgagctcttggagggtccagtatgcactgagcaggatccgtaatgctgcaaggcacttgctcacccttgacgagaagaacc

SEQ ID NO: 4110 - DNA, 243 bp, Zea mays
caaacccattcaatccgactcaatccacatggattaagagctaaatgaacaagccctaaatagacgcccgaaccagacatgctctgaaatcgttctcaaatacacacaagggatagatagaggtacagttgagttatacaaaggtttcatcaagtttcttaaagtacagcagagcttccatttcctacatgaccagatagccctagcaaagcatgcagctcctacaccaaaagccatccatgt

SEQ ID NO: 4111 - DNA, 258 bp, Zea mays
gaggactccatgaagtggttccaggtcaagtatgaaggtgtcatcctcaacaaggctcaggccagcacgatttaaacctcacctgtggggcaaaacagctctcgcttcatctccatgtgaacgcaagatcaccttccaaggtttttgtttgagttgtatcctctggcctgactttttagtctactagcagagctataatcactatatgaattattttttgtgcccttaccatactctgctgttgcttgagaatatgtt

SEQ ID NO: 4112 - DNA, 270 bp, Zea mays
cgacatccaatccaagtctactgcttttttgcccttagatgaggcatgccttcttgatatcgataatgttgaagaggctggcattcgtcctgggttagtagaagaattcatgataattgatgagaaccctggtgatgaaactttgattctaagtttacaagcaattcagcaagaacttgcatgggaaaggtgccggcaacttcaggccgaagatgtcgttgtcacgggtaaagtaattggtggaaacaaaggaggtgttgtagctcttgt

SEQ ID NO: 4113 - DNA, 274 bp, Zea mays
accgagcagtagcgactcctctgcgtgaggcctgccgtcatcccccgtgggccgtggccgtggccgtggccgtgcgcaaaaaaacaaaccatcctcgattcgaccggacgggaaggagacgcgccgggagaagggggaagagacgcggcgaccatgtctccgatctgggtgttcgggtacggctcgctgatctggaacccaggcttcgcctacgacgaccgcgtcgtcggctttgtcagggactaccgccgcgtcttctaccaagggagcacgg

SEQ ID NO: 4114 - DNA, 273 bp, Zea mays
gagagtacgtggaggagcagccatggcttcatcggtggccgccgcggcgagcacattcctgggcacccgcctggcggacccggcgccacagaacgggcgcatcgtggcccggttcgggttcgggttgggcggcaaggcgaagctgctccgaagaaggtggcgaagacatcgacctcctctgaccggccgctgtggttccccggcgccgtggcgccgactacctggacggctcgctggtcggcgactacgggttcgacccgttcggtctcggga

SEQ ID NO: 4115 - DNA, 281 bp, Zea mays
tggcgtcgtccatgctctccgctaccaccgtgccactccagcaggggggcggcctgtccgagttctccgggctcaggagctccgcgtcgctgccgatgcgccggaatgccacctccgacgacttcatgtctgccgtctccttcagaacccacgcggtcggcacgagcggcgggccgcggcgggcgccgacggaggcgaacctgaaggtggccatcaatgggttcggccgcatcgggcgcaacttcctgcggtgctggcacgggcgcggcgacgcctcaccc

SEQ ID NO: 4116 - DNA, 159 bp, Zea mays
cacgcatactgcatacacaacgcagagcatcagaagcagctgcgatctgatcgacatggctgccgccaccatggctatcacctcccgcgcgctcgtcggcaagccggcggctggcacgagggacgtcttcggcgagggccgcatcaccatgcgcaagac

SEQ ID NO: 4117 - DNA, 264 bp, Zea mays
cgcggaggcagggaactcgaaggggctggatgccgccatgaaggacctggccatgatcaccgggcagtggcccgtcaagaccaaggccaggaagtccgtggccagcttcaagatccgtgagggaaacaccatcggtatcgcagtcaccctccgcggcaggataatgtacaacttcctggataggctcatcaaccttgggctccctaggaccatggacttcctgggtgtcaacccaacagcttcgacgggcacggcaactacagc

SEQ ID NO: 4118 - DNA, 265 bp, Zea mays
accaaggagagtacgtggaggagcagccatggcttcatcggtggccgccgcggcgagcacattcctgggcacccgcctggcggacccggcgccacagaacgggcgcatcgtggcccggttcgggttcgggttgggcggcaaggcgaagctgctccgaagaaggtggcgaagacatcgacctcctctgaccggccgctgtggttccccggcgccgtggcgccgactacctggacggctcgctggtcggcgactacgggttcgaccc

SEQ ID NO: 4119 - DNA, 273 bp, Zea mays
aaggagagtacgtggaggagcagccatggcttcatcggtggccgccgcggcgagcacattcctgggcacccgcctggcggacccggcgccacagaacgggcgcatcgtggcccggttcgggttcgggttgggcggcaaggcgaagctgctccgaagaaggtggcgaagacatcgacctcctctgaccggccgctgtggttccccggcgccgtggcgcccgactacctggacggctcgctggtcggcgactacgggttcgacccgttcggtctc

SEQ ID NO: 4120 - DNA, 280 bp, Zea mays
gccggagctcgacgaggacgaccgacgacgcacgcagagatccggcgtactgcaaattttgaaaactgaactgtaagatggcatcagcagagctttcccgtgaggaaaatgtgtacatggcgaactcgccgagcaggcggagaggtacgaggagatggttgagttcatggagaaggtagccaagactgttgactcggaggagctcactgtggaggagcgaaacctcctgtctgttgcatacaagaacgtcattggagcccgccgcgcctcatggcgcatc

SEQ ID NO: 4121 - DNA, 281 bp, Zea mays
agccagccccccacaggagcttctctgaggaagttgctgcacttaaccgctactttggcggcctgaaatctggtggtaatgcttatgtgattggagatccagcaagacctggacagaagtggcacgtcttctacgccactgagtacccagagcaaccaatggttaaccttgagatgtgcatgactggtctggacaagaagaaagcttgtgtctttttcaagactaatgctgatgggaacacaacatgtgccaaggaaatgacaaagctctctggcatctct

SEQ ID NO: 4122 - DNA, 281 bp, Zea mays
caagaagatctacaactacttcccatacccatactttgtgtccttgatccatctagtagtgggtgtcgtatactgcctcatcagctggagtgtcggtctccccaagcgagcgcctatcaatggcacgctcctcaagcttctctttccagtcgccctgtgccatggtattggtcacatcactagcaatgtgtccttcgctgctgttgcagtctcatttgctcacactatcaaagctctggagcccttcttcagcgcacgggctactcagtttatccttggac

SEQ ID NO: 4123 - DNA, 281 bp, Zea mays
cgccacagcttgcgcccgcaatggcactcgtctccgcctcctcgtcctccaccaccgccgtcacggcgctccccaggaatgggcagcgggcgtcgtcctccttcctcggcggcaagacgctgctgagacaggccgaggcggcccggccgtcgttcgccgtgcgcgccgcggcggaccccaacaggccgatctggttccccggcagcacccctccgccgtggctcgacggcagccttcccggcgacttcggctttgatccctggggcctcggatctgacccg

SEQ ID NO: 4124 - DNA, 277 bp, Zea mays
cttgccacttctattgtcacagaatttacttcacttgctggaattatggcacgccattatgctttgagagacggcatccctgaagagattgcagaagcactatttgagataacactccctcggtcttcgggtgatgtgtttccaagaacagatgctggtatagttcttgcggttgctgataggtacttgtgcatgcaaatgtagcttactcaggccttgttcggttattcctatcctatgtggattgggatggattaagagagattttgacttgcta

SEQ ID NO: 4125 - DNA, 277 bp, Zea mays
gacaagaagaaagcttctgtctttttcaagactaatgctgatgggaacacagcatgtgccaaggaaatgacaaagctctctggcatctctgaaatcatccccgagatggagatctgcgattttgactttgaaccctgtggctactccatgaatgcgatccatggctctgcattctctacaatccatgtgacgcccgaggacggtttcagctatgccagttacgaggttatgggcttggatgccactgctctatcttatggtgaccttgtcaagaggg

SEQ ID NO: 4126 - DNA, 278 bp, Zea mays
cgcacagccaaaacctacctagccgccgccgcatgctcccccatcgccgccaagatgcagatctttgtgaagactctgacggggaagaccatcactttggaggtggagtcctcggacaccattgacaatgtgaaggccaagatccaggacaaggagggcatccccccggaccagcagcggctcatcttcgccggcaagcagctcgaggacggtcgcaccctcgccgactacaacattcagaaggagtccaccctccacctggtgctccgcctccgcgg

SEQ ID NO: 4127 - DNA, 277 bp, Zea mays
ctcgtcctccaccaccgccgtcgcggcgctccccaggaatgggcagcagcgggcgtcgtcgtcgttgttctcctcctcctcctcttcctccttcctcgtcggcaagacgctgctgaggcaggccgaggcagcccggccgtcgttcgccgtgcgcgccgcggcggattccgacaggccgatctggttccccggcagcacccctccaccgtggctcgacggcagccttcccggcgacttcggctttgatccctggggcctcggatctgacccggagagc

SEQ ID NO: 4128 - DNA, 273 bp, Zea mays
aaaattagcactgcatcatttgcactaatcattgatggtaaatcaataccctatgctttggaagatgatgtcaagtttaagttcttggatcttgctatcaactgtgcatcagtgatatgttgccgatcttcaccaaaacagaaggcactggtcacaagatttgttaagcaagtaacacataaagtgactttagcaataggtgatggggcaaatgatgttggcatgcttcaagaagctgacataggggttggcatcagtggtgctgaaggaatg

SEQ ID NO: 4129 - DNA, 274 bp, Zea mays
gttctgcccattctacaaatccgtttggatgatgcgcaacattattcacttcaacacattggcaaatcaggctgtggagcgggcagatggtactgacggccataagataacatacagtgtcataaagcatcggttgggggatctattttatcgcctagtatcccaaaagttcgaggatcctgcagaaggcgaagaagctttggtcggcaagtttaagaaactttatgacgaccttaccactgggttccgcaacctagaagatgaggcacggtga

SEQ ID NO: 4130 - DNA, 271 bp, Zea mays
cgggcctcgacgccgacgccgccgctgagcgcgacgccatcgtcttccgctcctacatcgccctcggctcctaccagctggtgatcagcgagatcgactcgtcggccgctacctcgctgcaggccgtgaagctgctcgcgctgtacctcactggagacaaggaaggtgctatctccagtctcaaggaatggttgagtgattcagcaattggaagcaatcctgttctgcgattgattgctggaattatatttatgcatgagcaggactacaa

SEQ ID NO: 4131 - DNA, 271 bp, Zea mays
cgcggcggtgtcagttgcggcgggggcttacggactccccttccggccggagggcgccgctcaccaccgcgagctctccgcggcagtggccgtcgtcgagcgcgcctgctgcctctgcgttgacgtgaagagatcactgttttcaggtggcagcagtattcttgagaagaatgaccaaagtcctgttacagttgcagatttcggagtgcaggcccttattagtttggagctccagagattgttcccatcgatacctcttgtggccgaagag

SEQ ID NO: 4132 - DNA, 269 bp, Zea mays
aagcaagctagctcgatctactactactactactagctggtacacatactagccatcctgccagccagccagcttgccatggcgcccaccgtgatgatggcctcgtcggcaaccgccgtcgccccgttccagggtctcaagtccgccgccagcctccccgtcgcccgccgcagcaccaggagcctcggcaacgtcagcaacggcggaaggatccggtgcatgcaggtgtggccggcctacggcaacaagaagttcgagacgctgtcgta

SEQ ID NO: 4133 - DNA, 271 bp, Zea mays
cagaggagaggagaaagggcaaaaggcaacaccgcccgcgacgaccacgatggcagcctcgctccaagtccaagccgcggccaccttgatgcaaccggccaagatcggcggccgggcgccgtccgcctcgctgccgtcgtcccgcccgtcgtcgcaactcgccagggcgttcggcgtcgacgccggcgccgccaggatcacgtgctccctccagtccgacgtcagggacgtcgccagcaagtgcgtcgacgccgccaagctcgccggcttc

SEQ ID NO: 4134 - DNA, 269 bp, Zea mays
gtggtgttgtgaggagctgctgccgctgctctccagtctccaccgatggcgatcaagaacatgacggtggcggcgacgacgcggtcgctggacgcggacatgacggtggacgagttcaaggagtggctgcggcggttcgacacggaccaggacgggcgcatcagccgcgacgagctgcggcgcgctctgcgtgccatccgctcccggttcacggggtggaggagcaggcagggcatcagttatgccgacacagacggcgacggctacat

SEQ ID NO: 4135 - DNA, 269 bp, Zea mays
tacgtggtcatcaagcacgccgcgctcttcacgtccacggtcatgagcctgctcctggcgcgccccaacgtcaagctgttcaacgccgtggccgtggaggacctcatcgtcaggggagggcgcgtcggcggcgtcgtcaccaactgggcgctcgtgtccatgaaccacgacacgcagtcctgcatggaccccaacgtcatggaggccaaggtcgtggtcagctcctgcggccacgacgggcccttcggcgccaccggcgtcaagaggct

SEQ ID NO: 4136 - DNA, 266 bp, Zea mays
gaccccttcgaggtcttggtccataagggagtgggcgagctggtgaagtttgctacagagaggggccgcaaagctaggcctaacttgaaggtgggcatttgtggagaacacggtggagagccttcgtctgtagccttcttcgcgaaggctgggctggattacgtttcttgctcccctttcagggttccgattgctaggctagctgcagctcaggtgcttgtctgaggctgcctcctcgttggcaaccggattgcctgctgctggtg

SEQ ID NO: 4137 - DNA, 268 bp, Zea mays
caaggagagtacgtggaggagcagccatggcttcatcggtggccgccgcggcgagcacattcctgggcacccgcctggcggacccggcgccacagaacgggcgcatcgtggcccggttcgggttcgggttgggcggcaaggcgaagctgctccgaagaaggtggcgaagacatcgacctcctgtgaaggaccgctggtcggcaagtttaagaaactttatgacgaccttaccactgggttccgcaacctagaagatgaggcacggtga

SEQ ID NO: 4138 - DNA, 288 bp, Zea mays
caacggtccatctcaactagccgtgaaggaagctgcctggggcctcccccgctacgccgccatctcacaggaaaatggtctggtgccgatcgtggagcccgagatccttctggatggcgagcacggcatcgagaggaccttcgaggtggcgcagaaggtgtgggcggagaccttcttctacatggccgagaacagcgtgatgttcgagggcatcctgctgaagcccagcatggtgacccctggtgccgagtgcgaggagaaggccaccccggagcaagtagccgagta

SEQ ID NO: 4139 - DNA, 288 bp, Zea mays
ccggtggcgcattcagggagtatatcgacacgtttgacggctacaccttcctgtacccgaagaattggatccaggtccgtggagctggcgcggacatattcttcagagaccccatggtcctcgacgagaacatgtcggtggagatatcgtcgccttcgtcgtccaggtacatgagcgtcgaggacctcggcccaccggagaaggctgcagagaaggtcctcggtcagtacctgacggagttcatgtccaccaggctgggcgttcggcgtgaatccaacgtcctatcgg

SEQ ID NO: 4140 - DNA, 283 bp, Zea mays
gcattttcagaagccgaagtggcatgaatatcgaggatgacgaggtcgcagtgaaaatagaaaaaagtgtgaacgagatcctcttcagggcattaactctcctggcaatcactgcactgaagtctgcatgagcagtcatcacgattttataggtttgtcgatgcagttgtgatatactcacctatgtctatgtggttcagaagtgtagtactgctttctgtaggaccaagttccacctgcccaaaccatggttatagcttctcagttctcattgatctcgtag

SEQ ID NO: 4141 - DNA, 278 bp, Zea mays
cggagaaggcaaggcttgcattttgcaagttcatggtgactccatctactctactcatcttggatgaaccgacaaaccatcttgatatcccatcaaaagacatgcttgaggaggcaatatcagaatatacaggcaccgtcataacagtttctcatgaccggtacttcataaaacaaattgtcaacagagtcatcgaagtgaaagatcagactatccaagactatcaaggagattacaattactaccttgagaggcaccttgaagcccgagaaagggaa

SEQ ID NO: 4142 - DNA, 279 bp, Zea mays
cccacctcatggcggacaaggagcctgtcgtggagcggccagacgcgggtgaggaggaggaggacgcctcagccgccgccgccgctggggaggaggaggacacgggcgcccaggtggctcccatcgtgcggcttgaggaggtagccgtcaccaccggcgaggaggacgaggacgtcctgctcgacatgaaggcgaacttgtaccgattcgacaaagacggtaaccaatggaaggaacggggcacgcgcgctgtcaagcttctcaagcacaagcagaccg

SEQ ID NO: 4143 - DNA, 217 bp, Zea mays
cttcgcggcagcgtgtcacttaaagttgtgcaagtacggcagtcaaatgtcaacagatttaagtgcaatagcatacgaagtaacctctttgataggctaacaagggttgtcaggtcctacgcaaatgcagttctaagttcgtttgaagaccctgagaagattctagaccaggcagttctggagatgaatgatgtcttgacaaagatgcggcaggcca

SEQ ID NO: 4144 - DNA, 278 bp, Zea mays
cggacaagttatcgaaccccactccatcagtgctgggctcgattaccctggcgttggacccgagcacagtttcttgaaggacattggacgtgccgaatacgatagtgtgactgaccaggaggcactggatgctttcaagcgcgtgtctcggttggagggcatcatccctgccctggagacctcccacgcgctggcctaccttgagaagctctgcccgacactggcggacggcgtgagggtggtggtgaactgcagcgggcgaggagacaaggacgtgc

SEQ ID NO: 4145 - DNA, 276 bp, Zea mays
gccaaccatctaccagcgactcagcgagcgagagcagcacacactgcacgcagctagctaggagcagcagcagcggcggcgatggcggcctccatgatctcctcgtcagctctggcggtggcgcctcagggcctgccgcccctcggccgccgcgcctcctccttcgccgtcgtctgctccaagaagaagatcaagaccgacaagccctacgggattgggggtggcctgaccgtcgacgtcgacgccaacgggagaaagggcaagggcaagggcgtg

SEQ ID NO: 4146 - DNA, 271 bp, Zea mays
ggacacggtacaggttattgcaggccgtgagacaggaaaggttggagaagtcacacgccttttcaagcacaacagcacggtgatcgtgaaggacctgaacttgaagtcgaagcacaagaaaggcacagacgatgaacccggtgaaatcgtcatgattgaaggccccattcatagctcaaatgtgatgctctactctaaggagaagagtgtggtaagcagggttggccacaaattcctggaggacgggaccaaggtccgatacctggtcaag

SEQ ID NO: 4147 - DNA, 269 bp, Zea mays
gtcatttaccagtatcgaagagttccttgatccacttgagctgtgctacaaatcactgtgtgactgctgcgacaaggccatcgcggacgggagcctcctggacctcctgcgccaggtgttcacgttcgggctctccctggtgaagctggacatccggcaggagtcggagcggcacaccgacgtgatcgacgccatcaccacgcacctcggcatcgggtcgtacctctagtggcccgaggacaagaggcaggagtggctgctgtcggagc

SEQ ID NO: 4148 - DNA, 281 bp, Zea mays
gcgcgccatcccctggatcttctcgtggacccagaccaggttccacctccccgtgtggctgggagtcggcgccgcattcaagttcgccatcgacaaggacgtcaggaacttccaggtcctcaaagagatgtacaacgagtggccattcttcagggtcaccctggacctgctggagatggttttcgccaagggagaccccggcattgccggcttgtatgacgagctgcttgtggcggaagaactcaagccctttgggaagcagctcagggacaaatacgtgg

SEQ ID NO: 4149 - DNA, 277 bp, Zea mays
ggaaagacgcgtttcggcggtggcggcacggcgagcccgcggccaagcgccaggccgcgagggacgatggcccctccgaatccgctgaagacggtaccgtcgtagccgagatatcgaagaacaagaaggtatccgttaggagctggaaaggcagggtcttcgtcgacttacgcgagttctacttcaaggacggcaagactctccccacccgcaaaggtatatcacttcaattagatcagtggaagatattgaaggacaacatcaaagccataaatga

SEQ ID NO: 4150 - DNA, 277 bp, Zea mays
cttttggctcggcagctaacgacctgcagccaaccatctaccagcgactcagcgagcgagagcggggggacgcagctagctaggagcagcagcagcggcggcggcgatggcggcctccatgatctcctcgtcagctctggcggtggcgcctcagggcctgccgcccctcggccgccgcgcctcctccttcgccgtcgtctgctccaagaagaagatcaagaccgacaagccctacgggattgggggtggcctgaccgtcgacgtcgacgccaacggg

SEQ ID NO: 4151 - DNA, 277 bp, Zea mays
cccgtcgcatcccatcccactaccacccatctcgtcgtccgccgattcgatccggttcttccaggccaggggcagtgatggcgacgaagaggagcgtgggcacctcggcgaggcggatctgacagggaagaaggtgttcgtgcgcgccgacctcaacgtcccgctcgacgatgcccagaagatcaccgacgacacccgcatccgcgcctccgtccccaccatcaagttcctcctcgagaagggcgccaaggtcatcctcgccagccacctgggtcgt

SEQ ID NO: 4152 - DNA, 277 bp, Zea mays
cttattcatctgatggtcatgatggtattgtgagggaagatggtgtaattatgaatgatgaaacagtttatcagttgtgcaaacaggctgtttcacaggctcgtgccggtgctgatgttgtcagccctagtgacatgatggatggccggattggagcacttcgctctgctctggacgccgagggcttccatgatgtctccattatgtcctacaccgcaaagtatgccagttcattttatggccctttccgagaagctttagattcaaatccaagatt

SEQ ID NO: 4153 - DNA, 273 bp, Zea mays
gttcgggctctccctggtgaagctggacatccggcaggagtcggagcggcacaccgacgtgatcgacgccatcaccacgcacctcggcatcgggtcgtaccgcgagtggtccgaggacaagaggcaggagtggctgctgtcggagctgcgaggcaagcgcccgctgctgcccccggaccttccccagaccgacgagatcgccgacgtcatcggcgcgttccacgtcctcgcggactcccgcccgacagcttcggcccctacatcatctccatg

SEQ ID NO: 4154 - DNA, 271 bp, Zea mays
tttgtgcacaaaggcatgattaagcaggggtctgtagaggttcgcaaggaagtagatgcttctgttgatgcaaaattgaggcagggggctaaggctcatcacactgcaacacatctactacaatctgctcttaaaagtgtagttggttcagaaacttcacaggctggttcccttgtggcgtttgaccatctccgatttgacttcaatttccatcgtccactttctgaagaggaattaacaacaattgaagcacttataaaccaatggattg

SEQ ID NO: 4155 - DNA, 270 bp, Zea mays
ctccgctcaaaataccgatcaggacaaacaatgctgaatcgtggttgcttacgacatagggtgacgaagagctcaggatctccagaggcgatggcagcagcatctttgtgctgttcaaggagggaagtactcttctatactgagatccaaatcccgagtccatgatcgttgaagctgaaccgtgaagtagttatactgcttatgcctttctttcttatagtaatatgctccgtctcaaaataagtcaatttctagaatcacttaaagtca

SEQ ID NO: 4156 - DNA, 273 bp, Zea mays
agctgctctactccaagttcgtgtcgctggtgcgctccgaccccatcatccagacgctgctccccatgtcgcccaagggcgagatctgcgacgtcaacggcgtctgcgtggacgccacggaggacgagctcttccgcctcaccaccaaggaggggaagctcaccgtggagcgcgagaaggtgaagatcgagacgcagcccttctcccccgtggtgcagttcgagcaggaccccgtgcagatcctggacgcgctgctcccgctctacctcaaca

SEQ ID NO: 4157 - DNA, 274 bp, Zea mays
tgcccacactatcaaagctctggagcccttcttcagcgcactgctactcagtttatgggtggacagcaagttcccttctctctgtggctttctcttgcccctgttgtcatcggtgtttcaatggcatcccttactgagctctcattcaactggactggcttcatcaatgccatgatatcaaacatctcattcacctacaggagcatttattccaagaaagccatgactgacatggatagcaccaacgtgtatgcttacatttcaataattgctc

SEQ ID NO: 4158 - DNA, 269 bp, Zea mays
catctaccagcgactcagcgagcgagagcagcacacacgcagctagctaggagcagcagcagcggcggcggcgatggcggcctccatgatctcctcgtcagctctggcggtggcgcctcagggcctgccgcccctcggccgccgcgcctcctccttcgccgtcgtctgctccaagaagaagatcaagaccgacaagccctacgggattgggggtggcctgaccgtcgacgtcgacgccaacgggagaaagggcaagggcaagggcgtgt

SEQ ID NO: 4159 - DNA, 249 bp, Zea mays
ccgattgccaggctagctgcagctcaggtgcttgtctgaggctgcctcctcattggcaaccggattgcctgctgctggtggatgtggtgatcaacagtattattacagagccatgctatgtgaacattactagtagcagtgctcataaaagctacaatcccatgtcctttttttccccagtcatgtaaaacttccaaactgctccatggttcaaaactctgttcttcaatacatcatcaattatcgatt

SEQ ID NO: 4160 - DNA, 266 bp, Zea mays
tctgaactcacctgatcgcgcctgcagtcttgcaaagcaggcttttgacgaggccatctcggaactggacaccctgagcgaggcgtcctacaaggacagcactttgatcatgcagctccttcgtgataacttgaccctatggacctctgacatctcggaggaccctgctgaagagattagggaggcgcccaagcgggactcgagtgaggggcagtaaagccggctttatgtgcctagaaactagtagctagtgtttgctgctgtcg

SEQ ID NO: 4161 - DNA, 246 bp, Zea mays
aaaaaagcagccgcaatggcgagcagcaccatggccctctcctccacggccttgggcggcaaggccgtgaacgtgccgtcgtcgtccgccttcggcgaggcgcgcgtgacgatgcgcaagacggcggcgaaggccaagccagctgcagcgtccgggagcccgtggtacggccccgaccgcctgctgtacctgggcccactgtccggcgtagcgccgagctacctgacgggcgagttcccgggcgac

SEQ ID NO: 4162 - DNA, 271 bp, Zea mays
agaggagccaccgagctacctgacgggcgacttcccgggcgactacggctgaaacacgggagggctgtcggcggacccggagacgttcgccaagaaccgggagctggaggtgatccactcacgctgggccatgcagcgcgcgctctgctgcgtcttccccgagctgctcgcccgcaaccgcgtcacattcggcgacgccgtatggttcaaggccggctcccagatcttcagcgatggctagctggactacctcgggataccgatcctcatc

SEQ ID NO: 4163 - DNA, 270 bp, Zea mays
ctcccggtgaccatccgactcctggaccctcccctccacgagttccttccagaagggaacatcgaggacattgtaagtgaattatgtgctgagacgggagccaaccaggaggatgccctcgcgcgaattgaaaagctttcagaagtaaacccgatgcttggcttccgtgggtgcaggcttggtatatcgtaccctgaattgacagagatgcaagcccgggccatttttgaagctgctatagcaatgaccaaccagggtgttcaagtgttc

SEQ ID NO: 4164 - DNA, 270 bp, Zea mays
gggcaagcagcaggtcatggtcggctactccgactccggcaaggacgccggccgcctgtccgcggcgtggcagctgtacagggcgcaggaggagatggcgcaggtggccaagcgctacggcgtcaagctcaccttgttccacggccgcggaggcaccgtgggcaggggtggcgggcccacgcaccttgccatcctgtcccagccgccggacaccatcaacgggtccatccgtgtgacggtgcagggcgaggtcatcgagttctgcttcgg

SEQ ID NO: 4165 - DNA, 269 bp, Zea mays
tgctggacagggtgttcaacattctacgtgagaacaacccagatcttgctggggataggcgtaggaccgttatgaggccaccacaagttcttacggagggaacaaagaagacagtttttgttaactttatggatttgtgtaaaacgatgcataggcaacctgagcatgtgatgatgtttttacttgctgaaatgggaacaagcgggtcacttgatgggcagcaaaggttggtgatcaaaggaagatttgcccccaaaaactttgaagca

SEQ ID NO: 4166 - DNA, 273 bp, Zea mays
cgtcccgcattcgtatcctctcctcactctcgccgccgccgcttcccctgcgccccgagccaagatgaatgttgaaaagctcaagaagatggcaggtgctgtgcgcactggggggaagggtagcatgcgcaggaagaagaaggcagtccacaagactacgaccacagatgataagaggcttcagagcaccctgaaaagaataggagtgaacaccattcctggtattgaagaggtcaacatctttaaggatgatgttgttattcagtttgtgaa

SEQ ID NO: 4167 - DNA, 270 bp, Zea mays
cataaaaccagtgcaagcagaagcagcgcaatggcgagcagcaccatggccctctcctccacagccttcgccggcaaggcagtgaacgtgccgtcgtctctcttcggcgaggcccgcgtgacgatgcgcaagacggcggcgaaggcaaagccggcggcgagctccggcagcccgtggtacggccccgaccgcgtgctctacctgggcccgctgtccggcgcgcccccgagctacctgacgggcgagttcccgggcgactactgctgggac

SEQ ID NO: 4168 - DNA, 271 bp, Zea mays
ctcgacagtccgggtcccgtcgccggcgtgggtagaaacagcggacaagctggagttgaggcggcggagagcaagccgctgggcgccgcggcccggcgtccgtctcgagctcggtcgttgaccccgtcgagtacaacgcgatgctcaagcagaagctggagaaggacctcgctgccatcgctatgtggagggcttctggtgcagcacctccagatctttctgcggctgctgcttccttgccaagtgtcgatgttccacatgcagctcctct

SEQ ID NO: 4169 - DNA, 176 bp, Zea mays
cataaaaccagtgcaagcagaagcagcgcaatggcgagcagcaccatggccctctcctccacagccttcgccggcaaggcagtgaacgtgccgtcgtctctcttcggcgaggcccgcgtgacgatgcgcaagacggcggcgaaggcaaagccggcggcgagctcctggagcccgtg

SEQ ID NO: 4170 - DNA, 248 bp, Zea mays
ctcgacagtccgggtcccgtcgccggcgtgggtagaaacagcggacaagctggagttgaggcggcggagagcaagccgctgggcgccgcggcgcggcgtccgtctcgagctcggtcgttgaccccgtcgagtacaacgcgatgctcaagcagaagctggagaaggacctcgctgccatcgctatgtggagggcttctggtgcagcacctccagatctttctgcggctgctgcttccttgccaagtgtc

SEQ ID NO: 4171 - DNA, 246 bp, Zea mays
gcaaccggtccaacactttcacgctcagcttcagcaatggctgcctccaccatggcgatctcctccacggcgatggccggcacccccatcaaggtgggttccttcggcgagggccgcatcaccatgcgcaagaccgtgggcaagcccaaggtggcggcgtccggcagcccctggtacggccccgaccgcgtcaagtacctcggccccttctccggcgagcccccgggctactcaccggcgagttcc

SEQ ID NO: 4172 - DNA, 245 bp, Zea mays
agcttgcgcccgcaatggcactcgtctccgcctcctcgtcctccaccaccgccgtcacggcgctccccaggaatgggcagcgggcgtcgtcctccttcctcggcggcaagacgctgctgagacaggccgaggcggcccggccgtcgttcgccgtgcgcgccgcggcggaccccaacaggccgatctggttccccggcagcacgcctccgccgtggctcgacggcagccttcccggcgacttcggc

SEQ ID NO: 4173 - DNA, 246 bp, Zea mays
attttctctgggaacggattaaaaagagcgaactcgaattgcttgctgacaagaaatgcgttgcccatcttacaggagaggggaatgcattctgtgatcttccggaagataccatgctaccaggagaagtgtagtttagttacagaagcaacagcagcggaatgcatttgccaatacattagctgagacttgaaacatctgcttgccagatgcagcaactacttttatatatatatgtgtatattc

SEQ ID NO: 4174 - DNA, 287 bp, Zea mays
gaaggccatcccgccacactgcttcgagcgctcggtgctcaagtccttctcgtacgtggtccacgacctggtgatcgccgcggcgctcctctacttcgcgctggccatcataccggcgctcccaagcccgctccgctacgcggcctggccgctgtactggatcgcgcaggggtgcgtgtgcaccggcgtgtgggtcatcgcgcacgagtgcggccaccacgccttctcggactactcgctcctggacgacgtggtcggcctggtgctgcactcgtcgctcatggtgc

SEQ ID NO: 4175 - DNA, 283 bp, Zea mays
gccggcgaagagcgcccagtcgcccaccaggatgaagtttgttgctgcctacctgcttgctgtcctcgctgggaactccagcccctctgccgaggacttgacagccattctggagtcagttggctgtgaagttgacaatgaaaagatggaactccttctgtcccaactgagcggtaaggacattaccgagctcattgctgctggcagggagaagtttgcttcagtcccatgtggcggtggcggtgtggctgttgtcgcagctgcccctgctgctggcggcgct

SEQ ID NO: 4176 - DNA, 281 bp, Zea mays
ggactggcgctgcttatgatgaaggtgctgaagcagccgaatggttttccacatttttggggtgcccaactcgactggtgcgctttaacgaagattcagaaactaggctgactgaccctgactatgcacgaggttacaaaaccatgttttctgatggcttcccttatctgatagtctctcagggctcattggatgcactaaatgagatactcaaagagcctataccaattaaccgcttcagaccaaatattttagtggaggggtgccacccatatgcagag

SEQ ID NO: 4177 - DNA, 279 bp, Zea mays
cgcatactgcatacacaacgcagagcatcagaagcagctgcgatctgatcgacatggctgccgccaccatggctatcacctcccgcgcgctcgtcggcaagccggcggctggcacgagggacgtcttcggcgagggccgcatcaccatgcgcaagaccgccgccaagcccaagccggcggcgtccggcagcccatggtacggtgccgaccgcgtcctgtacctgggcacgctgaccggctcgcccccgagctacctgacaggcgagttccccggcgact

SEQ ID NO: 4178 - DNA, 280 bp, Zea mays
gccaaatgctttgaaccttgcaattcagaaacctgaatttgcactgatcactactgattccgggattgtgttgctgcacaattcaaaagtcatttctacaacaaaagttaactatgccatcacgtcatcttcagtgtctcctgatggcacagaagctgttgtgggtgctcaagatgggaaactgcgaatctattccatcagtggcgatacactcacagaagaagctctgcttgagaagcaccgcggtgctatcacttccatacattattcgccagatgtt

SEQ ID NO: 4179 - DNA, 280 bp, Zea mays
gtgcggtctgcagttcagcggaaggccatcgtgtacagaagccacacattgttcacagctacaaagttagcttcactaggaccagccatcatctgtgtaaaagcttaaacgagagaactacaaggcactgcctgcatcggttccatgttaatgcttcgcccgatgacgacgacttccgctcgtcgcgtaacatagcgatcagtttgttcaagcggtacaagaatgtcattgaccgaggaggtggagaaaacctaaatgagtttgtcagtgctggagtgac

SEQ ID NO: 4180 - DNA, 281 bp, Zea mays
tcgaagaatgcttccaaacatatgttcggccgacgtatcatcaatttttgactgatttttgcaaggagcttactggcatacaacagattcaggtggacagaggtgtgcctctaggtgaagccttactcatgcacgataaatggctagaggacaagggcatcaagaacacaaactttgctattgtgacctggtctaactgggactgccgtataatgctggagtcggaatgcagatttaagagaatcaggaagcccccttattttaacaggtggatcaacttg

SEQ ID NO: 4181 - DNA, 282 bp, Zea mays
cacgcacgcatacacagcacagagtgaggtaagcatccgaaaaaagctgtgatctgatcgacatggccgccgccaccatggctctcacctcccgcgcgctcgtcggcaagccggcgaccagcaccagggacgtcttcggcgaggggcgcatcaccatgcgcaagactgctggcaagcccaagccagcggcgtccggcagcccctggtacggggccgaccgcgtcctgtacctgggcccgctgtccggccagcccccaagctacctgaccggcgagttccccg

SEQ ID NO: 4182 - DNA, 285 bp, Zea mays
cggctcgagaccggccgccacaccaccgtaccccgacccctcgacaacaatggccaccgtcctaggcagcccccgcgcgccggccttcttcttctcgccgtcctccctccgtgccgcgccggcgcccaccgccgtggcgctgcctgcggccaaggtgggcatcatgggccgtagcgccagcagcaggggcaggctgcgcgcgcaggccacctacaacgtgaagctgatcacgccggatggggaggtggagctgcaggtgcccgacgacgtgtacatcctggacca

SEQ ID NO: 4183 - DNA, 282 bp, Zea mays
cagccaaccatctaccagcgactcagcgagcgagagcagcacacacgcagctagctaggagcagcagcagcggcggcggcgatggcggcctccatgatctcctcgtcagctctggcggtggcgcctcagggcctgccgcccctcggccgccgcgcctcctccttcgccgtcgtctgctccaagaagaagatcaagaccgacaagccctacgggattgggggtggcctgaccgtcgacgtcgacgccaacgggagaaagggcaagggcaagggcgtgtaccag

SEQ ID NO: 4184 - DNA, 282 bp, Zea mays
ccagcagccgctctccccagccccactctctccatctagagctccctaactgcaccggccgccacaccaccgtaccccgacccctcgacaacaatggccaccgtcctaggcagcccccgcgcgccggccttcttcttctcgccgtcctccctccgtgccgcgccggcgcccaccgccgtggcgctgcctgcggccaaggtgggcatcatgggccgtagcgccagcagcaggggcaggctgcgcgcgcaggccacctacaacgtgaagctgatcacgccggag

SEQ ID NO: 4185 - DNA, 275 bp, Zea mays
cgatgctggggctgctaaggagctgatggcaaacctagtaagcatgcagtcatcactttctgatgttaacaagttgatcaaggagatccggtctgatgtttctgaagtagttgcagctgacgagtttgagtacaaggatccagttgatggctctgtgtccaagcaccagggcatccgatacctcttcggagatggttcacgactggtgttccgtctatccggaaccggttctgttggtgccaccatccgtgtctacatcgagcaatacgagaagg

SEQ ID NO: 4186 - DNA, 277 bp, Zea mays
cacacactcgggtaaagctatctcgagctagctagctgctgtaaccgttgccatggccaaaatggtgttgctctgcgtgctcgtctccttcctcctgatgcccttggcctccctagccctgacgcaggacttctgcgtcgccgacctgacctgcagcgacacgccggcggggtacccgtgcaagtccagcgtcaccgccaacgacttctacttccacggcctggccggccagggcaaaataaacccactcatcaaggccgccgtgaccccggccttc

SEQ ID NO: 4187 - DNA, 279 bp, Zea mays
gatctccatctcgaccgtcgctcaccgggaagctacgctacgacgaagcatggcgtccgtcaccgcccgcgccccggtcgcagccctgcgcccgtcgtcgtcgtcggccttccttggccactctagccgcctcggccgcactgctaccgcgtcgccgacgaggcggagcctcaaggcggaggccaagggcgagtggctcccgggccttccctcccccgcctacctcgacggcagcctgccgggtgacaatggcttcgacccgttgggcctggcggagga

SEQ ID NO: 4188 - DNA, 89 bp, Zea mays
atagcaaccggtccaacactttcacgctcagcttcagcaatggctgcctccaccatggcgatctcctccacggcgatggccggcacccc

SEQ ID NO: 4189 - DNA, 274 bp, Zea mays
tccctacgggattgggggtggcctgaccgtcgacgtcgacgccaacgggagaaagggcaagggcaagggcgtgtaccagttcgtcgacaagtacggcgcgaacgtcgacggatacagcccaatctacaacgaggatgactggtctcccaccggcgacgtctacgtcggtggaaccactgggcttctgatctgggccgtcaccctcgctgggatcctcggcggcggcgccctcctcgtctacaacaccagcgccctctccggctaaggatatcca

SEQ ID NO: 4190 - DNA, 273 bp, Zea mays
ggaaggcgcccttcgtcgtcagggccagctccagccctccagccaagcaaggtgccgacaggcagctgtggttcgcgtccaagcagtccctctcctacctcgatggcacgctgcccggcgactatggcttcgacccgctgggcctctcggacccggaggcaccgggggcttcatcgagcccaagtggctggcctatggcgaggtgatcaacggccgctacgccatgctgggcgcggtgggcgccatcgccccggagatcttcggcaagatggg

SEQ ID NO: 4191 - DNA, 274 bp, Zea mays
gcattcccgatttccgattcccaatccagcaaaccctaccagccttttgcaaactcagagagggacccgatggcacccaaggcggagaagaagccggcggcgaagaagcccgcagaggaggagcccgcggccccggcggagaaggcccccgctgggaagaagccgaagggggagaagcggctcccggcgggaaaatccgccggcaaggaaggcggtgttgacaagaaggggcggaagaaggccaagaagagcgtggagacgtacaagatctaca

SEQ ID NO: 4192 - DNA, 273 bp, Zea mays
gcttgcgcccgcaatggcactcgtctccgcctcctcgtcctccaccaccgccgtcacggcgctccccaggaatgggcagcgggcgtcgtcctccttcctcggcggcaagacgctgctgagacaggccgaggcggcccggccgtcgttcgccgtgcgcgccgcggcggaccccaacaggccgatctggttccccggcagcacccctccgccgtggctcgacggcagccttcccggcgacttcggctttgatccctggggcctcggatctgaccc

SEQ ID NO: 4193 - DNA, 214 bp, Zea mays
gcaaaagccaaaaggcatcaccgccgcgacgacgatggcagcctcgctccaagccgcggccaccctgatgcagccggccaagatcggcggccgggcgccctttgcctcgctgccgtcccgcccgtcgtcgcaactcgcctgcagggcgttcggcgtcgacgccggcgccgccaggatcacgtgctccctgcaggacgtcgccagcaggtgcgtc

SEQ ID NO: 4194 - DNA, 271 bp, Zea mays
atgcatcatgcacatcaattatatatggactacgtacgcagatgataaatgaagtgcgggaactcctgcggccggcggagatgccgggcttcttgacggactccaccgtccgccgcttcctccacgctaggagctggagcgcacgcaagccaccaaggctctcaaggaaaccgtcaagtggaggcgccagtacaggccggacgaaatccgttgggtatagtactaataagtagccgtactgcatgcacgtttgtactgtacgtacgtacgt

SEQ ID NO: 4195 - DNA, 271 bp, Zea mays
cgcacggcgacaagtccggcgaccacaaggaaaagaaggacaagaaaaagaagaagcacggcgagggccacgaccacgacggcggccacagtagcagcagcagcgacacgactgagatctggtgtcgcagcacaggtgcaacacatgtatgcttgctggatggaggattcataccagctgatgctgatgtagtgtttcactggtgtcatgcatgtatcgtgctattataatcaaaaagaaaaaagaaataacagtcagggatggtttgttt

SEQ ID NO: 4196 - DNA, 278 bp, Zea mays
ctccagccctacagcgaggtgttcggcctccagcggttccgcgagtgcgagctcatccacggccgatgggccatgctcgccaccctcggcgccctcaccgtcgagtggctcaccggcgtcacctggcaggatgctggcaaggtggagctggtggatgggtcctcctacctgggccagccgctgccgttcaccatctcgacgctcatctggatcgaggtgcttgtgatcggctacatcgagttccagcgcaacgccgagctcgacccggagaagaggct

SEQ ID NO: 4197 - DNA, 275 bp, Zea mays
caactttcttgctttctttcttcatcctgctgctgctgcatccatcagtgagcagtccacctgccaaggcagcagcagcaacaactgcggctaacttacatggactgacacatggttcacgtgcgtgcgtacgtacgtgcagcaacaacgccggcaagtacgccgaccgtttcgccgtgtcggaggacggcgtggagatgaccttcgccaccaactacctgggccacttcctgctcaccaggctgctgctggacaagatggcggacacggcgcgg

SEQ ID NO: 4198 - DNA, 273 bp, Zea mays
gccggagatcctgctggacggcgagcacggcatcgagcgcacgttcgaggtggcgcagaaggtgtgggccgaaaccttctacgccatggcggagaacaacgtcatgttcgagggcatcctgctgaagccgtccatggtgacgcccggcgcggaggccaaggacagggccaccccggagcaggtggccgcgtacaccctcaagctcctccaccgccggatccccccctccgtgcccgggatcatgttcctctcgggcgggcactcggaggtgga

SEQ ID NO: 4199 - DNA, 272 bp, Zea mays
ggagagtacgtggaggagcagccatggcttcatcggtggccgccgcggcgagcacattcctgggcacccgcctggcggacccggcgccacagaacgggcgcatcgtggcccggttcgggttcgggttgggcggcaaggcgaactgactccgaagaaggtggcgaagacatcgacctcctctgaccggccgctgtggttccccggcgccgtggcgcccgactacctggacggctcgctggtcggcgactacgggttcgacccgttcggtctcg

SEQ ID NO: 4200 - DNA, 273 bp, Zea mays
agaagacaaacgccggcacgcgcacgcagacacgatggcgatctgcagcgcgcacactaccacctccctgcgctccccatgcacgaccgtctcgaacgcaggtctgaggcagaagcaagtcatcttcgtcaccagcaacaggaggagcggcggcggcaggaggcacggaggggcaaggagcttccaggtctcgtgctccgtcgacaagccggtggtgattggcctggcggcatactcagggtgcggcaagagcaccttcatgcgccggctcac

SEQ ID NO: 4201 - DNA, 266 bp, Zea mays
cacgcagctagctaggagcagcagcagcggcggcggcgatggcggcctccatgatctcctcgtcagctctggcggtggcgcctcagggcctgccgcccctcggccgccgcgcctcctccttcgccgtcgtctgctccaagaagaagatcaagaccgacaagccctacgggattgggggtggcctgaccgtcgacgtcgacgccaacgggagaaagggcaagggcaagggcgtgtaccagttcgtcgacaagtacggcgcgaacgtc

SEQ ID NO: 4202 - DNA, 244 bp, Zea mays
gggagctagaggtgatccactcccggtgggcgatgctgggggcgctgggctgcgtgttcccggagatcctggctaagaacggcgtcaagttcggcgaggcggtgtggttcaaggccggcgcgcagatcttctcggagggcgggctggactacctggggaaccccaacctggtgcacgcgcagagcatcctggccatctgggcgtgccaggtggtgctcatgggcttcgtcgagggctaccgttt

SEQ ID NO: 4203 - DNA, 249 bp, Zea mays
tagcaaccggtccaacactttcacgctcagcttcagcaatggctgcctccaccatggcgatctcctccacggcgatggccggcacccccatcaaggtgggttccttcggcgagggccgcatcaccatgcgcaagaccgtgggcaagcccaaggtggcggcgtccggcagcccctggtacggccccgaccgcgtcaagtacctcggccccttctccggcgagcccccgagctacctcaccggcgagttcc

SEQ ID NO: 4204 - DNA, 263 bp, Zea mays
ttcagccgccgccgcgcgtacaagcaggagcagcaaggatgccggctggccacgggctgcgctcgcggacgcgcgacctgttcgcgcgccccttccgcaagaagggctacatcccgctcaccacctacctccgcacctacaagatcggcgactacgtcgacgtcaaggtgaacggcgccgtccacaaggggatgccgcacaagttttaccacggccgcaccggtcgcgtctggaacgtcaccaagcgcgccatcggcgtcgag

SEQ ID NO: 4205 - DNA, 246 bp, Zea mays
catcgatctacacacatacatagtttcttctactacacgacgacaaacatggggaagcctgcgaagatcggagagtggggtggatacgccggcgatcgtcgggatctgagggctactccggaccggctgatcgaggtgaaggtcacggcggacaacagcagctgcatccgctccatctccttcatctacatcggagccgatggcaaaccgtacgaggaggggccatggggtttcggccatgctggc

SEQ ID NO: 4206 - DNA, 264 bp, Zea mays
gtcgagggctaccgcattgccggcgggccgctcggcgaggtcgtcgacccgctgtaccctggcggcagcttcgaccccctcggcctggccgacgaccccgaggccttcgccgagctcaaggtgaaggagctcaagaacggccgcctcgccatgttttccatgttcggcttcttcgtccaggccatcgtcaccggcaagggcccgctcgagaacctcgctgaccacatcgctgacccagtcaacaacaacgcatgggcctacgcc

SEQ ID NO: 4207 - DNA, 255 bp, Zea mays
cgcacgcatacacagcacagagtgaggtaagcatccgaaaaaagctgtgatctgatcgacatggccgccgccaccatggctctcacctcccgcgcgctcgtcggcaagccggcgaccagcaccagggacgtcttcggcgaggggcgcatcaccatgcgcaagactgctggcaagcccaagccagcggcgtccggcagcccctggtacggggccgaccgcgtcctgtacctgggcccgctgtccggccagccccca

SEQ ID NO: 4208 - DNA, 259 bp, Zea mays
cgtcaacgagggcgactacgaccacagcgtcgccgacatcatcagcaacgcgtcctgcacgaccaactgcctcgcgccattcgtcaagatcttggacgaggagttcggaatcgtgaaggggaccatgacgacgacgcactcgtacaccggcgaccagaggctgctggacgcgtcccaccgcgacctccggcgggcccgcgcggcggcgctgaacatcgtgccgacgagcacgggcgccgcaaaggccgtggcgctggtg

SEQ ID NO: 4209 - DNA, 239 bp, Zea mays
cataaaaccagtgcaagcagaagcagcgcaatggcgagcagcaccatggccctctcctccacagccttcgccggcaaggcagtgaacgtgccgtcgtctctcttcggcgaggcccgcgtgacgatgcgcaagacggcggcgaaggcaaagccggcggcgagctccggcagcccgtggtacggccccgaccgcgtgctctacctgggcccgctgtccggcgggccccggagctacctgac

SEQ ID NO: 4210 - DNA, 258 bp, Zea mays
tggagattgcccaagtacctgatgagcatgtgaatgagtttaaatcaatcgagaagtttaagatattcaacactaacaacttgtgggtgaaccttaaagctgtcaagagactagtagaggctgaggcacttaagatggaaattattccaaaccccaaggaagttgatggtgtgaaagtccttcaacttgaaactgcagctggtgcagctattcgtttctttgacaaagcgattggagttaatgttccccgctcaagat

SEQ ID NO: 4211 - DNA, 257 bp, Zea mays
atggcgtcgtccatgctctccgctaccaccgtgccactccagcaggggggcggcctgtccgagttctccgggctcaggagctccgcgtcgctgcccatgcgccggaatgccacctccgacgacttcatgtccgccgtctccttcaggacccacgcggtcggcacgagcggcgggtcgcggcgggcgccgacggaggcgaagctgaaggtggccatcaacgggttcggccgcatcgggcgcaacttcctgcggtgctg

SEQ ID NO: 4212 - DNA, 280 bp, Zea mays
gtctggagcagaacatcaagtacttctatgatatcaaggacctcagcgatttcagggctaatccagactacaagggtgtctgccacattgcacttgctcaggaaggccactgccgaccaggcgaggttctcctgggtactgattctcatacgtgcaatgctggagcctttggtcaatttgcaaccggaattggaaacactgatgcaggttttgtgatgggcactggaaaggctcttctcaaggtgccacctactatcaggtttgtattagatggagaaat

SEQ ID NO: 4213 - DNA, 280 bp, Zea mays
ggaatgcaggaggtgaagatcagcatggaggagatggcgcggatcgaggaggagcagaggtttatcgagcgggagatggaaaagggggtggtgtacatcctcggggagagcgaggtggtggcgcggccccactcgtcgctgctcaagaagctgctcgtcaactacgcctaggccttcctgcgcaacaactgccagcagggtgagaagatgctcgccatccccaagtcgcagctgctcaaggtcggcatgtcctacgagatctgatctgatctgatctgat

SEQ ID NO: 4214 - DNA, 279 bp, Zea mays
gaagacgagtgtcaagtgaacctgaaacttgcggtgtcactggctggtacagctgagtgtgagtgagtgatcgagctagctgagctccgatcctcgctagctagctaggataccgccataccacaagtcttcttcacaagtttaggagtgacagcaacaagagatcgatggcctctgccaccgtgctcaagtcctccttccttcccaagaagtccgaatggggcgccaccaggcaggccgccgcgcccaggccgcccaccgtctccatggtcgtccgcg

SEQ ID NO: 4215 - DNA, 281 bp, Zea mays
ccgggctccatgggcaagcagtacttcctcggcctcgagaagttcctcgccggctccggcgacccgtcctaccccggcgggcccctcttcaacccgctcggcttcggcaagaccgagaaggagatgaatgagctcaagctcaaggagatcaagaacggcaggctcgacatgctcgccatcctcggttacttcatccaggggctcgtcaccggcgttggcccgttccagaacctgctcgaccacctcgccgaccccgtcaacaacaacgtgctcaccagcct

SEQ ID NO: 4216 - DNA, 282 bp, Zea mays
ccccgggactctcaactctgaccaggcgagggacttcgacctccccttgaaggagcggttctacctgcagccgctgccgccggcggaggcggcggcgagggtgaagacgtcggcgcaggacatcatcaacctcaagccgctcatcgacaagaaggcgtggccgtacgtccagaacgacctccgcctccgggcctcctacctgcgctacgacctcaagaccgtcatcgcttccaagcccaaggaggagaagaagagcctcaaggagctcaccggcaagctctt

SEQ ID NO: 4217 - DNA, 283 bp, Zea mays
ggttcctttccccatccccaactccattatttgcttgatccttgagaagagagaggaagacgagagctagaagcgaaggagaaaagcagttcttcagctaggcaggagggcacaggaaggaggagatggcgtcaaagaggattcagaaggagctcaaggatctgcagaaggaccctcccacctcgtgcagtgcaggtcctgttggtgaagacatgttccactggcaggcaacaataatgggtccatctgatagcccatattctggtggagttttcctagtcac

SEQ ID NO: 4218 - DNA, 279 bp, Zea mays
aaggagagtacgtggaggagcagccatggcttcatcggtggccgccgcggcgagcacattcctgggcacccgcctggcggacccggcgccacagaacgggcgcatcgtggcccggttcgggttcgggttgggcggcaaggcgaacatgctccgaagaaggtggcgaagacatcgacctcctctgaccggccgctgtggttccccggcgccgtggcgcccgactacctggacggctcgctggtcggcgactacgggttcgacccgttcggtctcgggaag

SEQ ID NO: 4219 - DNA, 157 bp, Zea mays
gcagccttggtttcgattgcactatttggtgcgtttgtaggccgggctgctatatcgactgttgatgctctggctcctaaattattcatcgggcttattgccggtgcatatgctcccgtactggttctcggcaatgaccatgaagactgttgacaat

SEQ ID NO: 4220 - DNA, 252 bp, Zea mays
gccaccatggctatcacctcccgcgcgctcgtcggcaagccggcggctggcacgagggacgtcttcggcgagggccgcatcaccatgcgcaagaccgccgccaagcccaagccggcggcgtccggcagcccatggtacggtgccgaccgcgtcctgtacctgggcccgctgtccggctcgcccccgagctacctgaccggcgagttcctgcggcgactactggtggggctcttgtcggggtgcggcgtacta

SEQ ID NO: 4221 - DNA, 277 bp, Zea mays
tgcatacacaacgcagagcatcagaagcagctgcgatctgatcgacatggctgccgccaccatggctatcacctcccgcgcgctcgtcggcaagccggcggctggcacgagggacgtcttcggctagtgccgcatcaccatgcgcaagaccgccgccaagcccaagccggcggcgtccggcagcccatggtacggtgccgaccgcgtcctgtacctgggcccgctgtccggctcgcccccgagctacctgaccggcgagttccccggcgactacggg

SEQ ID NO: 4222 - DNA, 278 bp, Zea mays
ataccagaccagaccagaccaatggccctgcgcctaccaatctcatcgtcccacgggctggcctccacgccggcgccaatctccacgacgacgtgccggccggccgtcttggcgacggccgcggcccagaagaggagcctgctgctggcgacggcctccgagacgaggggagtcgcgccggtgaggtccagcgggatcgagacgagcacggtgggtctgggatgtgaggccgtcaccgggcaggtcacggaggtcaacaaggacaccttctggcccat

SEQ ID NO: 4223 - DNA, 276 bp, Zea mays
gcgctggcaatggcgggaccgacgacctgaaggtgctgggcctgtggacgagcccgtttgtgatccgagtccgcatcgtgctcaacctcaagggcctggcgtacgagtacgtggaggacgacctcagcaacaagagcgcgctcctgctcagctccaacccggtgcacaagaccgtgcccgtgctgctccacgcgggtcgccccgtaaacgagtcccagatcatcctgcagtacatcgacgaggtctgggcggggaccgggccggccgtgctgccgc

SEQ ID NO: 4224 - DNA, 276 bp, Zea mays
ccgacatcgtcccttcgtccccacgagcaaccgataatccgccggcgttgagatgttggtttatcaggatctcctatctggcgacgagctcctgtcggattcattcacctacaaggagctcgagaacggcgtcctgtgggaggtcgagggaaagtgggtcacccaaggtcctgttgatgtggacattggtgccaatccatccgccgagggtggtgaggacgaaagcgttgatgacacagctgtgaaggtggttgatattgttgacacattccgtct

SEQ ID NO: 4225 - DNA, 112 bp, Zea mays
atgctcgcaacggggaccggtattgctccgttccgctccttcttgtggaagatgttcctggaggagcacgaggactacaagttcagcggccttgcgtggctgttcttgggag

SEQ ID NO: 4226 - DNA, 273 bp, Zea mays
tgtgtttccatgcataccaacaggtgtcttacatgattttggcgatggtgtctcctgtcactcattctgtgggcaactgtgttaaacgtgttgtggtcattgtaacatcagtgctgttcttcaggacacctgtttctcctatcaactctctcggtactgcgattgcacttgccggagttttcctgtactcacagctcaagcgacttaagcccaagccgaagacggcttaaatagggattgtattttccatctctttgtgttaatggagttaaa

SEQ ID NO: 4227 - DNA, 279 bp, Zea mays
ccgaggccttcgccgagctcaaggtgaaggagctcaagaacggccgcctcgccatgttttccatgttcggcttcttcgtccaggccatcgtcaccggcaagggcccgctcgagaacctcgctgaccacatcgctgacccagtcaacaacaacgcatgggcctacgccaccaacttcgtccccggcaactaagctcaacggctatgctatgcgacttcattgtctttcggatcggagagggtgtacgtacgtggattgattgatgctgcgagatgcatgt

SEQ ID NO: 4228 - DNA, 276 bp, Zea mays
ggaaagaagcgtttcggcggtggcggcagcggcgagcccgcggccaagcgccaggccgcgagggacgatggcccctccgaatccgctgaagacggtaccgtcgtagccgagatatcgaagaacaagaaggtatccgttaggagctggaaaggcagggtcttcgtcgacttacgcgagttctacttcaaggacggcaagactctccccacccgcaaaggtatatcacttcaattagatcagtggaagatattgaaggacaacatcaaagccataaat

SEQ ID NO: 4229 - DNA, 272 bp, Zea mays
atccaatggaaaatgctggtgcagcattgattcgtgaggttgctagcaagaccaatgattcagctggtgatgggactacaactgcgtccgtccttgctcgtgaaatcatcaagctaggccttctgagtgtaacatctggtgcaaatcctgtatcactaaagaaaggaatagacaaaactgtgcagggcctaattcaggagcttgagaataagtctagaccagtcaagggtggtggtgatatcaaagctgttgcatctatctctgctggcaat

SEQ ID NO: 4230 - DNA, 268 bp, Zea mays
gcttgatctccctccgccactccatccatctcctcgctcccagtccccgggaagcatggcgtccgtcaccgcccgcgccccggtagcggcccttcgcccgtcgtcggcatcgctcaagtcgtcgtcggccttccttggccactctagccgctcggcgcacgcgtctcccacgaggcgcactccaaggcggaggccaagggcgagtggctccccggccttccctccccctcctacctcgacggcagcctggcgggtgacaatggcttcg

SEQ ID NO: 4231 - DNA, 270 bp, Zea mays
gtccttcaactcgaaaccgcagctggtgcagctattcggttcttcgacaaagcgattggaattaatgttccccgctcaaggtttctcccagtgaaggctacatctgatctgttgcttgtgcagtctgatctttacaccttggttgatggctttgtcatccgcaacccatccagagcgaatccagctaacccttcaattgagcttggacctgagttcaagaaggttgccaatttccttgctcggttcaagtccatccccagcatagttgag

SEQ ID NO: 4232 - DNA, 118 bp, Zea mays
gacgtgggttggcttctcctccgcctccggttcgggttcgggttcgtgaggttctccggggttcggtttcgtgggtgagcggatcgagatggcggcgtcggatgttgattaccgctgc

SEQ ID NO: 4233 - DNA, 268 bp, Zea mays
ccaccgcggactggaggccaagctggacgaggggcgcacagtgtggaggccgagctcgtagaggcgctcgccaacctcgaggcgcagaaggaggaggctgttaaggcgctcgacgcccagatcgcctcgctcagtgatgagatcgtcaagaaggtgctcccatccgcgtgatgaaaccaaaccggccctgccttatcctacgactatagttacatgaacatcataaattaatgataattttgaagaaattggccgatgactccgacac

SEQ ID NO: 4234 - DNA, 268 bp, Zea mays
gaagacgagtgtcaagtgaacctgaaacttgcggtgtcactggctggtagcctgagtgtgagtgagtgatcgagctagctgagctccgatcctcgctagctaggataccgccataccacaagtcttcttcacaagtttaggagtgacagcaacaagagatcgatggcctctgccaccgtgctcaagtcctccttccttcccaagaagtccgaatggggcgccaccaggcaggccgccgcgcccaggccgcccaccgtctccatggtcg

SEQ ID NO: 4235 - DNA, 267 bp, Zea mays
gcaggaggagatggcgcaggtggccaagcgctacggcgtcaagctcaccttgttccacggccgcggaggcaccgtgggcaggggtggcgggcccacgcaccttgccatcctgtcccagccgccggacaccatcaacgggtccatccgtgtgacggtgcagggcgaggtcatcgagttctgcttcggggaggagcacctgtgcttccagactctgcagcgcttcacggacgccacgctggagcacggcatgcacccgccggtctctcc

SEQ ID NO: 4236 - DNA, 264 bp, Zea mays
gctcagtcctcgccaccgcccactccgtcgccaaccaatggcctccgccatggagctctcgctcctcaaccccgccgcgacgcaccgccaccgcggcggcctcgccggcctgcccctcgcacggcgctccgtggtccgcttccgcgtgtccgcctccgccgctgccaccgcgccgcccaagtcctcgggccccaagaatcggggcaagacggagatccaggagacgctgctcacgccccggttctacaccacggacttcgacga

SEQ ID NO: 4237 - DNA, 269 bp, Zea mays
gccaaaaggcatcaccgccgcgacgacgatggcagcctcgctccaagccgcggccaccctgatgcagccggccaagatcggcggccgggcgccctttgcctcgctgccgtcccgcccgtcgtcgcaactcgcctgcagggcgttcggcgtcgacgccggcgccgccaggatcacgtgctccctgcaggacgtcgccagcaggtgcgtcgacgccgcgaactgcgccggcttcgcgctcgccacctcggcgctcctcgtctcgggcgcga

SEQ ID NO: 4238 - DNA, 289 bp, Zea mays
aggtcggtattctgctcgttggcgtatccgatccgtgcgcctgctgtgtgtgtgtcggtggagatggccacatcttacgctcccatggcgagccaggtgatgaagagcagcctcgtcgtgcactctaggccgaggtgcctgtcaggcgctgctgcgctcacgaggcggccccggttcaccgtcaaggccatccagcccgagaaggcaacgtaccaggtggtgcagcccatcaacggcgaccccttcatcggcagcctggagacgccggtcacctcgagcccgctcgtgg

SEQ ID NO: 4239 - DNA, 248 bp, Zea mays
gagcgaaagaataacaaacattggtacccaagattgtttgctttcacaacgttacaacatatatatatcatatatgcatggacaggtacaatgcctctccagcagcaccagcaacaagggtggttagcagcagggactataaacaacagagtaccatccgcgttgatagattttttattactgcaaaattgatccccgcagcactaccggtagttgcggtagacgggagtgtacatgcagttctctgc

SEQ ID NO: 4240 - DNA, 260 bp, Zea mays
caagaagaagatcaagaccgacaagccctacgggattgggggtggcctgaccgtcgacgtcgacgccaacgggagaaagggcaagggcaagggcgtgtaccagttcgtcgacaagtacggcgcgaacgtcgacggatacagcccaatctacaacgaggatgactggtctcccaccggcgacgtctacgtcggtggaaccactgggcttctgatctgggccgtcaccctcgctgggatcctcggcggcggcgccctcctcg

SEQ ID NO: 4241 - DNA, 259 bp, Zea mays
aagcaagctagctcgatctactactactactactagctggtacacatactagccatcctgccagccagccagcttgccatggcgcccaccgtgatgatggcctcgtcggcaaccgccgtcgccccgttccagggtctcaagtccgccgccagcctccccgtcgcccgccgcagcaccaggagcctcggcaacgtcagcaacggcggaaggatccggtgcatgcaggtgtggccggcctacggcaacaagaagttcgaga

SEQ ID NO: 4242 - DNA, 247 bp, Zea mays
gagcgaaagaataacaaacattggtacccaagattgtttgctttcacaacgttacaacatatatatatcatatatgcatggacaggtacaatgcctctccagcagcaccagcaacaagggtggttagcagcagggactataaacaacagagtaccatccgcgttgatagattttttattactgcaaaattgatccccgcagcactaccggtagttgcggtagacgggagtgtacatgcagttctctg

SEQ ID NO: 4243 - DNA, 260 bp, Zea mays
ccgccgcaagaacaaatcccttgagggactgcaggccaatgtccagaggcttaagacatacaaggccaagctggttatcttcccaaggcgtgcgcgcaaggtgaaggctggtgactctactccagaggagcttgccaccgctacccaggtccagggtgactacatgccatttactcgtggtgagaaacgttcagttgaggttgtgaaggtcacagatgagatgaagtcatttgctgcctatggcaagctccgccttgagc

SEQ ID NO: 4244 - DNA, 258 bp, Zea mays
attactctgggtgatattggtggaaaatttggcagtggtgcatataacagtatggacaatggtgttctgcgatttgaccatgtgcgcataccaagggatcaaatgttgatgaggctttcacaagttacaagggaggggaaatatgttcattcagatgtcccaaagcagctgctttatgggacaatggtttttgttcgccagacaatagtcgcagatgcttctaaggctttgtcccgtgctgtttgcattgctgtacga

SEQ ID NO: 4245 - DNA, 261 bp, Zea mays
ggaccgacgagcgacgaagcgcgcagaaagagaagaacctcggagctgagatggcacaagccatggcgtcgatgaccggcctctcgcagggcgtcctgcccagcaggcgcgccgacagcagaaccaggacggccgtcgtcatcgtcagggcgtccgcggagggcgacgccgttgcgcaggcgggccgccgcgccgtgatcgggctggtggccactggcatcgtcggcggcgccttgtcgcaggcggcgcgcgccgagaccg

SEQ ID NO: 4246 - DNA, 260 bp, Zea mays
ccaagatacagtttccattatggattgagttgggagaaggaagcaatcaatagcctcgttgagaaggcaatatgtgaagctgacaagaaaggagctaaagttgttaccctcggactccttaaccaggcacataacctcaacagaaatggagaactttatcttcagaagtgcccaaagttgggagtaagactcgtagatggcaccagcttagctgctgcagtagttgtgaatagtgttcctcaaggcacagatcaagttgt

SEQ ID NO: 4247 - DNA, 259 bp, Zea mays
catggattcacgtactccggccatccggttgcctgtgctgtggccattgaagctctgaaactttatcgcgaaagggacattcccggccatgtcaagcaaatcgccccaaagttccaggacgggattagggcgctggcagacagtccgattatcggggagatacgtggcttggggatgattatggggaccgaattcacaaacaacaagtcaccgactgatctgttccctgccgaatggggggtcggtgccatcttcggcg

SEQ ID NO: 4248 - DNA, 260 bp, Zea mays
caacgccacagcttgcgcccgcaatggcactcgtctccgcctcctcgtcctccaccaccgccgtcacggcgctccccaggaatgggcagcgggcgtcgtcctccttcctcggcggcaagacgctgctgagacaggccgaggcggcccggccgtcgttcgccgtgcgcgccgcggcggaccccaacaggccgatctggttccccggcagcacccctccgccgtggctcgacggcagccttcccggcgacttcggctttgat

SEQ ID NO: 4249 - DNA, 253 bp, Zea mays
gaccagaccagaccaatggccctgcgcctaccaatctcatcgtcccacgggctggcctccacgccggcgccaatctccacgacgacgtgccggccggccgtcttggcgacggccgcggcccagaagaggagcctgctgctggcgacggcctccgagacgaggggagtcgcgccggtgaggtccagcgggatcgagacgagcacggtgggtctgggatgtgaggccgtcaccgggcaggtcacggaggtcaaca

SEQ ID NO: 4250 - DNA, 251 bp, Zea mays
gaacgagattcatgttctttgcttctcagctctagctgaagctctagctcagttcaaggtattgccattctcggttttgttgtcaagtctctgcccaccaggctgtgaaggttctttgttcgccttcttcacatctggactggtgctttcagcaatacttagtggagtattcggagttggattgtccaccctgatcggtgtgtcttctgtggactactccagcttgcctttgggtattttgctgcaaagtt

SEQ ID NO: 4251 - DNA, 252 bp, Zea mays
cacgcacgcatacacagcacagagtgaggtaagcatccgaaaaaagctgtgatctgatcgacatggccgccgccaccatggctctcacctcccgcgcgctcgtcggcaagccggcgaccagcaccagggacgtcttcggcgaggggcgcatcaccatgcgcaagactgctggcaagcccaagccagcggcgtccggcagcccctggtacggggccgaccgcgtcctgtacctgggcccgctgtccggccagc

SEQ ID NO: 4252 - DNA, 253 bp, Zea mays
ctcccggtgaccatccgactcctggaccctcccctccacgagttccttccagaagggaacatcgaggacattgtaagtgaattatgtgctgagacgggagccaaccaggaggatgccctcgcgcgaattgaaaagctttcagaagtaaacccgatgcttggcttccgtgggtgcaggcttggtatatcgtaccctgaattgacagagatgcaagcccgggccatttttgaagctgctatagcaatgaccaacc

SEQ ID NO: 4253 - DNA, 254 bp, Zea mays
cacgcacgcatacacagcacagagtgaggtaagcatccgaaaaaagctgtgatctgatcgacatggccgccgccaccatggctctcacctcccgcgcgctcgtcggcaagccggcgaccagcaccagggacgtcttcggcgaggggcgcatcaccatgcgcaagactgctggcaagcccaagccagcggcgtccggcagcccctggtacggggccgaccgcgtcctgtacctgggcccgctgtccggccagccc

SEQ ID NO: 4254 - DNA, 278 bp, Zea mays
ttttgaattatgctaatcagctctgtgagcgtctccctagccccaatggcgagtcaactgttgattgccatcagatctcaaagatgccaaatcttgcattcaccatagcaaacaagactttcaccttaacaccagagcagtacatagtgaagctggagcaagcaggacaaactatctgcatcagtgggtttatggcatttgacgtaccgcctcctcgtggtcctctctggatacttggtgatgtttttatgggtgcctaccacactgtttttgacttc

SEQ ID NO: 4255 - DNA, 213 bp, Zea mays
cgtcgacaagtacggcacccttccccttgccctttctcccctcggccgccgcgcctcctccttcgccgtcgtctgctccaagaagaagatcaagaccgacaagccctacgggattgggggtggcctgacgctcgacgtcgacgccaacgggagaaagggcaagggcaagggcgtgtaccagttcgtcgacaagtacggcgcgaacgtcgacgg

SEQ ID NO: 4256 - DNA, 274 bp, Zea mays
ccttttggtgtcccaaacactgtaggaactgtggctggggagcacccatttggagagcacccttccaggaccttgttcgtaaggaacatcaatagcaacgtcgaggactctgaactgcgatctttgtttgagcaatatggggatatccgtaccctttacactgcaacaaagcataggggctttgtaatgatatcttatttcgacatcagagctgcacggaatgcaatgcgcgcattgcagaacaaacctctgaggaggagaaagctggacattc

SEQ ID NO: 4257 - DNA, 102 bp, Zea mays
cggccccctcggacgtgctcgccgtggagctcctgcagcgcgagtacggcgagcgccactcgctgcccgtggtgccgctgttcgagaggctggccgacctgc

SEQ ID NO: 4258 - DNA, 271 bp, Zea mays
cgaggacctacgacctcatccatgctgataaagttttcagcagttaccaggacaggtgtgacataacgtacatcctactggagatggaccgaattctaaggcctgaggggactgtgatcatcagggacaacgtagaggtgttggtgaaggtacaagctatcactggaggcacgcgagactgacggctgatggaaccccatgagctgagagcacgcgcacgtcgaacatcgtctccccactcgacatcagttgctgtaatggttggtgaagt

SEQ ID NO: 4259 - DNA, 268 bp, Zea mays
tcagcggcgaccagcggcactggggcgagttcgtcaccccgggcctgctcttcctctacatcgccggctggatcgggtgggtcggcaggagctacctcatcgccatcagcggcgagaagaagcccgccatgagggagatcatcatcgacgtcgagctcgccacccgcctcctccccagggggttcatctggcccgtcgccgcctaccgcgagctcatcaacggggacctcgtcgtcgacgacaaggacatcggctactactagctgcg

SEQ ID NO: 4260 - DNA, 269 bp, Zea mays
agccgcacaagctcaggctatactccatcgccagcagcgccctcggagatttcggcgactccaagacggtatcgctttgcgtgaagaggctagtctacaccaacgatcagggggagattgtcaaaggagtctgctcaaacttcctgtgtgacttgaaacctggcgccgatgtgaagatcacagggccagtgggcaaggagatgctcatgcccaaagaccccaatgcaacagtcatcatgctcgcaacggggaccggtattgctccgttc

SEQ ID NO: 4261 - DNA, 266 bp, Zea mays
agacccttgaaaaagtagctgaagaagctagggtggagctagataggttgagggcagacagagaggaagagaagaatattctggtcaggggcagagctgctgttgagtctgaaatggaagttctgttgaagttgaggagtgaggtagaggaacagctgcagaacgtactgagcaagaaggtggaggtgtcgttcgagaagagtaggattgagaaactccaaaaggaaattgagagcgataactcggctgttgtgcaacttcagtat

SEQ ID NO: 4262 - DNA, 266 bp, Zea mays
cgggatggcctcttcccttgatctttctggtttcttcgaggaagaggatgcagcgcaaagaaagattcggttcacttcgacgcacccacccaaggatctatttgacaagatcgagagcgttgtcatggagatgggattcaaagtccataggggggcaggcaagctcaaggtcttgaagaatagcaagtgttccaggaactccaggaacccgtcatcattgttggtgtgcaccgaggtgtttgagctcggtccatcattatatgtcg

SEQ ID NO: 4263 - DNA, 264 bp, Zea mays
ggacgctagctcaccaccaacctcagcacatcgaggagaagaggagtggccaatggcttcgtcggtggccgccgcggcgagcacattcctgggcacccgcctggcggacccggtgccgcagaacgggcgcatcgtggcccggttcgggttcggcggcggaaagcccaaggctgccgtcccgaagaaggtggcgaagacgtcgatctcctctgaccggccgctgtggttccccggcgccgtggcgctcgactacctcgacggctc

SEQ ID NO: 4264 - DNA, 261 bp, Zea mays
cttcaccatcctcgccgtcatcatggccgggataaaggaccagaaggacccccgtgacaagatccaccacggcggatggatggccaagatcttctgctgggtcatcatcgtcttcctcatgttcttcgtgcccaacggggtcgtcagcttctatgaatctatatccaagtttggctctgggctgttccttctcgttcaggttgttctgctgttggattttgtgcacggatggaatgagaactgggtcgccaaggatgagca

SEQ ID NO: 4265 - DNA, 264 bp, Zea mays
ctccgtctccacgccgcgtcctcccgcacgaatccgcgctccggccaacgggccaagccctagccacccccgcccattcatggtgggcgggccgtgagatctctagggaggcttgtcggcttcgtcgggcgggaggggaggagatgggcgcccggaacagcgctgccgccacgccggtgctgctcaacgtgtacgaccttacggccgcgaacgattacctctactggctcggcttcggcgtcttccactccggaatcgaagtcc

SEQ ID NO: 4266 - DNA, 278 bp, Zea mays
ctcctgcgacgccacaaccacacgttcacggtagcgagacttatcgtcgtcggcggtgaagatggtgtcgctgaagctgcagaagcggctcgccgctagcgtcctcaagtgtgggaaaggcaaagtctggcttgaccccaatgaagtcagcgagatctccatggctaactcccgccagaacatccggaagctggttaaggatgggtttatcatcaggaagcctcagaaggttcactctaggtcccgtgcaagaagggcacatgaggccaagcagaagg

SEQ ID NO: 4267 - DNA, 277 bp, Zea mays
cagagctatattgaatacaatctttgacagctatggcccatgggctggagatcttagctcacgtgatcagggatccttggttgcttttgaagatggaagcactacttcttatgcacttcttaatgcacaagaaagaggtatgttgtttgtccaaccagggcaggatgtttacaaaggtcaaattgttggtatccatcagagacctggtgatttagcaattaatgtgtgcaagaaaaaggctgctacaaatgttcgttccaacaaagaaactacagtg

SEQ ID NO: 4268 - DNA, 279 bp, Zea mays
cgcgaggcaaggccatcgtccgccatgacgctctccctctccacctctttcctccccatccccgccgccgcgaggaccaccgcccgcaccctacgctccgtcgtcccctcccaggggatgcgctgctcgatgcgcaagaaggggttgcacccggagatctacgaggacgcgaaggtgtactgcaacggcgagctggtgctggtgacggggggcaccaagccggagtacacggtggacgtgtggtccggaaaccacccctactatgtcggcgacacctcg

SEQ ID NO: 4269 - DNA, 275 bp, Zea mays
gcccgtcggcgacaacgccatctccgtcgacggcaaggtcatcaaggtcgtgtccgaccgcaaccccagcaacctgccgtggggcgagctcggcatcgacctcgtcatcgagggcaccggcgtcttcgtcgaccgctatggcgcggggaagcacatccaggcgggggccaagaaggtgctcatcacggcgcccggcaagggcgacatccccacctacgtcgtcggcgtcaatgccgaccagtacaaccccgacgagcccatcatcagcaacgcct

SEQ ID NO: 4270 - DNA, 272 bp, Zea mays
ctggtgttgtggtggaaacagcactttacccgattgatactataaaaaccaggcttcaggctgctcgaggtggaagccggattgaatggaaaggcttgtattctggattagctggaaatctcactggcgtccttccggcctctgcgatatttgtcggggtgtatgagccaactaaaagaaaattactggaaacacttcctgaaaatctgagtgcagttgcccattttactgcaggggccattggaggtattgctgcttccctcgtccgtgtc

SEQ ID NO: 4271 - DNA, 274 bp, Zea mays
cgctctccccagccccactctctccatctagagctccctaactgcaccggccgccacaccaccgtaccccgacccctcgacaacaatggtcaccgtcctaggcagcccccgcgcgccggccttcttcttctcgccgtcctccctccgtgccgcgacggcgcccaccgccgtggcgctgcctgcggccaaggtgggcatcatgggccgtagcgccacatgcatgggcatgctgcgctcgcaggccacctactacgtgaagctgatcacgccggag

SEQ ID NO: 4272 - DNA, 271 bp, Zea mays
ctgtgccgcgccgacgccctgccgcacctcatcgtcagccgcgaccagcggcactggggcgagttcgtcaccccgggcctgctcttccactacatcgccggctggatcgggtgggtcggcaggagctacctcatcgccatcagcggcgagaagaagcccgccatgagggagatcatcatcgacgtcgagctcgccacccgcctcctccccagggggttcatctggcccgtcgccgcctaccgcgagctcatcaacggggacctcgtcgtcg

SEQ ID NO: 4273 - DNA, 270 bp, Zea mays
aaggatctggcaagagccttcaacctggtgctcgggaaccccaaggcgagcaagcagatcttcaacatctccggggccaagtatgtcaccttcgacggccttgcgcgggcatgcgcaaaggctggagggttccctgagccggagctcgtccactacaaccccaaggaattcgacttcggaaagaagaaggccttcccattcagagaccagcacttctttgcgtctgtggagaaggcgacgagcgaactcgggtggacgccggagtttgac

SEQ ID NO: 4274 - DNA, 269 bp, Zea mays
ggcctccctctcctctgccgccgtcaccgccccttccttcgccgcacccgcaccagctcgcgccgtggtcagaaggaggtccttcaccgtgcgcgcctctctccgcaaggccaccggcaccgccgccgtggcaatggctgccagcgccctgcttgccggcggtgccatggcccaggaggttctgctgggcgcaggcgacggcgtgctcgtcttcgagctcagccagttcaccgtcaaggccggcgacaccatcatattcaagaacaacg

SEQ ID NO: 4275 - DNA, 267 bp, Zea mays
cttcccttcgtctgcttcccagagacccagccatggcgatctcccagatctcacgcatattcctggccatccttctcctggccgccgccttcgccgccgccccagctgcgcttgcggacggcgacgacgtggtggcccttaccgaatccacgttcgagaaggaggtcggaaaggaccgcggcgccctcgtcgagttctacgccccctggtgtggtcactgcaagaagcttgctcctgagtatgaaagacttggtgcaagttttaaga

SEQ ID NO: 4276 - DNA, 267 bp, Zea mays
ggcgacggccgcggcccagaagaggtccagcgggatcgagacgagcacggtgggtctgggatgtgaggccgtcaccgggcaggtcacggaggtcaacaaggacaccttctggcccatcgtcgaggccgccggcgacaaggtcgtcgtcctcgacatgtacaccgaatggtgcgggccttgcaaagtgatggctccgaaattccaggagatgtctgagaagaacctggatgttgtgttcctgaagctcgactgcatccaggacaacaa

SEQ ID NO: 4277 - DNA, 265 bp, Zea mays
gtccgagaagatcgggtactggaggtacatcaccatcttcaggcacctcaaggcgaacccggagtaccaggtgtaccccatcttcaagtacttcgagaactggtgccaggacgagaacaggcacggcgacttcttctctgccctgctcaaggctcagccgcagttcctcaatgactggaaggccaagctctggtcacggttcttctgcctctcggtgtatgtgaccatgtacctgaatgactgccaacgcactgcattctatgag

SEQ ID NO: 4278 - DNA, 262 bp, Zea mays
acaccatacatgagttgcactgatggaagtgacctgtatgatctctatgctgtagtcgttcatctggatatgctgaacgcatcattctttggacattatatatgctatatcaaaggttatcaaggaaggtggtataaaattgatgactgcaaggttatggttgttgatgaggaggaagtacatgctcaaggcgcttatatgcttttatatagcaggagaacagctcgtcctaggtcacttcttacagttgatgagtccgtga

SEQ ID NO: 4279 - DNA, 260 bp, Zea mays
cgcaactggtatgcctggtctaggtccactacaaaaagtttgtgcggcattgcgggtactagcatatgggttaccttcagatgctgtagacgagtacattcaaataggggagtccacagctagggaatgccttcatcatttctgtcgaggtatcattgcatacttcagtggatggtacctacgaactcctaacgaagctgacataacacgcatcatgcaccatagcgaatcaaggggtttcccagggatgttgggttcta

SEQ ID NO: 4280 - DNA, 96 bp, Zea mays
atggcgtcgacgatcatggccgccacctcccgcatcgtcgcggcaaagacgccgtttcttggccagggtcgcgccgccgccaatgccagccccctc

SEQ ID NO: 4281 - DNA, 258 bp, Zea mays
caggaactggggcatcaagtgactcttatccgccaagttgctgagaaagtgttcgccaatgtgggcaagactatcgggtacaaagttggaacaatgattgagatccccagggcagctctggtggctgatgagatagcggacaggctgaattcttctccttcggaacgaacgacctgacgcagatgacctttgggtacagcagggatgatgtgggaaagttcattcccgtctatcttgctcagggcattctccaacatg

SEQ ID NO: 4282 - DNA, 260 bp, Zea mays
ttgagatttcgaaacagacgaatgctccaattgaagagtgccgcaagaaggtttggctggtggactcaaagggtttgattgttgactctcgtaaaggctcccttcagccattcaagaaaccttgggcgcatgagcacgagcccttgaaaaccttgtatgatgctgttcagtccatcaaacctacagttctgatcgggacatctggagttggaagaacattcacaaaagaaatcattgaggccatgtcttccttcaacgag

SEQ ID NO: 4283 - DNA, 261 bp, Zea mays
ggcttttggagtgcaatggcttcaaatgttacctttcaatcccgaaatgtattgagcaagaagctcatggttaagaaagaggaatccttggacaaccttaatctcttctctatcattacagtgatgtcatttttccttttggcccctgttaccttctttacagaaggtgtcaaaattactcctacatttttgcaatctgctggtctgaatgtaaaccaagtccttacaaggtgtcttttcgctggactgtgtttccatgca

SEQ ID NO: 4284 - DNA, 256 bp, Zea mays
gcctaaggggttcgtggccccgcagctggaccccagcacgccgtccccgatcttcggcggcacacgggcgggctgctccgcaaggcgcaggtggaggagttctacgtcatcacgtggacgtcccccaaggagcaggtgttcgagatgcccaccggcggcgccgccatcatgcgggagggccccaacctcttgaagctggcgcgcaaggagcagtgcctggcgctcggcaccaggttgcgctccaagtacaagatca

SEQ ID NO: 4285 - DNA, 255 bp, Zea mays
agcgtgatgagcgtgccaagaagtcggtgagcatcaacgagttccttaaacctgctgaaggagaaaggtactacggcggccgtggccgtggaaggggccgtggggatcgtggtggttttagaggcggataccgagggggatacagtcgtggcccagctgctgctgctccatccattgaagatcaagctcagttcccaagccttggtgggaagtgaagggcgcccagctgctgctgtcaccgagcgttgtgttgtc

SEQ ID NO: 4286 - DNA, 253 bp, Zea mays
gctaaaggtttaggaatgcatgtgattgcacatgatccatacgcttctgctgatcgggcccgtgcaattggagttgagctagttagtatggaggaggccatgacaactgctgacttcatctcattgcacatgcctcttacccctgcaacaaacaagatgctcaacgatgaggcctttgctaagatgaagtatggtgttcgcattataaatgttgcacgcggtggtgtgattgatgaagatgctctagtcaggg

SEQ ID NO: 4287 - DNA, 253 bp, Zea mays
ccagtcgaccgtcgacggcaagaagatcgtcgacgtgcttagtgagcagggaatcgtgcctggtatcaaggtcgacaagggtcttgtgccactcgctggctccaacaacgagtcatggtgccaaggtctcgatggccttgcttcacgtgaggcagcctactaccaggccggtgcccgcttcgccaaatggcgcactgttgtcagcatccccaacggtccatctcaactagccgtgaaggaagctgcctggggc

SEQ ID NO: 4288 - DNA, 252 bp, Zea mays
gaccccacgtacctggtggtggagcaggacaagacgctggccacctacgggatcaacgccgtgtgcactcacctcggctgcgtcgtgccgtggaacgcgctgagaacaagttcatctgcccctgccacggatcccagtacaacaaccagggcaaggtggtccgtggaccggcgcctctgtcgctggccctggttcacgccgacgtcgacgacggcaaggtcctcttcgtcccgtgggtggagaccgacttca

SEQ ID NO: 4289 - DNA, 253 bp, Zea mays
actagttctagatcgcgagctgccgccctttttttttttttttgtggttaacatagatattcgcatagattttatagcttgacagaattgtgctctaaatgtacagtatgttgctctcgaatgaagtatacaaaaaagatgactgttgccatagaatgccttcactcatcatcgagacctggtatgtacagtaaattgacgtcgaaaacgacagggctgcttgggggtactcttggccttccaggagcagaag

SEQ ID NO: 4290 - DNA, 254 bp, Zea mays
cagcgactcagcgagcgagagcagcacacacgcagctagctaggagcagcagcagcggcggcggcgatggcggcctccatgatctcctcgtcagctctggcggtggcgcctcagggcctgccgcccctcggccgccgcgcctcctccttcgccgtcgtctgctccaagaagaagatcaagaccgacaagccctacgggattgggggtggcctgaccgtcgacgtcgacgccaacgggagaaagggcaagggcaa

SEQ ID NO: 4291 - DNA, 249 bp, Zea mays
agcaacatgagaaggttcttgaggaaggtgtcctcaacccagaatcaactgttgttgcgatctttccctctccaatgcattatgctgggccaactgaggtgcagtggcatgctaaggctcgtattaatgctggtgcaaatttctatattgttggaagggatcctgctggtatgagccatcccacggagaaaagggacctctatgatgctgaccacgggaagaaggttttgagcatggctcctggcctcg

SEQ ID NO: 4292 - DNA, 249 bp, Zea mays
tttgtaatgggtggctggtggagtggcagctcaacattgtccttgaataagaactttgtacagcaggttgaggagaagttttcaaaagatacagatataatgctagtgtgccagaaaggacttagatcacttgccgcctgtgaacagctgtacaatgctggttttgaaaatttgttctgggtacaaggaggccttgaagctgccgaagaggaggattttgaaagggaaggttcccagcctttcaagctt

SEQ ID NO: 4293 - DNA, 248 bp, Zea mays
cgaatatgaggacggagaccagataagaacccttccgtgcaagcacgagttccacctgcaatgcgttgacaagtggctgaaagaaatacacagggtgtgccctctgtgccgtggagacgtctgcgaagtcgcctcgtgaagaccttggcgctgccatccttccgatgtggcgccggtggatagggcaccaccgccaggcgccagctgttccgtggttgaagctggttcggtcaggcaatggtgatcca

SEQ ID NO: 4294 - DNA, 241 bp, Zea mays
accgattcttcgagcggcacgcctcaagtcagcctgctttcaaggggaaccaggacgtgccctcaaagttagcagcagcgatgcactgacggtgaaagctacctgtaacggtgacaccgtgcggttcaagtttgtgccagcaatgggctggtaccacctgctggaagaggtagcgaagaggtttaagctggcgacaggagcgttccagctcaaatacaaggacgacgaggacgagtgggtg

SEQ ID NO: 4295 - DNA, 249 bp, Zea mays
agacactactttactcaaagtctagagctagcttttgctttgctcaccagataaaccgcagcagatggcgtcgacgatcatggccgccacctcccgcatcgtcgcggccaagacgccgtttcttggccagggtcgcgccgccgccaatgccagccccctccgcgacgtcgccgccgccgctgctggcggccggatcaccatgggcaacgacctgtggtacggcccggaccgcgtcaagtacctgggccc

SEQ ID NO: 4296 - DNA, 247 bp, Zea mays
agcctatccatcccttgcattggtattgtcatctggggcagggcaggggagggcaggagaagctatctattggccatctatccagcagccgctctccccagccccactctctccatctagagctccctaactgcaccggccgccacaccaccgtaccccgacccctcgacaacaatggccaccgtcctaggcagcccccgcgcgccggccttcttcttctcgccgtcctccctccgtgccgcgccgg

SEQ ID NO: 4297 - DNA, 274 bp, Zea mays
catactttgtgtccttgatccatctagtagtgggtgtcgtatactgcctcatcagctggagtgtcggtctccccaagcgagcgcctatcaatggcacgctcctcaagcttctctttccagtcgccctgtgccatggtattggtcacatcactagcaatgtgtccttcgctgctgttgcagtctcatttgctcacactatcaaagctctggagcccttcttcagcgcacggctactcagtttatccttggacagcaagttcccttctctctgtgg

SEQ ID NO: 4298 - DNA, 270 bp, Zea mays
tgaacggcggcgagctcttcgacaagatcgctatcaaggggaaactgtccgaacacgagggcaggaggctcttccagcagctaatcgacggcgtcactattgccatgacagaggtgtctaccaccgagacctcaagccagagaatgtccttgttgatcggaagggcaccatcaagatctctgacttcggcctcagcgctctacctcaacatctcgggagcgacggacttctgcacacaacatgtggcagccccaactacatagctcctga

SEQ ID NO: 4299 - DNA, 270 bp, Zea mays
ccaggacgtacgtacgtacgtagatcgatccatcgatcgctagctagctgacgaccatggcgtccctctcctctgccgccatcaccgccccttccttcacggccgcgcccgctcgcgcagtggtcagcaggaggtccttcaccgtgcgtgcctctctccgcaaggccactgccaccgccgccgtggccgttgccgccagcgtcctgcttgccggcggcggcgccatggcccaggaggtgctgctgggcgcaggcgacggcgggctcgtct

SEQ ID NO: 4300 - DNA, 270 bp, Zea mays
gaagccaaccggctcgtccgcccgttgcctgtcgtcgctatggccgccgtggaggtgtgcgtgaaggccgccgcggggaacccgacacgctcggcgattgcccgttctcgcagagggtgctgctcacgctggaggagaagaaggtcccgtacgaggtgaagctcgtcgacctcggcaacaagcccgaatggtttctgaacatcagcccagagggtaaggtgcctgtgttcaacggtggagatggcaaatgcattgctgattctgatgtaa

SEQ ID NO: 4301 - DNA, 272 bp, Zea mays
agctgagaaggcaaagatggaactgtcatctttgacccaaacaaacatgagcttgccttttattacagctactgcagatggtcccaagcatattgagactactcttaccagggctaaatttgaagagctatgctcagatctccttgacacgctgaggacccctgtggacaatgcccttagagatgcaaagttgcaattcaaagatattgatgaggttattcttgttggtggctcaactagaataccagctgttcaggagcttgtcaagaaaa

SEQ ID NO: 4302 - DNA, 264 bp, Zea mays
tgcaacgtcatggccgccgccgttggtgggactactacacgtgctgcctgtacgccgaccagctgaagctgcggtccgctgactgttcaaggagggggtccttggcctggtgcacctcgccgcggtggacgccttctgctagctcgtctcccgcggcatggtcgctccctatccgccgcgcacctaccacatcaacctgtccgtgttcacctccctgccggacatgttgtccatcgggcagcagttccccatcatcccgatcca

SEQ ID NO: 4303 - DNA, 265 bp, Zea mays
gccaccatcaatcacctccactttcaggcgtactacttgtcagtgcctttccctgttgagaaggcagctacccacaagatcccactctctgaggacacgaagaagaatggggtgaccgtgtccaagctgataaattatcctgtgagaggcctggtatttgagggagggaacaccctggacgacctggccactgtggtttctaatgcttgcatttggctgcaagacaacaatgtgccttacaatgtgctcatttctgactgtggca

SEQ ID NO: 4304 - DNA, 265 bp, Zea mays
gcaaccggtccagcactttcacgctcagctccagcaatggctgcctccaccatggcgatctcctccacggcgatggccggcacccccatcaaggtgggctccttcggcgagggccgcatcaccatgcgcaagaccgtgggcaagcccaaggtggcggcgtccggcagcccctggtacggccccgaccgcgtcaagtacctcggccccttctccggcgagcccccgagctacctcaccggcgagttccccggcgactacggctggg

SEQ ID NO: 4305 - DNA, 263 bp, Zea mays
atggcttcatcggtggccgccgcggcgagcacattcctgggcacccgcctggcggacccggcgccacagaacgggcgcatcgtggcccggttcgggttcgggttgggcggcaaggcgaactagctccgaagaaggtggcgaagacatcgacctcctctgaccggccgctgtggttccccggcgccgtggcgcccgactacctggacggctcgctggtcggcgactacgggttcgacccgttcggtctcgggaagcccgtggag

SEQ ID NO: 4306 - DNA, 263 bp, Zea mays
gcgccactgtccagtgcgcgcgtcaagcttgcttagctagccgccatggcctccctcgccgccgtctccgtgaagcccgtggccatcaagggtctcgccggcagctctatctccggaaggaagctcgccgtcgccaggccgtcggcccgctccatccgctagccccgcgcagcgccgtggtggccaagtacggcgacaagagcgtctacttcgacctcgacgacatcggcaacaccaccggacagtgggacctctacggctct

SEQ ID NO: 4307 - DNA, 265 bp, Zea mays
ggcatcttggaggatgttgtcttcccagctgagattgtggggaagcgtgtcaggtaccgtctggatggtgccaagatcatcaagatcttcttggacccaaaggagaggaacaacaccgaatacaagctggacacctacactacggtctaccgcagctgtgtgggaaagatgtggtctttgagtaccctatgaccgacaatgcataaacatgacgccccggatatccccatttcatttcgttgaatctggatgtttctttggggcc

SEQ ID NO: 4308 - DNA, 262 bp, Zea mays
ctcgccatcacataaaaccagtgcaagcagaagcagcgcaatggcgagcagcaccatggccctctcctccacagccttcgccggcaaggcagtgaacgtgccgtcgtctctcttcggcgaggcccgcgtgacgatgcgcaagacggcggcgaaggcaaagccggcggcgagctccggcagcccgtggtacggccccgaccgcgtgctctacctgggcccgctgtccggcgcgcccccgagctacctgacgggcgagttcccg

SEQ ID NO: 4309 - DNA, 260 bp, Zea mays
cctcgccatcacataaaaccagtgcaagcagaagcagcgcaatggcgagcagcaccatggccctctcctccacagccttcgccggcaaggcagtgaacgtgccgtcgtctcacttcggcgaggcccgcgtgacgatgcgcaagacggcggcgaaggcaaagccggcggcgagctccggcagcccgtggtacggccccgaccgcgtgctctacctgggcccgctgtccggcgcgcccccgagctacctgacgggcgagttc

SEQ ID NO: 4310 - DNA, 259 bp, Zea mays
gtccaacactttcacgctcagcttcagcaatggctgcctccaccatggcgatctcctccacggcgatggccggcacccccatcaaggtgggttccttcggcgagggccgcatcaccatgcgcaagaccgtgggcaagcccaaggtggcggcgtccggcagcccctggtacggccccgaccgcgtcaagtacctcggccccttctccggcgagcccccgagctacctcaccggcgagttccccggcgactacggctggga

SEQ ID NO: 4311 - DNA, 257 bp, Zea mays
cccggagctgctcgcccgcaacggcgtcaagttcggcgaggccgtgtggttcaaggccgggtcgcagatcttcagcgagggtgggctggactacctcggcaacccgagcctgatccacgcgcagagcatcctcgccatctgggcctgccaggtcgtgctcatgggcgccatcgaggggtaccgcgtcgccggcggcccgctcggagaggtcgtcgacccgctctaccccggcggcagcttcgacccgctcggcctcg

SEQ ID NO: 4312 - DNA, 256 bp, Zea mays
gcgtcgtccatgctctccgctaccaccgtgccactccagcaggggggcggcctgtccgagttctccgggctcaggagctccgcgtcgctgcccatgcgccggaatgccacctccgacgacttcatgtccgccgtctccttcaggacccacgcggtcggcacgagcggcgggtcgcggcgggcgccgacggaggcgaagctgaaggtggccatcaacgggttcggccgcatcgggcgcaacttcctgcggtgctggc

SEQ ID NO: 4313 - DNA, 259 bp, Zea mays
cagcgactcagcgagcgagagcagcacacactgcacgcagctagctaggagcagcagcagcggcggcgatggcggcctccatgatctcctcgtcagctctggcggtggcgcctcagggcctgccgcccctcggccgccgcgcctcctccttcgccgtcgtctgctccaagaagaagatcaagaccgacaagccctacgggattgggggtggcctgaccgtcgacgtcgacgccaacgggagacagggcaagggcaaggg

SEQ ID NO: 4314 - DNA, 89 bp, Zea mays
  unsure (1)..(89): unsure at all n locations
gtgctgcgcgaacgtgcgtggatgtcgctgaatgggtcgactggtgaggtgatggttgggaagcagncggtttgtctaccagcgcttag

SEQ ID NO: 4315 - DNA, 256 bp, Zea mays
ccgaggagttcctctcccaggtcgactacctgctcggcaggcaggcctacggcggcaagaccgactccgagggcgggttcgagaccggcgccgtggccaccgccaacgtcctggagagctccacccccgtgatcgacggcaagcagtactacgccgtgtccgtgctcaccaggacggcggacggcgacgagggcggcaagcaccagctcatcgcggccaccgtctccgacggcaagctctacatctgcaaggcgca

SEQ ID NO: 4316 - DNA, 248 bp, Zea mays
ttcggctgcaacgacgccacccaggtgtacaaggagctgcaggaggccatcaaatcctacccggacgccttccaccgcgtcatcggcttcgacaacatcaagcagacgcagtgcgtcagcttcatcgcctacaagcccccgggcagcgactagaccgcgcccgccggccgccccccgccggctagctagctagctagctcctgcgtgagctagtagctagtgccatgcgtcgtctctgtcgttcggtt

SEQ ID NO: 4317 - DNA, 244 bp, Zea mays
accaaggagagtacgtggaggagcagccatggcttcatcggtggccgccgcggcgagcacattcctgggcacccgcctggcggacccggcgccacagaacgggcgcatcgtggcccggttcgggttcgggttgggcggcaaggcgaactgcgtccgaagaaggtggcgaagagatcgacctcctctgaccggccgctgtggttccccggcgccgtggcgccggactagctggacggctcgctgg

SEQ ID NO: 4318 - DNA, 118 bp, Zea mays
ccaccatcgatctgcaagtctcgctacgtagcagtgcaatacaaaaaaagcagccgcaatggcgagcagcaccatggccctctcctccacggccttcgccggcaaggccgtgaacgtg

SEQ ID NO: 4319 - DNA, 246 bp, Zea mays
ttcgcttctccgtcaacttcacttcctcgtcgacgcctccgtcccaccaaccatgccggcggccatggcggctgcggcggcgcagaggctcctcgcggcgagcacgaaaatcatcggcgttgggcgcaactacatagcccacgccaaggagctcggcaatccggtccccaaggagcccgtcctgttcctgaagccgacctcgtcgtttctccacgctggtgtggccaccgccgccgtcgagatccc

SEQ ID NO: 4320 - DNA, 245 bp, Zea mays
ctcacttcttgttacatgactactacacttgacgcggggaacggcaagtgttccgtctgcttgagagcaggaagagggacgagctgagccaggagttgctagacaaggcacgagctcgtaaccgcggcggacgtacagtttcttctgtgaccctgacgctctgggagagaacctgtacacgattataaagttcggccttgttcaatacatgattctcaagacactatgcgctctcttggcgttgg

SEQ ID NO: 4321 - DNA, 240 bp, Zea mays
gccgtgaacgtgcagtgcatggtgttcggcaacatggggaacacttctggcaccggcgtgctcttcaccaggaaccccaacaccggagagaagaagctgtatggcgagttcctggtgaacgctcaggctgaggatgtggttgccggaataagaaccccagaggaccttgacgccatgaagaacctcatgccacaggcctacgacgagcttgttgagaactgcaacatcctggagagccac

SEQ ID NO: 4322 - DNA, 239 bp, Zea mays
cacgcttgagctgaggcagcaggcgctcgaccgtctcttgccgtatcagaggtctgacttcgaaggcattttccgtgctatggatggactcccggtgaccatccgactcctggaccctcccctccacgagttccttccagaagggaacatcgaggacattgtaagtgaattatgtgctgagacgggagccaaccaggaggatgccctcgcgcgaattgaaaagctttcagaagtaaacc

SEQ ID NO: 4323 - DNA, 242 bp, Zea mays
gctcgatctactactactactactagctggtacacatactagccatcctgccagccagccagcttgccatggcgcccaccgtgatgatggcctcgtcggcaaccgccgtcgccccgttccagggtctcaagtccgccgccagcctccccgtcgcccgccgcagcaccaggagcctcggcaacgtcagcaacggcggaaggatccggtgcatgcaggtgtggccggcctacggcaacaagaag

SEQ ID NO: 4324 - DNA, 241 bp, Zea mays
accagggtgttcaagtgttcccagagataatggttcctcttgttggaacaccacaggaactggggcatcaagtgactcttatccgccaagttgctgagaaagtgttcgccaatgtgggcaagactatcgggtacaaagttggaacaatgattgagatccccagggcagctctggtggctgatgagatagcggacaggctgaattcttctccttcggaacgaacgacctgacgcagatgacc

SEQ ID NO: 4325 - DNA, 107 bp, Zea mays
gttggcttctcctccccctccggttcgggttcgggttcgtgatgttctccggggttcggtttcgtgggtgagctgatcgagatggcggcgtcggatgttgagtaccg

SEQ ID NO: 4326 - DNA, 233 bp, Zea mays
aagagatggccgaagtcccttttcatggagcttcggcgttttaaaccgacatagaggcagaatgacctttttatacatgtatgtccgagtcaatgttgtaaacttccgcaaggggcataattgtaatttgtcacaggctgcgacctgtgtctataaatagatgaacagtacctctgtactgttcacgcgaacctgctttttgccttcgcatcacattcgtactttttgccttc

SEQ ID NO: 4327 - DNA, 235 bp, Zea mays
caaccttggaggagataagcttgtcactgttgaagatattgtccgtcagcactgggccacatatggtcgccattactacacacgctatgactatgagaatgttgatgcaggggctgctaaggagcttatggcaaacctagtaagcatgcagtcatcactttctgatgttaacaagttggtcaaggagatccggtctgatgtttctgaagtagttgcagctgacgagtttgagtac

SEQ ID NO: 4328 - DNA, 236 bp, Zea mays
tgcagatcatgtaactaccgagaagacatggtatgttgttgatgcaacagacaagatcctaggcaggctagcatccaccattgcagtacatatcaggggaaagaatgaacccacttacactcctagtgtagacatgggagcttttgttattgtggtcaatgcagataaggttgctgtttctggtaaaaagcggtcacaaaagctttataggaggcactccggaaggcctggaggga

SEQ ID NO: 4329 - DNA, 235 bp, Zea mays
gcagattttaacaattttgaccgtgtacgtgtccccaaaattcgatatgctgggatgcttcagtatgatggtgagttgaagcttccaagtcgctaccttgtttccccaccagagatagatagaacatctggggagtacttggtgaagaatggcatccgcacctttgcttgcagtgagacagtgaaatttggccatgtcacatttttctggaatggtaaccgctcgggatactttg

SEQ ID NO: 4330 - DNA, 236 bp, Zea mays
agtttctgcagcagaacaaattttcagtgctggtggaaagaggttaagaccagcattagtttttctggtatcgagagcaactgctgaattagctgctttgccggagctaactacagaacatcggcgcttggctgagatcatagagatgattcatactgcaagtctaatacatgatgatgtcatagacgatagcgggatgcgaagagggaaagaaacaatccaccagctgtacggca

SEQ ID NO: 4331 - DNA, 238 bp, Zea mays
cagccaggcagccatggcgcccaccgtgatgatggcctcgtcggccaccgccgtcgctccgttccaggggctcaagtccaccgccagcctccccgtcgcccgccgctcctccagaagcctcggcaacgtcagcaacggcggaaggatccggtgcatgcaggtgtggccggcctacggcaacaagaagttcgagacgctgtcgtacctgccgccgctgtcgacggacgacctgctgaag

SEQ ID NO: 4332 - DNA, 273 bp, Zea mays
atcgttaccgccctggaactgttgctcttcgtgaaatccgcaagtatcagaagagcactgacctgctcataaggaagcttccgttccaaaggcttgtcagggagattgcccaggatttcaagactgatcttcgtttccagagccatgcggtgcttgcgctgcaggaggctgcggaggcgtacctggtgggtctattcgaggacactaatctgtgcgccatccatgccaagcgcgtgaccatcatgcccaaggacattcagctggctaggagga

SEQ ID NO: 4333 - DNA, 273 bp, Zea mays
ggctccgacggcacgctcaagttcgaggagaaggacggcatcgactacgccgccgtcaccgtgcagctcccggggggcgagcgcgtgccgttcctcttcaccgtcaagcagctcgtcgccaccggcaagcccgagagcttcggcgggcccttcctcgtgcccagctaccgtggctcctccttcctcgaccccaagggccgcggcggctccaccggctacgacaacgccgtcgcgctccccgccgggggcagaggtgacgaggaggagctccag

SEQ ID NO: 4334 - DNA, 274 bp, Zea mays
ccaagggagaccccggcattgccggcttgtatgacgagctgcttgtggcggaagaactcaagccctttgggaagcagctcagggacaaatacgtggagacacagcagcttctcctccagatcgctgggcacaaggatattcttgaaggcgatccattcctgaagcaggggctggtgctgcgcaacccctacatcaccaccctgaacgtgttccaggcctacacgctgaagcggataagggaccccaacttcaaggtgacgccccagccgccgct

SEQ ID NO: 4335 - DNA, 274 bp, Zea mays
ctagacactactttactcaaagtctagagctagcttttgctttgctcaccagataaaccgcagcagatggcgtcgacgatcatggccgccacctcccgcatcgtcgcggccaagacgccgtttcttggccagggtcgcgccgccgccaatgccagccccctccgcgacgtcgccgccgccgctgctggcggccggatcaccatgggcaacgacctgtggtacggcccggaccgcgtcaagtacctgggccccttctccgcccagacgccctcgt

SEQ ID NO: 4336 - DNA, 269 bp, Zea mays
ccaaggagcaggtgttcgagatgcccaccggcggcgccgccatcatgcgggagggccccaacctcttgaagctggcgcgcaaggagcagtgcctggcgctcggcaccaggttgcgctccaagtacaagatcacctaccagttctaccgcgtcttccccaacggcgaggtgcagtacctccaccccaaggacggcgtctacccggagaaggtcaaccccggcagggagggcgtcggccagaacttccgcagcatcggcaagaacgtcaac

SEQ ID NO: 4337 - DNA, 270 bp, Zea mays
gctaccgcatcgccggcggcccgctcggcgaggtcgtcgacccgctctaccccggcggcagcttcgacccgctcggcctcgccgacgaccccgaggccttcgccgagctcaaggtcaaggagctcaagaacggccgcctcgccatgttctccatgttcggattcttcgtccaggccatcgtcaccgggaagggcccgctcgagaacctcgctgaccacattgccgaccccgtcaacaacaacgcttgggcctacgccaccaacttcgtcc

SEQ ID NO: 4338 - DNA, 270 bp, Zea mays
ctacgtagcagtgcaatacaaaaaaagcagccgcaatggcgagcagcaccatggccctctcctccacggccttcgccggcaaggccgtgaacgtgccgtcgtcgtccgccttcggcgaggcccgcgtgacgatgcgcaagacggcggcgaaggccaagcctgcggcggcgtccgggagcccgtggtacggccccgaccgcgtgctgtacctgggcccactgtccggcgagccaccgagctacctgacgggcgagttcccgggcgactacg

SEQ ID NO: 4339 - DNA, 270 bp, Zea mays
ggaagaaagcgcagatattttgactgtctcaactgaacaggagaaggaatcctttgctgagaaacttagtgaggtgcaggattggttatatatggacggtgaagatgctcaagctaatgaattcaaagagcgtcttgaccaacttaaagccattggtgacccaattcttttcagattgaatgaattaaaaacccgaccaacggcctgtgaaaatgctcgattgtatcttgatgagctgcaaaagattgttaagaactgggagacaaacaa

SEQ ID NO: 4340 - DNA, 272 bp, Zea mays
cgcttcttctcttcggttcagctctcgagtttccaggatgaaggtaatagctgcctacctgcttgctgttctgggtggaaacacttccccgactgctgatgatgttaagagcattctggaatcagttggtgctgaagctgatgaagaaaaactagagttcctgctcacagaactcaaagacaaggacataacagaagtgattgcagctggaagggaaaggttatcctctgtgccttcaggtggtggtgcaattgacatgggagctccagcag

SEQ ID NO: 4341 - DNA, 261 bp, Zea mays
gacaaacagcagcagatggcgtcgacgatcatggccgccacctcccgcatcgtcgcggcaaagacgccgtttcttggccagggtcgcgccgccgccaatgccagccccctccgcgacgtcgccgccgccgctgctggcggccggatcaccatgggcaacgacctgtggtacggcccggaccgcgtcaagtacctgggccccttctccgcccagacgccctcgtacctgaccggcgagttccccggcgactacggctgggac

SEQ ID NO: 4342 - DNA, 263 bp, Zea mays
gagatggcggtcgtggccacggaggagtaccgctccgtcgtcgtcaaggaggcgcgcttcgtcgagtacttcagatcggctacaccggagaccgagtacgggaggatgaacatcggcagccggccagccaagaggaggcccggcggcggcatcacgaccctgcgcgccatcccctggatcttctcgtggacccagaccaggttccacctccccgtgtggctgggagtcggcgccgcattcaagttcgccatcgacaaggacgt

SEQ ID NO: 4343 - DNA, 263 bp, Zea mays
gaatgagtgcagaagagaagcagaaggtcacaccgcgcactgtcatgataggagggaaagcgtttgcaacatacactaatgccaaaagaatagtgaaattggtgaatgatgttggtgctgttgtgaacaatgatcccgaagttaacaaatatctgaaggttgtctttatcccaaattacaatgtatcagtggctgaagtgcttattcctggtagcgaattgtcacagcatattagtactgctggtatggaagcaagtggaaca

SEQ ID NO: 4344 - DNA, 264 bp, Zea mays
agcaagcaagcagcgagtacatacatactaggcagccaggcagccatggcgcccaccgtgatgatggcctcgtcggccaccgccgtcgctccgttccaggggctcaagtccaccgccagcctccccgtcgcccgccgctcctccagaagcctcggcaacgtcagcaacggcggaaggatccggtgcatgcaggtgtggccggcctacggcaacaagaagttcgagacgctgtcgtacctgccgccgctgtcgacggacgacctg

SEQ ID NO: 4345 - DNA, 263 bp, Zea mays
cgccggagctcgacaaggacgaccgacgacgcacgcggagatccggcgtactgcaaattttgaaaactgaactgtaagatggcatcagcagagctttcccgtgaggaaaatgtgtacatggcgaactcgctgagcaggcggagaggtacgaggagatggttgagttcatggagaaggtagccaagactgttgactcggaggagctcactgtggaggagcgaaacctcttgtctgttgcatacaagaacgtcattggagcccgc

SEQ ID NO: 4346 - DNA, 276 bp, Zea mays
ttttggagtgcaatggcttcaaatgttacctttcaatcccgaaatgtattgagcaagaagctcatggttaagaaagaggaatccttggacaaccttaatctcttctctatcattacagtgatgtcatttttccttttggcccctgttaccttctttacagaaggtgtcaaaattactcctacatttttgcaatctgctggtctgaatgtaaaccaagtccttacaaggtgtcttttcgctggactgtgtttccatgcataccaacaggtgtcttac

SEQ ID NO: 4347 - DNA, 278 bp, Zea mays
gcgctacggcgtcaagctcaccttgttccacggccgcggaggcaccgtgggcaggggtggcgggcccacgcaccttgccatcctgtcccagccgccggacaccatcaacgggtccatccgtgtgacggtgcagggcgaggtcatcgagttctgcttcggggaggagcacctgtgcttccagactctgcagcgcttcacggccgccacgctggagcacggcatgcacccgccggtctctcccaagcccgagtggcgcaactcatggacgagatggcggt

SEQ ID NO: 4348 - DNA, 278 bp, Zea mays
aaaagaaatcattgaggccatgtcttccttcaacgagaggcctatcatcttttcactgtcaaacccaacctcgcattctgaatgcactgctgaacaagcatatacatggagtcagggccgttcaatctttgccagtggcagtccatttgcccccgtggagtacgaaggaaagacttttgtgcctgggcagtcgaacaatgcctacattttccctggactcggcctcggtcttgtgatctctggagccgtccgtgtccacgaggacatgcttctcgccg

SEQ ID NO: 4349 - DNA, 271 bp, Zea mays
agcccttcttcagcgcactgctactcagtttatccttggacagcaagttcccttctctctgtggctttctcttgcccctgttgtcatcggtgtttcaatggcatcccttactgagctctcattcaactggactggcttcatcaatgccatgatatcaaacatctcattcacctacaggagcatttattccaagaaagccatgactgacatggatagcaccaacgtgtatgcttacatttcaataattgctctcattgtttgcattccgcct

SEQ ID NO: 4350 - DNA, 271 bp, Zea mays
cttgaacacatttctttttaagatggagctggatattggtgccttggctaaagtcgtaggagataatgcgacttcagaattttttttaaatgcttcgaaagcacgtcatattgcaattgactctattttgtggaactctgagatggaacagtggcttgactattggcttcctggtgatgcagactgtcaggaagtacacgaatggaagcctaactcacagaaccgcaacatatttgcttccaacttcgttccgctgtggctaaatgcatac

SEQ ID NO: 4351 - DNA, 275 bp, Zea mays
gacaagtctcctgctagacaagatgaaatcaactgctgcagagacaggtgtgcagggaaggatcataaacgtatcatcggtcgcgcataaaagaagtgatggtacatgctttgagctgaacaagctaaacgataaggctaggtacaaaccgttcattgcatacgcgcattcgaagttagccaatattctccacacaaatgagttgtccaggcgttttcaggaagaaggatgcaacctgacagcgaattccctgcatcctggagtgatcatcacca

SEQ ID NO: 4352 - DNA, 273 bp, Zea mays
agcaacatgagaaggttcttgaggaaggtgtcctcaacccagaatcaactgttgttgcgatctttccctctccaatgcattatgctgggccaactgaggtgcagtggcatgctaaggctcgtattaatgctggtgcaaatttctatattgttggaagggatcctgctggtatgagccatcccacggagaaaagggacctctatgatgctgaccacgggaagaaggttttgagcatggctcctggcctcgagaggctcaacatccttcctttca

SEQ ID NO: 4353 - DNA, 273 bp, Zea mays
ccagtcgaccgtcgacggcaagaagatcgtcgacgtgcttagtgagcagggaatcgtgcctggtatcaaggtcgacaagggtcttgtgccactcgctggctccaacaacgagtcatggtgccaaggtctcgatggccttgcttcacgtgaggcagcctactaccaggccggtgcccgcttcgccaaatggcgcactgttgtcagcatccccaacggtccatctcaactagccgtgaaggaagctgcctggggcctcgcccgctacgccgccat

SEQ ID NO: 4354 - DNA, 274 bp, Zea mays
aacgcagcaagcagacagaaggacaggcaggcagcgagtgcaaccgcgagagcgatcagcgatgggctccttcttctcgaccttagtgacgccccctccggccgccgacgacccgaactgcgccgtggtggccgcgcactccaaggccacctacgacgagcagtgggcggcccacaagagcagcagcaagctgatggtgatcgacttctcggcgtcctggtgcgggccctgccgcttcatcgagccggccttcaaggagctggcctcccgcttc

SEQ ID NO: 4355 - DNA, 265 bp, Zea mays
cgcctctccttccagtgtccgccgtcgtgcgctcgctacccctctccctcgaggcctttgccggcgaagagcgcccagtcgcccaccaggatgaagtttgttgctgcctacctgcttgctgtcctcgctgggaactccagcccctctgccgaggacttgacagccattctggagtcagttggctgtgaagttgacaatgaaaagatggaactccttctgtcccaactgagcggtaaggacattaccgagctcattgctgctggca

SEQ ID NO: 4356 - DNA, 267 bp, Zea mays
cgactggttcggctggtgcacctgggacgccttctacaccgacgtcaccgccgacggcgtcaaacacggccttcagagcctgtccaagggcggcgcgccgccgcggttcctcatcatcgacgacggctggcagcagatcgcctccgagaacaagcccgaccccaacgtcgccgtccaggagggcgcgcaattcgccagccggctgaccgggatcaaggagaacaccaagttccagaccaagcccgacggcgacggcgacggcgagca

SEQ ID NO: 4357 - DNA, 265 bp, Zea mays
ggtggaagaccctaccctggggatgactctaatgatgatgatgacttggactcaaaacgcaggaaaatggaatctgctggtatcgatgctgctttgatgggtaaaccaaatcgcgagccccgtgtcgttgtacaaactgttagtgaagttgatatcttggatgatgggtatcgctggcgcaaatatgggcagaaagtagtgaaaggaaaccctaacccacggagttactacaaatgcacacatacaggatgcccagtcaggaaac

SEQ ID NO: 4358 - DNA, 267 bp, Zea mays
gccttctcgtcgctcctgttcttctcgcatccccagcccaggtggtgtcccctgtcgcgttgatgcatgctccctcggcggtggccttgagctgaggcggcggagcgatgccggactcggacaacgactccggcgggccgagcaacgccgggggcgagctgtcgtcgccgcgggagcaggaccggttgctgcccatcgccaacgtgagccggatcatgaagaaggcgctcgcggccaacgccaagatcagcaaggacgccaaggaga

SEQ ID NO: 4359 - DNA, 114 bp, Zea mays
agcagcgtcgtgcccttgcccagttctacagcccctctgctgcagcaagaaggaaagaagctagcgcttgtagcttgtcagccgtggccaccgccgccgcgtctagcctcctca

SEQ ID NO: 4360 - DNA, 267 bp, Zea mays
ctggtccgtggccatggcgtcgtccatgctctccgctaccaccgtgccactccagcaggggggcggcctgtccgagttctccgggctcaggagctccgcgtcgctgcccatgcgccggaatgccacctccgacgacttcatgtccgccgtctccttcaggacccacgcggtcggcacgagcggcgggtcgcggcgggcgccgacggaggcgaacttgaaggtggccatcaacgggttcggccgcatcgggcgcaacttcctgcggtg

SEQ ID NO: 4361 - DNA, 267 bp, Zea mays
cacatacatagtttcttctactacacgacgacaaacatggggaagcctgcgaagatcggagagtggggtggatacgccggcgatcgtcgggatctgagggctactccggaccggctgaccgaggtgaaggtcacggcggacaacagcagctgcatccgctccatctccttcatctacatcggagccgatggcaagccgtacgaggaggggccatggggtttcggccatgctggcacggagtacaagattgatctgtgcaggttcgac

SEQ ID NO: 4362 - DNA, 279 bp, Zea mays
gccatctcccctgttcggttttaggagacctgcgccgctcctccggccacgcgagcacgccgaaatggtcgcccacaggttccatcagtaccaggtggtgggtcgcgcgctgccgaccccgaccgatgagcaccccaagatctaccgcatgaagctctgggccactaacgaggttcgcgccaagtcgaagttctggtacttcctgagaaagctgaagaaggtgaagaagagcaatggccagatgctcgccatcaacgagatcttcgagcgcaaacccta

SEQ ID NO: 4363 - DNA, 270 bp, Zea mays
ataaaaccagtgcaagcagaagcagcgcgatggcgagcagcaccatggccgtctcgtccacagccttcgccggcaaggcagtgaacgtgccgtcgtctctcttcggcgaggcccgcgtgacgatgcgcaagacggcggcgaaggcaaagccggcggcgagctccggcagcccgtggtacggccccgaccgcgtgctctacctggggccggtgtccggcgcgcccccgagctacctgacgggcgagttcccgggcgactacggctgggaca

SEQ ID NO: 4364 - DNA, 277 bp, Zea mays
gatgggtgacgcagagattgacctgcagccgatgatcagtgcagctacagcgtttggcgaccctgatctgctcgcggacatgcagatcggcaagtggctcaggtccccagataatgcgctggcaagggacagcgccgtcaatgtcgttggtggcaaggtcaagcaggaggtctctctgaggctgcagaacgtggaatcgggggaggtggaactggagctggagtggataccactcaatcagtagagtttaaatccacctgtaggctatatgtgatgc

SEQ ID NO: 4365 - DNA, 278 bp, Zea mays
caagcagcgagtacatacatactaggcagccaggcagccatggcgcccaccgtgatgatggcctcgtcggccaccgccgtcgctccgttccaggggctcaagtccaccgccagcctccccatcgcccgccgctcctccagaagcctcggcaacgtcagcaacggcggaaggatccggtgcatgcaggtgtggccggcctacggcaacaagaagttcgagacgctgtcgtacctgccgccgctgtcgacggacgacctgctgaagcaggtggactacct

SEQ ID NO: 4366 - DNA, 276 bp, Zea mays
attcgatttgatcgttccccttccccgcgcctcctcgttcccctgaccagtcgccccgattttttttctgttccaggtcgcttctctctgttccgcgtgcgatcgagtagatcaaaaggcggaggaggatggcgaggagttcgttcaagttggagcaccccttcgaaaggaggcaagctgaggctaaccgcatcagggagaaataccctgacagaatccctgtcattgttgagaaggccgagaggagtgacatcccagacattgacaagaaaaagt

SEQ ID NO: 4367 - DNA, 276 bp, Zea mays
ccaaaagcagcagcagctccagccgtcgccgtctccactctccagtctccaccactgctccgcccgcgccggatcgagggagggcaggcggacgaggaggagggatgagtctcttcgggcttggacgaaaccagaagacattccgccccaagaagagcgctccatcaggtagcaagggagcacagctccgaaagcacatagatgccactctcggcagtggaaaccttagggaagctgtgaggttgcctcctggagaggatatcaatgaatggcttg

SEQ ID NO: 4368 - DNA, 275 bp, Zea mays
gcacaccaaggagagtacgtggaggagcagccatggcttcatcggtggccgccgcggcgagcacattcctgggcacccgcctggcggacccggcgccacagaacgggcgcatcgtggcccggttcgggttcgggttgggcggcaaggcgaacatgctccgaagaaggtggcgaagacatcgacctcctctgaccggccgctgtggttccccggcgccgtggcgccgactacctggacggctcgctggtcggcgactacgggttcgacccgttcgg

SEQ ID NO: 4369 - DNA, 272 bp, Zea mays
ggtcctcgccatcaggtggaaccagtgcaagcagaagcagcgcaatggcgagcagcgccgtggccctctcctccacagccttcgccggcaaggcagtgaacgtgccgtcgtctcacttcggcgaggcccgcgtgacgatgcgcgagacggcggcgaaggcaaagccggcggcgagctccggcagcccgtggtacggccccgaccgcgtgctgtacctggggccgctgtccggcgggcccccgagctacctgacgggcgagttcccgggcgac

SEQ ID NO: 4370 - DNA, 282 bp, Zea mays
cgaccgcgcccagcggagcattgcgtgccaggcggcgagcagcatctccgccgaccgcgtccccgacatggagaagcggaactgatgaacctcctcctcctcggcgccatctcgttgcccaccgtcggcatggtcgtcccctacggcgccttcttcgtccctgccggctccgggaacgccggcggcgggacctacgcgaaggacaagctgggcaacgacatcacggtggaggcgtggctcaacacgcacggtcccaacgaccgcacgctcgcgcaggggctc

SEQ ID NO: 4371 - DNA, 275 bp, Zea mays
cagaggagaggagaaagggcaaaaggcaacaccgcccgcgacgaccacgatggcagcctcgctccaagtccaagccgcggccaccttgatgcaaccggccaagatcggcggccgggcgccgtccgcctcgctgccgtcgtcccgcccgtcgtcgcaactcgccagggcgttcggcgtcgacgccagcgccgccaggatcacgtgctccctccagtccgacgtcagggacgtcaccagcaagtgcgtcgacaccgccaagctcgccggcttcgcgc

SEQ ID NO: 4372 - DNA, 281 bp, Zea mays
cgcacgcatacacagcacagagtgaggtaagcatccgaaaaaagctgtgatctgatcgacatggccgccgccaccatggctctcacctcccgcgcgctcgtcggcaagccggcgaccagcaccagggacgtcttcggcgaggggcgcatcaccatgcgcaagactgctggcaagcccaagccagcggcgtccggcagcccctggtacggggccgaccgcgtcctgtacctgggcccgctgtccggccagcccccaagctacctgaccggcgagttccccgg

SEQ ID NO: 4373 - DNA, 277 bp, Zea mays
gcttctgtggccaacccaggtgttactgttgttgacatcgatggagatggtagctttctcatgaacgttcaggagctagctatgatccgaattgagaacctcccggtgaaggtctttgtgctaaacaaccagcacctggggatggtggtgcagtgggaggacaggttctataaggccaacagagcgcacacatacttgggaaacccagagaatgaaagtgagatatatccagatttcgtgacgatcgccaaagggttcaacattccagcggtccgtg

SEQ ID NO: 4374 - DNA, 273 bp, Zea mays
gccatgtttaccactgggaccttggaacaaggaaatgcatccacaaggcaacagatgacggttccctggctggcctctcgctctgcacctcgcgggatagctctttgtttgccacaggctccagcagcggcatcgtgaatgtgtacaagagggacgattttctcggcgggaagaggaagccgatgaagactatcgagaacctgaccactgatatcggtgagatgaagttcaaccatgacgcccagatcctggcgatcagctcgaggaaagaga

SEQ ID NO: 4375 - DNA, 269 bp, Zea mays
cgccaggcttcaaagtcgcgatcttgggtgcagcaggtgggatcgggcagccacttgcgctattgatgaagatgaaccctcttgtttcggtgctccatctatacgatgtcgtcaacgcacctggtgtcacagccgacatcagccacatgaacactggtgctgtggtacgtggcttcttgggccagccacagttggaaaatgccctggctggaatggatcttgtaataattcctgctggtgtccctcggaaacctgggatgacaagggat

SEQ ID NO: 4376 - DNA, 269 bp, Zea mays
cacactcgggtaaagctatctcgagctagctagctgctgtaaccgttgccatggccaaaatggtgttgctctgcgtgctcgtctccttcctcctgatgcccttggcctccctagccctgacgcaggacttctgcgtcgccgacctgacctgcagcgacacgccggcggggtacccgtgcaagtccagcgtcaccgccaacgacttctacttccacggcctggccggccagggcaaaataaacccactcatcaaggccgccgtgaccccg

SEQ ID NO: 4377 - DNA, 274 bp, Zea mays
cgccggcttcccgcacaacgtcgtcttcgacgaagacgaggtgccgagccgcgtcgacgccaccaagatctcgcaggaggagtacctcaacgcgccaggcgagacctactccgtcaccctcaccgtgccgggaacctacggcttctactgcgagccgcatcaaggagccggaatggtcggcaagatcaccgtcaactaattaagctagctatcgatcgatatccattcatgtattagctgttgcttcctgctttgtactccgccgatctgtcca

SEQ ID NO: 4378 - DNA, 276 bp, Zea mays
caagcatatatgggggagatcaccaatgtcatggagtaccaggccatcgccaagcagaagcttccgaagatggcctacgactactacgcgtccggcgccgaggacgagtggacgctgcaggagaacagggaggccttctccaggatgttgttccgtccgcgcatactgatcgacgtgtccaagatcgacatgaccaccaccgtgctggggttcaagatgtccatgcccatcatggtcgcccccactgctatgcagaagatggctcacccagatggg

SEQ ID NO: 4379 - DNA, 277 bp, Zea mays
gaagaagacgagtgtcaagtgaacctgaaacttgcggtgtcactggctggtacacctgagtgtgagtgagtgatcgagctagctgagctccgatcctcgctagctagctaggataccgccataccacaagtcttcttcacaagtttaggagtgacagcaacaagagatcgatggcctctgccaccgtgctcaagtcctccttccttcccaagaagtccgaatggggcgccaccaggcaggccgccgcgcccaggccgcacaccgtctccatggtcgt

SEQ ID NO: 4380 - DNA, 273 bp, Zea mays
gacgcagatgacctttgggtacagcagggatgatgtgggaaagttcattcccgtctatcttgctcagggcatcctccaacatgaccccttcgaggtcctggaccagaggggagtgggcgagctggtgaagtttgctacagagaggggccgcaaagctaggcctaacttgaaggtgggcatttgtggagaacacggtggagagccttcgtctgtgagcttcttcgcgaaggctgggctggattacgtttcttgctcccctttcagggttccgat

SEQ ID NO: 4381 - DNA, 231 bp, Zea mays
gtcgcatttgcaggcagatctgagttagccggcggatacgatccgtgcgcctgctgtgtgtgtgtcagtggagatggccacagcttacgctcccatggcgagccaggtgatggagagcaggctcgtcgtgcactcgaggccaagggtcctgtcacgcgctgctgcgtgcacgaagcggcaccagttcaccgtcaaggccatccagcccgagaaggcaacgtaccaagtggt

SEQ ID NO: 4382 - DNA, 269 bp, Zea mays
gcggaggaacagccagcgcgctcctggcggccaaagggagggcggtgacccaggtcgctaagaagaacctgatccagatcgccgtcccgatcttcatcgagctgaagcggctgctggagagcaagaacagcccgctgatcgggtgcctgatggagtgcctgcgcgcgctgctcaaggactacaagaacgagatggaggagatcctggtggcggacaagcagctccagcgtgagctcctctacgacatgcacaagtacgaggcaggcaag

SEQ ID NO: 4383 - DNA, 267 bp, Zea mays
accaaatcaggtctgtgaccgagagtatcgaagctgtcaggatgtccaagcgcgccggatggggagtgatggcaagccacaggagtggcgagacagaggacaccttcattgctgacctctcagttggcctgtctacgggccaaatcaagacgggagctccttgccggtctgagcgcctggccaaatacaaccagctgctcaggatcgaggaagagctcggtgatgccgcggtctacgccggagcaaagttcagggcaccagtggagc

SEQ ID NO: 4384 - DNA, 265 bp, Zea mays
ccggtccaacactttcacgctcagcttcagcaatggctgcctccaccatggcgatctcctccacggcgatggccggcacccccatcaaggtgggttccttcggcgagggccgcatcaccatgcgcaagaccgtgggcaagcccaaggtggcggcgtccggcagcccctggtacggccccgaccgcgtcaagtacctcggccccttctccggcgagcccccgagctacctcaccggcgagttccccggcgactacggctgggacac

SEQ ID NO: 4385 - DNA, 267 bp, Zea mays
cggagagctggaaaaggcaggaaagacccggcttttgaccccaagtaccctgttgagggcaatggcggccacctccgaggaggcaatcaagcagttctcggcgctcatggagcagctagaggagccgctaaagagcacattccagaatgtgcatcaaggaaatctgagagggactttgatgcgttttctgaaggctagagaatggagtgtgcctaaagcttataaaatgctaatggattgcttaaactggagagtacagaatgagat

SEQ ID NO: 4386 - DNA, 263 bp, Zea mays
gtcttgagatgctctcgattgccttcgccgggaacagtgatttgggcctccattacatcctatcgggctgcaagagcttgaagaagctagagattagggactgcccatttggtgacaagcccttgctggcaaacgctgccaagctggagacaatgcgatccctttggatgtcgacgtgctcaatgaccttgggcgcatgccggcagcttgcgcgcaagatgccccgtcttagtgtggaggtcatgaatgatcctcgacgggga

SEQ ID NO: 4387 - DNA, 266 bp, Zea mays
aaggagagtacgtggaggagcagccatggcttcatcggtggccgccgcggcgagcacattcctgggcacccgcctggcggacccggcgccacagaacgggcgcatcgtggcccggttcgggttcgggttgggcggcaaggcgaacatgctccgaagaaggtggcgaagacatcgacctcctctgaccggccgctgtggttccccggcgccgtggcgcccgactacctggacggctcgctggtcggcgactacgggttcgacccgtt

SEQ ID NO: 4388 - DNA, 267 bp, Zea mays
gatgctatcgatttcaccatcaaacaagacgacggggctctgccacagaacctctaccgcgcagacatcgtgcttgccggcgtttcgcgtacagggaagacgccactgtcgatatacctagctcaaaagggatacaaggtggcaaatgtcccaatcgtgatgggagtggaccttccaaagtccctttttgagatcaaccaggacaaggtttttggactgacaataaacccagcgatccttcaggcgattagaaagaccagggccaag

SEQ ID NO: 4389 - DNA, 269 bp, Zea mays
gaagaaggagaccgagctggagatgcagagggaggaccttttgtcgaagcctgagcagatccgggctaagattgtcgaagggcgtgtaaagaagaggcttggagaattcgcgttgttcgaacagccattcatcaagaacgacaaggtcacaataagtgagtggctgaagcaaactatagctacaactggagagaatatgaaggtcaggagatttgcccggtacaacctaggtgaagggctggagaagaaaagccaggattttgctgctg

SEQ ID NO: 4390 - DNA, 269 bp, Zea mays
gcgccacttgcttgagtagcgaacctgagagcaatggcgtcgctgtcgtgcgcctccacgctgccctggacccccgcctcctccccgccgccctcggcggaccgccgcctcacggcctctcgccgggctccgtcgctggtcatcctcgcccaggggaaggtgaagaaacaccctcaggtcatattgacagatgacatagaagacgtggggaagaaaggggatacaatgaaggtgcgagctggattctaccgcaactccttgcttcccaa

SEQ ID NO: 4391 - DNA, 263 bp, Zea mays
gacgagtgtcaagtgaacctgaaacttgcggtgtcactggctggtacacctgagtgtgagtgagtgatcgagctagctgagctccgatcctcgctagctagctaggataccgccataccacaagtcttcttcacaagtttaggagtgacagcaacaagagatcgatggcctctgccaccgtgctcaagtcctccttccttcccaagaagtccgaatgggcgcgccaccaggcaggccgccgcgcccaggccgcccaccgtctc

SEQ ID NO: 4392 - DNA, 288 bp, Zea mays
tgtcggtgacttcatcttcagtatttgtgctggagctgtgttcctcttcatgctcgaccgctttttgaggttctggcaatcaagggccaaagtcgacatcatttcagccgcttgccgcccgtgtgggacggtggagctagtattctcaaaaccagcaagcctccactacaatgctttgagtttcatcttcattcaagtgcgcgagctatcgttcttgcagtggcacccgttcagtgtatcttcaagtcccatggatgggagataccacatgtcggttctcataaaagt

SEQ ID NO: 4393 - DNA, 282 bp, Zea mays
gccacccgagggctacgtcgagcccgcggcgtttgacgagctaccgccggagtccccagaagacgtggcggcggcgtacgaatctctctacgggccggccttcagcggcgagacattgctggggaacaatgtctttgaggtcaaggtggtcgaccccatcgacatggaccgggagcagcgcccgaacgacgatttcaccgagcgcgtcgtgcaggtcaaccgcgtcaccaaggtcgtcaagggagggaggcagctctcctaccgcgcaatcgtcgtcgttgg

SEQ ID NO: 4394 - DNA, 287 bp, Zea mays
ctaccagcgactcagcgagcgagagcagcacacacgcagctagctaggagcagcagcagcggcggcggcgatggcggcctccatgatctcctcgtcagctctggcggtggcgcctcagggcctgccgcccctcggccgccgcgcctcctccttcgccgtcgtctgctccaagaagaagatcaagaccgacaagccctacgggattgggggtggcctgaccgtcgacgtcgacgccaacgggagatagggcaagggcaagggcgtgtaccagttcgtcgacaagtacg

SEQ ID NO: 4395 - DNA, 287 bp, Zea mays
gcgtgtttgagactagcggaccgaccttgaagttgaagttgaaaaggtcggcctgcgcggcgatggatgtcaagtgccggcgtctggcggggaaggtggccatcgtgacggcgtccacgatggggatcggcctcgccatcgccgagcgcctcggtctggagggcgccgccgtcgtcatctcctcccgcaagcagaagaacgtgaacgacgcggtggaggggctcagggccaagggtatcaccgcggttggtgccgtctgccacgtctccgacgcacagcagcgcaag

SEQ ID NO: 4396 - DNA, 289 bp, Zea mays
tcaggctctacgtccggggcaccatcctcggatacaagaggtccaagtcgaaccagtacgagaccacgtcgctcgttcagatcgagggggtgaacaccaaggaggacgtcgcgtggtacgctggcaagcgcatggcgtacatctacaaggctaagaccaagagcagcgagacccgctacaggtgcatctggggcaaggtcacccgcccgcacggcaactcgggcgtcgtccgcgccaagttcaagtccaacctcccgcctgagtccatggggcgcaaggtcagagtgtt

SEQ ID NO: 4397 - DNA, 282 bp, Zea mays
gttacatcacttgtgacacttccagtcataatttttgagccaatgacaatgcttcagaaaatggctgagttgatggaatactgtgagttgttagacaaagcagatgaatgtgaggctccatacatgcgtatggtttatgcttctacatgggctgtttcggtatacttcgcgtatcagcgcacatggaagccttttaatccgatccttggagagacttatgagatggttaaccaccagggcattacatttcttgccgagcaggtaagccatcatcccccaatg

SEQ ID NO: 4398 - DNA, 283 bp, Zea mays
tccgcgcgccgcggaccagcagccatgtcgtgctcccacctctccaccgcctggtcctcctcggcgctcgccagcagcgcctccaccacccgacggcgctcccccccgcgctcgggtctcctggtgcggtgttccctccgtgagctccgcacccgcatcgactccgtcaggaacacgcagaagatcacggaggccatgaagctggtggccgccgccaaggtccggcgcgcgcaggaggccgtcgtctcctctcgccctttctcggaggcgctggtggaggtgc

SEQ ID NO: 4399 - DNA, 283 bp, Zea mays
gaaattttgaagttcattcatgaccctagtcgtacagagtatgacttcaatggccttccaacttcgtatctgcgtcttgctgcacatcgcctggcgcacattacttcctgcagtccattgccataccagacaacagtttgcctgatggaactggttcacgtatcatcctccgtaagacaacattcgactgccgactgcctgctgtccgccttgcagatattccagttaacctgccacaagaagacatctctgtggcgaaagtagctattaaacagaggcctca

SEQ ID NO: 4400 - DNA, 279 bp, Zea mays
caacgtcatattcaacatcctcaacaagaagatctacaactacttcccatacccatactttgtgtccttgatccatctagtagtgggtgtcgtatactgcctcatcagctggagtgtcggtctccccaagcgagcgcctatcaatggcacgctcctcaagcttctctttccagtcgccctgtgccatggtattggtcacatcactagcaatgtgtccttcgctgctgttgcagtctcatttgctcacactatcaaagctctggagcccttcttcagcgc

SEQ ID NO: 4401 - DNA, 279 bp, Zea mays
caccttgaaagcatcaaggccagtatcgaggccaggcgaccagattttgatgcctttattgatccgcagaagcagtatgctgatgctgtgattgaagttctgccgacccagttgattcccgacgacaacgaaggaaaggtgctgcgtgttaagctcatcatgaaagaaggggtgaagaacttcaacccggtttatctctttgacgaaggatcgaccatcagctgggtgccttgtggaagaaagctcacatgctcttaccctggcatcagattttcctat

SEQ ID NO: 4402 - DNA, 276 bp, Zea mays
tttgtttgagaatgggacaattgctattgtggaggccatttctcctgagcttggtaaccgcgtgcaaagagtccgtgtgcagcttcctggtctaagccaggagcttcttcaaaagttgagggagaagaacatcgattttgctgctcacagcaaccaggaggactctggttctcttctgttcaaccttattggaaatttggcattcccgcttatccttatcggtggtctgtttttactttcaagaagggcacagggtggcctcggtggacccaatgg

SEQ ID NO: 4403 - DNA, 280 bp, Zea mays
gccggccgattcgagcagcgccccagcagcctctgctccgctgcctctggcgaccgccggagcccgaggcggaggaggagggaagatctcgctcgatccaaggaggcgagtacaagatggtgagctcctcgtcgccggtggtcaacgtgtacccgctcgccaactacacgttcggcaccaaggagcccaagatggagaaggacacctccgtcgacgaccgcctcgcccgtatgaaggtcaactacatgaaagaaggaatgcgtacaagtgttgaagcaat

SEQ ID NO: 4404 - DNA, 280 bp, Zea mays
cgccttgaaagcatcaaggccagtatcgaggccaggaaaccagattttgatgcctttattgatccgcagaagcagtatgctgatgctgtgattgaagttctgccgacccagttgattcccgacgacaacgaaggaaaggtgctgcgtgttaagctcatcatgaaagaaggggtgaagaacttcaacccggtttatctctttgacgaaggatcgaccatcagctgggtgccttgtggaagaaagctcacatgctcttaccctggcatcaaattttcctatg

SEQ ID NO: 4405 - DNA, 281 bp, Zea mays
tttgtttgagaatgggacaattgctattgtggaggccatttctcctgagcttggtaaccgcgtgcaaagagtccgtgtgcagcttcctggtctaagccaggagcttcttcaaaagttgagggagaagaacatcgattttgctgctcacagcaaccaggaggactctggttctcttctgttcaaccttattggaaatttggcattcccgcttatccttatcggtggtctgtttttactttcaagaagggcacagggtggcctcggtggacccaatggtcctg

SEQ ID NO: 4406 - DNA, 289 bp, Zea mays
gccggccgattcgagcagcgccccagcagcctctgctccgctgcctctggcgaccgccggagcccgaggcggaggaggagggaagatctcgctcgatccaaggaggcgagtacaagatggtgagctcctcgtcgccggtggtcaacgtgtacccgctcgccaactacacgttcggcaccaaggagcccaagatggagaaggacacctccgtcggcgaccgcctcgcccgtatgaaggtcaactacatgaaagaaggaatgcgtacaagtgttgaagcaatcctattggt

SEQ ID NO: 4407 - DNA, 277 bp, Zea mays
cgctggcaaggtggagctggtggatgggtcctcctacctgggccagccgctgccgttcaccatctcgacgctcatctggatcgaagtgcttgtgatcggctacatcgagttccagcgcaacgccgagctcgacccggagaagaggctgtaccccggcggctcctactttgacccgctcgccctggcggccgacccggagaagaatgagcggctgcagctggcgggagatcaagcacgcgcgccgtcccatggtcggcttcctcggcttcgcggtgca

SEQ ID NO: 4408 - DNA, 275 bp, Zea mays
cagattgctgtgctcgcggatgacatattgaaaaatgtggaatatgatgttctaagggttattttcaacaagttccattctgtcatatcgtttaagcccacaatggtaacgatactgtcccctgaggttgcagaaaaagaagcagaaactggtgggaagatgggtgacctagattcttatgagattgaaggcggtgagacaaaagcagagatattgcaaaacctagctgagttccagttttcttgtgtcatgtacaatggtgccctagagaatgc

SEQ ID NO: 4409 - DNA, 278 bp, Zea mays
gctttcgcgccgccgccgccgccgcttcgtcgtctccgccgcagcgatgccgtcgcacaagaccttccggatcaagaagaagctggcgaagaagatgcgccagacccgccccatcccctactggatccgcatgcgcacggacaacaccatcaggtacaacgccaagcgcaggcactggcgccgcaccaagctcggcttctgagcgcgcggatcggccggctcctgcgtcggaattctagggtctctacctttcctttggttttatcgatgtctcttgt

SEQ ID NO: 4410 - DNA, 275 bp, Zea mays
acaagatcctcaaggtcatccggaagaacctggtgaagaagtgcattgagctgttctttgagattgctgagaacaaggaggactacaacaagttctatgaggccttctcgaagaacctgaagcttggcatccacgaggactccacgaacaggaacaagattgcggactgctgaggtatcactccaccaagagcggagatgagctgacaagcctcaaggactatgtgactaggatgaaggagggccagaatgacatctactacatcactggcgaga

SEQ ID NO: 4411 - DNA, 280 bp, Zea mays
gaaatattcagaactgaggcgtgacctgatacggacagaacgacatctgttgaaggagatggggtttatttgccatgtcgagcacccccataagttcatatcaaactaccttgcaacacttgaagcccctcccgagcttactcaagaggcatggaaccttgccaatgatagcttaaggacaactctgtgtgtgcgatttaagagtgaagtagtagcatgtggagttgtgtatgctgcagctaggagacaccgggttccccttcctgaagatcctccgtgg

SEQ ID NO: 4412 - DNA, 278 bp, Zea mays
gacaactcttatttgcacttgacggacttcattcgacaggaattgttcacagagatataaaacctcaaaatgtgatattttcagagggatcacgaaccttcaaaattattgatcttggagcagcagctgacttacgggtaggaattaactatattcctaaagagttccttttggatccaaggtatgctgctccagaacaatatattatgagcacacaaaccccgtctgctccttctgttccagttgcaacaactttgtctccagtcctgtggcagctg

SEQ ID NO: 4413 - DNA, 271 bp, Zea mays
ggctggcggccaagagcggggagcgcttcgcctacgactccttccgccgcttcctcgacatgttcggcaacgtcgtcatggacatcccccgctcactgttcgaagagaagcttgagcacatgaaggaatccaaggggctgaagaacgacaccgacctcacggcctctgacctcaaagagctcgtgggtcagtacaaggaggtctacctctcagccaagggagagccattcccctcagaccccaagaagcagctggagctagcagtgctggc

SEQ ID NO: 4414 - DNA, 232 bp, Zea mays
tctatagcaaccggtccaacactttcacgctcagcttcagcaatggctgcctccaccatggcgatctcctccacggcgatggccggcacccccatcaaggtgggttccttcggcgaaggccgcatcaccatgcgcaagaccgtgggcaagcccaaggtggcggcgtccggcagcccctgggtacggcccgaacgcgtcaagtacctcgagcccttctgcggcgaacccccga

SEQ ID NO: 4415 - DNA, 259 bp, Zea mays
gccgcacccgcaccagcccgcgccgtggtcagaaggaggtccttcaccgtacgcgcctctctccgcaaggccaccggcaccgccgccgtggcaatggctgccagcgccctacttgccggcggtgcgatggcccaggaggtgctgctgggcgcaggcgacggcgggctcgtcttcggacccagccagttcaccgtcaaggccggcgacacgatcacgttcaagaacaacgggagcttcccgcacaacgtcgtcttcgacg

SEQ ID NO: 4416 - DNA, 274 bp, Zea mays
tcaaacgtgactatttggcggaacattcgacgactcaggttcctgatttcttgaatgccaaaattgatggaagaccagtgaaagaagtcattaaggataccaagtggttagaggaagagttcaccctcacagttcaaaagcgtggaggtgtgctcatccaaaaatggggcagatcatcagctgcatcgaccgctgtttcgatagtggatgctattagatccctcgtaactcctaccccagaaggtgactggttttctacaggggtttatacgac

SEQ ID NO: 4417 - DNA, 97 bp, Zea mays
gtttcacgttgcattgcataggcaagtcgagatgatgagttggcgttgtacactaagatgaaccatgtttgtgcaatagtggtggtttttgtttcct

SEQ ID NO: 4418 - DNA, 265 bp, Zea mays
ggagagtacgtggaggagcagccatggcttcatcggtggccgccgcggcgagcacattcctgggcacccgcctggcggacccggcgccacagaacgggcgcatcgtggcccggttcgggttcgggttgggcggcaaggcggagctgctgccgaagaaggtggcgaagagatcgacctcgtctgaccggccgctgtggttccccggcgccgtggcgcgcgactacctggactgctcgctggtcggcgactacgggttcgacccgtt

SEQ ID NO: 4419 - DNA, 82 bp, Zea mays
cgatgtgcaagtctcgctacgtagcagtgcaataaaaaaagcaaccgcaatggcgagcagcaccatggccctctcctccacg

SEQ ID NO: 4420 - DNA, 262 bp, Zea mays
aattgcagttaaaaggcttgcttcgcattcaggacagggtttcacggagttcaggaatgaagttgaacttatagctaagctacaacacacaaatttggttaggctcttgggatgctgcattcaagccgaggaaaaaattttggtgtatgaatatttgccgaataaaagcctggacttctttatctttgatgaaagacaaagcagtttgcttaattggtataaacggcgtgccataattgaaggcgtacgcaacgtctcctgt

SEQ ID NO: 4421 - DNA, 264 bp, Zea mays
agcctggccagtgctttgccgtgtacgagtggtgcattacggatcactatgatcctaacaatgcaacccacaaaaggatcaaggatgaaattgagcttggcaatggcctgccacatatcagaagcactcggcaatgtctccaggcagtaaaagacgccgggtttgaggttgtttgggataaggatcttgctgaagattctcccttgccttggtacttgcccttggatccaagccgattctccctgagtagcttccgtttgacct

SEQ ID NO: 4422 - DNA, 265 bp, Zea mays
gctagctcgatctactactactactactagctggtacacatactagccatcctgccagccagccagcttgccatggcgcccaccgtgatgatggcctcgtcggcaaccgccgtcgccccgttccagggtctcaagtccgccgccagcctccccgtcgcccgccgcagcaccaggagcctcggcaacgtcagcaacggcggaaggatccggtgcatgcaggtgtggccggcctacggcaacaagaagttcgagacgctgtcgtacc

SEQ ID NO: 4423 - DNA, 265 bp, Zea mays
gcacaccaaggagagtacgtggaggagcagccatggcttcatcggtggccgccgcggcgagcacattcctgggcacccgcctggcggacccggcgccacagaacgggcgcatcgtggcccggttcgggttcgggttgggcggcaaggcgaacgtgctccgaagaaggtggcgaagacatcgacctcctctgaccggccgctgtggttccccggcgccgtggcgcccgactacctggacggctcgctggtcggcgactacgggttc

SEQ ID NO: 4424 - DNA, 264 bp, Zea mays
ctcaaacaaaatttcaggcgacagctgaaagacctgtacaagtcctttgtttctgagtaccctatcgagtcgatcgaagacccatttgatcaggatgactggcgcacttatgccaaactcactgatgagattggacagaaagtgcagattgtaggagatgatcttctcgttaccaaccccaccagggtcgccaaggccatcaatgagaagacctgcaatgctctcctcttgaaggtgaaccaaatcgggtctgtgaccgagagt

SEQ ID NO: 4425 - DNA, 262 bp, Zea mays
gttagaagaagcaccagtgcctgatcgatggcggcccaggctctcctctccggccggcagctgctgggccgccccgtgcagtcggccgtctctaggtcgtcggcgaggaaggcgcccttcgtcgtcagggccagctccagccctccagccaagcaacgtgccgacaggacggtgtggttcgcgtccaagcagtccctctcctacctcgatggcacgctgcccggcgactatggcttcgacccgctgggcctctcggacccgg

SEQ ID NO: 4426 - DNA, 270 bp, Zea mays
gtcttcacactcctcgccatcacataaaaccagtgcaagcagaagcagcgcaatggcgagcagcaccatggccctctcctccacagccttcgccggcaaggcagtgaacgtgccgtcgtctcacttcggcgaggcccgcgtgacgatgcgcaagacggcggcgaaggcaaagccggcggcgagctccggcagcccgtggtacggccccgaccgcgtgctctacctgggcccgctgtccggcgcgcccccgagctacctgacgggcgagtt

SEQ ID NO: 4427 - DNA, 270 bp, Zea mays
cgggcttcaaccatgagcttgtgctagaagttttctttgcatgcaacaaggacgaagagcttgcagccaactacctccttgatcatggccacgagtttgacgagcagcagcaatagtgggtgatatggtgtggtggatgcaggaaaccgaggcagtagcagaacagcatagtgtcgttctgatgacctccgtctgatgagagatacttggttgtttatgctatgctgctgaccatcttttattttcatgtgttcggaatgctttctaagt

SEQ ID NO: 4428 - DNA, 270 bp, Zea mays
agaatctgacaagattacgctggagacagcaaagcttttgagagaagattatttggcacaaaatgcattcaccccatatgataagttctgcccattctacaaatccgtttggatgatgcgcaacattattcacttcaacacattggcaaatcaggctgtggagcgggcagctggtactgacggccataagataacatacagtgtcataaagcatcggttgggggatctattttatcgcctagtatcccaaaagttcgaggatcctgcaga

SEQ ID NO: 4429 - DNA, 271 bp, Zea mays
gaacggcacgctcgccatgctcgccatcctcggttacttcatccaggggctcgtcacccgcgtcggcccgttccagaacctgctcgaccacctcgccgaccccgtcaacaacaacgtgctcaccagcctcaagttccactagaacgtggtgcatcagcatacctgctgctgccgccgccgccgccagttgtttgctgtggaaagctagatgcatgcgtgttgtaaaggaacctgaagcgttgcatcggtcatgattcatgcatggccagcc

SEQ ID NO: 4430 - DNA, 270 bp, Zea mays
cgacgatcatggccgccacctcccgcatcgtcgcggccaagacgccgtttcttggccaggctcgcgccgccgccaatgccagccccctccgcgacgtcgccgccgccgctgctggcggccggatcaccatgggcaacgacctgtggtacggcccggaccgcgtcaagtacctgggccccttctccgctcagacgccctcgtacctgaccggcgagttccccggcgactacggctgggacaccgccgggctgtccgctgacccggaggcgt

SEQ ID NO: 4431 - DNA, 270 bp, Zea mays
ctgaagcaatggccatgagagctctcccgctgaccccttccaggagctcctcgtttggagctcaccaaaccaggccgagcggcggcggccccagatcagtgagagcttatgcgaagggagacgaggagggcgacaagcagtccctcttcggaagcatcaccgaggcgctggacttctcgcaggtccggtcggagaaggacgccgagctgctgtacgaggccagggagtccaccagaggtggagggaggatgacgagggagcagtacggag

SEQ ID NO: 4432 - DNA, 265 bp, Zea mays
cgcgtcacctggcaggacgctggcaaggtggagctggtggatgggtcctcctacctggcccagccgctgccgttcaccatctcgacgctcatctggatcgaagtgcttgtgatcggctacatcgagttccagcgcaacgccgagctcgacccggagaagaggctgtaccccggcggctcctactttgacccgctcgccctggcggccgacccggagaagaaggagcggctgcagctggcggagatcaagcacgcgcgcctcgcca

SEQ ID NO: 4433 - DNA, 265 bp, Zea mays
cgcgcgcgacgcggagggcacgcccaagaggctgacctacgacgagatccagagcaaaacgtacatggaggtgaagggcacgggcacggcgaaccagtgcccgaccatcgacggcggcgtggagtcgttcccgttcaaggccggcaagtaccagatgaagaagctgtgcctggagccgacgtccttcaccgtcaaggcggagggcatcgccaagaacgccccgcccgagttccagaagaccaagctcatgacccgcctcacgtac

SEQ ID NO: 4434 - DNA, 254 bp, Zea mays
gagcactccatccactactttactgaaagtctagagctagcttttgctttgctcaccagacaaacagcagcagatggcgtcgacgatcattgccggcacctcccgcatcgtcgcggcaaagacgccgtttcttggccagggtcgcgccgccgccaatgccaggcccctccgcgacgtcgccgccgccgctgctggcgagcggatcaccatggggcgacgacctgtggtacggcccggaccgcgtcaagtacctg

SEQ ID NO: 4435 - DNA, 265 bp, Zea mays
aaggaactcgcggtgtcattgtttcagagtgtggttttgatgttgttcaatgacgcacaaaaattaagcttccttgacatcaaagattccactggtatcgaggataaagaattgagacggacactgcaatcgcttgcatgtggtaaagttcgggttctccaaaagataccaaaagggagagatgtagaagataaggatgactttgtattcaatgaagattttagtgctcccctctatcgcataaaggtaaatgcaattcaaatga

SEQ ID NO: 4436 - DNA, 264 bp, Zea mays
ctatagcaaccggtccagcactttcacgctcagctccagcaatggctgcctccaccatggcgatctcctccacggcgatggccggcacccccatcaaggtgggctccttcggcgagggccgcatcaccatgcgcaagaccgtgggcaagcccaaggtggcggcgtccggcagcccctggtacggccccgaccgcgtcaagtacctcggccccttctccggctagcccccgagctacctcaccggcgagttccccggcgactacg

SEQ ID NO: 4437 - DNA, 265 bp, Zea mays
aggagaaggacggcatcgactacgccgccgtcaccgtgcagctcccggggggcgagcgcgtgccgttcctcttcaccgtcaagcagctcgtcgccaccggcaagcccgagagcttcggcgggcccttcctcgtgcccagctaccgtggctcctccttcctcgaccccaagggccgcggcggctccaccggctacgacaacgccgtcgcgctccccgccgggggcagaggtgacgaggaggagctccagaaggagaacatcaagaa

SEQ ID NO: 4438 - DNA, 263 bp, Zea mays
acgcacccaccgtgagcgtggccatcgtggagcagtccgtgtccccgggcggcggcgcgtggctgggcgggcagctgttctcggccatggtggtgcgcaggccggcgcacctgttcctggacgagctgggcgtgggctacgacgaggccgaggactacgtggtggtcaagcacgcggcgctgttcacgtccaccgtgatgagccggctcctggcgcggcccaacgtgaagctgttcaacgccgtggcggtggaggacctgatc

SEQ ID NO: 4439 - DNA, 257 bp, Zea mays
gttagaaagctcaaggtcctggctaacgccgatacccctgatgatgcattgactgcgcgaaacaatggggcacaaggaattggattatgccggacagagcacatgttctttgcttcagacgagaggattaaggctgtcaggcagatgattatggctcccacgcttgagctgaggcagcaggcgctcgaccgtctcttgccgtatcagaggtctgacttcgaaggcattttccgtgctatggatggactcccggtgac

SEQ ID NO: 4440 - DNA, 259 bp, Zea mays
ccaggttccacctccccgtgtggctgggagtcggcgccgcattcaagttcgccatcgacaaggacgtcaggaacttccaggtcctcaaagagatgtacaacgagtggccattcttcagggtcaccctggacctgctggagatggttttcgccaagggagaccccggcattgccggcttgtatgacgagctgcttgtggcggaagaactcaagccctttgggaagcagctcagggacaaatacgtggagacacagcagct

SEQ ID NO: 4441 - DNA, 258 bp, Zea mays
ggcagttgtagcgagggaggctattcaggaagcaacccggaacaaatcagatgttgttctggttgacactgctggacgtatgcaggacaatgagccactcatgagggcactctccaagctaatcaatctcaatagcccagacctggttttatttgttggagaagcattggttggaaatgatgctgtggatcagctcactaaatttaaccagaaattagcagacctatctgctgttcccactgctagattgatcgatgg

SEQ ID NO: 4442 - DNA, 252 bp, Zea mays
ccgccggccacttcttagatcgaaagttcggcttcgacggcagggactgatgactgatccatatgtagacatggccgacgtgccatctatatatgatcatatatgtttaatttgcttcaccctagccgtctccacatgtagacatctatatatgatcatatatgtttaactagctgaatgcccgtgcgttgcaacggaaatatataataccaatatactgcgataacttatatacaaaatgtgtgttatatt

SEQ ID NO: 4443 - DNA, 258 bp, Zea mays
ggcaggcgaacgactgtcgcgaggcaaggccatcgtccgccatgacgctctccctctccacctctttcctctccatccccgccgccgcgaggaccaccgcccgcaccctacgctccgtcgtcccctcccaggggatgcgctgctcgatgcgcaagaaggggttgcacccggagatctacgaggacgcgaaggtgtactgcaacggcgagctggtgctggtgacggggggcacaaagccggagtacacggtggacgtgt

SEQ ID NO: 4444 - DNA, 262 bp, Zea mays
ctccaacgcagcaagcagacagaaggacaggcaggcagcgagtgcaaccgcgagagcgatcagcgatgggctccttcttctcgaccttagtgacgccccctccggccgccgacgacccgaactgcgccgtggtggccgcgcactccaaggccacctacgacgagcagtgggcggcccacaagagcagcagcaagctgatggtgatcgacttctcggcgtcctggtgcgggccctgccgcttcatcgagccggccttcaagga

SEQ ID NO: 4445 - DNA, 240 bp, Zea mays
cttggaggaaggcaaacgccacatcattgtatcattattggcaagagcaaaattctgacctattgctctggagaacaggaactcttcccgcaggccttttgacattttatggcctgatggagcccctagaccgcagatggcatgtcttgggtctcgggtatgatgtagacatagatgatcgtctgattgagagtgctgctgttgtgcactataatggaaacatgaaaccctggctgaagc

SEQ ID NO: 4446 - DNA, 239 bp, Zea mays
ctcgggtgcgtgttcccggagctgctcgcccgcaacggcgtcaagttcggcgaggcggtgtggttcaaggcgggctcccagatcttcagcgagggcgggctggactacctcggcaacccgagcctggtccacgcgcagagcatcctggccatctgggcgtgccaggtggtgctcatgggcgccgtcgaggggtaccgcgtcgccggcggcccgctcggagaggtggtcgacccgctgta

SEQ ID NO: 4447 - DNA, 240 bp, Zea mays
gcttctcattcctcgtgttctggaccgcctgcctcagaggattgatccagagagcttcttgcttgcactgcaaatggcagccgagggaggtagcccatacttcaggcttggttacaatagcttgggtgcgtttgccaccatcaatcacctccactttcaggcgtactacttgtcagtgcctttccctgttgagaaggcagctacccacaagatcccactctctgaggacacgaagaagaa

SEQ ID NO: 4448 - DNA, 242 bp, Zea mays
cgggccaggggtttcttcaggggatgggtgcctactttgcttggttacagtgctcagggggcttgcaagtttggcttctatgagttctttaagaagtattactcggacattgcagggcctgagtatgcccaaaagtacaagactctaatctacctcgcaggatctgcatctgctgaggtaattgctgatgtggctctctgcccttttgaagctgtgaaggtacgtgtgcagacacaacctgg

SEQ ID NO: 4449 - DNA, 226 bp, Zea mays
tagcaaccggtccaacactttcacgctcagcttcagcaatggctgcctccaccatggcgatctcctccacggcgatggccggcacccccatcaaggtgggttccttcggcgagggccgcatcaccatgcgcaagaccgtgggcaagcccaaggtggcggcgtccggcagcccctggtacggccccgaccgcgtcaagtacctcggccccttctcgggcgagccccc

SEQ ID NO: 4450 - DNA, 234 bp, Zea mays
gttagatgttgatgcacttgaagatgttgctaatgcagtgaatgggctgttgacaccccaaaactctgttctgatgattacacattaccaacgtcttttggatctcattaagcccagttacgttcacatcatggaaaatggcaagataatcaagacgggtgacagttctattgccacacaaattaatgaaggcggcttcaaatctatcgcccttgtatagcgtgaaagcagcag

SEQ ID NO: 4451 - DNA, 236 bp, Zea mays
gtcgcgaggcaaggccatcgtccgccatgacgctctccctctccacctctttcctccccatccccgccgccgcgaggaccaccgcccgcaccctacgctccgtcgtcccctcccaggggatgcgctgctcgatgcgcaagaaggggttgcacccggagatctacgaggacgcgaaggtgtactgcaacggcgagctggtgctggtgacggggggcaccaagccggagtacacggtg

SEQ ID NO: 4452 - DNA, 235 bp, Zea mays
gctcgccatggcctccctctcctctgccgccgtcagcgcgccttccttcgccgcaccagcgccagcccgcgccgtggtcagaaggaggtccttcaccgtgcgcgcctctctccgcaaggccacctgcaccgccgccgtggcaatggctgccagctccctgcttgccggctgtgccatggcccaggaggtgctgctgggcgcaggctacggcgggctcgtcttctagctcagccag

SEQ ID NO: 4453 - DNA, 238 bp, Zea mays
gaccgacgacgcacgcggagatccggcgtactgcaaattttgaaaactgaactgtaagatggcatcagcagagctttcccgtgaggaaaatgtgtacatggcgaactcgctgagcaggcggagaggtacgaggagatggttgagttcatggagaaggtagccaagactgttgactcggaggagctcactgtggaggagcgaaacctcttgtctgttgcatacaagaacgtcattggag

SEQ ID NO: 4454 - DNA, 227 bp, Zea mays
atttattccaagaaagctatgactgacatggatagcaccaacgtgtatgcttacatctcaataatcgctctaattgtttgcattccacctgcattgatctttgaagggcccaagctaatgcagcatggatttagtgatgccattgcaaaagtaggtttgacaaagtttgtcagtgacctattcttggttggactgttctaccatctgtataaccagattgctacaaa

SEQ ID NO: 4455 - DNA, 227 bp, Zea mays
gttggcttctcctgcccgtccggttcgggttcgggttcgtgaggttctccggggttcggtttcgtgggtgagcggatcgagatggcggcgtcggatgttgagtagcgctgcttcgtcagcagcctcgcctggaccacggacgaccactccctcgacaacgccttcagcacctacggcgaggtcctcgaatccaatattatcctcgatcggtagacgcagaggtcccg

SEQ ID NO: 4456 - DNA, 231 bp, Zea mays
gtgcaagtctcgctacgtagcagtgcagtgaaaaaagcagccgcaatggcgagcagcaccatggccctctcctccacggccttcggcggcaaggccgtgaacgtgccgtcgtcgtccgccttcggcgaggcccgcgtgacgatgcgcaagacggcggcgaaggccaagccagctgcggcgtccgggagcccgtggtacggccccgaccgcgtgctgtacctgggcccactg

SEQ ID NO: 4457 - DNA, 230 bp, Zea mays
gcgcatactgatggacgtgtccaagatcgacatgaccaccaccgtgctggggttcaagatctccatgcccatcatggtcgcccccactgctatgcagaagatggctcacccagatggggagtacgccactgcgcgcgcggcggctgcggcaggcaccataatgacactgtcgtcctgggcaacttcaagcgtcgaggaggttgcctcgaccgggccagggatccgcttct

SEQ ID NO: 4458 - DNA, 263 bp, Zea mays
cgaaaaaagctgtgatctgatcgacatggccgccgccaccatggctctcacctcccgcgcgctcgtcggcaagccggcgaccagcaccagggacgtcttcggcgaggggcgcatcaccatgcgcaagactgctggcaagcccaagccagcggcgtccggcagcccctggtacggggccgaccgcgtcctgtacctgggcccgctgtccggccagcccccaagctacctgaccggcgagttccccggcgactacggctgggaca

SEQ ID NO: 4459 - DNA, 218 bp, Zea mays
gctagcgcttatagcttgtcagccatggccaccgccgccgcgtctagcctcctcaagtcctccttcgcgggctcccggctcccggccgccacgcggacgacaccggcgtccctcgtggtggccacctgcccgcgcggcgccggcgcggggcccatctgcgcgtccatgtccatgtcgtcctccaacccgccctacgacctgacgtccttccggttcag

SEQ ID NO: 4460 - DNA, 257 bp, Zea mays
gagggaaacaccatcggtatcgcagtcaccctccgcggcaggataatgtacaacttcctggataggctcatcaaccttgggctccctaggaccatggacttcctgggtgtgaacccaacagcttcgacgggcacggcaactacagccttggcctccgtgaccagggcgtgttcccggagatcccgtacgaggtgggcgggaagaagaacggcatggacgtgtccatcgtcaccagcgccaagacggacaacgaggcg

SEQ ID NO: 4461 - DNA, 242 bp, Zea mays
cctcgatccgatccgccgagtgcacaccacctttccccactccgatcgaatcgatggccgccgagggcgagaagaagatgataaccctcaaaagctccgatggcgaggagttcgaggtggaagaggcggtggcgatggagtcgcagaccatccgccacatgatcgaggatgactgcgccgacaacggcatccctcttcctaacgttaactccaagatcctatccaaggtaatcgagtactgc

SEQ ID NO: 4462 - DNA, 260 bp, Zea mays
ggaagaaccttggcccgacaccatgctcccaatggccgtccaccccaccaccacgccggccttgtccccgcgcgcccgcgtctcgccgcacaggcctcccatctcctccctggcggacccctcgtcctccccctgccatcgcatcgtcagtttcaaaagcaggaggctgccacttcgctctctccacatcgccgctgccgctgccgccggggcagaggaagaagaggcgcaactaggtggaagtgtgaacgcggtcgacg

SEQ ID NO: 4463 - DNA, 254 bp, Zea mays
ccaagacccactgaaccctcgccgtttcgtcgcacccaccaacacgagagatgagctccggcggcgcggacaagcccggcagtggcggcggcgcggtgaagacgccgtcggacttcctcaagtccatcaggggccgccccgtagtcgtaaagctcaactccggcgtcgactacagaggtatattggcttgtctggatggttatatgaacatcgcaatggagcagaccgaggagtacgtgaatggccagttgaag

SEQ ID NO: 4464 - DNA, 155 bp, Zea mays
ggcaagggccccatcgagaacctcttcgaccacgtcgccgaccccgtcgccaacaacgcctgggcatacgccacgaacttcgtccccggcaactaactgactgagcaacgccgtacatgtgtactaccatcagatccatccattcgttcgtccgt

SEQ ID NO: 4465 - DNA, 250 bp, Zea mays
gagcatggagagaagagtcctccttagagcttttggtgccgaacttgtccttactgatgctgcaaaagggatgaaaggcgccttagataaggctacagagattttaaacaagacaccaaattcttacatgcttcaacagttcgataaccctgccaaccctcaggtacattatgagactactggtccagagatctgggaggattcaaaggggaaggtggatatattcattggtggaattggaacagggggg

SEQ ID NO: 4466 - DNA, 256 bp, Zea mays
gtcgagatgcacgactgattggccaagggaacccaaatgatttcttagtttctgctgctgtagctgagtttaaagggcctgttgtatttggtgttgttcgtctggcccaagtaaacatggagttggctagagttgaagccacatttagtggtctatcacctggtaaacatggatggtcaataaatcagtttggggatttgacaagaggtgcagaaagcactggcaatgtctataatccgccagatcatttatctga

SEQ ID NO: 4467 - DNA, 246 bp, Zea mays
cggggcatcaagtgactcttatccgccaagttgctgagaaagtgttcgccaatgtgggcaagactatcgggtacaaagttggaacaatgattgagatccccagggcagctctggtggctgatgagatagcggacaggctgaattcttctccttcggaacgaacgacctgacgcagatgacctttgggtacagcagggatgatgtgggaaagttcattcccgtctatcttgctcagggcattctcca

SEQ ID NO: 4468 - DNA, 244 bp, Zea mays
gtgtgatatccttctcttgggtggtggtatgatcttcacattttacaaggcacaaggtctttctgtcggtgcttcgttggttgaggaagacaaactcgatcttgcaacatctctacttgcaaaggctaaggaaaagggtgtctcccttatgttgccaaccgatgttgtcatcgctgataagtttgctcctgatgctaacagccagattgttccagcatctgcaattcctgatggttggatgggg

SEQ ID NO: 4469 - DNA, 245 bp, Zea mays
atggctttttcctccacaggttaagttccctttatgtactctcgccgagacaccaagaactgcagctcactgcattgagtatgctcacttgatcaaatgggatgaggttcatcctggaaaaccttttgatggcgatgatgcagagcatatgcagtggatttattcagaggctttgaagagagcagagcttttcggtatttctggtgttacatattctttgacacagggtgttgtcaaaaatataa

SEQ ID NO: 4470 - DNA, 236 bp, Zea mays
cactcctcgccatcacataaaaccagtgcaagcagaagcagcgcaatggcgagcagcaccatggccctctcctccacagccttcgccggcaaggcagtgaacgtgccgtcgtctctcttcggcgaggcccgcgtgacgatgcgcaagacggcggcgaaggcaaagccggcggcgagctccggcagcccgtggtacggcgccgacggcgtgctctacctgggcggggtgtgcggcgc

SEQ ID NO: 4471 - DNA, 249 bp, Zea mays
gttccttcgtcacacaactgtgatattccgcatgtgaaccgtactgagtaccagctgattgatatatcagaggatggatttgtgagccttcttacttcagatggcaacactaaggatgatcttagactcccaactgatgagactcttgtggcccagatcaaggaagggtttgaaagcggcaaggatcttgttgtgactgtccagtctgctatcggggaggagcagatctgcgcgctgaaggatgttggc

SEQ ID NO: 4472 - DNA, 256 bp, Zea mays
gcagctgcgatctgatcgacatggctgccgccaccatggctatcacctcccgcgcgctcgtcggcaagccggcggctggcacgagggacgtcttcggcgagggccgcatcaccatgcgcaagaccgccgccaagcccaagccggcggcgtccggcagcccatggtacggtgccgaccgcgtcctgtacctgggcccgctgtccggctcgcccccgagctacctgaccggcgagttccccggcgactacgggtggga

SEQ ID NO: 4473 - DNA, 252 bp, Zea mays
cgccgctgggatctagcacgcgagcgagcgagagagccgcgcacctatctggcaagcgacgccgcggcctcgatcggagtcggaggcgaacacccccatggcggcggctggcggcggcgcaggagggaaggtatccttcaagatcatcctcacctccgaccccaagctccctttcaaagtgttcagcgtgcccgatgcggcgcccttcaccgcggtgctcaagtacgccgcggaggagttcaaggtcccgcc

SEQ ID NO: 4474 - DNA, 255 bp, Zea mays
  unsure (1)..(255): unsure at all n locations
cggcatggtggtgctggtcaagaaccccaacaacgcctaccacatgtactgcggtatcgtgcagcgcgtcagcgacggcaaggtcgcggtgctcttcgagggaggagtgtgggacaggctcatcaccttcaacctcgacgagctcgagggcagggagaagggaccccctatggccaaccccaagtccgtggtgctagaggatcttgtcgcggactncgaggatgacgatgatgataaggaggacgaagcggccaa

SEQ ID NO: 4475 - DNA, 221 bp, Zea mays
gcatacaactcatatatatatataacatacgtctctttcgtcgaataatctgtatattattctctatggaaagaaccctcgcgcccgtgctgtacgtttcgtcgtggaaagaaccctggcctcatgcttcgtacaccttgcactcgtcggtctcggggttgtccttgcagaagtcctccagagggtcgccgctgccggccgccgccgcgccgggccacttg

SEQ ID NO: 4476 - DNA, 251 bp, Zea mays
ctcgctacgtagcagtgcaataaaaaaagcagccgcaatggcgagcagcaccatggccctctcctccacggccttcgccggcaaggccgtgaacgtgccgtcgtcgtccgccttcggcgaggcccgcgtgacgatgcgcaagacggcggcgaaggccaagccagcggcggcgtccgggagcccgtggtacggccccgaccgcgtgctgtacctgggcccactgtccggcgagccgccgagctacctgacgg

SEQ ID NO: 4477 - DNA, 252 bp, Zea mays
ggatcgtggagccatgaggttgctatctctgtgaaccactgaaggtccgcaactggattctgccggaaatgccaggattgataactgatttcgtcatctctcttgatgaccgttatctctactttgtaaattggcttcatggcgatattaggcagtacaacattgaggatcccgcaaagcctttcttggctggacaagtatgggttggtggtcttcttcagaagggcagtgatgtcgtctatgttactgatg

SEQ ID NO: 4478 - DNA, 243 bp, Zea mays
tcgatctgcaagtctcgctacgtagcagtgcaatacaaaaaaagcagccgcaatggcgagcagcaccatggccctctcctccacggccttcgccggcaaggccgtgaacgtgccgtcgtcgtccgccttcggcgaggcccgcgtgacgatgcgcaatacggcggcgaaggccaagcctgctgcggcgtccgggatcccgtggtacggccccgaccgcgtgctgtacctgggcccactgtccgg

SEQ ID NO: 4479 - DNA, 256 bp, Zea mays
cgactctatcttagctctctttgcaagccagtaggtcaccactcaaaagcttgtgaagcaggtgagatgggcaaggaggtggatgtgtccactctagaggccggcggcgtccgtgaccgtgactacgcggaccctccgccggcaccgctgatcgacatcgacgagctcggcaagtggtccctgtaccgcgccgtgatcgccgagttcgtggccacgctgctgttcctgtacatcacggttgccacggtgatcgggt

SEQ ID NO: 4480 - DNA, 258 bp, Zea mays
gctggtgaacgggcggtgggcgatgctgggcgtggccgggatgctgatcccggaggtgctgaccaaggccgggctgatcaacgcgccgcagtggtacgacgccggcaagtcggagtacttcgcgtcgtcgtcgacgctgttcgtgatcgagttcatcctgtttcactacgtggagatccggcggtggcaggacatcaagaaccccggcagcgtcaaccaggaccccatcttcaagagctacagcctgccgccgcacga

SEQ ID NO: 4481 - DNA, 243 bp, Zea mays
gcaaccggtccaacactttcacgctcagcttcagcaatggctgcctccaccatggcgatctcctccacggcgatggccggcacccccatcaaggtgggttccttcggcgagggccgcatcaccatgcgcaagaccgtgggcaagcccaaggtggcggcgtccggcagcccctggtacggccccgaccgcgtcaagtacctcggccccttctccggcgagcccccgagctacctcaccggcgag

SEQ ID NO: 4482 - DNA, 248 bp, Zea mays
cctcgccatcacataaaaccagtgcaagcagaagcagcgcaatggcgagcagcaccatggccctctcctccacagccttcgccggcaaggcagtgaacgtgccgtcgtctcacttcggcgaggcccgcgtgacgatgcgcaagacggcggcgaaggcaaagccggcggcgagctccggcagcccgtggtacggccccgaccgcgtgctctacctgggcccgctgtccggcgcgcccccgagctacctg

SEQ ID NO: 4483 - DNA, 248 bp, Zea mays
ccacacaccaacctcagcacaccaaggagagtacgtggaggagcagccatggcttcatcggtggccgccgcggcgagcacattcctgggcacccgcctggcggacccggcgccacagaacgggcgcatcgtggcccggttcgggttcgggttgggcggcaaggcgaagctgctccgaagaaggtggcgaagacatcgacctcctctgaccggccgctgtggttccccggcgccgtggcgcccgactac

SEQ ID NO: 4484 - DNA, 249 bp, Zea mays
gagatggccgatgcggaggacgccgccgccgcgcgccgacgggccgccataaccgactaccgcaagaagctgctcaactgcagggagctcgagtcgcgcgtcggcaccgtgagagaaagccttaaaaatgcaaagagggattttaccaagactgaagacgacttgaaatctctgcagagcgtggggcaaataattggagaggttctccgacctcttgataatgaacgctttattgtgaaggccagcagt

SEQ ID NO: 4485 - DNA, 251 bp, Zea mays
gcagccgtggctgcaaaagcctacgagctcggtctggcgacccgtctgcctccccccagcgacctggtgaaatatgcagagaactgcatgtacactcccgtctaccgcaactaccggtagtgctgcggggatcaattttgcagtaataaaaaatctatcaacgcggatggtactctgttgtttatagtccctgctgctaaccacccttgttgctggtgctgctggagaggcattgtacctgtccatgcata

SEQ ID NO: 4486 - DNA, 251 bp, Zea mays
cgaggaggagctccagaaggagaacatcaagaacgccgcctcctccagcggcaacatcacgttgagcgtcaccaagagcaacccggagaccggcgaggtcatcggcgtcttcgagagcgtgcagccgtccgacaccgacctcggggccaaggcgcccaaggatgtcaagatccagggggtctggtacgctcagctcgagtgattcgagtgtctaactgctaggtgtccgaccgccgtcatggatcttggga

SEQ ID NO: 4487 - DNA, 250 bp, Zea mays
gctagctgaggacggtacagcggcacagaggtgcgacgtacgacgacgacgacgcaggcgccacacatggcatcccagctctccgccgccgtgccccggttccacggcctccggggctacgccgcgcccaggtccgcggtggcagcgctgccgtccgtgagggtgggcaggaagaggtcgtcgtcgcagggcatccgctgcgactacatcggctccgccaccaacctgatcatggtgacgacgacgacgc

SEQ ID NO: 4488 - DNA, 249 bp, Zea mays
gccctacaacgccacgctctccgttcaccagctcgttgagaacgcagacgagtgcatggtgctcgacaacgaggctctctatgacatctgcttccgcacgctcaagcttgccacaccaacctttggtgatctcaaccaccttatctctgcaaccatgagtggtgttacgtgctgccttcgcttccctggtcagctgaattctgacctccggaagcttgcagtgaacctgatccccttcccacgtctgca

SEQ ID NO: 4489 - DNA, 251 bp, Zea mays
gcctcgccgctgttccccgcaacctatcgacccaatctcgtccgacccggcgcgtcgtcccctccagatctccgtcgccctctccaggtagcagaaactgttctgctgcagtctgacaaagtggagggcttaggagcttctgcttcttttatgtctgaacaatctttgctttatttgggattgttgggagagtactctcgtgcaactaggaaaaggcacaaggttccgtcccactgcatgcgtcaagagac

SEQ ID NO: 4490 - DNA, 243 bp, Zea mays
ctcctgagccgttgcattggggagttcgcctttcgctctgatgtccgagctgtaaaattagcaaaggactacatcgtgattgtcctcgagcacaagatatttgtctacaacttcaccgatctgaagctgctctaccagattgacaccctgtcaaatcccaatggactttgctgcctctctcatcattccaatacttcagtgttggcctgccctgggttgcaccaggggcatgttcgcgtggag

SEQ ID NO: 4491 - DNA, 241 bp, Zea mays
gtacagttgtactgagctgagctgccggaggagaataggagaggcaggcgatgacgatggcgacgaaggcggcgtgcgtgctggcggtgtgggtgctcgtcgcatcgggcctgtccgacctgggctcagcgcgcgcgcccctgggcagcaagccgcagcgggagttcgactacttcgcgctctccctccagtggcccggcaccatctgcgcctccacccgccactgctgcgccaccaacgg

SEQ ID NO: 4492 - DNA, 242 bp, Zea mays
acccccaacagcgccactgtccagtgcgcgcgtcaagcttgcttagctagccgccatggcctccctcgccgccgtctccgtgaagcccgtggccatcaagggtctcgccggcagctctatctccggaaggaagctcgccgtcgccaggccgtcggcccgctccatccgcaggccccgcgcaccgccgtggtggccaagtacggcgacaagagcgtctacttcgacctcgacgacatcggcaa

SEQ ID NO: 4493 - DNA, 241 bp, Zea mays
aacggcgtcaagttcggcgaggccgtgtggttcaaggccgggtcccagatcttcagcgagggcgggcttgactacctcggcaacccgagcctgatccacgcgcagagcatcctggccatctgggcgtgccaggtggtgctcatgggcgccgtcgaggggtaccgcatcgccggtggcccgctcggggaggtggtcgacccgctgtaccccggcggcagcttcgacccgctcgggctcgccg

SEQ ID NO: 4494 - DNA, 240 bp, Zea mays
cgaccgcctcctcctcctcgttctactcgccgccccttctagaatcatccagaggcgtgccggtgaagcgcgagagggtgaggcatggcgatgcagacgggggtcgcgacctccaaggtcctcatcctcgtcggtgcagggatgacgggctcgatcctgctgcggaatggccgcttatctgatgtgttgggagaactccaggagattatgaagggtgtaaatcaaggaacttcttcgggt

SEQ ID NO: 4495 - DNA, 240 bp, Zea mays
ctggcatgtcacgaatgttgttaagttccccaacgtgtccagttctggaggtccttgggaaaaaactgtcgtttgagattgctgttggactcaatggtcgagtctgggtgaatgctcctgcagcaagtactgtcattcttgtatcaaatgcaataatgaggtcagaatctttgagcggcataaaacaaagagctatggtagaaaatctattggagagattgtcatgatgataagtcagca

SEQ ID NO: 4496 - DNA, 246 bp, Zea mays
ccctcccgaagtcccaaaggccgccgccgcccgccagcccaccatggccgcgcagtccttcctcctcgccgccactgccgccgccaggtcccccgcggtcttcgccgctccctattcctccgcacgccctttccactcggtccacttcgtcgccggcccgtggggcgccgccaccgccagggcgctcgtcgtcgcggacgccactaagaaggccgtagccgtcctcaagggcgcgtctgaggtcga

SEQ ID NO: 4497 - DNA, 134 bp, Zea mays
ccgtgcgtgtgttggtcgagatggctacaacagcttacgctcccatggcgagccaggtgatgaagagcagcccggtgcactcgatgccgagggtgctgtcaggcgctgcgctcacgcggccccggccccggttc

SEQ ID NO: 4498 - DNA, 275 bp, Zea mays
ctgaagcaggggctggtgctgcgcaacccctacatcaccaccctgaacgtgttccaggcctacacgctgaagcggataagggaccccaacttcaaggtgacgccccagccgccgctgtccaaggagttcgccgacgagaacaagcccgccggactggtcaagctgaacccggcgagcgagtacccgcccggcctggaagacacgctcatcctcaccatgaagggcatcgccgccggcatgcagaacactggctaggcggcttctcttcactcacc

SEQ ID NO: 4499 - DNA, 270 bp, Zea mays
aagaatctcaaatacagttcctgctatttccctggtgattcaagcaccctagaagatgctgaggttgcgatgatggatctgtattgtgagaggtcgaaactacaagatggccaaagtatcctagatgttggatgtggatggggatccctttcactgtacattgcaaagaaatataggaactgcagtgtaacagggatatgcaactctactacacagaaggcttttatagaagagcaatgtagggataacgagctgtcaaatattgagata

SEQ ID NO: 4500 - DNA, 273 bp, Zea mays
cacttgccccttttgccggaattctcagcttggggataggtgataccatggcatcaatgatagggtacaagtatggcgtgttaagatggagcaagacaggaaagaaaacaatcgagggcacggcagcgggcataacatcggtgctagcagcctgctcgatcctggtgtcactcttggcttccagtgggtacattctttcgcagaattggctatcgctcctgatagctgtcacattgagcgggttattggaggcatacactgcacagctggaca

SEQ ID NO: 4501 - DNA, 271 bp, Zea mays
ggcgcaactcatggacgagatggcggtcgtggccacggaggagtaccgctccgtcgtcgtcaaggagccgcgcttcgtcgagtacttcagatcggctacaccggagaccgagtacgggaggatgaacatcggcagccggccagccaagaggaggcccggcggcggcatcacgaccctgcgcgccatcccctggatcttctcgtggacccagaccaggttccacctccccgtgtggctgggagtcggcgccgcattcaagttcgccatcgac

SEQ ID NO: 4502 - DNA, 270 bp, Zea mays
caaagtctagagctagcttttgctttgctcaccagataaaccgcagcagatggcgtcgacgatcatggccgccacctcccgcatcgtcgcggccaagacgccgtttcttggccagggtcgcgccgccgccaatgccagccccctccgcgacgtcgccgccgccgctgctggcggccggatcaccatgggcaacgacctgtggtacggcccggaccgcgtcaagtacctgggccccttctccgcccagacgccctcgtacctgaccggcga

SEQ ID NO: 4503 - DNA, 86 bp, Zea mays
cggctcgagcgaccgcgtcaagtacctcggccccttctccggcgagcccccgagctacctcaccggcgagttccccggcgactacg

SEQ ID NO: 4504 - DNA, 272 bp, Zea mays
atcaagtggatgtaattaggcctggaacaactgttgaactgaggaacgcaaagatcgacatgttcaagggttcgatgcggcttgcagtggacaagtggggaattgtgaaagctgctgaaagctcagctgagtggacagtcaaggaggacaacaacctgtccttaattgagtttgagctggtgaccgtgacggagtgaaaaccgccattgcttaggagtattgttggtttgctgtgttgttgaacctaatcatcatcgccaatcaataaggac

SEQ ID NO: 4505 - DNA, 270 bp, Zea mays
ccgccgccgcagccatccgcttctcttcggttcagctctcgagtttccaggatgaaggtaatagctgcctacctgcttgctgttctgggtggaaacacttccccgactgctgatgatgttaagagcattctggaatcagttggtgctgaagctgatgaagaaaaactagagttcctgctcacagaactcaaagacaaggacataacagaagtgattgcagctggaagggaaaggttatcctctgtgccttcaggtggtggtgcaattgac

SEQ ID NO: 4506 - DNA, 267 bp, Zea mays
cttttagcctcaggagatggcaaaagaactgccactattgttggcgatgtctatatccatccatctgccaaggtgcatcctacttcaaagattggcccaaatgtctctatatcagcaaatgcacgcgttggagctggtgccaggcttatcaattgcataattctggatgatgttgaaattatggaaaatgctgttgttatatattcaatcgtagggtggaaatcatccattggaaaatggtcacgtgtacagggcgaaggtgatcac

SEQ ID NO: 4507 - DNA, 162 bp, Zea mays
ctatagcaaccggtccaacactttcacgctcagcttcagcaatggctgcctccaccatggcgatctcctccacggcgatggccggcacccccatcaaggtgggttccttcggcgagggccgcatcaccatgcgcaagaccgtgggcaagcccaaggtggcgg

SEQ ID NO: 4508 - DNA, 254 bp, Zea mays
ctggatagttcacatatgatgatgacagcgattgcttgcaaggagtctggccttcattttgcaggagttcatgactcattttgggtgcatgcgtgtgatgttgatcaaatgaaccagatattgagacaacaatttgtggagctttacagcatgccgattcttgaaaatctgctggaggagttccaaacgtcattccccacactagaatttccaccctgcccaccgcaaggtaactttgacgtgagggaagttct

SEQ ID NO: 4509 - DNA, 81 bp, Zea mays
gccaccatcgatctgcaagtctcgctacgtagcagtgcaatacaaaaaaagcagccgcaatggcgagcagcaccatggccc

SEQ ID NO: 4510 - DNA, 261 bp, Zea mays
tgcaattcaagaactggcttccttggaaagacacgtgggattcgtccttgtgttttccctgctggaagagttggatttgtcagaacagtagtggaatgcaaggaatctagaattggaaagcagcccatcgaagttccatcaaatgttactctcacattagaagagcagtttgtcaaagctaagggtccgctgggggagttatctctgagctttccaggtgacttgaagatcgtgaaagaagaatccggtaacctgagagtt

SEQ ID NO: 4511 - DNA, 264 bp, Zea mays
cggtttgcaaaactgccgtcagcaagaattgaaatgcaaactccaggcacgctgtctgcatgcctaaggtgaaatcaatgtgaaattggcaaattatgttgtcgtgtacagcccgtcatatataatattagggggtgtttgggagtgaagttttttcacagttttggaagaatactgcagtattcttaaatactgcagtattatatacagaatggtgtttggcaagctggctaaaatctatgttttcaaaactgtagtattaca

SEQ ID NO: 4512 - DNA, 264 bp, Zea mays
gctgcttgagaacgtaagattctacaaggaagaggagaagaatgacccagagtttgcacagaagcttgcctccctagcagatctttatgttaacgatgcatttggaacagcccacagggcgcatgcatcgaccgagggagttaccaagtttttgcagccttctgttgcagggttccttctgcagaaggaactcgactaccttgtcggagctgtttcaagccctaaacgcccttttgctgccatcgtgggtggttcaaaggtgtc

SEQ ID NO: 4513 - DNA, 263 bp, Zea mays
agacgagtgtcaagtgaacctgaaacttgcggtgtcactggctggtacagcctgagtgtgagtgagtgatcgagctagctgagctccgatcctcgctagctagctaggataccgccataccacaagtcttcttcacaagtttaggagtgacagcaacaagagatcgatggcctctgccaccgtgctcaagtcctccttccttcccaagaagtccgaatggggcgccaccaggcaggccgccgcgcccaggccgcccaccgtct

SEQ ID NO: 4514 - DNA, 260 bp, Zea mays
tagcaatgtgtccttcgctgctgttgcagtctcatttgctcacactatcaaagctctggagcccttcttcagcgcacggctactcagtttatccttggacagcaagttcccttctctctgtggctttctcttgcccctgtggtcattggtgtttcaatggcatcccttactgagctttcattcaactggactggcttcatcaatgccatgatatcaaacatctcattcacttacaggagcatttattccaagaaagctat

SEQ ID NO: 4515 - DNA, 260 bp, Zea mays
cggagcgctcgagtcgctacaccacgaggtcgagctcgccgtcgtcatctcccggcgtgggcgcgacgttcccgaggcgtccgccatggactttgttggaggttatgcacttgctttggacatgacagcaagggaccttcagtctgttgctaagtctgcaggccttccatggactttggctaaaggacaagacaccttcaccccaattagtgcagtagttccaaaatcagctgtcactaatcccgatgatctcgagctct

SEQ ID NO: 4516 - DNA, 261 bp, Zea mays
cagcgccactgtccagtgcgcgcgtcaagcttgcttagctagccgccatggcctccctcgccgccgtctccgtgaagcccgtggccatcaagggtctcgccggcagctctatctccggaaggaagctcgccgtcgccaggccgtcggcccgctccatccgctagccccgcgcagcgccgtggtggccaagtacggcgacaagagcgtctacttcgacctcgacgacatcggcaacaccaccggacagtgggacctctacgg

SEQ ID NO: 4517 - DNA, 258 bp, Zea mays
ctttgggaccgcactaaataggttctgtgttcaggctgctgttgggcatccacttacagtttatggaaaaggtggtcagacccggggatatctggacatcagagacactgtacagtgcgtggagctagcaatagccaacccagccaaacctggcgagttcagagtcttcaaccagttcaccgagcagttctctgtcaatgagctagccaacctggtgctgcggcaggagcgaaacttgggctagaagtggagaccaaa

SEQ ID NO: 4518 - DNA, 267 bp, Zea mays
atcccgtcgcatcccatcccactaccacccatctcgtcgtccgccgattcgatccggttcttccaacccaggtgatggcgacgaagaggagcgtgggcaccctcggcgacgcggatctgaaggggaagaaggtgttcgtgcgcgccgacctcaacgtcccgctcgacgatgcccagaagatcaccgacgacacccgcatccgcgcctccgtccccaccatcaagttcctcctcgagaagggcgccaaggtcatcctcgccagccacc

SEQ ID NO: 4519 - DNA, 267 bp, Zea mays
ggccaggctaatatcaaatgctgaacaggctctggaaaaataccccaaagatttcaatagatgggatgcatacatgcagcagctaaaaggcagctgttccagcattggtgcttcaaggatgaagagtgagtgcgtgtcattccgggattactgcggacagggaaatgttgaaggttgtatgagatcgttccagaaagtcaagagggagcacggtgccctgaggcagaaactagaggcctatttccagctgctacgacaagctggtcc

SEQ ID NO: 4520 - DNA, 262 bp, Zea mays
ctggactagtgagtgcccaagcccatcgccaggagctgatacaggatcttttcaaagtatggcaagatccacagagaaggacagtaactggtggcatgataaaggaacttctcatttctttcaagagagcaactggacagaagccccagaggatcatattctacagggatggtgtcagtgagggacagttctatcaagtattgttgtatgaacttgatgccatcagaaaggcatgtgcatccttggagcccaactaccagcc

SEQ ID NO: 4521 - DNA, 262 bp, Zea mays
ccctagccgccgccgccgctcgtctccctgagaggtgccgggaccgaggaactggccgagttctaggtagagaatcggttttgcttgtctcagcacggggtctgctgcgtctggtggtggtgaaggggagaaattcgtgagatctgttccggatcaggcgtgcgagctcgggaatcaggggtttcacacatagcttcgtcgatttgaatttgatgtactaatggagtctaagggtggcaaaaagtctagcagtagtcgttcc

SEQ ID NO: 4522 - DNA, 263 bp, Zea mays
cctaactcccagctctctcgttcaggcgcgctctctctagccggcgacgattgggcgagcggcgccactcaacgccaggtcttcgtgaaaaccatcgccggcgatgagtttcaaccagtctactgtcaaggggcaggccaggagggagaggcctagggctcgccctcatggcctgacgcagcagaggaggcaggaaataaaggaagcttttgatctgtttgatacagataactctggaaccattgatgcaaaagagctcaatg

SEQ ID NO: 4523 - DNA, 261 bp, Zea mays
ccagggtgttcaagtgttcccagagataatggttcctcttgttggaacaccacaggaactggggcatcaagtgactcttatccgccaagttgctgagaaagtgttcgccaatgtgggcaagactatcgggtacaaagttggaacaatgattgagatccccagggcagctctggtggctgatgagatagcggacaggctgaattcttctccttcggaacgaacgacctgacgcagatgacctttgggtacagcagggatgat

SEQ ID NO: 4524 - DNA, 264 bp, Zea mays
gcgagacccgaccccgccgtcgcgatgaggccggcgctgctcaagtccacggccgagctcctccgccgcagccgcggctacgcctcctcggccaacccggagcggaaggtggccatcctgggcgctgcgggcggcatcgggcagccgctctccctcctcatgaagctgaacccgctcgtctcctccctctccctctatgatatcgccgggacccccggcgtcgcggccgacgtctcccacatcaactcccccgccctggtgaag

SEQ ID NO: 4525 - DNA, 264 bp, Zea mays
gcggcggttcgagaactacggcaagttcggcctgctctgcggcgccgacggcctgccgcacctcatcgtcagcggcgaccagcggcactggggcgagttcgtcaccccgggcctgctcttcctctacatcgccgggtggatcgggtgggtcggcaggagctacctcatcgccgtcagcggcgagaagaagcccgccatgagggagatcatcatcgacgtcgagctcgccacccgcctcctccccagggggttcatctggcccgt

SEQ ID NO: 4526 - DNA, 257 bp, Zea mays
gggacaacggtgacaagaggatgacgaggcaccccaaccagccgcagtgaagtggatgtgatcttggagagagccttatctctagagcctagagcagcaataggtccacataagaaacaaacaaacaaacaaaaaaggagacatgatgattggtgcgctctctagagatgttaactaagggggtgtttggtttctagggactaatttttagttcctacattttattccattttagttgcaaaattgctaaatataga

SEQ ID NO: 4527 - DNA, 257 bp, Zea mays
tttcacgctcagcttcagcaatggctgcctccaccatggcgatctcctccacggcgatggccggcacccccatcaaggtgggttccttcggcgagggccgcatcaccatgcgcaagaccgtgggcaagcccaaggtggcggcgtccggcagcccctggtacggccccgaccgcgtcaagtacctcggccccttctccggcgagcccccgagctacctcaccggcgagttccccggcgactacggctgggacaccgcc

SEQ ID NO: 4528 - DNA, 258 bp, Zea mays
ggagaagaagacgagtgtcaagtgaacctgaaacttgcggtgtcactggctggtagcctgagtgtgagtgagtgatcgagctagctgagctccgatcctcgctagctaggataccgccataccacaagtcttcttcacaagtttaggagtgacagcaacaagagatcgatggcctctgccaccgtgctcaagtcctccttccttcccaagaagtccgaatggggcgccaccaggcaggccgccgcgcccaggccgccc

SEQ ID NO: 4529 - DNA, 257 bp, Zea mays
cgttgacaagaagactagaaccgaacctgaccatgtcgctgatccgccgcagcaacgtgttcgatcccttctccctcgacctctgggacccctttgagggcttccccttcggctccggcaacagcagcagtctcttccactcgttcccgcggaccagctcggagaccgcggccttcgctggcgcgcggatcgactggaaggagactccagaggcgcacgtgttcaaggccgacgtaccggggctgaagaaggaggag

SEQ ID NO: 4530 - DNA, 259 bp, Zea mays
caccactccgcgctacatgatgacggtacatctgcacagaggtgctacgtactacgacgacgacgcatgcgccacacatggcatcccagctctccgccgccgtgccccggttccacggcctccggggctacgccgcgcccaggtccgcggtggcagcgctgccgtccgtgagggtgggcaggaagaggtcgtcgtcgcagggcatccgctgcgactacatcggctccgccaccaacctgatcatggtgacgacgacgac

SEQ ID NO: 4531 - DNA, 260 bp, Zea mays
gctcccacctctccaccgcctggtcctcctcggcgctcgccagctgcgcctccaccacccgacggcgctcccccccgcgctcgggtctcctggtgcggtgttccctccgtgagctccgcacccgcatcgactccgtcaggaacacgcagaagatcacggaggccatgaagctggtggccgccgccaaggtccggcgcgcgcaggaggccgtcgtctcctctcgccctttctcggaggcgctggtggaggtgctctacaac

SEQ ID NO: 4532 - DNA, 272 bp, Zea mays
acaacatcaaccagccgcgccacttctgcaagaactgccagaggtactggactgccggcggtgccatgcgcaacgtgcccgtgggcgcaggccggcgcaagagcaagagcgcgtcggccacttcccacttcctccagagggtcagggccggtctgcccgtcgacccgctcgtctgcgcggcagccaagactaacggcacggtgctcagcttcggctctgccatgtccagcttagacctcacggagcagatgaaacagctcaaggaaaagctc

SEQ ID NO: 4533 - DNA, 270 bp, Zea mays
ttaaaacaccactgccagtttacagtttctctcgcgaatggtctcacaatattcgctggtttccacaaaataagattgtcaatagctactacgtacttatgctattctgcatgtgatgtacgagtgtgcatcttcaagaatctttaagttgaatggtcccataataatattgataacaatgtaaattgtatgtcctgtacgtactttggtatcgcgacatctcagtgtgcatcttcaaggatcataagttgaatgttatcattaaggtca

SEQ ID NO: 4534 - DNA, 267 bp, Zea mays
cgggagcaaccaggaggatgccctcgcgcgaattgaaaagctttcagaagtaaacccgatgcttggcttccgtgggtgcaggcttggtatatcgtaccctgaattgacagagatgcaagcccgggccatttttgaagctgctatagcaatgaccaaccagggtgttcaagtgttcccagagataatggttcctcttgttggaacaccacaggaactggggcatcaagtgactcttatccgccaagttgctgagaaagtgttcgccaa

SEQ ID NO: 4535 - DNA, 265 bp, Zea mays
atccccccggagaccgcgctgccgtggttcaagacgggcgtcatcccgcccgcgggcacctacaactactgggccgactcctacacgctcttcgtcttcaacatggcgctcatgggcttcgccgagcaccgccgcctccaggactggtacaacccgggctccatgggcaagcagtacttcctcggcctcgagaagttcctcgccggctccggcgacccgtcctaccccggcgggcccctcttcaacccgctcggcttcggcaaga

SEQ ID NO: 4536 - DNA, 266 bp, Zea mays
ccatggcctccctctcctctgccgccgtcaccgccccttccttcgccgcaccagcgccagcccgcgccgtggtcagaaggaggtccttcaccgtgcgcgcctctctccgcaaggccaccggcaccgccgccgtggcaatggctgccagcgccctgcttgccggcggtgccatggcccaggaggtgctgctgggcgcaggcgacggcgggctcgtcttcgagccagccagttcaccgtcaaggccggcgacaccatcacattcaaga

SEQ ID NO: 4537 - DNA, 265 bp, Zea mays
tgccaaaaggcatcaccgccgcgacgacgatggcagcctcgctccaagccgcggccaccctgatgcagccggccaagatcggcggccgggcgccctttgcctcgctgccgtcccgcccgtcgtcgcaactcgcctgcagggcgttcggcgtcgacgccggcgccgccaggatcacgtgctccctgcaggacgtcgccagcaggtgcgtcgacgccgcgaactcgccggcttcgcgctcgccacctcggcgctcctcgtctcgggc

SEQ ID NO: 4538 - DNA, 266 bp, Zea mays
gtcgcagcagctagcgcccggccggccagtcgagtgagtccatcctccatcgccatccaatggccgccaccgccctgagcatgagcatcctccgcgcgccgccgccctgcttctcgtccccactcaggctcagggtcgcggttgccaagccgctggcggcccccatgcggcgccagctgctgcgcgcgcaggccacctacaacgtgaagctgatcacgccggagggggaggtggagctgcaggtgcccgacgacgtctacatcctg

SEQ ID NO: 4539 - DNA, 265 bp, Zea mays
cacgcacgcatacacagcacagagtgaggtaagcatccgaaaaaagctgtgatctgatcgacatggccgccgccaccatggctctcacctcccgcgcgctcgtcggcaagccggcgaccagcaccagggacgtcttcggcgaggggcgcatcaccatgcgcaagactgctggcaagcccaagccagcggcgtccggcagccccttgtacggggccgaccgcgtcctgtaccttggcccgctgtccggccagcctccaagctacct

SEQ ID NO: 4540 - DNA, 265 bp, Zea mays
aaagatgctgtggacgatgaattggttgagatcatacgcggaccggctgacacggagggcgccctggacgcgttcgtgtcgacggtgaccggcccgccggggccaagcccgatagccctgatgccgcggctggccgacctgcccgtgctggtgctgtggggtgaccgggaccccttcaccccgatcgacgggcccgtggggaagttcttctcgaagctgccgtcggagctcccgaacgtgacgctctacatgctggagggcgtgg

SEQ ID NO: 4541 - DNA, 265 bp, Zea mays
agaagaaggggagccggaggtagaaagaccagagaagatggcgaccaccgagccggcggcggtgaggctggtgggctccttcgccagcccgttcgtccaccgcgccgaggtggccctgcgcctcaaaggggtgccctacgagctcatcctggaggacctggccaacaagagcgagctgctgctggcacacaaccccgtgcacaaactcgtgcccgtgctcctccacggcgacagggccatctccgagtcgctcgtcatcctcgag

SEQ ID NO: 4542 - DNA, 263 bp, Zea mays
agctcactcgccacacacacaccccctctccagctccgttggactccggacagcagcaggcgcggggcggtcacgtagtaagcagctctcggctccctctccccttgctccatatgatcgtgcaacccatcgagctacgcgcgtggactgccttccctgggtcggcgcaggaggggatcggaaggatggcggcatcggtttccagggccatctgcgttcagaagccgggctcaaaatgcaccagggacagggaagcgacctcc

SEQ ID NO: 4543 - DNA, 262 bp, Zea mays
ctaggatgaggcgtatttccagtcatattggcagtaacatacggatcgtagcactttcagcatcacttgctaatgctaaagatcttggtgaatggattggtgccacctctcatggccttttcaacttccctccagcagtgagacctgtgccactggaaattcacatccagggtgtggatatagcgaactttgaggcaaggatgcaagcaatgacaaagcctacctacactgccatcacacagcatgcaaagaacaataaacc

SEQ ID NO: 4544 - DNA, 260 bp, Zea mays
gcacaccaaggagagtacgtggaggagcagccatggcttcatcggtggccgccgcggcgagcacattcctgggcacccgcctggcggacccggcgccacagaacgggcgcatcgtggcccggttcgggttcgggttgggcggcaaggcgaactgctccgaagaaggtggcgaagacatcgacctcctctgaccggccgctgtggttccccggcgccgtggcgccgactacctggacggctcgctggtcggcgactacggg

SEQ ID NO: 4545 - DNA, 260 bp, Zea mays
caacggcgacggcaagaaggagcaccagttctacctgtggttcgacccggccgccgacttccacacctacaccatcatctggaacgacaagaacgtcatcttcaaggtggacgacctcttcgtgcggtgcttcaagcggtacccggacctggcgtacccgggcgggaagcccatgtcggtgcacgccacgctgtgggacggcagctactgggccacgcagcaggggaaggtgaaggtggactggtccgccgcgcccttcg

SEQ ID NO: 4546 - DNA, 261 bp, Zea mays
atcacgttcaacgacgccatcgtgcagtatggcctggacagcatcccgttcggtggcgtggggcacagcgggttcggccagtaccacggcaagtactcgtttgacatgttcagccacaagaaggcggtgctcaagaggagcttcctcgtcgagttcatgttccgctacccgccgtgggacgagaccaagatcggaatgctcaggcgcgtctaccgcttcgactacgtctcgctcttcctcgcgctcatcggcctcaggaga

SEQ ID NO: 4547 - DNA, 260 bp, Zea mays
gttgaagctactagcgtgtagctagggaagagaagcgcgcgagtagctagcagacgtacgtaggcagaagcctagctgggtttgaagggccccgatcgatgatcccctacgcgactgcggcggaggcggagggagcactggggcgcaccatgacgtgggctgagacagcatggtacgagtactcggcggtgatgccagattcctggctgcactgccacaccacatttatcctgttcgtcatctacagcatcgccccgctg

SEQ ID NO: 4548 - DNA, 261 bp, Zea mays
gtacgaggcacgcctgaccaagtgcaagtaccttgctggagacttcctcagcctcgccgacctgaaccatgtgtctgtcactctctgcctgttcgctacgccctacgcatctgtgctcgacgcctacccgcatgtgaaggcctggtggtctggtctgatggagaggccgtctgtccagaaggtcgctgccctgatgaagccatctgcttgaaacggttgccctgtcaatcggtgaatggaataagccaagtctgttctggg

SEQ ID NO: 4549 - DNA, 261 bp, Zea mays
atctggtttcgctgccccgattcgccacgaagccgcactgtgagagagggacgcggcccgttgtcctcggcttgtacgcaatccttccgtcgctgcgaactgatccctcgtgttcgccatggcccccagcgtcgccgtggaaaacctcaaccccaaggtcttgaaatgtgagtatgcagtccgtggcgagattgtcatccatgctcagcgcttgcagcaacaactacaaacacaaccagggtctcttccttttgatgagat

SEQ ID NO: 4550 - DNA, 260 bp, Zea mays
ccttcctcggcttcgccgtgcaggccgccgccaccggcaaggggccgctcaacaactgggccacccacctgagcgacccgctccacactaccatcttcgacacgttcggagggtcctcttaagcccgccattgctccgccccgtccatcgaccggaacgtgttcttggattaattaactacgatctctatgagcctggggatggatcaacccgtcgtgcgtggtctcgttttgtgatgagtgggagagagaggatgacaa

SEQ ID NO: 4551 - DNA, 255 bp, Zea mays
gcgagatcaatgccaaccagtggtgctcttgatcgtgttgccgagaaattgaatgttccattctttgaggttccaacaggctggaaattttttggcaacctaatggatgcaggaaaattgtctatttgtggagaggaaagttttgggactggatctgatcacatcagagagaaggatggcatctgggctgttctggcttggctttccatacttgcacaccggaacaaggataagaaggtcggagagagattagtg

SEQ ID NO: 4552 - DNA, 255 bp, Zea mays
aatctagaagcgcccctctccctctctctctctctcttcgccgtccgaagctccgcaccccaatctaatcgacacctcgccgagatgggccgcaagttcttcgtcggtggcaactggaaatgcaatggaaccacagatcaggtcgagaagattgtcaaaaccctgaatgaaggacaggttcccccttcagatgttgtggaggtcgttgtcagccctccttatgtcttccttcctgtggtcaagagccagctgcgc

SEQ ID NO: 4553 - DNA, 256 bp, Zea mays
aaaggctctcaaaccaggccatcacatgtgaccactatagtgctgacttccatcaaggatatatgggaaatggcacccttacatccgtattgacacggcttggtgagctggaggagaaggtacaagcacttgaagcaaagccaccccaagtgccatttgaaaaggaggaattgttacatactgctgtttaccgcgtggatgtgttggaagctgaactaatttctatgaagaaggccttgtatgagacattgattcg

SEQ ID NO: 4554 - DNA, 243 bp, Zea mays
ctgctcctggcgcgccccaacgtgaagctgttcaacgccgtggccgtggaggacctcatcgtcaggggagggcgcgtcggcggcgtcgtcaccaactgggcgctcgtgtccatgaaccacgacacgcagtcctgcatggaccccaacgtcatggaggccaacgtcgtggtcagctcctgcggccacgacgggcccttcggcgccaccggcgtcaagaggctccaggacatcggcatgatcagc

SEQ ID NO: 4555 - DNA, 242 bp, Zea mays
gctacaacgtcagtatgatggctgactccacctcccggtgggctgaggcattgcgtgagatctcagggcgtttggctgaaatgcctgctgatagtggttacccagcttacttggctgcacgtttggcatccttttatgaacgtgctggtaaggtaaaatgtctgggaagtccagacaggaatggcagtgtcacaattgttggagctgtctctcctcctggtggtgatttttcagaccctgtt

SEQ ID NO: 4556 - DNA, 240 bp, Zea mays
aggatatgcccttcctcatgccattcttcgtttggatcttgctggtcgggacctcacagactccctcatgaaaattctcactgagaggggttactccttcacaacctcagccgagcgagaaattgtaagggacatcaaggagaagctagcatatatagcccttgactatgagcaagagttggaaactgccaagaacagctcttcagttgaaaagagctatgagctacctgatggacaagt

SEQ ID NO: 4557 - DNA, 245 bp, Zea mays
ggctgtggagcgggcagctggtactgatggccaaaagataacatacggtgtcataaaacaccgtttgggcgatctattttatcgcctagtatctcaaaagttcgaggatcctgccgaaggtgaagaagctttggtcggcaaatttaagaaactgtatgatgacctcaccactggtttccgcaatctcgaagacgaggcacggtgaactactgtagattctgtgtaaacaaggactgccaaatgtt

SEQ ID NO: 4558 - DNA, 243 bp, Zea mays
gtctgacttcgaaggcattttccgtgctatggatggactcccggtgaccatccgactcctggaccctcccctccacgagttccttccagaagggaacatcgaggacattgtaagtgaattatgtgctgagacgggagccaaccaggaggatgccctcgcgcgaattgaaaagctttcagaagtaaacccgatgcttggcttccgtgggtgcaggcttggtatatcgtaccctgaattgacaga

SEQ ID NO: 4559 - DNA, 170 bp, Zea mays
gaagcgttgcattgtaatagcactttgtaactcctcaccctccacagggctttgggattcaccccgaaatgactcactttcggtgaaattcacccgtttcggcgaggtcgtccgaatataccggccaaatgtttccattggatttcaattattagtcaactctagagttg

SEQ ID NO: 4560 - DNA, 247 bp, Zea mays
ctgcctcaagacctggggcggccagccggacaaggtcaaggcggcgcaggacgcgctgctgctgcgcgccaaggccaactccctggcgcactcggcaagtacacctccgacggcgaggccgccgaggccaaggagggaatgttcgtcaagaactacagctactaattaatcgcccggccatcacccgggataccgccgcccctccgagagatacgtgtgtactgatcatggttaagcacgtactccg

SEQ ID NO: 4561 - DNA, 239 bp, Zea mays
ctttgatgatattggagccttggagaatgtaaaggacacgttaaaggagctggtgatgctccctttgcaaagacctgagttgttctgcaaagggcagttaacaaagccttgcaaggggatattgcttttcggacctcctggcactggaaaaactatgcttgccaaagcagtagcaactgaagcaggcgctaatttcatcaatatatcaatgtcgagcattacatctaagtggtttggtg

SEQ ID NO: 4562 - DNA, 238 bp, Zea mays
tggggagcaaggcaaaacgaagattggaaagagctgtctggaatgatacttcattccttgcgttggcggatgtgatggactactctctccttgttggcatcgacgaggagaagaaagagctcgtcatcggcatcatcgactacttgcgccaatacacctgggacaagcagctggagacgtgggtgaaggcctcgggcattcttggtggccccaagaacgaatcccccaccgtcatatc

SEQ ID NO: 4563 - DNA, 238 bp, Zea mays
attttgccctaggtgtatttgagaatgctgttaacagaggagttcagaatataagctttggagatctgtcaggaaatcttggacgaacaatgtataaattcaagttccagataccgtcttacttttcccttgtaattcgaagccttgctgttttagaaggtatcgcaatcagcttcaatccaaagtataaagttctggggagttcatatccatggattgcaagaaaagttctcactga

SEQ ID NO: 4564 - DNA, 241 bp, Zea mays
ccccaacttcaaggtgacgccccagccgccgctgtccaaggagttcgccgacgagaacaagcccgccggactggtcaagctgaacccggcgagcgagtacccgcccggcctggaagacacgctcatcctcaccatgaagggcatcgccgccggcatgcagaacactggctaggcggcttctcttcactcacctgcagagtgcaccgcaataatcagcttccggatggtggcgttttgtcag

SEQ ID NO: 4565 - DNA, 240 bp, Zea mays
cctgtatgagctggatggactgacggaagggcctgtgaatcttgggcagtgcgatggtgctgatgatcttgattggctacggatggtgcagccagttattcaagaaaggattgagcgctactcacaaagcgagatcaggttcaatctcatggccatcataaagaacaggaaagaggtgtacagtgctgagcttgaggaactggagaagagaagggagcagattttgcaggagatgaataa

SEQ ID NO: 4566 - DNA, 233 bp, Zea mays
gagcagcgtgcccaccgtcaaggactcgcaggccatctgcgacctcgtctactcgctcttcgtctccgaggaggtggacaaggtggagctgctctactccaagttcgtgtcgctggtgcgctccgaccccatcatccagacgctgctccccatgtcgcccaagggcgagatctgcgacgtcaacggcgtctgcgtggacgccaccgaggacgagctcttccgcctcaccacca

SEQ ID NO: 4567 - DNA, 232 bp, Zea mays
cacgcgggcgggccgggcgaggagatggagaagttcctcaagcagccggacacgacgctgctggacatgctgcccacgcagatgcaggccatcaaggtcatgacgacgctggacatcctctcgtcgcactcgcccgacgaggagtacatgggggagttcgcggagccgtcgtggctggcggacccatggtgaaggcggcgttcgagaagttcggcggcaggatgaaggagat

SEQ ID NO: 4568 - DNA, 185 bp, Zea mays
gtccgtggggatggcgtcgtccatgctctccgctaggagcgtgccactccagcaggggggcggcgctgtccggtttctccgggctcaggagtccgcgtcgctgcgcatgcggcgggatcgcagtccggacgacttcatgtcgcgcgtctcgttcaggacgcacgcggtcgggacgagccgcgggt

SEQ ID NO: 4569 - DNA, 231 bp, Zea mays
ggctctccaagggcctcctgtggaaggaccgcgtcaggatcctcggcgagctgcgctctgcgctggcgtacctccactccaggcggccccacgccatcatccacgccgacgtgaagctgaccaacatcctcctggacgccggcaacgcgagccggctgggggacttcgggacggcgcgggcggtgcacgtgaagccgctggaggaggagaccatcggccgccgcacgaacc

SEQ ID NO: 4570 - DNA, 233 bp, Zea mays
ctcgatgtcatagcaatgagaacacctgggttcagtggagcagacttggcaaaccttctgaatgaagcagccattctggctggacggccggggaggacagcaatttcttcaaaagagatagatgattctattgacagaattgtggctggtatggaagggactgtgatgacagacgggaagagcaaaagtcttgttgcgtaccatgaagtcgggcatgcaatttgcggaacttt

SEQ ID NO: 4571 - DNA, 231 bp, Zea mays
ggcgacgacggcgccaggctgctgcagcacctcttctggtccaacgggccggagaagcgcaccgggcccgggaacaagcagtgcgccgccaaggacgtggtggtggacacggcgtgcatgctgctggccgagctgttccggcgctacgacgacttcgaggtggagggcacctccttcaccaagctcgtcaagcgccaggcgtcgccgagcgtggcgcaggcagcagccgcc

SEQ ID NO: 4572 - DNA, 231 bp, Zea mays
cttctcttcttccaattgttggtggtgttgcattggcatctcttactgacgcatcctttaactgggctggcttttggagtgcaatggcttcaaatgttacctttcaatcccgaaatgtattgagcaagaagctcatggttaagaaagaggaatccttggacaaccttaatctcttctctatcattacagtgatgtcatttttccttttggcccctgttaccttctttacag

SEQ ID NO: 4573 - DNA, 234 bp, Zea mays
gccaagaggaggcccggcggcggcatcacgaccctgcgcgccatcccctggatcttctcgtggacccagaccaggttccacctccccgtgtggctgggagtcggcgccgcattcaagttcgccatcgacaaggacgtcaggaacttccaggtcctcaaagagatgtacaacgagtggccattcttcagggtcaccctggacctgctggagatggttttcgccaagggagacccc

SEQ ID NO: 4574 - DNA, 236 bp, Zea mays
cgccaggcagccatggcgcccaccgtgatgatggcctcgtcggccaccgccgtcgctccgttccaggggctcaagtccaccgccagcctccccgtcgcccgccgctcctccagaagcctcggcaacgtcagcaacggcggaaggatccggtgcatgcaggtgtggccggcctacggcaacaagaagttcgagacgctgtcgtacctgccgccgctgtcgacggacgacctgctgaa

SEQ ID NO: 4575 - DNA, 232 bp, Zea mays
cgcagtcctctctctgttcttcctcctcctcctccctgcttgtgatgccatctactgcgacgaagacgactgctacgacctcctaggggttaagcaggacgcgaacgcgtcagacatcaagaaagcgtactacaagctctctctcaaacaccacccggacaagaatcccgatgcggagtcgcggaagctcttcgttcaagattggcaatgcttacgagattctgaaggatga

SEQ ID NO: 4576 - DNA, 204 bp, Zea mays
ctgctcctggcgcgccccaacgtgaagctgttcaacgccgtggccgtggaggacctcatcgtcaggggacggcgcgtcggcggcgtcgtcaccaactgggcgctcgtgtccatgaaccacgacacggcatcctgcatggaccccaacgtcatggaggccaatgtcgtggtcagctcctgctgccacgacgggcccttcggcgcc

SEQ ID NO: 4577 - DNA, 260 bp, Zea mays
gctacaacgtcagtatgatggctgactccacctcccggtgggctgaggcattgcgtgagatctcagggcgtttggctgaaatgcctgctgatagtggttacccagcttacttggctgcacgtttggcatccttttatgaacgtgctggtaaggtaaaatgtctgggaagtccagacaggaatggcagtgtcacaattgttggagctgtctctcctcctggtggtgatttttcagaccctgttacctccgaaaccctcagt

SEQ ID NO: 4578 - DNA, 263 bp, Zea mays
aggatatgcccttcctcatgccattcttcgtttggatcttgctggtcgggacctcacagactccctcatgaaaattctcactgagaggggttactccttcacaacctcagccgagcgagaaattgtaagggacatcaaggagaagctagcatatatagcccttgactatgagcaagagttggaaactgccaagaacagctcttcagttgaaaagagctatgagctacctgatggacaagtaatcaccattggtgcagagagat

SEQ ID NO: 4579 - DNA, 259 bp, Zea mays
ggctgtggagcgggcagctggtactgatggccaaaagataacatacggtgtcataaaacaccgtttgggcgatctattttatcgcctagtatctcaaaagttcgaggatcctgccgaagtcgaagaagctttggtcggcaaatttaagaaactgtatgatgacctcaccactggtttccgcaatctcgaagacgaggcacggtgaactagtgtagattctgtgtaaacaaggactgccaaatgttttataagatacata

SEQ ID NO: 4580 - DNA, 260 bp, Zea mays
gtctgacttcgaaggcattttccgtgctatggatggactcccggtgaccatccgactcctggaccctcccctccacgagttccttccagaagggaacatcgaggacattgtaagtgaattatgtgctgagacgggagccaaccaggaggatgccctcgcgcgaattgaaaagctttcagaagtaaacccgatgcttggcttccgtgggtgcaggcttggtatatcgtaccctgaattgacagagatgcaagcccgggcca

SEQ ID NO: 4581 - DNA, 262 bp, Zea mays
ctctggtccgtggccatggcgtcgtccatgctctccgctaccaccgtgccactccagcaggggggcggcctgtccgagttctccgggctcaggagctccgcgtcgctgcccatgcgccggactgccacctccgacgacttcatgtccgccgtctccttcaggacccacgcggtcggcacgagcggcgggtcgctgcgggcgccgacggaggcgaactgaaggtggccatcaacgggttcggccgcatcgggcgcaacttcct

SEQ ID NO: 4582 - DNA, 264 bp, Zea mays
gtgcaagcagaagcagcgcaatggcgagcagcaccatggccctctcctccacagccttcggcggcaaggcagtgaacgtgccgtcgtctctcttcggcgaggcccgcgtgacgatgcgcgagacggcggcgaaggcagagccggcggcgggctcgggcagcccgtggtacggccccgaccgcgtgctctacctgggcccgctgtccggcgcgcgcccgagctagctgacgggcgagttcccgggcgagtacggctgggacaccg

SEQ ID NO: 4583 - DNA, 261 bp, Zea mays
ccaaagtgggcagtgcttcttgggaggctaggcagcaagaaggccgacttcaagagcgcggagaacctgccgtcgccgttcgacaacctgacggtgctggagcagaagttcgcggccgtgggcctccacaccgtggacctggtggccctctcgggagctcacacgttcgggcgggtccagtgccagttcgtcacggggcggctgtacaacttcagcggcacgaaacggccggaccccacgcttaactccggctaccgggcg

SEQ ID NO: 4584 - DNA, 253 bp, Zea mays
ctcaacttaccagcagcaccagtgcctgctcgatggcggcccacgctctcctctccggccggcagctgctcggccgccccgtgcactcggccgtctctcggtcgtcggcgaggacggcgcccttcgtcgtcagggccagctccagccctccagccaagcacggtgccgacaggcagctctggttcgcgtccaagcagtccctctcctacctcgatggcacgctgcccggcgactatggcttcgacccgctggg

SEQ ID NO: 4585 - DNA, 152 bp, Zea mays
gctttctctggcaacacagctgctgatggcatgaagagcagcgcatgagaaaaacgcagcatggcattaggccgtcaacagccagcatgattagagcccccctgcatgcagaatgatcacccggtcccgtagttcacgacgaaagcatggct

SEQ ID NO: 4586 - DNA, 258 bp, Zea mays
gtgtgtagtcgcagcagctagcgcccggccggccagtcgagtgagtccatcctccatcgccatccaatggccgccaccgccctgagcatgagcatcctccgcgcgccgccgccctgcttctcgtccccactcaggctcagggtcgcggttgccaagccgctggcggcccccatgcggcgccactgctgcgcgcgcaggccacctacaacgtgaagctgatcacgccggagggggaggtggagctgcaggtgcccgacg

SEQ ID NO: 4587 - DNA, 260 bp, Zea mays
aagaactcaagccctttgggaagcagctcagggacaaatacgtggagacacagcagcttctcctccagatcgctgggcacaaggatattcttgaaggcgatccattcctgaagcaggggctggtgctgcgcaacccctacatcaccaccctgaacgtgttccaggcctacacgctgaagcggataagggaccccaacttcaaggtgacgccccagccgccgctgtccaaggagttcgccgacgagaacaagcccgccgga

SEQ ID NO: 4588 - DNA, 253 bp, Zea mays
ggtttgaggacaggaatctttgaagcaagcaagcttgtattaattaatgtcgctccaacacttccagagattcaagtgcaatcaattgcatccttctgcagcacagtcttagggactgcagtccgtatcccttgtgaggttcttaagcagcgattgcaggctggaatattcgacaatgtaggggaggcgattgttggcaccatgcgacgagatggcccaaagggattttttcgtggcactggggccacactgt

SEQ ID NO: 4589 - DNA, 256 bp, Zea mays
cacacacagacaagtggtttccaaagccaagtgtgtgtactagcaaccagctagctcgggcggcagccggcagccatcatgtcggaggagaagcaccactttcaaccaccacaagaaggacgaggagcagcccgccggcgagtacgggtactccgagaccgaggtggtcaccgccaccggcgagggcgagtacgagaggtacaagaaggaggagaaggagcacaagcacaagcagcacctcggcgaggccggcgcc

SEQ ID NO: 4590 - DNA, 72 bp, Zea mays
gtcgccctgtgccatggtattggtcacatcactagcaatgtgtccttcgctgctgttgcagtctcatttgct

SEQ ID NO: 4591 - DNA, 256 bp, Zea mays
cgcgccgccgccgctgcagactcctccttttcgatcccttcacaaagcgccgccgtcgccccatcgaacatggctccgaagaaggataaggccccgcccccgtcgtcgaagcccgccaagtccggcggtggcaagcagaagaagaagaagtggagcaagggaaagctaaaggagaaggtgaacaacgcggtgctgttcgaccaggctacctacgacaagctgctctctgaggtgcccaagtacaagcagatcaccc

SEQ ID NO: 4592 - DNA, 253 bp, Zea mays
gccgtgcaaaggcactggaagatgcattcaacacgcttgagggattttcatgtaacaaggctgaaggagcaatgtaccttttccctcagatccatctgccacataaggcaattgaggctgctaaagctgccaagaaagcacctgatgcattctatgcgctccgtctccttgaatcaactggaattgttgtggttcctggatctggatttggccaagttcctggaacatggcacgtcagatgcacgatcctgcc

SEQ ID NO: 4593 - DNA, 252 bp, Zea mays
gccacgccaaatgccactttgtcgccatagacatattcaatgggaaaaagcttgaagatattgttccttcatcacacaactgtgacattccgcatgtgaaccgtactgagtatcagctgattgatatttctgaggatggatttgtgagccttcttacttcagatggcaacactaaggatgatcttagactcccaactgatgagactcttgtggcccagattaaggaagggttcgaacacgggaaggatcttg

SEQ ID NO: 4594 - DNA, 251 bp, Zea mays
gtgccgacaggcagctgtggttcgcgtccaagcagtccctctcctacctcgatggcacgtacgtacctgcgctcgttgcccgtcccgcgcgcacaaaccttctgctagcgacgatagaaatcctatgctcacctgcctcattgttgctgctgcatgcatgcatgcaggctgcccggcgactatggcttcgacccgctgggcctctcggacccggaggtcaccggggcttcatcgagcccaagtggctggcc

SEQ ID NO: 4595 - DNA, 252 bp, Zea mays
atctaccagcgactcagcgagcgagagcagcacacacgcagctagctaggagcagcagcagcggcggcggcgatggcggcctccatgatctcctcgtcagctctggcggtggcgcctcagggcctgccgcccctcggccgccgcgcctcctccttcgccgtcgtctgctccaagaagaagatcaagaccgacaagccctacgggattgggggtggcctgaccgtcgacgtcgacgccaacgggagaaagggc

SEQ ID NO: 4596 - DNA, 232 bp, Zea mays
aagaccaaccaatagcacttaagctactcggctcagaaagatcgtttcaagccctcgaaggtgtagctatggaactggaggactcgctgtatccactgctgagggaagtcagcattggcatagatccttacgtggtctttcaagatgtagattgggcccttcctattggcgctaagcccgaggtcccggcatggagcgagctgcggtagtggatatcaatgggcaaatcctt

SEQ ID NO: 4597 - DNA, 248 bp, Zea mays
gtggaagggggtctgcacttggttcttcagttctcacctcatggaagccttgcttctgttctacatggtacaaaggagcccctgaagtggaaagtcaggttcaaaattgcacttggaattgctgaagggctgctttatctacatgaaggctgccatcgccgcataattcacagagacatcaaggcatctaatatccttctaactgaagactaccaacctcagatatcagattttggggttgcaaagtg

SEQ ID NO: 4598 - DNA, 246 bp, Zea mays
ctcccacgctcaccgacgccacagcttgtgcgcgcgcaatggcactcgtgtccgcctcctcgtcctccaccaccgccgtcgcggcgctccccaggaatgggcagcagcgggcgtcgtcgtcgttgttctcctcctcctcctcttcctccttcctcgtcggcaagacgctgctgaggcaggccgaggcagcccggccgtcgttcgccgtgcgcgccgcggcggattccgacaggccgatctggttcc

SEQ ID NO: 4599 - DNA, 245 bp, Zea mays
cacagcagatgtatgcctcactccagaaaattacagctctacccgatgatacaaaagtatactgtgggcatgaatataccttgagtaatgcaaagtttgccttgagtgtagaaccgggaaataaagcattgcaggaatatgctgcaaatgcagctgagctgcgtaataagaatatacccacggtgccaacaacaattggaagggagaaggaatgcaatcctttcttgcggacctccaatccagaa

SEQ ID NO: 4600 - DNA, 245 bp, Zea mays
gcgcgaaacaatggggcacaaggaattggattatgccggacagagcacatgttctttgcttcagacgagaggattaaggctgtcaggcagatgattatggctcccacgcttgagctgaggcagcaggcgctcgaccgtctcttgccgtatcagaggtctgacttcgaaggcattttccgtgctatggatggactcccggtgaccatccgactcctggaccctcccctccacgagttccttccaga

SEQ ID NO: 4601 - DNA, 241 bp, Zea mays
cacgggcccagccttcgcgaatttgtccaggagtgctacgaggtctcagccgactacgagggcaaaggagacacgacgaagctgggcgagctcggcgccaagctcacggggctggcccccgccgacgccatcctcgtggcgagctccatcctgcacatgctcaacctcgccaacctggccgaggaggtgcagatcgcgcaccgccgccgcaacagcaatctcaagaaaggtgggttcgccg

SEQ ID NO: 4602 - DNA, 239 bp, Zea mays
cgcgctccccgtcctcgacgacctcatcgcggaggagaagaaccacgggtcgttcgacttcgtcttcgtggacgccgacaaggacaactacctcaactaccacgagcggctgctgaagctggtgaagctgggcggcctcatcggctacgacaacacgctgtggaacggctccgtcgtgctccccgacgacgcgcccatgcgcaagtacatccgcttctaccgcgacttcgtgctcgtcc

SEQ ID NO: 4603 - DNA, 236 bp, Zea mays
cctgtgcttccagactctgcagcgcttcacggccgccacgctggagcacggcatgcacccgccggtctctcccaagcccgagtggcgcaagtcatggacgagatggcggtcgtggccacggaggagtaccgctccgtcgtcgtcaaggagccgcgcttcgtcgagtacttcagatcggctacaccggagaccgagtacgggaggatgaacatcggcagccggccagccaagatgag

SEQ ID NO: 4604 - DNA, 238 bp, Zea mays
gcgtcttcccggagcttctcgcccgcaacggcgtcaagttcggcgaggccgtgtggttcaaggccggctcccagatcttcagcgagggcgggctggactacctcgggaacccgagcctcatccacgcgcagagcatccttgccatctgggcgtgccaggtcgtgctcatgggcgccgtcgagggctaccgcatcgccggcggcccgctcggcgaggtcgtcgacccggtctaccccgg

SEQ ID NO: 4605 - DNA, 266 bp, Zea mays
gcaagaagctgaaacttactgattttggacttgcacgtgaagaaactgtgactgaaatgatgactgctgaaactgggacttaccgatggatggccccagagctatacagcacagtcacacttcgacgtggtgagaaaaagcattacacaaataaagtggatgtgtatagctttggcattgttttgtgggaattattgaccaatagaatgccatttgaaggcatgtcgaatctacaagctgcatatgctgctgcttttcagcaaaag

SEQ ID NO: 4606 - DNA, 268 bp, Zea mays
gtccaagaagaccatcgccgactacggctctcccgaggagttcctctcccaggtcgactacctgctcggcaggcaggcctacggcggcaagaccgactccgagggcgggttcgagaccggcgccgtggccaccgccaacgtcctggagagctccacccccgtgatcgacggcaagcagtactacgccgtgtccgtgctcaccaggacggcggacggcgacgagggcggcaagcaccagctcatcgcggccaccgtctccgacggcaag

SEQ ID NO: 4607 - DNA, 252 bp, Zea mays
cagggcggtgacatagttagaggcgacggtaaagggagtgagtctatatatggaggcatcttcccagatgagaatttcactgtaaaacatacacatccaggggttgttgctatggcgaattctggacttgattctaatggatctcagttttacataactaatatcaagaccagctggtttgaatgggagcatgttgtctcggcaggtgatccagggatggatacgtgtacgcatagaaggggcgctgggact

SEQ ID NO: 4608 - DNA, 261 bp, Zea mays
catggatggtaaatcaaggtgctttggtttcatcaattttgagaatccagatgcagcttcccgtgctgttcaggaacttaatggtaagaagataaatgacaaagagtggtatgttggaagagctcagaagaagtcagaaagagagatggaactaaaaaggagatttgagcagatcttgaaagatgctgctgacaaatatcaaggactgaacttatatctcaagaacttggatgatagcattggagatgatcaacttcgtga

SEQ ID NO: 4609 - DNA, 258 bp, Zea mays
cttgggacttggagatttgggttgtcagggaatgggaattcctgtaggcaaacttgctctatacactgctctaggaggagttgacccatcagtttgcttgcctatcacaattgatgttggtacaaataacgagaaactgcttaatgatgagttctacattggactccggcaaaaacgtgcgactggcgaggagtatgatgagcttattgaagagttcatgtctgctgttaagcaattctatggtgagaaagtcctcat

SEQ ID NO: 4610 - DNA, 260 bp, Zea mays
gcttcccagagacccagccatggcgatctcccagatctcacgcatattcctggccatccttctcctggccgccgccttcgccgccgccccagctgcgcttgcggacggcgacgacgtggtggcccttaccgaatccacgttcgagaaggaggtcggaaaggaccgcggcgccctcgtcgagttctacgccccctggtgtggtcactgcaagaagcttgctcctgagtatgaaagacttggtgcaagttttaagaaagcta

SEQ ID NO: 4611 - DNA, 261 bp, Zea mays
cgacgagcgacgaagcgcgcagagaagagaagaacctcggagctgagatggcacaagccatggcgtcgatgaccggcctctcgcagggcgtcctgcccagcaggcgcgccgacagcagaaccaggacggccgtcgtcatcgtcagggcgtccgctgagggcgacgccgttgcgcaggcgggccgccgcgccgtgatcgggctggtggccactggcatcgtcagcggcgccttgtcgcaggcggcgcgcgccgagaccgtca

SEQ ID NO: 4612 - DNA, 260 bp, Zea mays
ctggtgatcaactgcctcgcgccattcgtcaagatcttggacgaggagttcggaatcgtgaaggggaccatgacgacgacgcactcgtacaccggcgaccagaggctgctggacgcgtcccaccgcgacctccggcgggcccgcgcggcggcgctgaacatcgtgccgacgagcacgggcgccgccaaggccgtggcgctggtgctgccgcagctcaaggggaagctgaacggcatcgcgctgcgggtgccgaccccgaa

SEQ ID NO: 4613 - DNA, 259 bp, Zea mays
catcgatctgcaagtctcgctacgtagcagtgcaatacaaaaaaagcagccgcaatggcgagcagcaccgtggccctctcctccacggccttcgccggcaaggccgtgaacgtgccgtcgtcgtccgccttcggcgaggcccgcgtgacgatgcgcaagacggcggcgaaggccaagcctgcggcggcgtccgggagcccgtggtacggccccgaccgcgtgctgtacctgggcccactgtccggcgagccaccgagct

SEQ ID NO: 4614 - DNA, 256 bp, Zea mays
cgggaagataacagaagagtcagatttcttgctgatggtacctggggtattcgtaaagtaatcggtgctgtcgcccatgatcttggagcacatgatccttggcatgaattgaatgcttacaacatacatgacacaagtagatggaaagatcttaatcccaagtttgtgcttcagatttacagggattttgctgcaacaggtgacaagtcatttggcaaggatgtctggcctgcagtctgtactgctatggaataca

SEQ ID NO: 4615 - DNA, 257 bp, Zea mays
ctccacctccccgtgctactacgacggccgctactggaccatgtggaagctgcccatgttcggctgcaacgacgccacccaggtgtacaaggagctgcaggaggccatcaaatcctacccggacgccttccaccgcgtcatcggcttcgacaacatcaagcagacgcagtgcgtcagcttcatcgcctacaagcccccgggcagcgactagaccgcgcccgccggccgccccccgccggctagctagctagctagct

SEQ ID NO: 4616 - DNA, 254 bp, Zea mays
gccggcatgcagaacactggctaggcggcttctcttcactcacctgcagagtgcaccgcaataatcagcttccggatggtggcgttttgtcagttttggatggaaatgccgaactggcagcgtctgttttccctatgcatatgtaatttcctgcctctttatattcactcttgttgtcaagtccaagtggaaaatcttggcatattatacatattgtaataataaacatcgtacaatctgcatgctgttttgta

SEQ ID NO: 4617 - DNA, 254 bp, Zea mays
ggtgatgacagctatttcctgaacaacgctccaatcattgctgttgatcgggctccaaatgttattgctatcaatgtaagcccaattgaatatggacatgtgcttctcattcctcgtgttctggaccgcctgcctcagaggattgatccagagagcttcttgcttgcactgcaaatggcagccgagggaggtagcccatacttcaggcttggttacaatagcttgggtgcgtttgccaccatcaatcacctcca

SEQ ID NO: 4618 - DNA, 254 bp, Zea mays
ggcctccctctcctctgccgccgtcaccgccccttccttcgccgcacccgcaccagcccgcgccgtggtcagaaggaggtccttcaccgtgcgcgcctctctccgcaaggccagctgcaccgccgccgtggcagtggctgccagcgccctgcttgccggcggtgccatggcccaggaggtgctgctgggcgcaggcgacggcgggctcgtcttcgagcccagccagttcaccgtcaaggccggcgacaccatca

SEQ ID NO: 4619 - DNA, 256 bp, Zea mays
ccataataatcatattgctgccttggctattactctgaagcaagtcgcaactcctgagtataaagcgtacattcaacaagtcaagaaaaatgctcaggctctggcatcagcgttgctcagaagaaaatgcagattggttactggtggcacagataatcacttaatactttgggatctcagaactcttggcttgactggtaagatctttgagaaggtctgtgaggcatgccacatatctatcaacaagacaccaatt

SEQ ID NO: 4620 - DNA, 253 bp, Zea mays
gcccggccggtctccgaggcgggcggagggaaccagagagcaaggcgaggagcgcggaagggctgacggaaggggcggcggggcatggctcgccggccggcgtcgtgggagcagggcggcgacgagtacgactatctcttcaaggtcgtgctcatcggcgactctggcgtggggaagtccaacctgctctcccgcttcaccaagaacaccttcgccctcgactccaagtccaccatcggcgttgagttcgcca

SEQ ID NO: 4621 - DNA, 250 bp, Zea mays
gaacctgaaacttgcggtgtcactggctggtacacctgagtgtgagtgagtgatcgaactagctgagctccgatcctcgctagctagctaggataccgccataccacaagtcttcttcacaagtttaggagtgacagcaacaagagatcgatggcctctgccaccgtgctcaagtcctccttccttcccaagaagtccgaatggggcgccaccaggcaggccgccgcgcccaggccgcccaccgtctcca

SEQ ID NO: 4622 - DNA, 251 bp, Zea mays
ctgacagaaatttttgaccgtggaatgtatgccggtcctgttggctggtttggaggagctgagtgcgagttcgctgtcgggattagatcagcgttacttggaaaaggtcacagcactctggtgtacgccggtgcggggatcgttgaaggtacaaacccatcttttgaatgggatgagcttgatctcaaagcatctcagtttgcaaagctgttgcggtaccaagaacgacctattcgctaccaagaggctga

SEQ ID NO: 4623 - DNA, 253 bp, Zea mays
  unsure (1)..(253): unsure at all n locations
atttactagggctggttgctatttttctgattcagaggaataggcatgctttaattggccgggccattgatgatcatgacatgcagcgagtccttgaatttcttaagtctgatcaggtcgtagatgctctttatgattgcaaaagcgaggtgattgggccaggattttttagattcaaggctgaaattgatttcaatggagttgttctggtacaaaattatttgganaggactggacgtgggacttgggcaaa

SEQ ID NO: 4624 - DNA, 259 bp, Zea mays
agaggattgccatctacgagtacatggaaagcggcaatctgcacaacctactgcacgacttgccactaggagttcaggcaaccgaagactggagtggcgacacatgggaggacaacaccggtggtgttgcaacaactgaaatcgtcacgccggaaggtactgcaacatggatattccggcacaaaatcgccctaggtgccgcaagggcgctggcattcctccaccatggctgtatcccgcagattgtccaccgggacgt

SEQ ID NO: 4625 - DNA, 261 bp, Zea mays
cataaaaccagtgcaagcagaagcagcgcaatggcgagcagcaccatggccctctcctccacagccttcgccggcaaggcagtgaacgtgccgtcgtctctcttcggcgaggcccgcgtgacgatgcgcaagacggcggcgaaggcaaagccggcggcgagctccggcagcccgtggtacggccccgaccgcgtgctctacctgggcccgctgtccggcgcgcccccgagctacctgacgggcgagttcccgggcgactac

SEQ ID NO: 4626 - DNA, 260 bp, Zea mays
gaccgcgtccccgacatggagaagcggaactgatgaacctcctcctcctcggcgccatctcgttgcccaccgtcggcatggtcgtcccctacggcgccttcttcgtccctgccggctccgggaacgccggcggcgggacctacgcgaaggacaagctgggcaacgacatcacggtggaggcgtggctcaacacgcacggtcccaacgaccgcacgctcgcgcaggggctcaagggtgaccccacgtacctggtggtggag

SEQ ID NO: 4627 - DNA, 264 bp, Zea mays
gggagagccccagggccaagaagtacaggagcatcaaccagatcactggcctcaggggcaccgccgtgaacgtgcagtgcatggtgttcggcaacatggggaacacttctggcaccggcgtgctcttcaccaggaaccccaacaccggagagaagaagctgtatggcgagttcctggtgaacgctcagggtgaggatgtggttgccggaataagaaccccagaggaccttgacgccatgaagaacctcatgccacaggcctacg

SEQ ID NO: 4628 - DNA, 263 bp, Zea mays
gtacgctctctgctagcacccatcttgcagcagcggacgcccgacccgatccgtgcgtgtgtgttggtagagatggctacagcagcttacgctcccatggcgagccaggtgatgaagagcagcccggtgcactcgaggccgaggggcctgtcaggcgctgcgctcacgcggccccggccccggttcagcgtcgtcaaggccgccatccagcccgagaaggcaacgtaccaggtggtgcagcccatcaacggcgacccgttcat

SEQ ID NO: 4629 - DNA, 253 bp, Zea mays
ctctcgtggaagaggataaactcgagctcgcaacttctcttattgagaaggcgaaggcaaagggggtttctcttttgcttcccactgatattgtagtagcggacaagtttgcagccgatgctgagagcaagattgtccctgccactgctatccctgatgactggatgggtcttgatgttggccctgatgccaccaaaacattcgacgaagcattggacaccaccaagactgttatttggaacggcccatggga

SEQ ID NO: 4630 - DNA, 255 bp, Zea mays
gtcttcacactcctcgccatcacataaaaccagtgcaagcagaagcagcgcaatggcgagcagcaccatggccctctcctccacagccttcgccggcaaggcagtgaacgtgccgtcgtctctcttcggcgaggcccgcgtgacgatgcgcaagacggcggcgaaggcaaagccggcggcgagctccggcagcccgtggtacggccccgaccgcgtgctctacctgggcccgctgtccggcgcgcccccgagcta

SEQ ID NO: 4631 - DNA, 253 bp, Zea mays
gggcgtacgcggacacagccccgatccgaatcgtcgtccttgcgagcctcgccgatcccccactcccctcccctcgctctcaagatgcacatccttgtgaagaccctcaccggcaagactatcaccctcgaggtggagtcttctgacaccattgacaatgtcaaggctaagatccaggacaaggagggcatccctcctgaccagcagcggcttatcttcgccggcaagcagcttgaggacggacgcacacttg

SEQ ID NO: 4632 - DNA, 249 bp, Zea mays
ggcttctcctccccctccggttcgggttcgggttcgtgaggttctccggggttcggtttcgtgggtgagcggatcgagatggcggcgtcggatgttgagtaccgctgcttcgtcggctgcctcgcctgggccacggacgaccactccctccacaacgccttcagcacctacggcgaggtcctcgagtccaagattatcctcgatcgggagacgcagaggtcccgcggcttcggcttcgtcaccttctcc

SEQ ID NO: 4633 - DNA, 250 bp, Zea mays
gctcggtgatgccgcggtctacgccggagcaaagttcagggcaccagtggagccctactaagaaaggaagaggatggggatgttttcttgtggagctatactagctcgctgctgccttttgttacaatgtttgtacggtcgcaataaatgtatggtcgtgtttgctcgagagctactcaggtgattttgtcgtgggagcaccaaaagcagaaaagaactgtttttttcttctctctctctagattctgac

SEQ ID NO: 4634 - DNA, 250 bp, Zea mays
gcccactcctccggctcttcttctccaccggcaccagtccaccacctcccacctcctgccaccgcgcggccccaaccaaccacaccgcagcgcagcaatggcgggcaacggcgccatcgtggagagcgacccgctgaactggggcgctgcggcggcggagctggccgggagccacctggacgaggtgaagcgcatggtggcgcaagcccggcagcccgtggtcaagatcgagggttccaccctccgcgtc

SEQ ID NO: 4635 - DNA, 254 bp, Zea mays
gtcatcgcttccaagcccaaggaggagaagcagagcctcaaggagctcaccggcaagctcttcagcaccatcgacgatcttgaccatgccgcaaagatcaagagcaccccggaggccgagaaatacttcgcagcaaccaaagatgcgctcggcgacgtcctcgccaagctagcctagatggaagctaatagatgggttaacgatggccacgtaatttcggacttgtgtttgttcatatggagccggcaaatgta

SEQ ID NO: 4636 - DNA, 252 bp, Zea mays
agctggtcttcgccaagatgggcatcacccccatcatgatgagcgccggcgagctggagagcggcaacgccggagagcccgccaagctcatcaggcagcgctaccgtgaggcctccgacctcatcaagaagggcaagatgtcctgcctcttcatcaacgacctcgacgccggcgcgggtcgcatgggcggcaccacccagtacacggtgaacaaccagatggtcaacgccaccctgatgaacatcgccgaca

SEQ ID NO: 4637 - DNA, 225 bp, Zea mays
ggtgggttggcttctcctccccctccggttcgggttcgggttcgtgaggttctccggggttcggtttcgtgggtgagcggatcgagatggcggcgtcggatgttgagtaccgctgcttcgtcggcggcctcgcctgggccacggacgaccactccctccacaacgccttcagcacctacggcgaggtcctcgagtccaagattatcctcgatcgggagaccagag

SEQ ID NO: 4638 - DNA, 247 bp, Zea mays
ccgtcgctcaccgggaagctacgctacgacgaagcatggcgtccgtcaccgcccgcgccccggtcgcagccctgcgcccgtcgtcgtcgtcggccttccttggccactctagccgcctcggccgcactgctaccgcgtcgccgacgaggcggagctcaaggcggaggccaagggcgagtggctcccgggccttccctcccccgcctacctcgacggcagcctgccgggtgacaatggcttcgacccg

SEQ ID NO: 4639 - DNA, 244 bp, Zea mays
aagcaagctagctcgatctactactactactactagctggtacacatactagccatcctgccagccagccagcttgccatggcgcccaccgtgatgatggcctcgtcggcaaccgccgtcgccccgttccagggtctcaagtccgccgccagcctccccgtcgcccgccgcagcaccaggagcctcggcaacgtcagcaacggcggaaggatccggtgcatgcaggtgtggccggcctacggca

SEQ ID NO: 4640 - DNA, 242 bp, Zea mays
gcacgcccgctgaggcgagccatcatgaggctgctggaggacagccttgctgagaagatgctcgcgggggaggtaaaggagggcgactctgccatagtagatgtggactcggaggggaaggttgttgtgctcaatggtcagggcggcataccggagctctcaactccggcgatcaccgtttagctcgtacataacaaatgacaaaattaatagcatagtttttgttcaaacacattatcatt

SEQ ID NO: 4641 - DNA, 242 bp, Zea mays
attggagaggttctccgacctcttgataatgaacgctttattgtgaaggccagcagtggtccccgatatgtggtcggttgccgaagtaaagtagacaaggagaagttgacatctggaactcgtgttgtacttgacatgacgaccttgacaataatgcgcactcttccacgggaggtggatccagtggtatataacatgcttcatgaagatccaggaaatgtcagttactctgctgtaggcgg

SEQ ID NO: 4642 - DNA, 246 bp, Zea mays
cgaccccatcatccagacgctgctccccatgtcgcccaagggcgagatctgcgacgtcaacggcgtctgcgtggacgccaccgaggacgagctcttccgcctcaccaccaaggaggggaagctcaccgtgcgagcgcgagaaggtgaagatcgagacgcagcccttctcccccgtggtgcagttcgcgcaggaccccgtgcagatcctggacgcgctgctcccgctctacctcaacagccagatcc

SEQ ID NO: 4643 - DNA, 245 bp, Zea mays
gccatggcgtcgtccatgctctccgctaccaccgtgccactccagcaggggggcggcctgtccgagttctccgggctcaggagctccgcgtcgctgcccatgcgccggaatgccacctccgacgacttcatgtccgccgtctccttcaggacccacgcggtcggcacgagcggcgggtcgcggcgggcgccgacggaggcgaactgaaggtggccatcaacgggttcggccgcatcgggcgcaac

SEQ ID NO: 4644 - DNA, 244 bp, Zea mays
ccatgttgctgctacagtgagcatgtctaaggtggcagtgtcattcacacacataattaaaagcgcagaacctgcattcagtgttttggtgtcaaggttcttccttggggagacgtttccaattccagtatatctttctcttcttccaatcattggtggttgtgctctagctgctgtcacagagctgaactttaatatggttggatttatgggtgccatgatatccaaccttgcatttgttttc

SEQ ID NO: 4645 - DNA, 250 bp, Zea mays
gccgctctccccagccccactctctccatctagagctccctaactgcaccggccgccacaccaccgtaccccgacccctcgacaacaatggccaccgtcctaggcagcccccgcgcgccggccttcttcttctcgccgtcctccctccgtgccgcgccggcgcccaccgccgtggcgctgcctgcggccaaggtgggcatcatgggccgtagcgccagcagcaggggcaggctgcgcgcgcaggccacct

SEQ ID NO: 4646 - DNA, 284 bp, Zea mays
caagagtggcctcaatggcattcaggttgaactccaggccacagatgcgagtgaaatcagcctcgatgagatcaaggatcgggcacgctaggcgcaccgccatcgcgagtttcatggtcacgcatcatggactcgcctactactgtggatttgtacgccattatagacttggtgctgcgaaagactgctttggtgatttgtgggtttgttgctgtgtaaaaagatcctcatggcttccagaagaccatgaaggtttggatctatcatgtaattccttgttatct

SEQ ID NO: 4647 - DNA, 284 bp, Zea mays
cgacgaaataataaagcgcgcgcgcgcacgcggagaggctcggagactgagtgagatggcacaagccatggcgtccatgaccggcctctcgctaggcgttctgcccagcaggcgcgccgccaacagggccaggtcggccgccgtcgtcagggcgtccgccgaggcgcaggcgcaggcgcaggcgggccgccgcgccgtgctcgggctggtggccactggcatcgtcggcggcgccttgtcggaggcggtgcacgccgagaccgtcaagaccatcaagatcggcg

SEQ ID NO: 4648 - DNA, 277 bp, Zea mays
ggatttacactaccaacaaagttttgcttcgggtggcacagaggtaaaagtatggtttggaaaggttgaagatctgccagtttacttcttggaaccacaaaatggcatgttttgggttggatgtgtctatgggaagaatgatgagagtagatttggcttcttctgtcattctgctctggagtttctgctccaaaaaggatcttctcctgatatcatacattgtcatgactggtcaagtgctcccgttgcttggctatacaaggaacagtatgctctt

SEQ ID NO: 4649 - DNA, 277 bp, Zea mays
caaggatgccagcccacccccgagctctacaccgccttgatcggggcctactgccgaagcggcctactggacgaggcactccagctcctcaacgacatgaagagctcccctttatgccagcctgacgtctacacctacagcaccatcatcaaggcctgcattgacgctgccaggttcgacctcaccgacgccatgtacaaagacatggcggagcgctccatatcacccaacacggtcacacagaacatcgtcctcagcggctacgggaaggccgggc

SEQ ID NO: 4650 - DNA, 247 bp, Zea mays
gacgagcgacgaagcgcgcagaaagagaagaacctcggagctgagatggcacaagccatggcgtcgatgaccggcctctcgcagggcgtcctgcccagcaagcgcgccgacagcagaaccaggacggccgtcgtcatcgtcaaggcgtccgccgaaggcgaacgcgttgcgcaagccggccggcgcgccgtgatcgggcttgtgggcactggcatcgtcggccgcggcttgtcgcaagcggcgcgcg

SEQ ID NO: 4651 - DNA, 262 bp, Zea mays
gcaggcggacgcccgacccgatccgtgcgtgtgtgttggtagagatggctacagcagcttacgctcccatggcgagccaggtgatgaagagcagcccggtgcactcgaggccgaggggcctgtcaggcgctgcgctcacgcggccccggccccggttcagcgtcgtcaaggccggcatccagcccgagaaggcaacgtaccaggtggtgcaagccatcaacggcgaaccgttcatcggcagccttgagacgccgttaacttc

SEQ ID NO: 4652 - DNA, 274 bp, Zea mays
acggaaagcatgccacttcatattgtcgaagcagctcagtactggtggatggggagaaagccatatcgctattgaaactcaggtgtatgtaaatctcaaaggtgaccgtgctcacgctgtgaataccgcctgggcaatgctcgctttaatttatgctggacagtttgaacgagatccaacgccattacatcgtgctgcaaaggaattgatcaacatgcaactggagacaggagagtttcctcagcaagagcatgtaggatgcttcaactgcagc

SEQ ID NO: 4653 - DNA, 273 bp, Zea mays
cacaccaacaccaactcgaccggtctgctagtgttggagagaagagaatacactacagtactacatggcgaagagcagcagcagggcatggcggcagtggcgctggtagtgctggtggtgctggcggcgacggcggccgagacggcgtcggcggcttcgtgcaacgccgggcagctggcggcttgctcgccggcgatcactgccggcgcgacgccctccgcgtcgtgctgctccaacctcaaggcgcagcaggggtgcttctgccagttcgtg

SEQ ID NO: 4654 - DNA, 273 bp, Zea mays
caacgccacagcttgcgcccgcaatggcactcgtctccgcctcctcgtcctccaccaccgccgtcacggcgctccccaggaatgggcagcgggcgtcgtcctccttcctcggcggcaagacgctgctgagacaggccgaggcggcccggccgtcgttcgccgtgcgcgccgcggcggaccccaacaggccgatctggttccccggcagcacccctccgccgtggctcgacggcagccttcccggcgacttcggctttgatccctggggcctcg

SEQ ID NO: 4655 - DNA, 272 bp, Zea mays
ggcgtcgtccatgctctccgctaccaccgtgccactccagcaggggggcggcctgtccgagttctccgggctcaggagctccgcgtcgctgcccatgcgccggaatgccacctccgacgacttcatgtccgccgtctccttcaggacccacgcggtcggcacgagcggcgggtcgcggcgggcgccgacggaggcgaacttgaaggtggccatcaacgggttcggccgcatcgggcgcaacttcctgcggtgctggcacgggcgcggcgacg

SEQ ID NO: 4656 - DNA, 271 bp, Zea mays
cgaggataagcttgagttcagcaagatcttggaggctattaaggcgaacttcaacgacaagttcgatgaggtcaggaagaagtggggaggtggcatcatgggatccaagtcgcaggccaagaccaaggcccgggaaaagctgctcgccaaggaggctgcgcacgtgatgacctagattgtctactgctgtgtctgccctgtagtttgacggggaagaactgatgaactcgtattgtggttttccgaatctagtttcatatgtttctgtcca

SEQ ID NO: 4657 - DNA, 210 bp, Zea mays
cggctccctctccccttggtccatatgatcgtgcaacccatcgagctacgcgcgtggactggctttcctgggtcggcgcaagaagggatcggaaagatggcggcatcggtttccagggccatctgcgttcagaagccgggctcaaaatgcaccagggacagggaagcgacctccttcgcccgccgatcggtcgcagcgccgaggcccccg

SEQ ID NO: 4658 - DNA, 270 bp, Zea mays
ggctgctgttgacaatagggtgctaaaggcagatgtcgaaaccttaagagcaaaggtacactgctttgcctgtgctgtgtgagccctgcatctgttgaattaggcactttgggttgtttcaactgctagcactaggtgaatcaactcccacccctagatttcagagataatccatggccttccatacgtaactgggtgttcttggccattctgatggaacgtgggaatgcatcatgttttcaggtgaagatggcagaggactcagtgaag

SEQ ID NO: 4659 - DNA, 271 bp, Zea mays
agcgactcagcgagcgagagcagcacacactgcacgcagctagctaggagcagcagcagcggcggcgatggcggcctccatgatctcctcgtcagctctggcggtggcgcctcagggcctgccgcccctcggccgccgcgcctcctccttcgccgtcgtctgctccaagaagaagatcaagaccgacaagccctacgggattgggggtggcctgaccgtcgacgtcgacgccaacgggagaaagggcaagggcaagggcgtgtaccagttc

SEQ ID NO: 4660 - DNA, 269 bp, Zea mays
gaaggacccggagcacgcgcaggtcacaagatcgaggagggcgtggcggcggtggctgccctgggcagcggcggcttcgcgttccacgagcaccacgacaagaaggaggccaaagacgcggcggaggacgccggggaggaggaggagtccggccgccgcggcgaggggaagaagaagcaccacttcttcggctgatcgggctgctgctcgatcgatctacttgcgtacgtaggctgctccccaggaccagaaggagcatgcatggaggg

SEQ ID NO: 4661 - DNA, 267 bp, Zea mays
gcttgcgctcctgaagcgcgccatgaggttcgtgatcgaaaaccttgaccccagcgaccggctctccgtcgtcgccttctcctcgtcggcctggaggctgttcccgctccagaggatgaccgcctccggacagcagcagtcgctgcaggctgtcaactccctcgccgccgatggcggcaccaacatcgccgaggggctgcggaaggctgccagggtggtggaggacaggcaggccaggaacccggtgtgcagcatcatgctcctctc

SEQ ID NO: 4662 - DNA, 266 bp, Zea mays
gacgggccgccgccgggcggtttcgcgcccgtgcgctacgccgccggattcccacctcgggccccagcgccactgccatcttcctcacggccttcggcgccttcgcgtatggcatgtaccaggtcggtcaggggaacaaggtgcgccgggcactcaaagaagagaaaattgctgctcgtagtgctatactaccgatgctccaagctgaagaggatgaaagatttgtcaaagagtggaagaagtatcttgatgaggaggcgaggatt

SEQ ID NO: 4663 - DNA, 267 bp, Zea mays
agcgcacacacacacaaccagatctcccccaaatccacccgtcggcacctccgcttcaagatgcagatctttgtgaaaaccctgactggcaagactatcaccctcgaggtggagtcgtctgacaccattgacaacgttaaggccaagatccaggacaaggagggcatccccccagaccagcagcggctcatctttgctggcaaacagcttgaggacgggcgcacgcttgctgactacaacatccagaaggagagcaccctccacctt

SEQ ID NO: 4664 - DNA, 279 bp, Zea mays
gcccgtgtcgtgtagtgtgtagtcgcagcagctagcgcccggccggccagtcgagtgagtccatcctccatcgccatccaatggccgccaccgccctgagcatgagcatcctccgcgcgccgccgccctgcttctcgtccccactcaggctcagggtcgcggttgccaagccgctggcggcccccatgcggcgccagctgctgcgcgcgcaggccacctacaacgtgaagctgatcacgccggatggggaagtggagctgcaggtgcccgacgacgtct

SEQ ID NO: 4665 - DNA, 277 bp, Zea mays
gctagcgcttatagcttgtcagccatggccaccgccgccgcgtctagcctcctcaagtcctccttcgcgggctcccggctcccggccgccacgcggaccacaccggcgtccctcgtggtggccaccggcccgcgcggcgccggcgcggggcccatctgcgcgtccatgtccatgtcctcctccaacccgccctacgacctgacgtccttccggttcagccccatcaaggagtccatcgtgtcccgcgagatgacccgtcgctacatgacggacatga

SEQ ID NO: 4666 - DNA, 275 bp, Zea mays
gccacaatggtttccctgtgcttgatgagccacccataacggaaaccccggaactggttgggcttgtgactaggtctcatttattagttttgctgaacagcaagaatttcatgaagggacgggttaaaactagtggtagcttcgttctgcgaagatttggtgcatttgactttgcgaaaccaggttcaggtaaaggtttgaaaattgaggacctggatttcactgatgaggagatggacatgtatgtggatctccacccgatcacaaatacatca

SEQ ID NO: 4667 - DNA, 279 bp, Zea mays
gtcgagggcttccgcatcaacggcctcgacggcgtcggcgagggcaacaacctctaccccggcggccagtacttcgacccgctgggcctcgccgacgaccccgtcaccttcgccgagctcaaggtcaaggagatcaagaacggccgcctcgccatgttctccatgttcggcttcttcgtccaggccatcgtcaccggcaaggggcccctcgagaacctgctcgaccacctcgacgaccccgtcgccaacaacgcctgggtctacgccaccaagttcgca

SEQ ID NO: 4668 - DNA, 277 bp, Zea mays
cacaccaaggagagtacgtggaggagcagccatggcttcatcggtggccgccgcggcgagcacattcctgggcacccgcctggcggacccggcgccacagaacgggcgcatcgtggcccggttcgggttcgggttgggcggcaaggcgaagctgctccgaagaaggtggcgaagacatcgacctcctctgaccggccgctgtggttccccggcgccgtggcgcccgactacctggacggctcgctggtcggcgactacgggttcgacccgttcggtc

SEQ ID NO: 4669 - DNA, 277 bp, Zea mays
ggcctccgccatggagctctcgctcctcaaccccgccgcgacgcaccgccaccgcggcggcctcgccggcctgcccctcgcgctgcgctccgtggtccgcttccgcgtgtccgcctccgccgcggccaccgcgccgcccaagtcctcgggccccaagaagcggggcaagacggagatccaggagacgctgttcacgccccggttctacaccacggacttcgacgagatggagcgcctcttcaacgccgagatcaacaagcagctcaaccaggcggag

SEQ ID NO: 4670 - DNA, 280 bp, Zea mays
ggagtttcctacaaatacttcggtgctgcattggggaaggggagacaggctgcaaagactgagatagaaaagttgaaactttcggagcttacctgccgggaaggcattgttgaagttgcaaagataatttatggagtgcatgacgaagcgaaggacaaagcttttgagttggagttgagctggatctgtgatgaatcgaaccgtcagcatcagaaggttccaaatgaactgttggagcaggccaaagctgctgctcaggcagctcttgaggagatggatg

SEQ ID NO: 4671 - DNA, 278 bp, Zea mays
gccatggcctccctctcctctgccgccgtcaccgccccttccttcgccgcaccagcgccagcccgcgccgtggtcagaaggaggtccttcaccgtgcgcgcctctctccgcaaggccaccggcaccgccgccgtggcaatggctgccagcgccctgcttgccggcggtgccatggcccaggaggtgctgctgggcgcaggcgacggcgggctcgtcttcgagcccagccagttcaccgtcaaggccggcgacaccatcacattcaagaacaacgccgg

SEQ ID NO: 4672 - DNA, 275 bp, Zea mays
ctgcaagtctcgctacgtagcagtgcaataaaaaaagcagccgcaatggcgagcagcaccatggccctctcctccacggccttcgccggcaaggccgtgaacgtgccgtcgtcgtccgccttcggcgaggcccgcgtgacgatgcgcaagacggcggcgaaggccaagccagcggcggcgtccggtgacccgtggtacggccccgaccgcgtgctgtacctgggcccactgtccggcgagccgccgagctacctgacgggcgagttctcgggcga

SEQ ID NO: 4673 - DNA, 272 bp, Zea mays
acgtcgtggtcgacgagtcgtgctggagcgacctcgagttctgcgagaaaaccaggaactggtactgctacggcaaggcggtggcggacaggcggcgtgggagacggcccggcggcggggcgtggacctggtggtggtgaaccccgtgctggtggtgggccccctgctgcaggcgacggtgaacgccagcatcgcgcacatcctcaagtacctggacggctcggcccgcaccttcgccaacgccgtgcaggcgtacgtggacgtgcgcgacg

SEQ ID NO: 4674 - DNA, 272 bp, Zea mays
accgcattgccggcgggccgctcggcgaggtcgtcgacccgctgtaccctggcggcagcttcgaccccctcggcctggccgacgaccccgaggccttcgccgagctcaaggtgaaggagctcaagaacggccgcctcgccatgttttccatgttcggcttcttcgtccaggccatcgtcaccggcaagggcccgctcgagaacctcgctgaccacatcgctgacccagtcaacaacaacgcatgggcctacgccaccaacttcgtccccggc

SEQ ID NO: 4675 - DNA, 275 bp, Zea mays
cggatgagtacaaggagagcgtcctccctgccgccgtcacagcgaggatcagcatcgaggccgggtccactctcggctggcagaagtacgtcggagcccagggcaaggccattggcatcgacaagttcggcgcgagtgctcctgccgggacgatctacaaggagtacggcatcaccgtggagagcatcattgcagctgccaagagcttttaagagctaacaacggtctggagttttttttattgtcgtcgttgatgccaaaggaacactgtacct

SEQ ID NO: 4676 - DNA, 267 bp, Zea mays
gctggtggtggttacgggtccttcggcgcggcggtggcgctgttcaaccgcggcgagtaccacgcgtgccacgacgtggtggaggagctgtggtacagcgccgaggaccccgcccggacgctcctccacggcctcctccagtgcgccgtcggcttccaccacctcttcaaccagaaccaccgcggcgcgatgatggagctcggcgagggcctctgcaagctccgtaagctgcagctagacggcgacggcgacaacgacgggggcggc

SEQ ID NO: 4677 - DNA, 268 bp, Zea mays
tggaccgaggacatgcgcgacgacgcgctggaacctgccgacctcttcagccgccacctcacggtcgtcgacgtcggcggcggcacggggttcaccacgctcggcatcgtcaagcacgtcaacccggagaacgtcacgctgctcgaccagtccccgcaccagctcgacaaggcccggcagaaggaggccctcaagggggtcaccatcatggagggcgacgccgaggacctcccgttccccaccgactccttcgaccgatacatctccg

SEQ ID NO: 4678 - DNA, 269 bp, Zea mays
cgaccgtcgctcaccgggaagctacgctacgacgaagcatggcgtccgtcaccgcccgcgccccggtcgcagccctgcgcccgtcgtcgtcgtcggccttccttggccactctagccgcctcggccgcactgctaccgcgtcgccgacgaggcggagcctcaaggcggaggccaagggcgagtggctcccgggccttccctcccccgcctacctcgacggcagcctgccgggtgacaatggcttcgacccgttgggcctggcggaggac

SEQ ID NO: 4679 - DNA, 266 bp, Zea mays
cgacaatgagtttgaggcaaggtggaagaactggattgatagatttagccttcaggataatgaatggatcacctttctgtatgagaatcggcacttgtgggcccctgccttccttagggacactttctcagctgggctctgtactgttagccagcgtgaaagtccaagtacattttttgaggatgcagtcagttcagagaccacattggtgacgttccttgccagctacatgacacttttggataacaaatacaaaatggagcaac

SEQ ID NO: 4680 - DNA, 264 bp, Zea mays
gcgaacttccaataacactagccgtgtatccaagctcacaaccctcaaggccaagcaagctaatactctgtactggtctcctgctgggcgcttcatagttcttgctggactgaagggtttcaacgggcagctggaattctacaatgttgatgaactagagacaatggcaacaggagagcattttatggcaacagatatcatgtgggatccaactgggagatatctcgcgactgcagttacctcagttcatgaaatggagaatgg

SEQ ID NO: 4681 - DNA, 267 bp, Zea mays
atccgcgttaccccctctcccttggtttcctctcccaccaccaacccccatcccggttatctccgccgccgcccgctttgggaaggcgcgacgaaggcaggcgagaggctccagccggacgaggaggaaagaggagcagcagggccggaggagagatgttcctgtgggactggttctacggggtgctggcctccctcggcctgtggcagaaggaggcgaagatcctcttcctcggcctcgacaacgccggcaagaccacgctgctcc

SEQ ID NO: 4682 - DNA, 266 bp, Zea mays
ggcggcgaaggccaagcctgcggcggcgtccgggagcccgtggtacggccccgaccgcgtgctgtacctgggcccactgtccggcgagccaccgagctacctgacgggcgagttcccgggcgactacggctgggacaccgcggggctgtcggcggacccggagacgttcgccaagaaccgggagctggaggtgatccactcccgctgggccatgctgggcgcgctcggctgcgtcttccccgagctgctcgcccgcaacggcgtca

SEQ ID NO: 4683 - DNA, 267 bp, Zea mays
gaagaagaggctcgtcgcttaccatgaggctggccatgcccttgtcggcgccctcatgccagagtatgatccagtagccaagatttccatcatccctcgtggccaggctggtggactcacattctttgctccaagcgaagaaaggctagaatctggattgtacagcaggagctatcttgagaaccaaatggctgtagcccttggtggcagggttgctgaggaggtgatctttggccaagacaacgtgacaacaggagcttccaacga

SEQ ID NO: 4684 - DNA, 269 bp, Zea mays
gacaccagcaacccccaacagcgccactgtccagtgcgcgcgtcaagcttgcttagctagccgccatggcctccctcgccgccgtctccgtgaagcccgtggccatcaagggtctcgccggcagctctatctccggaaggaagctcgccgtcgccaggccgtcggcccgctccatccgcaggccccgcgcagcgccgtggtggccaagtacggcgacaagagcgtctacttcgacctcgacgacatcggcaacaccaccggacagtggg

SEQ ID NO: 4685 - DNA, 271 bp, Zea mays
cctacctctccagcatcctcccgtctccgtcgtctcgtctccgctcctcacctcgccagccatgggcaagatcaagatcggaatcaacggtttcggaaggatcggcaggctcgtggccagggtcgccctgcagagcgaggatgtcgagctcgtcgccgtcaacgaccccttcatcaccacggattacatgacgtacatgttcaagtacgacaccgtgcacggccaatggaagcacagcgacatcgccctcaaggactccaagacgcttctc

SEQ ID NO: 4686 - DNA, 271 bp, Zea mays
tcctactgcaaaagatcttgcttctcgtgatgttgtttcaagatcaatgacaatggaaattagagaaggacgtggtgtagggccattgaaggatcacatttatttgcatctgaaccatctgccacctgaggttctcaaggaaaggcttcctggtatttctgaaactgctgctatttttgctggtgttgatgtcaccaaggagcccattccagttttgcctactgtgcactacaatatgggcggtattccaacaaactaccatggggaggta

SEQ ID NO: 4687 - DNA, 258 bp, Zea mays
gacatcggcgacctcctcggcaagacgctgctgctcgagctcgtcagctccgagctcgacgcaaagtcgggcgtggagaagacgcgggtgacggcgtacgcgcacaagacgctgcgggagggccactacgaggcggagttcaaggtgccggcgtcgttcgggccggtgggcgcggtgctggtggagaacgagcaccacaaggaggtcttcatcaaggagatcaagctcgtcaccggcggcgacacagcaccgccgtca

SEQ ID NO: 4688 - DNA, 264 bp, Zea mays
gccgcaagaaggtttggctggtggactcaaagggtttgattgttgactctcgtaaaggctctcttcagccattcaagaaaccttgggcgcatgagcacgagcccttgaaaaccttgtatgatgctgttcagtccatcaaacctacagttctgatcgggacatctggagttggaagaacattcacaaaagaaatcattgaggccatgtcttccttcaacgagaggcctatcatcttttcactgtcaaacccaacctcgcattctg

SEQ ID NO: 4689 - DNA, 260 bp, Zea mays
cataatgggaactcagaccctcgtggttttggtcatataggagtatctgtggatgatgtccacaaggcatgtgaacgctttgaacgtcttggggttgagtttgtgaagaaacctgatgatggaaaaatcaaaggcatcgctttcatcaaagatcctgatggttactggatcgaaatatttgaccagacgattgggacggtaacttcttcagcatcatgatgaacagtagtggttccttatatggtgcgcaagatcataca

SEQ ID NO: 4690 - DNA, 265 bp, Zea mays
cacgcatactgcatacacaacacagagcatcagaaggagctacgatctgatcgacatggctgccgccaccatggctatcacctcccgcgcgctcgtcggcaagccggcggctggcacgagggacgtcttcggcgagggccgcatcaccatgcgcaagaccgccgccaagcccaagccggcggcgtccggcagcccatggtacggtgccgaccgcgtcctgtacctgggcccgctgtccggctcgcccccgagctacctgaccggc

SEQ ID NO: 4691 - DNA, 263 bp, Zea mays
ctcattgctggtcatgagacttcagcagctgtcttgacatggacattttatcttctatctaagtatccaaaagtaatggccaagctccaagatgaggctgatagtgttctaggtgatggtttgccaacaattgaggatgtgaagaaactaaagtacacgactcgggttattaatgaatcattgagactatatccacagccgccggttttaattcgtaggtcacttgaggacgatatcctgggagggtaccaattggccgagga

SEQ ID NO: 4692 - DNA, 160 bp, Zea mays
ggcctccctctcctctgccgccgtcaccgccccttccttcgccgcaccaggccacccgcgccgtggtcagaaggaggtccttcaccgtgcgcgcctctctccgcaaggccaccggcaccgccgccgtggcaatggctgccagcgccctgcttgccggcgg

SEQ ID NO: 4693 - DNA, 271 bp, Zea mays
ctcgcattcggcggcacatggtggcgcgccttgctccacgttctcggcatatgctatggcccacaaggggaaggcgacgtccgacgtcacctacaacccgaatgacgggcccgaggcgtacaccaaccccgccgtccacaaccgcctcagtgagtacaccgccatggccaaggaggtccacgggccagattacgatccgaggaccgaggacatcgacggagatgtcctcatgagggtcggaggaggcaagaggcatgggcggtactggatt

SEQ ID NO: 4694 - DNA, 169 bp, Zea mays
cgatcctagcctcgctcagcactttccaacagatgtggatatcgaaggaggagtacgacgagtctggcccggcaattgttcaccggaagtgcttctagggtttcacaagttcctcgtcgttacctagtctcaaattatgtcccctccatttctcgagatatgtgtggca

SEQ ID NO: 4695 - DNA, 255 bp, Zea mays
caagtttggtgtagttagacagtttgttggccatggggttggcaaagtttttcatgctgagcctgttgtgcttcatttcagaaacaatgaatggggacgtatgatgttgaatcaaacatttactatagagcccatgctaaccatagggagcatcaaccctgtcatgtggtccgatgactggaccgcagtgacagaagacggcagcttgtcagcacagtttgagcacacgatacttattaccgaagatggccctga

SEQ ID NO: 4696 - DNA, 258 bp, Zea mays
gcttcgtgtaccgcgagaactccacctccccgtgctactacgacggccgctactggaccatgtggaagctgcccatgttcggctgcaacgacgccacccaggtgtacaaggagctgcaggaggccatcaaatcctacccggacgccttccaccgcgtcatcggcttcgacaacatcaagcagacgcagtgcgtcagcttcatcgcctacaagcccccgggcagcgactagaccgcgcccgccggccgccccccgccgg

SEQ ID NO: 4697 - DNA, 259 bp, Zea mays
tcgatctgcaagtctcgctacgtagcagtgcaatacaaaaaaagcagccgcaatggcgagcagcaccatggccctctcctccacggccttcgccggcaaggccgtgaacgtgccgtcgtcgtccgccttcggcgaggcccgcgtgacgatgcgcaagacggcggcgaaggccaagcctgcggcggcgtccgggagcccgtggtacggccccgaccgcgtgctgtacctgggcccactgtccggcgagccaccgagctac

SEQ ID NO: 4698 - DNA, 161 bp, Zea mays
ctccatctagagctccctaactgcaccggccgccacaccaccgtaccccgacccctcgacaacaatggccaccgtcctaggcagcccccgcgcgccggccttcttcttctcgccgtcctccctccgtgccgcgccggcgcccaccgccgtggcgctgcctg

SEQ ID NO: 4699 - DNA, 262 bp, Zea mays
gttccccagtcttgctccctgcagtcctccctcctccatctccagcgttgtgttctgactcacctgcaccaatggctgttctttctgctgctggtgctcccccggcctcagctatcgggtttgagggctatgagaagcgccttgagatcacattctctgaggcacctgtctttgtggacccccatggcagcggtttgcgtgccctctccaggtcccagattgactctgttctggatcttgcacggtgcacgatcgtgtccga

SEQ ID NO: 4700 - DNA, 270 bp, Zea mays
gcagcagcacgagcagcacgccgtccgctccaaccgtctcgcttccctgcttagcttgccgccgcgccatggcgtcgaccaaggcacccggccctggcgagaagcaccactccatcgacgcgcactccgtcagctggtcccaggcaaggtctccgaggacgacaagctcatcgagtacgatgcgctgctcgtcgaccgcttcctcaacatcctccaggacctccacgggcccagccttcgcgaatttgtccagcagtgctacgaggtgtc

SEQ ID NO: 4701 - DNA, 270 bp, Zea mays
gctccacagttcgtctggttccaaagttaccaagtattacatagaattctggaagcaaattcctccaaacgagccctaccgggtgatactaggccatgtaagggacaagctgtacaacacacgcgagcgtgctcgccatctgctggcatctggagtttctgaaatttcagcggaatcgtcatttaccagtatcgaagagttccttgagccacttgagctgtgctacaaatcactgtgtgactgcggcgacaaggccatcgcggacgggag

SEQ ID NO: 4702 - DNA, 267 bp, Zea mays
gttcctgcacgtacgcacgcaccgggacaccagcaacccccaacagcgccactgtccagtgcgcgcgtcaagcttgcttagctagccgccatggcctccctcgccgccgtctccgtgaagcccgtggccatcaagggtctcgccggcagctctatctccggaaggaagctcgccgtcgccaggccgtcggcccgctccatccgcagccccgcgcaccgccgtggtggccaagtacggcgacaagagcgtctacttcgacctcgacga

SEQ ID NO: 4703 - DNA, 266 bp, Zea mays
ggggaacgccgcggacacgccggagcaatcatttttgctctcaagaacaagctggacattaccctcggagtagcgttggggtcggcgacccagatctccatgtttgtggtgccgctgagtgtcattgtagcttggatcgcgggtattcaaatggatcttgacttcaagctcatagagaccggctctctcttcgtctcagtaatagtgacagcattcaccctccaggatggttcgtcacactacctcaaggggatccttctgctgct

SEQ ID NO: 4704 - DNA, 265 bp, Zea mays
gtgaggtgatccttgggaagcagccgctttccccaccagcccttagtggcgatctgggaactttcatggcctgggtggatgatgttagaaagctcaaggtcctggctaacgccgatacccctgatgatgcattgactgcgcgaaacaatggggcacaaggaattggattatgccggacagagcacatgttctttgcttcagacgagaggattaaggctgtcaggcagatgattatggctcccacgcttgagctgaggcagcaggc

SEQ ID NO: 4705 - DNA, 266 bp, Zea mays
ccgggctcttgtagtcgatgatcttattgctaccggtggaacactatgtgcagctgtcaaacttattgaacgtgttggagcaaaggttgttgagtgtgcttgtgtcattgaattgccagaactgaagggccgagacaagcttggggacaggccagtttttgtccttgtggaagcagacgcctgagcggaacttgggacttctcagagagtttggcgccgtcgatgctccctctctggagacaacacagtttcccatgttaccatgt

SEQ ID NO: 4706 - DNA, 267 bp, Zea mays
cgaaacaatggggcacaaggaattggattatgccggacagagcacatgttctttgcttcagacgagaggattaaggctgtcaggcagatgattatggctcccacgcttgagctgaggcagcaggcgctcgaccgtctcttgccgtatcagaggtctgacttcgaaggcattttccgtgctatggatggactcccggtgaccatccgactcctggaccctctcctccacgagttccttcgagaagggaacatcgaggacattgtaagt

SEQ ID NO: 4707 - DNA, 269 bp, Zea mays
cgagaagttcctcgccggctccggcgacccgtcctaccccggcgggcccctcttcaacccgctcggcttcggcaagaccgagaaggagatgaatgagctcaagctcaaggagatcaagaacggcaggctcgccatgctcgccatcctcggttacttcatccaggggctcgtcaccggcgttggcccgttccagaacctgctcgaccacctcgccgaccccgtcaacaacaacgtgctcaccagcctcaagttccactagaacgttggtg

SEQ ID NO: 4708 - DNA, 265 bp, Zea mays
gttgccaaagaattccctcccctagccgccgccgccgctcgtctccctgagaggtgccgggaccgaggaactggccgagttctaggtagagaatcggttttgcttgtctcagcacggggtctgctgcgtctggtggtggtgaaggggagaaattcgtgagatctgttccggatcaggcgtgcgagctcgggaatcaggggtttcacacatagcttcgtcgatttgaatttgatgtactaatggagtctaagggtggcaaaaagtc

SEQ ID NO: 4709 - DNA, 262 bp, Zea mays
cacaccaaggagagtacgtggaggagcagccatggcttcatcggtggccgccgcggcgagcacattcctgggcacccgcctggcggacccggcgccacagaacgggcgcatcgtggcccggttcgggttcgggttgggcggcaaggcgaagctgctccgaagaaggtggcgaagacatcgacctcctctgaccggccgctgtggttccccggcgccgtggcgcacgactacctggacggctcgctggtcggcgactacgggt

SEQ ID NO: 4710 - DNA, 264 bp, Zea mays
ccgccatcgacgaactctacagcgacggcatcccgctgccgccgcagaccgggttcgacgccatccgcaccgtcgtcccgcgcatggtcaagctggtggaggacaccaccgaccacgtcctccgcttcgaggtgccggagatgatagagagggaccggttctcgtggttcaaggacgaggagttcgcgaggcagacgatcgcggggctcaacccgctgtgcatccagctgctgactgagttccccatcaagagcaagctggacc

SEQ ID NO: 4711 - DNA, 262 bp, Zea mays
gtgactcttatccgccaagttgctgagaaagtgttcgccaatgtgggcaagactatcgggtacaaagttggaacaatgattgagatccccagggcagctctggtggctgatgagatagcggacaggctgaattcttctccttcggaacgaacgacctgacgcagatgacctttgggtacagcagggatgatgtgggaaagttcattcccgtctatcttgctcagggcattctccaacatgaccccttcgaggtcctggacca

SEQ ID NO: 4712 - DNA, 263 bp, Zea mays
gcgggagttacaagacctgaaagaccggggttagatttaagcaagcagccacctgctgttcgattgaacaaagagcttggctccattttaacttttaagttgaagggagaggatttaattcgggaaagcggtattccgtacactattgtaaggccatgtgcattaactgaggaaccagctggagccgatctcatgtttgaccagggggacaacatcacaggaaagatatcaagggaagaagttgcccgtatttgtgtagcagc

SEQ ID NO: 4713 - DNA, 264 bp, Zea mays
cagaacggctctgccatgatcgacggctccgagagcttcgacggcgccaaggcgtacaaggacagcaagatctgcaacatgctcaccatgcaggagctgcaccggcggtaccacgaggagacgggcatcacgttcgcgtcgctctacccggggtgcatcgccaccacggggctgttccgcgagcacatcccgctgttccgcctgctcttcccgcctttccagaagttcgtcaccaagggcttcgtgtcggaggcggagtccggc

SEQ ID NO: 4714 - DNA, 262 bp, Zea mays
gcaccgcgccgctgctctgcgccggcgtcaccgtgtacagccccatgatgcgccacggcctcaacgagcccggcaagcacctcggcgtcgtcggcctcggcggcctcggccacgtcgccgtcaagttcggcaaggccttcgggatgaaggtcaccgtcatcagcacgtccgccagcaagcgccaggaggccatcgagaacctcggcgcggacgagttcctcatcagccgggacgaggaccagatgaaggcggcgacggggac

SEQ ID NO: 4715 - DNA, 260 bp, Zea mays
ctcgctacgtagcagtgcaatacaaaaaaagcagccgcaatggcgagcagcaccatggccctctcctccacggccttcgccggcaaggccgtgaacgtgccgtcgtcgtccgccttcggcgaggcccgcgtgacgatgcgcaagacggcggcgaaggccaagcctgcggcggcgtccgggagcccgtggtacggccccgaccgcgtgctgtacctgggcccactgtccggcgagccaccgagctacctgacgggcgagtt

SEQ ID NO: 4716 - DNA, 260 bp, Zea mays
cttgtatttcttgtgcctgcttaatgctgggctatccgccggtctcttgctctgatagcttgctccaggacgtacgtacgtacgtagatcgatccatcgatcgctagctagctgacgaccatggcgtccctctcctctgccgccatcaccgccccttccttcacggccgcgcccgctcgcgcagtggtcagcaggaggtccttcaccgtgcgtgcctctctccgcaaggccactgccaccgccgccgtggccgttgccgc

SEQ ID NO: 4717 - DNA, 263 bp, Zea mays
cacgcacgcatacacagcacagagtgaggtaagcatccgaaaaaagctgtgatctgatcgacatggccgccgccaccatggctctcacctcccgcgcgctcgtcggcaagccggcgaccagcaccagggacgtcttcggcgaggggcgcatcaccatgcgcaagactgctggcaagcccaagccagcggcgtccggcagcccctggtacggggccgaccgcgtcctgtacctgggcccgctgtccggccagcccccaagctac

SEQ ID NO: 4718 - DNA, 264 bp, Zea mays
cggctcgagggaagcgcgtcttcgtgcgtgccgacctcaacgtgccgctcgacgagaaccagaacatcaccgacgacacccgcatccgggccgccatccccaccatccagtacctcctcggcaagggcgccaaagtcatcctctcaagccacttgggtcgccctaagggttttacacccaagtttagcttagccccccttgttgcacggttgtctgagcttcttggcattcaggtgcaaaaagccgacgatgttattggccctg

SEQ ID NO: 4719 - DNA, 260 bp, Zea mays
catggttgttgctgacttaggctgctcatctgggcctaacacactacgcttcgtatccgaggtgattggcatcatagctcgccattgcaaagaacatggccgacaacatgaccacccacagcttcagttcttcctgaatgacctgcccggaaacgacttcaacaatctcttccagctgatccagcagttcaataagccgacggcaataaaccacaagagtgaggcagccgaggcactgcctcctccgtgctatatctctg

SEQ ID NO: 4720 - DNA, 258 bp, Zea mays
cactcctcgccatcacataaaaccagtgcaagcagaagcagcgcaatggcgagcagcaccatggccctctcctccacagccttcgccggcaaggcagtgaacgtgccgtcgtctcacttcggcgaggcccgcgtgacgatgcgcaagacggcggcgaaggcaaagccggcggcgagctccggcagcccgtggtacggccccgaccgcgtgctctacctgggcccgctgtccggcgcgcccccgagctacctgacgggc

SEQ ID NO: 4721 - DNA, 260 bp, Zea mays
ccaacatcgatctgcaagtctcgctacgtagcagtgcaatacaaaaaaagcagccgcaatggcgagcagcaccatggccctctcctccacggccttcgccggcaaggccgtgaacgtgccgtcgtcgtccgccttcggcgaggcccgcgtgacgatgcgcaagacggcggcgaaggccaagcctgcggcggcgtccgggagcccgtggtacggccccgaccgcgtgctgtacctgggcccactgtccggcgagccaccga

SEQ ID NO: 4722 - DNA, 260 bp, Zea mays
tgcacaggaaggatccgaccttctgggacggtgcagttcttgtggcgccaatgtgcaagatatcggagaaagtgaagccgcacccggtggtggtcaccctgctaactcaggtggaggagatcatccccaagtggaagatcgtccccaccaaggacgtcatcgactccgcattcaaggaccccgtcaagcgcgagaagatcaggaagaacacgctcatctaccaggacaagccccggctgaagacggcgctggagcttctc

SEQ ID NO: 4723 - DNA, 257 bp, Zea mays
cgcatttgcaggcagatctgagttagccggcggatccgatccgtgcgcctgctgtgtgtgtgtcggtggagatggccacagcttacgctcccatggcgagccaggtgatgaagagcagcctcgtcgtgcactcgaggccgaggggcctgtcaggcgctgctgcgctcacgaggcggccccggttcaccgtcaaggccatccagcccgagaaggcaacgtaccaggtggtgcagcccatcaacggcgaccccttcatc

SEQ ID NO: 4724 - DNA, 258 bp, Zea mays
aacctctcctggcacgagatcacgcttctcgttggatcgaacagctagggtttccaagatgttcgggcgcgcgccgaagaagagcgacaacacacggtactacgagatcctcggggtctccaaggacgcgtcccaggatgacctcaagaaagcctaccgcaaggccgccatcaagaaccaccccgacaagggcggcgatcccgagaagttcaaggagctagctcaggcttatgaggtcctcagtgatcctgaaaagcg

SEQ ID NO: 4725 - DNA, 258 bp, Zea mays
gttcgcggctccgttcaccaagagaggtctgctgctcaagttcctgctgctgggcggcggctcacttctggcctacgtcagcgcgtcggcgtcaccggacctcctgccgatcaagaagggacctcaggagccgccgcagccgggcccgcgcggcaagatctaagctcagctactccatttgcatggtctagtagtagcttgctttgtactgctagcgccggtcgatccgtcgcaatcgtcatggatcatctctctatc

SEQ ID NO: 4726 - DNA, 258 bp, Zea mays
gatttaccctacagttcattaggattattgtcatgccgcaaaccgatgatctatgaatgtggtgaatcttgcaactgttctacatattgccggaacagagtgacccaaaaagggcccaggctacattttgaggtcttcaggaccaccaatcgaggctggggtcttcgttgctgggaacctgttcgtgctggttcatttatatgtgagtatgctggtgaggtcattgatgaactcaaagttaatttgaatgacaccgaa

SEQ ID NO: 4727 - DNA, 258 bp, Zea mays
gcgggctggactacctcggcaacccgagcctggtccacgcgcagagcatcctggccatctgggcgtgccaggtggtgctcatgggcgccgtcgaggggtaccgcgtcgccggcggcccgctcggggaggtggtcgacccgctgtaccctggcggcagcttcgacccgctcgggctcgccgacgacccggaggcgttcgccgagctcaaggtgaaggagatcaagaacggccgcctcgccatgttctccatgttcggct

SEQ ID NO: 4728 - DNA, 261 bp, Zea mays
aaggagagtacgtggaggagcagccatggcttcatcggtggccgccgcggcgagcacattcctgggcacccgcctggcggacccggcgccacagaacgggcgcatcgtggcccggttcgggttcgggttgggcggcaaggcgaagctgctccgaagaaggtggcgaagacatcgacctcctctgaccggccgctgtggttccccggcgccgtggcgcccgactacctggacggctcgctggtcggcgactacgggttcgac

SEQ ID NO: 4729 - DNA, 257 bp, Zea mays
cgcatactgcatacacaacgcagagcatcagaagcagctgcgatctgatcgacatggctgccgccaccatggctatcacctcccgcgcgctcgtcggcaagccggcggctggcacgagggacgtcctcggcgagggccgcatcaccatgcgcaagaccgccgccaagcccaagccggcggcgtccggcagcccatggtacggtgccgaccgcgtcctgtacctgggcccgctgtccggctcgcccccgagctacctg

SEQ ID NO: 4730 - DNA, 255 bp, Zea mays
gatcgtactggaccaatctgccaccacactttgatcacacacaggaagttgagatcagaaaaatgcaggctgccgctactgccgccgggttctcggccgtgctgcccgccaagggcaggccggcggcgaggagcagggtggtggcccgtgtccccgccacaaggaggagcgtccgtgtagctgccgtcgtcgcgaccgaggccgcgcagatcgactacagctcaagcgtctcggtgttcccgatggaggcctgcg

SEQ ID NO: 4731 - DNA, 254 bp, Zea mays
agcgactcagcgagcgagagcagcacacacgcagctagctaggagcagcagcagcggcggcggcgatggcggcctccatgatctcctcgtcagctctggcggtggcgcctcagggcctgccgcccctcggccgccgcgcctcctccttcgccgtcgtctgctccaagaagaagatcaagaccgacaagccctacgggattgggggtggcctgaccgtcgacgtcgacgccaacgggagaaagggcaagggcaag

SEQ ID NO: 4732 - DNA, 253 bp, Zea mays
gggatgcgccgccgtgggtcaaggaggcgctcggctacaaccagcaggcgctcaccatgctcggcgtcggcaacgacatcggcgagaacgtcgccatgccttattggatgtgcaacagacacagctcgaaaagttcaagcagaaataatttcccagaaatataagaatattgagttctatgatgtcaaccgttttggccaatagttgatctcactggtcattcttttcaacctgtacttagatttttatttgt

SEQ ID NO: 4733 - DNA, 253 bp, Zea mays
cacgcatactgcatacacaacgcagagcatcagaagcagctgcgatctgatcgacatggctgccgccaccatggctatcacctcccgcgcgctcgtcggcaagccggcggctggcacgagggacgtcttcggcgagggccgcatcaccatgcgcaagaccgccgccaagcccaagccggcggcgtccggcagcccatggtacggtgccgaccgcgtcctgtacctgggcccgctgtccggctcgcccccgagc

SEQ ID NO: 4734 - DNA, 248 bp, Zea mays
aagcatttgctgatgctggagcagatgttctatttattgatgcccttgcttcagtagaagagatgaaagcattttgtgcggttgcaccagaagttccaaagatggcaaacatgttagaaggtggtggtaaaactcccatattgagccctgctgaacttgaggaaattggtttcaggcttgtagtatatcctttatccttagttggggtatcaatgcgtgcaatgcaggatgctctagttgcgataaaa

SEQ ID NO: 4735 - DNA, 253 bp, Zea mays
caagcttttgacattctctactgcataaccttcaagctgatggattagcaatggcttgacatgcatgctacttacatggacttcaacacggtcatgaagtctacacggcgtcactgagaaagggagctgttaattgaagatattcagaggattgaggacatgccatcatacaggcttctggcccggtagctagaagaaactgaaaccttagcatggctacatattgcaaggcggcttgagatgctaatggatc

SEQ ID NO: 4736 - DNA, 257 bp, Zea mays
ggcctccctctcctctgccgccgtcaccgccccttccttcgccgcacccgcaccagcccgcgccgtggtcagaaggaggtccttcaccgtgcgcgcctctctccgcaaggccaccggcaccgccgccgtggcaatggctgccagcgccctgcttgccggcggtgccatggcccaggaggtgctgctgggcgcaggcgacggcgggctcgtcttcgagcccagccagttcaccgtcaaggccggcgacaccatcacat

SEQ ID NO: 4737 - DNA, 255 bp, Zea mays
cactcctcgccatcacataaaaccagtgcaagcagaagcagcgcaatggcgagcagcaccatggccctctcctccacagccttcgccggcaaggcagtgaacgtgccgtcgtctctcttcggcgaggcccgcgtgacgatgcgcaagacggcggcgaaggcaaagccggcggcgagctccggcagcccgtggtacggccccgaccgcgtgctctacctgggcccgctgtccggcgcgcccccgagctacctgacg

SEQ ID NO: 4738 - DNA, 248 bp, Zea mays
gaaaggctcctatgtcgtcaccctttcaatgaatcaaagagagcgtacgttgttccacagcatgttgaggaattattgaagtgctactggcctggaaattcatcgaattcacgggaggagcttccatccatccatgagattaggactcggtgtattcaccatctggaccgaatgaggccagaccatatgaggcggctgaacccgacgccttacaaggtaagcgtgagtgctaagctgtatgacttcat

SEQ ID NO: 4739 - DNA, 247 bp, Zea mays
gacctcttctccttgcgccgccgccgctgctgccgccgccatgtcgaagcgcggtaggggagggacggcggggaacaagttccgcatgtcgctgggtctccccgtcgcagcgaccgtgaactgcgcggacaacacaggcgccaagaacctctacatcatctccgtcaagggcatcaaggttaggctcaaccgcctgccgtccgcctgcgtcggtgacatggtcatggccaccgtcaagaagggtaag

SEQ ID NO: 4740 - DNA, 248 bp, Zea mays
gcccgcgtagtcgatgacttgccgctggtcgggaacaaggcgccagacttcgaagccgaggctgtgttcgaccaggagttcatcaacgtgaagctctctgattacattgggaagaagtacgtcattctgttcttctaccccttggatttcaccttcgtctgcccgaccgagattactgcgtttagtgacagatacgaggaatttgagaagttgaacactgaggttcttggtgtttccattgacagtgt

SEQ ID NO: 4741 - DNA, 173 bp, Zea mays
cggaaggatggcggcgtcggtttccagggccatctgcgttcagaagccgggctcaaaatgcaccagggacagggaagcgacctccttcgcccgccgatcggtcgcagcgccgaggcccccgcacgccaaagccgccggcgtcatccgctccgactccggcgcgggacggggca

SEQ ID NO: 4742 - DNA, 247 bp, Zea mays
ccgaccacaccgttcctccgagcccaggagcagccccgcgccaggaggaagtttgttcttttaacaatatgtcgagggaggagaatgtttacatggccaagttggctgagcaggctgaaaggtatgaggagatggttgagtatatggagaaggtggctaagactgtagatgtggaagagctcactgttgaggagcgtaaccttctgtctgttgcatacaagaatgtgattggggctcgccgcgcttc

SEQ ID NO: 4743 - DNA, 284 bp, Zea mays
tggggtggatacgccggcgatcgtcgggatctgagggctactccggaccggctgaccgaggtgaaggtcacggcggacaacagcagctgcatccgctccatctccttcatctacatcggagccgatggcaagccgtacgaggaggggccatggggtttcggccatgctggcacggagtacaagattgatctgtgcaggttcgacgagagcttgacggagatctccgggaccacgggcccagcctacaacattgacaatctggtcaagtctctcaaatttgtcac

SEQ ID NO: 4744 - DNA, 282 bp, Zea mays
aatctttgctgaccaggggaaagcacttaatgcggtcgcctcgcggaacgcgaaagtcttagttgtcggaaatccctgtaacactaatgcgctgatttgtttgaaaaatgccccaaacataccggcaaaaaactttcatgcattgacgaggttggatgaaaatagagcaaagtgccagctggcactaaaagcaggtgtattttatgacaaagtatcaaacgtgactatttgggggaacattcgacgactcaggttcctgatttcttgaatgccaaaattgat

SEQ ID NO: 4745 - DNA, 281 bp, Zea mays
caaaacctcaacaaccaagtttcatgtctgatctcgacgtccagcttccatctgcctttgatccgtttgctgaggcaaatgctgaggactctggtgctggtcctggaacgaaggattatgtgcatgtgcgcatccagcagcgcaacggcagaaagagtctgactacagtccagggtctgaagaaagagttcagctataacaagatcctcaaggatctgaagaaggaattctgctgcaatggtactgtagttcaggacccagagctaggccaggtcattcag

SEQ ID NO: 4746 - DNA, 279 bp, Zea mays
ggagtcggtgctgcagcagcccttcttcaagacggagacggtgtcgcatctggtgcgggagtgcgagtccttgatggaggccgtgttcccggaggcgcgcgatcggggccaggccgccgccgcggcgctcgccgtcgcggaggcggagcagggcatcttccgcaacaccgtggccgcgctcctcaccatgcaggacgtccgcgcggggagctccaccagaggaagccactcgctgccgccgctcaacctgccggactccgactggctacggtccttcga

SEQ ID NO: 4747 - DNA, 280 bp, Zea mays
ggcacggcggtggcccggcacacagggcacgttgggtgcgccttgagccacttgccgatgcacttgtcgtggaagctgtggccgcaccgcgcaggcccgaagcgcctggtcctcccgcatgccggcgaggcagacgcagcacttgtcctctgcgccggagctgcccccgctgccttcatcctcgtcgtcgctgagacgcaggagcgacttggcggccgagaccgttgacccggtgtccggcgagagcagacgaccatgacgatgatgttggcgaggcaga

SEQ ID NO: 4748 - DNA, 282 bp, Zea mays
tttggtgttccaaggacaagacaaatatacgagcaagcaattgaatccggcctcccagacaaagatgttctgacaatgtgcatgaagttcgctgagctagagagaagccttggtgaaattgatcgttcgcgtgccatctatgtgcatgcatccaactatgccgatccaaataatcctgacttttggaagaagtggaatgactttgagattcagcacggtaacgaagacacattcagggagatgcttcgtatcaaacggacagtggctgctagccgtagtcag

SEQ ID NO: 4749 - DNA, 282 bp, Zea mays
ggtggttcaagggcgccaggaagggagtcgagaaggccgccgcctccttcagcgtcgcatgatgcagtaatattgtttcttcgatgggatgggatgcacgcactacgtagagagcttggctaggccaggcctggctgagcacgcttgtgtgttccttcgactgtacatgagaacaaagactaagaccttgttcgtttctatcggattacacctggaattgttccagctaaggccttattcggcacaatagtatttaatacacactcggatccaatacacaac

SEQ ID NO: 4750 - DNA, 282 bp, Zea mays
cttgaagccaggcgctgaggtgaagatcacagggccagtgggcaaggagatgctcatgcccaaagaccccaacgcaacaatcatcatgctcgcaacgggtaccggcatcgctccgttccgctccttcttgtggaagatgttcttcgaggagcacgaggactacaagtacaccgggctggcgtggctgttcctgggcgtcccgaccagcgacaccctgctgtacaaggaggagctggagaagatgaaggagatggcgccggacaacttccggctggacttcgc

SEQ ID NO: 4751 - DNA, 282 bp, Zea mays
gggatgctgtggaagtgtctggcaaaaatgtgatgcagacatcctcagttgtgaccacttctgttgtaacacacagatacggtgaacaagcaggtgaagccacacacaattacctccacgctacaggaaatgttctcggagctgcgtgggctgtattcaagattagaaaagccctcgaccctaagggtaatatgaagaagtcttttgtcagccaagcagcgcacgccgtagctaaagaatcagttgcgaggcaaaagaagaagtgaactggcctggtcggtg

SEQ ID NO: 4752 - DNA, 228 bp, Zea mays
cacgcatactgcatacacaacacagagcatcagaaggagctacgatctgatcgacatggctgcctgcaccatggctatcacctcccgcgcgctcgtcggcaagccggcggctggcacgagggacgtcttcggcgagggccgcatcaccatgcgcaagaccgccgccaagcccaagccggcgggctccggcagcccctggtaaggtgccgaccgcgtcctgtacctggg

SEQ ID NO: 4753 - DNA, 277 bp, Zea mays
tttcagaagtaaacccgatgcttggcttccgtgggtgcaggcttggtatatcgtaccctgaattgacagagatgcaagcccgggccatttttgaagctgctatagcaatgaccaaccagggtgttcaagtgttcccagagataatggttcctcttgttggaacaccacaggaactggggcatcaagtgactcttatccgccaagttgctgagaaagtgttcgccaatgtgggcaagactatcgggtacaaagttggaacaatgattgagatccccag

SEQ ID NO: 4754 - DNA, 275 bp, Zea mays
ggtagcttcagtgaacctgtgctccaatatcactggtcaaatccttgcgagcctcgtcatgaatccaccaaaggttggggacgaatcatatgcttcctacaaggcagagaaagatggaatccttcagtctttagctcgccgtgcaaaggcactggaagatgcattcaacacgcttgagggattttcatgtaacaaggctgaaggagcaatgtaccttttccctcagatccatctgccacataaggcaattgaggctgctaaagctgccaagaaag

SEQ ID NO: 4755 - DNA, 276 bp, Zea mays
aggacggtaggatatttgaaggtgaccttttggttggtgccgatggaatatggtcaaaggtgaggaagacactattcgggcactcagatgccacctattcaggttacacctgctacactggaattgcagattttgtgccgcctgatatcgatacggttgggtaccgggtatttctgggccacaaacagtacttcgtctcttcggatgtcggtgccggtaaaatgcaatggtatgcttttcacaaggaagaggctggtggcactgaccctgagaacg

SEQ ID NO: 4756 - DNA, 277 bp, Zea mays
gattgccacccggctcaacatgaagccaaacatgtgatgcttctgctgaataataatgaagacacgcatgcatgtcgtcgtcaggaacaagagaaataatacaagaccagcacgcatgggcatactctatattatagatggccaaaaagcacgaggcccgtgagcccggcacgaagcccgctttttgggcccggtccgagcacggcacggtagaataagcgggcgggcttgaacaggaaactaggcacggcgggctagcccggcacggcctgtttac

SEQ ID NO: 4757 - DNA, 123 bp, Zea mays
ctcaccaccaacctcagcacatcgaggagaagaggagtggccaatggcttcgtcggtggccgccgcggcgagcacattcctgggcacccgcctggcggacccggtgccgcagaacgggcgcat

SEQ ID NO: 4758 - DNA, 268 bp, Zea mays
tcctcgccatcacataaaaccagtgcaggcagaagcagcgcagtggcgggcagcaccatggccctctcctccacagccttcgccggcaaggcagtgaacgtgccgtcgtctcacttcggcgaggcgcgcgtgacgatgcgcaagacggcggcgaaggcaaagccggcggcgagctccggcagcccgtggtacggccccgaccgcgtgctctacctgggcccgctgtccggcgcgcccccgatctacctgacggacgagttcccggacg

SEQ ID NO: 4759 - DNA, 273 bp, Zea mays
gttcgtcaccgtctagtacgactgtgcgatggaggaagaggcgaggagaagatgcagatcttcgtgaagaccctgacggggaagaccatcaccctcgaggtggagagcagcgacaccgtcgacaacgtcaaggccaaaatccaggacaaggaagggattcccccagatcaacagcgactgatattcgctggcaagcagctggaggatggacgcacgctggctgactacaacatccaaaaggagtcaactcttcatttggtcctcaggcttagg

SEQ ID NO: 4760 - DNA, 271 bp, Zea mays
gacgctagctcaccaccaacctcagcacatcgaggagaagaggagtggccaatggcttcgtcggtggccgccgcggcgagcacattcctggcacccgcctggcggacccggtgccgcagaacgggcgcatcgtggcccggttcgggttcggcggcggaaagcccaaggctgccgtcccgaagaaggtggcgaagacgtcgatctcctctgaccggccgctgtggttccccggcgccgtggcgcccgactacctcgacggctcgctggtcgg

SEQ ID NO: 4761 - DNA, 301 bp, Zea mays
aaaaaagacacgcatccggctcgccgctcacctgggggttaacctcgacgatgtgctggcctctcttcaccaccacgggctcgttggccagcacgttctcgagatggtcgagcagttccttggcctggcaggaaccgaagtccggatccgcctcgtggtggtgccacacgatggcgctctccttgtgctcgatgtaggagccatctgttgcctccgtgtacagctgcatcaccggctccgcggtcttcttccagtcgaagtcggcggccaacccggaggtatcccatggcgcgtccctgct

SEQ ID NO: 4762 - DNA, 303 bp, Zea mays
gctgggcgcaggcgacggccggctcgtcttcgagcccagccagttcaccgtcaaggccggcgacaccatcaccttcaagaacaacgccggcttcccgcacaacgtcgtgttcgacgaagacgaggtgccgagcggcgtcgacgcctccaagatctcgcaggaggagtacctcaacgcgccaggcgagacctactccgtcaccctcaccgtgccgggcacctacggcttctactgcgagccgcaccaaggagcaggaatggtcggcaagctcacagtcaactaaagctagctatccattccatg

SEQ ID NO: 4763 - DNA, 173 bp, Zea mays
gtcttcacactcctcgccatcacataaaaccagtgcaagcagaagcagcgcaatggcgagcagcaccatggccctctcctccacagccttcgccggcaaggcagtgaacgtgccgtcgtctcacttcggcgaggcccgcgtgacgatgcgcaagacggcggcgaaggcaaagc

SEQ ID NO: 4764 - DNA, 302 bp, Zea mays
agaagatcacggaggccatgaagctggtggccgccgccaaggtccggcgcgcgcaggatgccgtcgtctcctctcgccctttctcggaggcgctggtggaggtgctctacaacatgaaccaggagatccagacggaggacatcgacctgcccctcacccgcacccgccccgtcaagaaggtggccctcgtggtcctgaccggcgagcgcggcctctgcgggagcttcaacaacaacgtgctcaagaaggcggaaacccgcatcgatgagctcaagcagctgggcctccagtacaccgtcgtc

SEQ ID NO: 4765 - DNA, 301 bp, Zea mays
gtcatcttccacgtctccaagaccggcggccacctcgggtccagcctcggcgtggtggagctcaccgtcgcgctgcactacgtcttcaacgcgccgcaggaccgcatcctctgggacgtcggccaccagtcgtacccgcacaagatcctgacggggcggcgcgacaagatgccgacgatgcggcagaccaacggcctggcgggcttccccaagcgcgccgagagcgagtacgacagcttcggcacgggccacagctccaccaccatctccgcggcgctcgggatggcggtgggccgggacc

SEQ ID NO: 4766 - DNA, 301 bp, Zea mays
gccgagcttgaagggctacttctgtctcatccagaaattctggatgctgttgttatcccgttccccgatgctgaagctggtgcaattcctattgcttacgtcgtaaggtcctctgagagttctttgactgaagttgatgtccagaaatttattgaaaagcaggtcgcatactacaaaaaattgaggagggtgacctttgtggacagcgtaccaaaatctgcttcagggaagatcttgagaagagaactcatctctaaagtcagatcatccaagctatagcaagccggcttctgtgttcgta

SEQ ID NO: 4767 - DNA, 251 bp, Zea mays
gcaaccggtccaacactttcacgctcagcttcagcaatggctgcctccaccatggcgatctcctccacggcgatggccggcacccccatcaaggtgggttccttcggcgagggccgcatcaccatgcgcaagaccgtgggcaagcccaaggtggcggcgtccggcagcccctggtacggccccgaccgcgtcaagtacctcggccccttctccggcgagcccccgagctacctcaccggcgagttccccgg

SEQ ID NO: 4768 - DNA, 300 bp, Zea mays
gtcctcgatccgatccgccgagtgcacaccacctttccccactccgatcgaatcgatggccgccgagggcgagaagaagatgataaccctcaaaagctccgatggcgaggagttcgaggtggaagaggcggtggcgatggagtcgcagaccatccgccacatgatcgaggatgactgcgccgacaacggcatccctcttcctaacgttaactccaagatcctatccaaggtaatcgagtactgcaacaagcacgtacatgccgccgccgccgccgccgccgcctcgaaagccggttccga

SEQ ID NO: 4769 - DNA, 295 bp, Zea mays
cacacatacatagtttcttctactacacgacgacaaacatggggaagcctgcgaagatcggagagtggggtggatacgccggcgatcgtcgggatctgagggctactccggaccggctgaccgaggtgaaggtcacggcggacaacagcagctgcatccgctccatctccttcatctacatcggagccgatggcaagccgtacgaggaggggccatggggtttcggccatgctggcacggagtacaagattgatctgtgcaggttcgacgagagcttgacggagatctccgggac

SEQ ID NO: 4770 - DNA, 282 bp, Zea mays
cacagaggtgcgacgtacgacgacgacgaggcaggcgccacacatggcatcccagctctgcgccgccgtgccccgggtccacggcctccggggctacgccgcgcccaggtccgcggtggcagcgctgccgtccgtgagggtggggaggaagaggtcgtggtcgcagggcatccgctgcgactacatcggctccgccaccaacctgatgatggtgacgacgacgacggtggtgctgttcgcggggcggttcgggctggcgccgtccgggaaccgcaaggcgac

SEQ ID NO: 4771 - DNA, 294 bp, Zea mays
ctccctgccttctataagtacaggttcattgtgtgctgtgctcccagctccatcactgacacaagagagcacgctactactcatcactcgccaacgtgcagagatcagggaagcggcactccatccactgactgaccgctcatggcgaaggtccacctctacgtcgccgcggcctgcgccgtcgtcctcgcgctcgccaccccggccctcgccggtgaccccgacatgctgcaggacgtctgcccggctgactacgcctccccggtgaaactgaacgggttcgggtgcaaggcg

SEQ ID NO: 4772 - DNA, 297 bp, Zea mays
tcgtactggaccaatctgccaccacactttgatcagacacagacacaggaagttgagatcagaaaaatgcaggctgccgctactgccgccgggttctcggccgtgctgcccgccaagggcagccggcggcgaggagcagggtggtggcccgtgtccccgccacaaggaggagcgtccgcgcagctgccgtcgtcgcgaccgaggccgcgcagatcgactacagctcaagcgtctcggtgttcccgatggaggcctgcgacctgcttggtggcgacgcgtgcaacgggcccatgttcc

SEQ ID NO: 4773 - DNA, 294 bp, Zea mays
gaacacttgattgattcagtaggtagctagctagctgaatcacaatggatgctaccaagttccgtccgtccagtagccacgacacgacggtgacgacgacgaacgctggcgctcctgtgtggaacgacaacgaggcgctgactgtggggcctcgcggtcccatcctgctggaggactaccacctgatcgagaaggtggcgcacttcgcgcgcgagcgatcgccggagcgcgtggtgcacgccgcggcgcctcggccaagggcttcttcgagtgcacccacgacgtgacgtcgct

SEQ ID NO: 4774 - DNA, 294 bp, Zea mays
ccggcgactacggctgggacaccgccgggctgtccgcggacccggaggcgttcgcgcggaacagggcgctggaggtgatccacgggcggtgggcgatgctgggggcgctgggctgcatcaccccggatgtgctggagaagtgggtgcgcgtggacttcaaggagcccgtgtggttcatggccggcgcgcagatcttctcggagggcgggctggactacctgggcaaccccaacctggtgcacgcgcagagcatcctcgccgtgctcggcttccaggtcatcctcatgggcctcg

SEQ ID NO: 4775 - DNA, 131 bp, Zea mays
atgacggtcgtctccagcagggacccgctcaagctccgatggggtgagctcggcattgacatcgtcatcgagggcaccggagtcttcgtcgacggccccggcggcgggaagcagatccaggccggcgcgaa

SEQ ID NO: 4776 - DNA, 285 bp, Zea mays
gtacgcacgcaccgggacaccagcaacccccaacagcgccactgtccagtgcgcgcgtcaagcttgcttagctagccgccatggcctccctcgccgccgtctccgtgaagcccgtggccatcaagggtctcgccggcagctccatctccggaaggaagctcgccgtcgccaggccgtcggcccgctccatccgcagccccgcgcaccgccgtggtggccaagtacggcgacaagagcgtctactttgacctcgacgacatcggcaacaccaccggacagtgggac

SEQ ID NO: 4777 - DNA, 283 bp, Zea mays
attgagtccacggtgaatgaagcatgcaataaattacatgatgattgtggagattaagctattacaagattgatgttgtgacgctagcagctaacgtagcagctaggcagcagcctcacttcacaactacaaatcacacaggagcatggggtccttgagcagactggcctcactcatttcacctcgaggatctcgtccaaggcgtagttgttggtagacacgccggcgtagttcaccttgttgaaccgcaccaccaccgggtaacgggtgttaggatcctgat

SEQ ID NO: 4778 - DNA, 140 bp, Zea mays
gatcgctgggcacaaggatattcttgaaggcgatgcattcctgaagcaggggctgctgctgcgcaacccctacatcaccagcctgaacgtgttccaggcctacacgctgaagcggataagggaccccaacttcaaggtga

SEQ ID NO: 4779 - DNA, 289 bp, Zea mays
ccagttcaccgtcaaggccggcgacaccatcaccttcaagaacaacgccggcttcccgcacaacgtcgtgttcgacgaagacgaggtgccgagcggcgtcgacgcctccaagatctcgcaggaggagtacctcaacgcgccaggcgagacctactccgtcaccctcaccgtgccgggcacctacggcttctactgcgagccgcaccaaggagcaggaatggtcggcaagatcacagtcaactaaagctagctatccattccatgcatctcgatctgtatgtactccgcc

SEQ ID NO: 4780 - DNA, 287 bp, Zea mays
accctgagaagattctcgagcaggcagttctcgagatgaacgatgacttgacaaagatgaggcaggccacagcacaggtcttggcgtctcaaaagcggcttgagaataaatacaaagctgcagaacaagcttctgctgattggtatcgaagggctcaacttgctcttcaaaagggtgacgaggatcttgctcgcgaacccgttaagcggcgtaaatcatatgctgacaatgcaagctccttaaggtcccagcttgatcagcagaagggtgtagttgaaaatctgatt

SEQ ID NO: 4781 - DNA, 287 bp, Zea mays
cagcgccactgtccagtgcgcgcgtcaagcttgcttagctagccgccatggcctccctcgccgccgtctccgtgaagcccgtggccatcaagggtctcgccggcagctccatctccggaaggaagctcgccgtcgccaggccgtcggcccgctccatccgcatgccccgcgcaccgccgtggtggccaagtacggcgacaagagcgtctactttgacctcgacgacatcggcaacaccaccggacagtgggacctctacggctctgacgcgccctcgccctacaacc

SEQ ID NO: 4782 - DNA, 255 bp, Zea mays
cgagggcttccgcatcaacggcctcgacggcgtcggcgagggcagcaacctctaccccggcggccagtacttcgacccgctgggcctcgccgacgaccccgtcaccttcgccgagctcaaggtcaaggagatcaagaacggccgcctcgccatgttctccatgttcggcttcttcgtccaggccatcgtcaccggcaaggggcccctcgagaacctgctcgaccacctcgacgaccccgtcgccaacaacgcctg

SEQ ID NO: 4783 - DNA, 255 bp, Zea mays
gcaagaccgagaaggagatgaatgagctcaagctcaaggagatcaggaacggcaggctcgccatgctcgccatcctcggttacttcatccaggggctcgtcaccggcgtcggcccgttccagaacctgctcgaccacctcgccgaccccgtcaacaacaacgtgctcaccagcctcaagttccactagaacgtggtgcatcagcatacctgctgctgccgccgccgccgccagttgtttgctgtggaaagctaga

SEQ ID NO: 4784 - DNA, 257 bp, Zea mays
gaggcggcgggcgaaatgaagcttaacgtcaagaccctcaagggcgaccaacttcgagatcgaggcgagccccgatgcgtcggttgctgaggtgaagaggatcatcgaaactactcagggtcagagtacctacccagcagaccagcaaatgctcatataccaagggaaaattctgaaggatgagaccactttggaaagcaacggagttgctgagaacagcttccttgttataatgctgtccaaggctaaggcatcgt

SEQ ID NO: 4785 - DNA, 255 bp, Zea mays
cttgcgtgctcgcgcgcgactctcgtggcgcacaagactaggcgaccgccgccgcccctacgccacgtgctcgagtctagcctcgtcgattgcttccccagtttaattgatctacaagcttcagaacatgttcaagaatacatttcagtctgggttcctgtccattctttatagcctcgggaccaagccattgcagatatgggataaggaagttgtgaatgggcacattaaacgaccccaagatgaagatatcca

SEQ ID NO: 4786 - DNA, 257 bp, Zea mays
agccaaccatctaccagcgactcagcgagcgagagcagcacacacggcacgcagctagctaggagcagcagcagcggcggcgatggcggcctccatgatctcctcgtcagctctggcggtggcgcctcagggcctgccgcccctcggccgccgcgcctcctccttcgccgtcgtctgctccaagaagaagatcaagaccgacaagccctacgggattgggggtggcctgaccgtcgacgtcgacgccaacgggagaa

SEQ ID NO: 4787 - DNA, 256 bp, Zea mays
gctgctgggagttggcctctgttctgagggacacaaaggagagagttgattctgctggagtaaaactgattgctgttggtgttggcactccagctaaagcccgtattcttgccgagcgcttgccctttccgttggaatacctctatgctgatcctgatcggaaggcgtataatctcttgggtctatattttggtgttggtcgcacgttcttcaatccggccagtgcgaaagtgttttcacggtttgactcccttaa

SEQ ID NO: 4788 - DNA, 258 bp, Zea mays
gtgcaggttcgacgagagcttgacggagatctccgggaccacgggcccagcctacaacattgacaatctggtcaagtctctcaaattcgtcaccaacaaacgcgcttacggaccgtacggcagggacgagggcaccccgttccgtgtcaaggtgatgaacaacggccacgtcgctggcttctttggccgctctggagattgcctggacgcgatcgggctctacgtgaaccccaactaataactaaaacgatggatcgg

SEQ ID NO: 4789 - DNA, 251 bp, Zea mays
taccagcgactcagcgagcgagagcagcacacactgcacgcagctagctaggagcagcagcagcggcggcgatggcggcctccatgatctcctcgtcagctctggcggtggcgcctcagggcctgccgcccctcggccgccgcgcctcctccttcgccgtcgtctgctccaagaagaagatcaagaccgacaagccctacgggattgggggtggcctgaccgtcgacgtcgacgccaacgggagaaagggc

SEQ ID NO: 4790 - DNA, 251 bp, Zea mays
cttgattactcctggaaagagtgttttggtggaagcaacaagtggaaacacaggcattggtcttgccttcattgctgcttctaaaggatataagctgatactaacaatgccttcatcaatgagcatggagagaagagtcctcctcagagcttttggtgctgaacttgtccttactgatgctgcaaaagggatgaaaggggccttagataaggctacagagattttaaacaagacaccaaattcttacatgc

SEQ ID NO: 4791 - DNA, 251 bp, Zea mays
atttggaaggctgcactgcaccagcttacgactcgaatcagctccatgctgcggttgtggagcttgtgtgtgacgagggggcagagatcaagtactccacggtgcagaattggtactctggtgatgaggagggcaaaggaggcatttataactttgtgacaaagaggggacggtgcaaagggcatggttcgaagatctcatggacacaggttgagactggatctgctattacatggaagtacccaagcgtc

SEQ ID NO: 4792 - DNA, 243 bp, Zea mays
ggcgcatacggcatacacagcgcagggcatcagaagcaggtgggatctggatcgacatggctgccgccagcatgggtatcacgtcccgcgcgctcgtcggcaaggcggcggctggcacgagggacgtcttcggcgagggccgcatcaccatgcgcagtacgcgcgccaagcccaagccggcggcgtccggcagccgatggtacggtgccgaccgggtcgtgtagctggggccgctgtcgggct

SEQ ID NO: 4793 - DNA, 251 bp, Zea mays
gcccgtgtcgtgtagtgtgtagtcgcagcagctagcgcccggccggccagtcgagtgagtccatcctccatcgccatccaatggccgccaccgccctgagcatgagcatcctccgcgcgccgccgccctgcttctcgtccccactcaggctcagggtcgcggttgccaagccgctggcggcccccatgcggcgccactgctgcgcgcgcaggccacctacaacgtgaagctgatcacgccggaaggggagg

SEQ ID NO: 4794 - DNA, 251 bp, Zea mays
ggagaaggagcgagaaggtttcccattaacctctcttagggaaataaatatcctcttgtctttccacaatccttcaattgtggatgttaaggaagtagtagttggaagtagtctagatagtatttttatggttatggagtacatggaacatgatcttaaaggtgtcatggagaccatgaaacaaccatatacccaaagcgaggtaaagtgtttgatgcttcagctgctagaaggtgtaaaatatctacatg

SEQ ID NO: 4795 - DNA, 254 bp, Zea mays
ccgccatcacataagtccgccgcccctctccctcagtaaacccccctctcttcttcccgcggtctgctcgttcgatctgtgcagcagatctgaggtctcgagcgaccgtgaagcagcttcaatcgtcggcatggcgctcgtattgcatagtggggctggaaacaagaatgccttcaaagcacttattgctgcagaatacagtgggatcaaggttgagttgaccaaggattttgagatgggtgtctccaacaaga

SEQ ID NO: 4796 - DNA, 245 bp, Zea mays
agccagcatcgatgtgcaagtcgcgctgacgtagcagtgcagataaaaagaagcagccgcaatggcgagcagcaccatggcccgctcgtccacggcgttcgccggcaaggccgtgaacgtgccgtcgtcgtccgccttcggcgaggcccgcgtgacgatgcgcaagacggcggcgaaggccaagccagctgcggcgtccgggagcccgtggtacggccccgaccgcgtggtgtacctgggcccag

SEQ ID NO: 4797 - DNA, 242 bp, Zea mays
ggagcggcgagcgacgaagcgcgcagaaagagaagaagctcggagctgagatggcacaaggcatggcgtcgatgaccggcctctcgcagggcgtcgtgcccagcgaggcgcgccgacagcagaaccaggacggccgtcgtcatcgtcgaggacgtccgcggagggcgacgccgttgcgcaggcgggccgccgcgccgtgatcgggctggtggccactgggatcgtcggcggcggcttgtcgc

SEQ ID NO: 4798 - DNA, 242 bp, Zea mays
atagcaaccggtccagcactttcacgctcagctccagcaatggctgcctccaccatggcgatctcctccacggcgatggccggcacccccatcaaggtgggctccttcggcgagggccgcgtcaccatgcgcaagaccgtgggcaagcccaaggtggcggcgtccggcagcccctggtacggccccgaccgcgtcaagtacctcggccccttctccggcgagcccccgagctacctcaccgg

SEQ ID NO: 4799 - DNA, 243 bp, Zea mays
cccaaggcgaggcgacgaaaccctcgccagtccccaactcgaacctcagtcaggcagcgtgaggagggagagttcaaggaccgaggcggcgtcgggcgagatgaagcttaacgtcaagaccctcaagggcaccaacttcgagatcgaggcgagccccgatgcatcggttgctgatgtgaagaggatcattgagaccactcaaggtcagagtacctaccgggcggaccagcaaatgctcatata

SEQ ID NO: 4800 - DNA, 243 bp, Zea mays
accgctcttgcatttgccggtgcttttagctttgaggatggactgaagcttgtcaagctaagaggagaagctatgcaggatgcttcagatgctgccaatagtgcgatggttagtgtgattggtctggattcagaaaaggtgcaagaactatgtgatgctgctaatgacgaagtagatgaaaacgatagagttcaaatagcaaactttctgtgccctgggaattatgcagtttctggtggtgta

SEQ ID NO: 4801 - DNA, 243 bp, Zea mays
agacggtccaacactttcacgctcagcttcagcaatggctgcctccaccatggcgatctcctccacggcgatggccggcacccccatcaaggtgggttccttcggcgagggccgcatcaccatgcgcaagaccgtgggcaagcccaaggtggcggcgtccggcagcccctggtacggccccgaccgcgtcaagtacctcggccccttctccggcgagcccccgagctacctcaccggcgagtt

SEQ ID NO: 4802 - DNA, 247 bp, Zea mays
caaaagttcggcatcatcaagggcaccatgaccaccacccactcctacaccggcgaccagaggctgctggacgcgagccaccgcgacctgcgccgcgcccgcgccgccgcgctcaacatcgtgcccacgtccaccggcgccgccaaggccgtctcgctggtgctccccaacctcaagggcaagctcaacgggatcgcgctccgggtgcccaccccgaacgtctccgtcgtcgacctcgtcgtgcagg

SEQ ID NO: 4803 - DNA, 244 bp, Zea mays
agggaatagcatcgctagtggacgccggcggtggcaccggcgcacagcccaagcggtggctgcagcattcccggacacccggtgcacggtgctggagcttccgcagtggtagacgctgctccgattgatgggccggttcgctttgtcggaggtgacatgacgaagttcatccctcctgctgatgccgttcttctaaaggttgtgtttctacgaagatccaaaattccttggaccaaaagcttca

SEQ ID NO: 4804 - DNA, 104 bp, Zea mays
atcccatctcccttttttttccagtcatgtaaaacttccaaactgctccatggttcaaaactctgttcttcaatacatcatcaattatcgattatatacgtggc

SEQ ID NO: 4805 - DNA, 261 bp, Zea mays
gcgagttcctggtgaacgctcagggtgaggatgtggttgccggaataagaaccccagaggaccttgacgccatgaagaacctcatgccacaggcctacgacgagcttgttgagaactgcaacatcctggagagccactataaggaaatgcaggatatcgagttcactgtccaggaaaacaggctgtggatgttgcagtgcaggacagggaaacgtacgggcaaaagtgccgtgaagatcgccgtggacatggttaacgagg

SEQ ID NO: 4806 - DNA, 260 bp, Zea mays
catccagaaagatgttgctcctgaaacagtagatgcaatgaagaggactatttctggcatgttgggtcttcttccatctgatcagttccgtgtcattgtagaagccctttggaatcccttcttcaagttattggtatcttcaattatgactgggtatactctgcgaaatgctgaatacaggctttcttttgaaagaaatctagaactgcctgaagaaggtgtagaatgcctaaaaagtgatgtcactgaagataatcatc

SEQ ID NO: 4807 - DNA, 257 bp, Zea mays
gagagcgtgtggatttgggggagcttcttcactggagagtggagagctccggtagcgaggcgaaggtgggaagatggaggaggggaatcagagaggtctccccgatggcggactggggccccgtgatcgtagcgacggtgctgttcgtggtcctcacgccggggctgctctgcacgctgccgggccggggccgcgtcgcagagttcggcagcatgcacaccagcggcctggccatcctcgtccacgccgtcctctac

SEQ ID NO: 4808 - DNA, 258 bp, Zea mays
agctgcaggtgcccgacgacgtgtacatcctggaccaggccgaggaggacggcatcgacctgccctactcctgccgcgcggggtcctgctcctcctgcgccggcaaggtcgtctccggctccgtggaccagtccgaccagagctacctcgacgacggccagatcgccgccggctgggtgctcacctgccacgcctaccccacctctgacgtcgtcatcgagacgcacaaggaggaggagctcaccggcgcataatcat

SEQ ID NO: 4809 - DNA, 258 bp, Zea mays
gttcgtgggcgagagggaagagatggcggcgtcggacgttgagtaccgttgcttcgttggcggcctcgcctgggccaccgacgaccactccctcaacaacgccttcagcacctacggcgaggtcctcgagtcgaagatcatcctggatcgggagacgcagaggtcccgcggcttcggcttcgtcaccttctccacggaggacgcgatgcgcacgctcatcgagggcatgaacggcaaggagctcgacggccgcaacat

SEQ ID NO: 4810 - DNA, 258 bp, Zea mays
ggagcgtttgacgcgagcatcgactgcggaataaccttcttcgacaccgccgaagtgtacggagcaggggtatcgggagcgattaattcagagagtttactaggaaggtttatcaacgagaggcagcggaaggagcaggtggacgtggctgtcgcgaccaagttcgcagctcttccatggaggttcggtcgtgggagcgtcatctgcgcgctcaaggcctcgctggatcgcctcggtgtctcgtcggttgagctctac

SEQ ID NO: 4811 - DNA, 257 bp, Zea mays
  unsure (1)..(257): unsure at all n locations
gtcgggtgctctgccgtggcacctattccgggtgctggcacagagcttgaagcaagaccactatgtcagtgataccggagatgtggtctactaccaagctgagtcgaaaacgagcacctctgcactaaaatccgattgacagggagtatagagcgtactgngattcttcatttttctcggggaggggctgtgcctgaagacctgaccagcctccacctctgattagcgtgagtgggtacgtcgactgaagaatgtaa

SEQ ID NO: 4812 - DNA, 254 bp, Zea mays
ctgtcgtgggatcccagccaccgccgctagaagaagagctcggcgattcccaggtcccgcgagaagatgccgaagcagatccatgagattaaggacttcctcctcaccgcgaggaggaaggatgcccgctcagtgaagatcaagaggagcaaggatgttgtcaagttcaaggtgcgctgctccaagtacttgtacacgctctgcgtcttcgatgctgagaaggcaaacaagttgaagcaatctcttcccccagg

SEQ ID NO: 4813 - DNA, 254 bp, Zea mays
gtcttgccatgcttccaaatgccattacatccagcttgggtagtaaagtcaaactatcatggaaactcacgagcattacgaaatcagatgacaagggatatgttttggagtatgaaacgccagaaggggttgtttcggtgcaggctaaaagtgttatcatgactattccatcatatgttgctagcaacattttacgtccactttcaagcgatgctgcagatgctctatcaagattctattatccaccggttgct

SEQ ID NO: 4814 - DNA, 253 bp, Zea mays
gtcgcagcagctagcgcccggccggccagtcgagtgagtccatcctccatcgccatccaatggccgccaccgccctgagcatgagcatcctccgcgcgccgccgccctgcttctcgtccccactcaggctcagggtcgcggttgccaagccgctggcggcccccatgcggcgccactgctgcgcgcgcaggccacctacaacgtgaagctgatcacgccggacggggaggtggagctgcaggtgcccgacgac

SEQ ID NO: 4815 - DNA, 251 bp, Zea mays
gcctggacggcctggcgtcccgcgaggccgcctactaccagcagggcgcgcggttcgccaagtggcgcaccgtcgtcagcatccctaacggcccctccgagctcgccgtcaaggaggccgcgtgggggctcgcacgctacgccgccatctcacaggacaacgggcttgtgccgatcgtggagccggagatcctgctggacggcgagcacggcatcgagcgcacgttcgaggtggcgcagaaggtgtgggcc

SEQ ID NO: 4816 - DNA, 292 bp, Zea mays
ctaccagcgactcagcgagcgagagcagcacacacgcagctagcgaggagcagcagcagcggcggcggcgatggcggcctccatgatctcctcgtcagctctggcggtggcgcctcagggcctgccgcgcctcggccgccgcgcctcctccttcgccgtcgtctgctccaagaagaagatcaagaccgacaagccctacgggattgggggtggcctgaccgtcgacgtcgacgccaacgggagaaagggcaagggcaagggcgtgtaccagttcgtcgacaagtacggcgcg

SEQ ID NO: 4817 - DNA, 285 bp, Zea mays
gcgtgaagaggctagtctacaccaacgatcagggggagattgtgaaaggagtctgctcaaacttcctgtgtgacttgaaacctggcgccgatgtgaagatcacagggccagtgggcaaggagatgctcatgcccaaagaccccaatgcaacagtcatcatgctcgcaacggggaccggtattgctccgttccgctccttcttgtggaagatgttcctggaggagcacgaggactacaagttcagcggccttgcgtggctgttcttgggagtcccgacgagcgaca

SEQ ID NO: 4818 - DNA, 289 bp, Zea mays
agatcgggtactggaggtacatcaccatcttcaggcacctcaaggcgaacccggagtaccaggtgtaccccatcttcaagtacttcgagaactggtgccaggacgagaacaggcacggcgacttcttctctgccctgctcaaggctcagccgcagttcctcaatgactggaaggccaagctctggtcacggttcttctgcctctcggtgtatgtgaccatgtacctgaatgactgccaacgcactgcattctatgagggaattggtctggacaccaaagaattcgacat

SEQ ID NO: 4819 - DNA, 287 bp, Zea mays
gacgaatgctccaattgaagagtgccgcaagaaggtttggctggtggactcaaagggtttgattgttgactctcgtaaaggctctcttcagccattcaagaaaccttgggcgcatgagcacgagcccttgaaaaccttgtatgatgctgttcagtccatcaaacctacagttctgatcgggacatctggagttggaagaacattcacaaaagaaatcattgaggccatgtcttccttcaacgagaggcctatcatcttttcactgtcaaacccaacctcgcattctg

SEQ ID NO: 4820 - DNA, 286 bp, Zea mays
cggccaccggactgtccggtgcgcccgacgatagaaggcaaaggtggccttccagatttgctctcaacggctcctagctgccttggggctataaaagggacccctaggcgcatggaggagacatgccaagcaactcttgagcattcttgatcatccacactcagtctttgcgcatccatttgtgattctaagtgattcgagctctgttcttgtgagaaactgtgagatagtctttgagctcgaatcttggccgtgtgtgtgcgcgtttcgctgtggatttgtgtgt

SEQ ID NO: 4821 - DNA, 284 bp, Zea mays
gaagacgagtgtcaagtgaacctgaaacttgcggtgtcactggctggtagcctgagtgtgagtgagtgatcgagctagctgagctccgatcctcgctagctaggataccgccataccacaagtcttcttcacaggtttaggagtgacagcaacaagagatcaatggcctctgccaccgtgctcaagtcctccttccttcccaagaagtccgaatggagcgccaccagacaggccgccgcgcccaggccgcccaccgtctccatggtcgtccgcggctccgccta

SEQ ID NO: 4822 - DNA, 279 bp, Zea mays
ctacaatgtagcgatgtggtaccagctgattgtgcgatgtcaaacccaggggaaagggctgattccagcctttgtattcctgttaggcaggtcagatctagtatatcccatcccttatctggtttgactggtgagagcagcgctggagatcaccaagactgtggggtgtcaccaattctcctcatgggcgagccaccctggcattctcctggtccagaaggctcattagctggaggaagcagagatagcgctctcacacgatacaaggagaagaagaag

SEQ ID NO: 4823 - DNA, 279 bp, Zea mays
agagggaactgaaggagctgctgattgcctgcgctagggcagtggaacgtaacaacagctacgccattgatctgatgatcccagagctgaggaagatggtttcggtgtccggcgagccgcttgagaggctgggagcctacatggtggaaggtcttgttgccaggctcgcggcctccggcagctcaatctacaaggctttgaagtgtaaggagcccaggagctctgatctcctctcctacatgcacttcctgtatgaggcctgcccctacttcaagttcg

SEQ ID NO: 4824 - DNA, 277 bp, Zea mays
caaggagagtacgtggaggagcagccatggcttcatcggtggccgccgcggcgagcacattcctgggcacccgcctggcggacccggcgccacagaacgggcgcatcgtggcccggttcgggttcgggttgggcggcaaggcgaacctggtccgaagaaggtggcgaagacatcgacctcctctgaccggccgctgtggttccccggcgccgtggcgccgactacctggacggctcgctggtcggcgactacgggttcgacccgttcggtctcggga

SEQ ID NO: 4825 - DNA, 274 bp, Zea mays
atcagtaactaataattactttagattagaaagcaagaatcgaggcgagaagatggtgcagttcggcaagtggctgaggaggcagatcgagcggagctcccggagtggcaggaccagttcctgcggtacaaggagctgaagcggtgcgtcaaggcgcgctccggcggctgcccgccgttgcccgcggaggaggccgagttcgtggccgagatcgacgcggagaccgagaagatcaacgccttcttcctcgaccaggaggaggagttcatcatcc

SEQ ID NO: 4826 - DNA, 278 bp, Zea mays
gctggtagcctgagtgtgagtgagtgatcgagctagctgagctcggatcctcgctagctaggataccgccataccacaagtcttcttcacaagtttaggagtgacagcaacaagagatcgatggcctctgccaccgtgctcaagtcgtccttccttcccaagaagtccgaatggggcgccaccaggcaggccgccgcgcccaggccgcccaccgtctccatggtcgtccgcgcctccgcctacgccgatgagctcgtgaagaccgcgaaaacgatcgc

SEQ ID NO: 4827 - DNA, 191 bp, Zea mays
ggcggaaacccgcatcgatgagctcaagcagctgggcctccagtagaccgtcgtcagcgtggggaagaagggcaacgcctacttccagcgccgcccctacatcccgttggagcgcgatctagaggtgagcagcgtgcccaccgtcaaggactcgcaggccatctgcgacctcgtctactcgctcttcgtct

SEQ ID NO: 4828 - DNA, 277 bp, Zea mays
gcttattgctgggctagccgccggtctcttgctctgatagcttgctccaggacgtacgtacgtacgtagatcgatccatcgatcgctagctagctgacgaccatggcgtccctctcctctgccgccatcaccgccccttccttcacggccgcgcccgctcgcgcagtggtcagcaggaggtccttcagcgtgcgtgcctctctccgcaaggcgactgccaccgccgccgtggccgttgccgccagcgtcctgcttgccggctgcggcgccatggccc

SEQ ID NO: 4829 - DNA, 279 bp, Zea mays
ggactacctgctgcgcaacggctggataccctgcctcgagttcagcaaggtcggcttcgtgtaccgcgagaactccacctccccgtgctactacgacggccgctactggaccatgtggaagctgcccatgttcggctgcaacgacgccacccaggtgtacaaggagctgcaggaggccatcaaatcctacccggacgccttccaccgcgtcatcggcttcgacaacatcaagcagacgcagtgcgtcagcttcatcgcctacaagcccccgggcagcga

SEQ ID NO: 4830 - DNA, 276 bp, Zea mays
gtcacatacttgcaccatcatggccacgaagacaagcttccctggtaccgtggaaaggagtggagttatctgcgtggaggactgacgacgctcgaccgggactacggatggatcaacaacatccatcacgacatcggaactcatgtcatccatcacctcttccctcagatcccgcattaccatctcatcgaggcgaccgaggcagcaaagccggttcttggcaagtactacaaagagccgaagaagtcgggtgctctgccgtggcacctattccgg

SEQ ID NO: 4831 - DNA, 274 bp, Zea mays
tataccgcgatctcaagcctgaaaatgtccttgtccgggaggacgggcacatcatgctctcggacttcgacctctctcttcgttgtgctgtcagtccaacactgatcaggtcctcaaaccctgacgcagaactgcagaagcgctcaggaagagcagccaaggctactgtgttgagccagcctgtgttgagccgtcctgcatcactcaaccgtcgtgtgcagccccaaccacctgcttcggcccacgcctgttctcctccaagtccaagaccaag

SEQ ID NO: 4832 - DNA, 274 bp, Zea mays
tgaagattggcttaaccctgttgccatacaagaggcgtttgaagcgagggctctcaggatggcagtaaactgtgcccagaacataggccaagcagcaaaccaagaagaaggtttctatgagcggtcccctgatttgctagaggctgcagtagctcacatccagttggtcattgtaaccaagttcatttcgaaggtgcagcaggacattcctggacctggagtgaaggaacagctccagaacctttgcaatgtctatgccctctacattctccac

SEQ ID NO: 4833 - DNA, 271 bp, Zea mays
gccgtcgcggtgtcgtcggagtacgggaccgagggcgcggacagcaggacggggagttctccgaggacctcaagctgttcgtcggtaacctgccgttcagcgtcgacagtgcgcacatggccgggctcttcgagcaggctggctccgtcgagatggtcgaggttgtatacgatagaatgactgggcggagtcgtggatttggattcgtgacaatgtcttcagctgaagaagccggggctgctgtcgagcaattcaacggttatacatttca

SEQ ID NO: 4834 - DNA, 275 bp, Zea mays
cgcctctcgagtctcgtccacccgtcgtcctcctagctcctctactcgccagtcgccatgggcaagattaagatcggaatcaacggcttcggaaggatcggcaggctcgtggccagggtcgccctccagagcgaggatgtcgagctcgtcgccgtcaacgaccccttcatcaccacggactacatgacctacatgttcaagtacgacaccgtccacggccactggaagcacagcgacatcacactcaaggactccaagacccttctcttcggtga

SEQ ID NO: 4835 - DNA, 273 bp, Zea mays
gttcaaggtccggacggcgtcctgcggcggcacggcctgtgtcaattccttcggcgacgagcagctggccgtcgacatgctcgctaacaagctcctctttgaggctttggagtactcacatgtgtgtaagtatgcgtgctccgaggaagtccccgagctccaggacatgggtggcccagtcgaaggtggtttcagcgttgcgttcgaccccctcgacggctccagcattgtcgacaccaacttcaccgtcggaaccatcttcggagtctggcc

SEQ ID NO: 4836 - DNA, 272 bp, Zea mays
ggaggacaaacttttcggttgggtgctggacgactgcggggattgctcagttgccgagggatgccttatggacacaaacaatgatcccatcgatgttgatgcacacatgtacaggtatcatctacatgttttacaatatatattttttaggagttacttttaaaaaatattagaaaaccccttctttgatattttcaatttttttggtggcttaaaaaaacaagaaagtaaattttacaaaccttagagatggtctaagtcgtccatgcata

SEQ ID NO: 4837 - DNA, 272 bp, Zea mays
aacacggtggagagccttcctctgtcgccttcttcgcgaaggctgggctggattacgtttcttgctcccctttcagggttccgattgctaggctagctgcagctcaggtgcttgtctgaggctgcctcctcaatggcaaccggattgcctgctgctggtggatgtggtgatcaacagtattattacagagccatgctatgtgaacattactagtagcagtgctcataaaagctacaatcccatgtcctttttttccccagtcatgtaaaact

SEQ ID NO: 4838 - DNA, 275 bp, Zea mays
ctcgaccgtcgctcaccgggaagctacgctacgacgaagcatggcgtccgtcaccgcccgctccccggtcgcagccctgcgcccgtcgtcgtcgtcggccttccttggccactctagccgcctcggccgcactgctaccgcgtcgccgacgaggcggagcctcacggcggaggccaagggcgagtggctcccgggccttccctcccccgcctacctcgacggcagcctgccgggtgacaatggcttcgacccgttgggcctggcggaggacccgg

SEQ ID NO: 4839 - DNA, 267 bp, Zea mays
cgacaacatgaacgccaagggcacgctgaacctcctcaccggcgccaccgccgccgccagcggtgggggcagtatcctcaggaagaaaaatacgcacgggatcctgaacgccgtgagctggggcctcctgctgcccatgggcgccaccttcgctcggtacctcaagacgttcaggtccgccgacccggcctggttctacctccacgtggcgtgccagctggccgggtacggcgtcggggtgtccggctgggccaccggcatccacct

SEQ ID NO: 4840 - DNA, 264 bp, Zea mays
cagcaatggtggatgtttggctcgaggtggaggctaaccagtacaccgctgcactgaatcccatcctcttccaggtcctcatcagtccgatgcttgggggaacaccgaccagaaagttgtggatgagaaccttgagaagctgaagaaggtgctagaggtgtacgaggcacgcctgaccaagtgcaagtaccttgctggagacttcctcagcctcgccgacctgaaccatgtgtctgtcactctctgcctgttcgctacgcccta

SEQ ID NO: 4841 - DNA, 264 bp, Zea mays
cccactcaagggtattatgggctacgtggaggaggatctggtttccaccgacttcaccggtgacagcaggtcgagcatcttcgacgccaaggccgggattgccctgaacgaccacttcatcaagctcgtctcttggtacgacaacgagtggggctacagcaaccgcgtcgtcgacctgatccgccacatgttcaagacccagtagagagagatatttctgcctccctatcgtgggtcgtccccaatggcctttggtcgcagaca

SEQ ID NO: 4842 - DNA, 267 bp, Zea mays
gtcttgtgttgttcggagcgggcagcagcacacagccccatcccaatcctagtcgatcttcttcccctcctcaaggaagaaaagaagctgaaccatggggaagagaaagtcagctgctaagccacctcctaagaagcggatggacaagcttgacactgtcttttcctgcccattctgcaaccacgggagtagtgttgagtgccgaattgacatgaagaatctgattggcgaacatcttgtagaatctgtcaggaaaacttcagcaca

SEQ ID NO: 4843 - DNA, 263 bp, Zea mays
agagggaactgaaggagctgctgattgcctgcgctagggcagtggaacgtaacaacagctacgccattgatctgatgatcccagagctgaggaagatggtttcggtgtccggcgagccgcttgacaggctgggagcctacatggtggaaggtcttgttgccaggctcgccgcctccggcagctcaatctacaaggctttgaagtgtaaggagcccaggagctctgatctcctctcctacatgcacttcctgtatgaggcctgc

SEQ ID NO: 4844 - DNA, 267 bp, Zea mays
gtcatttaccagtatcgaagagttccttgagccacttgagctgtgctacaaatcactgtgtgactgcggcgacaaggccatcgcggacgggagcctcctggacctcctgcgccaggtgttcacgttcgggctctccctggtgaagctggacatccggcaggagtcggagcggcacaccgacgtgatcgacgccatcaccacgcacctcggcatcgggtcgtaccgcgagtggcccgaggacaagaggcaggagtggctgctgtcgga

SEQ ID NO: 4845 - DNA, 258 bp, Zea mays
ggacgctagctcaccaccaacctcagcacatcgaggagaagaggagtgggcaatggcttcgtcggtcgccgccgcggcgagcacattcctgggcacccgcctggcggacccggtgccgcagaacgggcgcatcgtggcccggttcgggttcggcggcggaaagcccaaggctgccgtcccgaagaaggtggcgaagacgtcgatctcctctgaccggccgctgtggttccccggcgccgtggcgcccgactacctcga

SEQ ID NO: 4846 - DNA, 259 bp, Zea mays
caaggttcgagttcgtcaccgtctagtacgactgtgcgaaggaggaagaggcgaggagaagatgcagatcttcgtgaagaccctgacggggaagaccatcaccctcgaggtggagagcagcgacaccgtcgacaacgtcaaggccaaaatccaggacaaggaagggattcccccagatcaacagcgactgatattcgctggcaagcagctggaggatggacgcacgctggctgactacaacatccaaaaggagtcaact

SEQ ID NO: 4847 - DNA, 260 bp, Zea mays
cgtttcctcccttcccatcccccactgctcagcagtcagtcagcactcgccacccacacgcctccgctccgcccacggttccactccaactctccgatctccaggaatccgcggctgaggcgccggcgatggcggctcccatggtcgacgccgaatacctgcgccaggtcgacagggcgcgccgccacctccgcgccctcatctccaacaagggatgcgccccgatcatgctccgcctcgcatggcatgatgctggaact

SEQ ID NO: 4848 - DNA, 287 bp, Zea mays
cctactattggcaccttgggaaaaatattttcttggtgctgttaaggatttgtcaatagcagagtctgctgtaccaccagttgattcaagtgttgagacagaagtcagaaatgcggtcagaaaagtagagatgaagagcaaagaatgtgcctatcaagcatggttagggtactacaactcgaacaagaccattggtcgagataagtccagacttgttcaccttgcagaagagttcagccaaagcatgggtcttgcagttcctccagccataccgagaaacattcttc

SEQ ID NO: 4849 - DNA, 282 bp, Zea mays
ccgagctcctcgaaaccctaggagcgtgcttgaccggcggcggcgaggtgatggcgatggaccctgacgcggtacgaaggccttcgtggagcattactaccgaacgttcgacaccaaccgcgcggcgctggttgggctgtaccaggagacctccatgctcaccttcgagggccagaagttccagggcccgtccgccattgccggcaagctcggatctctccctttccaggcctgcgagcatcagatcgtcaccgtcgactggcagccatcgggtccccaggg

SEQ ID NO: 4850 - DNA, 280 bp, Zea mays
tggcgcaacttcctgcggtgctggcacgggcgcggcgacgcctcgcccctcgacgtcatcgccatcaacgacaccggcggtgtcaagcaggcgtcccacctgctcaagtacgactccacgctcggcatcttcgacgccgacgtcaagcccgtcggcgacaacgccatctccgtcgacggcaaggtcatcaaggtcgtgtccgaccgcaaccccagcaacctgccgtggggcgagctcggcatcgacctcgtcatcgtgggcaccggcgtcttcgtcgacc

SEQ ID NO: 4851 - DNA, 276 bp, Zea mays
ctcttcgtcgccgctttcctcctctccgcctaccaggagtttaatgagttcggtgctgatggtggaccagcagctaaggcccttcggcccaaattcaacgtgtttgtcaaaaatgtatctgctcatctgggagtagctgtgccacacattgagttgaagcatgtgattgctgctacaattggtcttaagggtcttggaagcctcctttttattttgagcagctctctcggtgcttatctcctgctgctgtaccttgctttgatcactcctatcatc

SEQ ID NO: 4852 - DNA, 276 bp, Zea mays
gcaagcagcgagtacatacatactaggcagccaggcagccatggcgcccaccgtgatgatggcctcgtcggccaccgccgtcgctccgttccaggggctcaagtccaccgccagcctccccgtcgcccgccgctcctccagaagcctcggcaacgtcagcaacggcggaaggatccggtgcatgcaggtgtggccggcctacggcaacaagaagttcgagacgctgtcgtacctgccgccgctgtcgacggacgacctgctgaagcaggtggacta

SEQ ID NO: 4853 - DNA, 275 bp, Zea mays
gtcggaagctcaagttagaagaagcaccagtgcctgatcgatggcggcccaggctctcctctccggccggcagctgctgggccgccccgtgcagtcggccgtctctaggtcgtcggcgaggaaggcgcccttcgtcgtcagggccagctccagccctccagccaagcaaggtgccgacaggcagctgtggttcgcgtccaagcagtccctctcctacctcgatggcacgctgcccggcgactatggcttcgacccgctgggcctctcggacccgg

SEQ ID NO: 4854 - DNA, 277 bp, Zea mays
gtagtgtgtagtcgcagcagctagcgcccggccggccagtcgagtgagtccatcctccatcgccatccaatggccgccaccgccctgagcatgagcatcctccgcgcgccgccgccctgcttctcgtccccactcaggctcagggtcgcggttgccaagccgctggcggcccccatgcggcgccagctgctgcgcgcgcaggccacctacaacgtgaagctgatcacgccggagggggaggtggagctgcaggtgcccgacgacgtctacatcctgg

SEQ ID NO: 4855 - DNA, 267 bp, Zea mays
gacttgcagccttggattgctagagatgacgaacaaggtcagaagatgtggagagtcaaccagcgtatagtgaagcttatagctgagcttatgaggaaccatgacagccctgaagcgttggtgatactcgctagtgcctccgaccttctacttcgtgctaccgatggaatgctcgtcgatggtgaagcttgtactttgccacagcttgagcttctggaagtgaccgctcgggctgtccatcttatcatcgaatggggagattcaggt

SEQ ID NO: 4856 - DNA, 227 bp, Zea mays
cgccatcacataaaaccagtgcaagcagaagcatcgcaatggcgatcagcaccatggccctctcctccacagccttctccggtaatgcagtgaacgttccgttgtctcacttcggcgaggtccgcgtgacttttcgcaagacggcggctaaggcaaagccggcggcgagctccggcagcccgtggtatggccccgaccgcgagctctacctggggtcgctgtccggc

SEQ ID NO: 4857 - DNA, 267 bp, Zea mays
gaaggttgttgtggtgaaccgctccgtggaaagggtggatgctattcgtgaggagatgaaagatatagagatcgtgtacaggcctctctcagacatgtatcaagctgctgctgaagctgatgtcgtgttcaccagcaccgcatctgaaacttcattgttcgcaaaagaacacgcagaggcactcccccctgtctctgatactatgggaggtgttcgcctgtttgtcgacatatctgtccccaggaatgtcagcgcatgtgtgtctga

SEQ ID NO: 4858 - DNA, 266 bp, Zea mays
ggcgcgcgtctgcaacggaaggaccaagagagacgctcgcagctactacgagatctggcagacggtcggggtggaccggccgtctcagatactgttcctgacggacgtgtgccaggaagccacggcagcacaggctgcaggccttgaggtgctaatatctatcagacctggaaacgcgccactccctgctgaaacccatgggtttgggacagtcgagtcatttgctgaaatcttgacatgaagggaggatgcatcctcaacatgca

SEQ ID NO: 4859 - DNA, 264 bp, Zea mays
ggcttgcataaagcagtatctctatgtatggatcactgctatgtttcaggaacggttggtgatgacagctggtacaagacggtcattttagctggtggttcgtcgtgcttgcctggtttaccagagaggctggagaaagagcttcaccaacttcttccaccttatatgtcagaaggaataagagtactccccccttcatttggcactgattctgcctggtttggtgcaaagatgatcagcaacgtgagtactttcactgaggca

SEQ ID NO: 4860 - DNA, 282 bp, Zea mays
cgccactgtccagtgcgcgcgtcaagcttgcttagctagccgccatggcctccctcgccgccgtctccgtgaagcccgtggccatcaagggtctcgccggcagctccatctccggaaggaagctcgccgtcgccaggccgtcggcccgctccatccgctagccccgcgcaccgccgtggtggccaagtacggcgacaagagcgtctactttgacctcgacgacatcggcaacaccaccggacagtgggacctctacggctctgacgcgccctcgccctacaa

SEQ ID NO: 4861 - DNA, 281 bp, Zea mays
gaattgttccgatcaaggataggaagggacaaactgcacttcagatggctgtgaaaggcaagaacacagatgtagtggaagagttactgatggctgatgtttccattctcaatgtgcgggacaagaagggaaatactgctttgcacatagctacatggaaatgggagaattttgggattatgaaacaccgcagacgtggcttcgacgaaacggaggcgtaggcgagggattcgacattatgaaaaaccagagaagatactacactctaaaatggacatgaa

SEQ ID NO: 4862 - DNA, 280 bp, Zea mays
ccctggacctgctggagatggttttcgccaagggagaccccggcattgccggcttgtatgacgagctgcttgtggcggaagaactcaagccctttgggaagcagctcagggacaaatacgtggagacacagcagcttctcctccagatcgctgggcacaaggatattcttgaaggcgatccattcctgaagcaggggctggtgctgcgcaacccctacatcaccaccctgaacgtgttccaggcctacacgctgaagcggataagggaccccaacttcaa

SEQ ID NO: 4863 - DNA, 279 bp, Zea mays
caaggagagtacgtggaggagcagccatggcttcatcggtggccgccgcggcgagcacattcctgggcacccgcctggcggacccggcgccacagaacgggcgcatcgtggcccggttcgggttcgggttgggcggcaaggcgaactgctccgaagaaggtggcgaagacatcgacctcctctgaccggccgctgtggttccccggcgccgtggcccccgactacctggacggctcgctggtcggcgactacgggttcgacccgttcggtctcgggaag

SEQ ID NO: 4864 - DNA, 281 bp, Zea mays
gaactcaagccctttgggaagcagctcagggacaaatacgtggagacacagcagcttctcctccagatcgctgggcacaaggatattcttgaaggcgatccattcctgaagcaggggctggtgctgcgcaacccctacatcaccaccctgaacgtgttccaggcctacacgctgaagcggataagggaccccaacttcaaggtgacgccccagccgccgctgtccaaggagttcgccgacgagaacaagcccgccggactggtcaagctgaacccggcgag

SEQ ID NO: 4865 - DNA, 217 bp, Zea mays
cgtcaccctcgctgggatcctcggcggcggcgccctcctcgtctacaacaccagcgccctctccggctaaggatatccaatgcatgcgcttcttgcgattcgtcgtgtaaaatcagggtgtctgtctataatctagcctccatggatgctcaaccttcgtcatgtaacaataatcagtgctactcttcattacataattttgatgctatatatatat

SEQ ID NO: 4866 - DNA, 281 bp, Zea mays
cttgagcacatgaaggaatccaaggggctgaagaacgacaccgacctcacggcctctgacctcaaagagctcgtgggtcagtacaaggaggtctacctctcagccaagggagagccattcccctcagaccccaagaagcagctggagctagcagtgctggctgtgttcaactcgtgggagagccccagggccaagaagtacaggagcatcaaccagatcactggcctcaggggcaccgccgtgaacgtgcagtgcatggtgttcggcaacatggggaacac

SEQ ID NO: 4867 - DNA, 282 bp, Zea mays
ggaagacgacgacatcgagctgctggagcgcgtgaaggaggacaggaagaagcggctgcagaagcagggcatcatcagctcctccggcgccgagaccgggtatttgcaggacctcatctacaggctcagcaaagtcgggcaggccattgacaacgacgacctcccagccgcgagcagcgtgctgggaccaagctcagacgcccagtgggtgcagaacatcaatgcagctttctccaagctcagctcaagcccggagcagaggaacgtggtcgacagcttcaa

SEQ ID NO: 4868 - DNA, 275 bp, Zea mays
cgtcgatctcctctgaccggccgctgtggttccccggcgccgtggcgccgactacctcgacggctcgctggtcggcgactacgggttcgacccgttcgggctcgggaagcccgtggagtacctgcagttcgaactggactcgctggaccagaacctggccaagaacgaggccggcggcatcatcggcacccggttcgagtcctccgacgtcaagtccaccccgctccagccctacagcgaggtgttcggcctccagcggttccgcgagtgcgagc

SEQ ID NO: 4869 - DNA, 278 bp, Zea mays
tcggcaccaggctgcgctccaagtacaagatcacctaccagttcgaccgcgtcttccccaacggcgaggtgcagtacctccaccccaaggacggcgtctacccggagaaggtcaaccccggcagggagggcgtcggccagaacttccgcagcatcggcaagaacgtcaaccccatcgacgtcaagttcaccggcaagagcaccttcgactaatcacacatcacgccgcccgcccgcccggccggtgatccaaatcaaaggacttcttcttcttcttat

SEQ ID NO: 4870 - DNA, 271 bp, Zea mays
ggtggtcaaatacatctccaaaatgatgccgatcctagccgtgtcattcttgttcgattgcgtgcagtgtgttctttcaggtgttgctaggggctgtggatggcaaaagattggggcttgtgttaatcttggtgcatactaccttataggaattccagctgccttctgtttcgcctttatgtaccatctaggtggaatgggactttggttgggaataatctgcgcactcgtcatacagatgctattgcttctcacaattaccttgtgcagc

SEQ ID NO: 4871 - DNA, 273 bp, Zea mays
cgagaagccgccgccgatcgggcccaagaggggcgccaaggtggagatccttaggagggagtcctactggtacaacgggatcggcaacgtcgtcaccgtcgatcaggatcccaacacccgctacccggtggttgtgcggttcaacaaggtgaactacgccggcgtgtccaccaacaactacgccttggacgaggtcttagaggtgaaatgagtggggccggccggctcaagggctccgcgctagctaccgtgtgattgatttgtagtagttgt

SEQ ID NO: 4872 - DNA, 268 bp, Zea mays
tagcaacaagaagtttgattctgatgtttctcttgatgtcatagcgatgagaacacctgggttcagcggagagacttggcaaaccttctgaatgaagcagccattctggctggaagacggggaaggacagcaatttcttcaaaagagattgatgattctattgacagaattgtagctggtatggaagggactgtgatgacagacgggaagagcaaaagtcttgttgcttaccatgaagttgggcatgcaatttgcggaactttgacgc

SEQ ID NO: 4873 - DNA, 264 bp, Zea mays
gccagtctcaacaagcactctctatccctgggatccatcatctacatacatccatgagcctccttacttcaaggatatgacaatgactcctcctggcccgcgacccgtgaaggatgcatattgccttctgaactttggtgacagtatcacaactgatcacatctcgcctgccggaaacattcacccagacagcgcactgcaacatatctgaaggagcgtggtgttgaaaggaaggacttcaactcatatggtagccgaagagga

SEQ ID NO: 4874 - DNA, 267 bp, Zea mays
ctcccccactacgactcgagcgagtgggactggctgcgcggcgcctggccaccatggaccgcgactacggcatcctcaaccgcgtgttccacaacatcacggacacgcacgtcgcgcaccacctcttctccaccatgccgcactaccacgccatggaggccaccaaggcgatcaggcccatcctcggcgactactaccacttcgacccgacccctgttgccaaggcgacctggcgcgaggccagggagtgcatctacgtcgagcccg

SEQ ID NO: 4875 - DNA, 265 bp, Zea mays
gggaaatgctgcgtctcgggatgctcaggcattcgcgtaaacgatgcggagaagctcgtgacgatcggaggccatgtgctgcgcgaaggtgagtggctgtcgctgaatgggtcgactggtgaggtgatccttgggaagcagccgctttccccaccagcccttagtggtgatctgggaactttcatggcctgggtggatgatgttagaaagctcaaggtcctggctaacgccgatacccctgatgatgcattgactgcgcgaaaca

SEQ ID NO: 4876 - DNA, 266 bp, Zea mays
gtgctcgatctccatctcgaccgtcgctcaccgggaagctacgctacgacgaagcatggcgtccgtcaccgcccgcgccccggtcgcagccctgcgcccgtcgtcgtcgtcggccttccttggccactctagccgcctcggccgcactgctaccgcgtcgccgacgaggcgcagctataaggcggaggccaagggcgagtggctcccgggccttccctcccccgcctacctcgacggcagcctgccgggtgacaatggcttcgacc

SEQ ID NO: 4877 - DNA, 261 bp, Zea mays
cactcctcgccatcacataaaaccagtgcaagcagaagcagcgcaatggcgagcagcaccatggccctctcctccacagccttcgccggcaaggcagtgaacgtgccgtcgtctcacttcggcgaggcccgcgtgacgatgcgcaagacggcggcgaaggcaaagccggcggctagctccggcagcccgtggtacggccccgaccgcgtgctctacctggtgccgctgtccggcgcgcccccgagctacctgacgggcgag

SEQ ID NO: 4878 - DNA, 266 bp, Zea mays
cagtgccacagcggcagaccgacctcccgttcttactcgctgttgaagatgtcttctccatcaccggtcgtggtacagttgccactggccgtatcgagcgtggcaccgtcaagattggtgacacagtcgatatcgttggaatccgggacacccggaactgcaccgtgactggcgttgagatgttccagaagaccatggacgatgccatggctggagacaatgtcggactgctgctccgtggtatgcagaaggatgacattgagaga

SEQ ID NO: 4879 - DNA, 261 bp, Zea mays
tgagactgtacaaactgatctgccatgcaactttttcttgcccaccatggttttcttctggagcaaggaagtttattaagcgcattctcgatcctaaccctgataccaggataaaaattgcagaaattttggaagatgaatggttcaaaaaaggctataaaccaccacattttgaacaaggcgaagatgttaaccttgacgacgttgatgctgcattcaatgattcagaggaccgtcttgtagcagagaaaagagaaaagc

SEQ ID NO: 4880 - DNA, 258 bp, Zea mays
caccaaggagagtacgtggaggagcagccatggcttcatcggtggccgccgcggcgagcacattcctgggcacccgcctggcggacccggcgccacagaacgggcgcatcgtggcccggttcgggttcgggttgggcggcaaggcgaacctgctccgaagaaggtggcgaagacatcgacctcctctgaccggccgctgtggttccccggcgccgtggcgccggactacctggacggctcgctggtcggcgactacgg

SEQ ID NO: 4881 - DNA, 261 bp, Zea mays
gagctttcagaggcttcccagatccttaattgtctgtctgatttggtctactggacggtttgtgcatgtatgcagacgcagcacaaagtcgaaatggacaagagggatggaaagttcagcccacagcctatggcagtgcccccggtgcaacaaatgtcacgcatcgatcagcctatgccgcctcctgctggatatgcaccgcaaccagcatatgggcagccttatggtggctatccatctcctcctggccaaggttatccg

SEQ ID NO: 4882 - DNA, 155 bp, Zea mays
gtcgctctgtgtcagttgttagtgctgtgttcatcctcggctccagcagacccatgcatcaaccagcatggactgtggatcgatggatgctgttactcctgtcaggatttgttctaagttaatcctaaggaaaaaatggtgcttcttggtgctgc

SEQ ID NO: 4883 - DNA, 250 bp, Zea mays
ggcgaagacatcgacctcctctgaccggccgctgtggttccccggcgccgtggcgccgactacctggacggctcgctggtcggcgactacgggttcgacccgttcggtctcgggaagcccgtggagtacctgcagttcgagttggactcgctggaccagaacctggccaagaatgaggccggcggcatcatcggcacccggttcgagtcctccgaagtcaagtccaccccgttgcagccctacagcgagg

SEQ ID NO: 4884 - DNA, 254 bp, Zea mays
ggcaaccccagcctgatccacgcgcagagcatcctcgccatctgggcctgccaggtcgtgctcatgggtgccgtcgagggctaccgcattgccggcgggccgctcggcgaggtcgtcgacccgctgtaccctggcggcagcatcgaccccctcggcctggccgacgaccccgaggccttcgccgagctcaaggtgaaggagctcaagaacggccgcctcgccatgttttccatgttcggcttcttcgtccaggc

SEQ ID NO: 4885 - DNA, 255 bp, Zea mays
cgggaagctattcaagtggtggcagatcgtgtcccaagggacatccttgagcagatttacaaaattgcattgccaaagccaaagccatatgaaccccagtcccggccgccaactgctgctgagctgttgcgggcctactgcgcgtctcgtgggcatgtcagccatgctgggctgcctgatgagaccagggctgctcgacagatactgaaggattacattgatggtaaaatcccacactttgagctccctcctggc

SEQ ID NO: 4886 - DNA, 254 bp, Zea mays
gccgtttcttggccagggtcgcgccgccgccaatgccagccccctccgcgacgtcgccgccgccgctgctggcggccggatcaccatgggcaacgacctgtggtacggcccggaccgcgtcaagtacctgggccccttctccgcccagacgccctcgtacctgaccggcgagttccccggcgactacggctgggacaccgccgggctgtccgcggacccggaggcgttcgcgcggaacagggcgctggaggtga

SEQ ID NO: 4887 - DNA, 248 bp, Zea mays
ggagagtacgtggaggagcagccatggcttcatcggtggccgccgcggcgagcacattcctgggcacccgcctggcggacccggcgccacagaacgggcgcatcgtggcccggttcgggttcgggttgggcggcaaggcgaactggctccgaagaaggtggcgaagacatcgacctcctctgaccggccgctgtggttccccggcgccgtggcgcccgactacctggacggctcgctggtcggcgact

SEQ ID NO: 4888 - DNA, 245 bp, Zea mays
cttgatcgtgctataaatttctatgggaaggcatttggcatggaacgtcttcgcaagcgagacaattctgggtacaagaatacgattgcgatgatgggatatggcccagaagacaaaaatgctgaattggagttgacctacaactatggggtgaaggaatatgataagggaaatgcttatgcacagattgctattagtactgatgatgtctacaagactgcggaagcaattagagtaaatggtgg

SEQ ID NO: 4889 - DNA, 245 bp, Zea mays
caccccgctgccgcggctcgaacataaaccctagagccgccggcccggtcgcgctacgacacaaatctcaaatcacccggagagaactcgctcgcgaaggctgaactcatggctcgcgtcttcgttgggaacctggatccgcgtgtcacggcgcgggagattgaggacgagttccgcacgtttggggttctgaagagtgtatgggttgctaggaaaccaccagggtttgccttcattgacttcga

SEQ ID NO: 4890 - DNA, 244 bp, Zea mays
ggtggcggacggaaggcgaaggagtagcagcagcaggcggcgccgagtagcggctccccacctcgagcttgccaccatggctagaggattgaagaagcatttgaagaggctcaatgcgcccaagcattggatgctggacaagcttggcggagcttttgctcccaagccatcttctggacctcacaagtctagggagtgcctgccactgatcctcatcatcaggaacaggctcaagtatgctctt

SEQ ID NO: 4891 - DNA, 242 bp, Zea mays
ctcgccatgttctccatgttcggcttcttcgtgcaggccatcgtcaccggcaagggtcccgttgagtacctcgccgaccacctcgctgaccctgtcaacaacaacgcctgggcctacgctaccaacttcgtccccggcaagtgagcgagggcatatacatacttgtatgtgtgtaccgtagacatacgtattcgtatatgtactgcagtagatgtaccagtatttgtgaagaagggagcatg

SEQ ID NO: 4892 - DNA, 247 bp, Zea mays
gactcctcgccatcacatgaaaccagtgcgagcagaagcagcgcagtggcgagcagcaccatggcgctctcctccacagccttcgccggcaaggcgatgaacgtgccgtcgtctctcttcggcgaggcccgcgtgacgatgcgcgatacggcagcgaaggcaaagccggcggcgagctccggcagcccgtggtacggccccgaccgcgtgctctacgtgggacccgctgtccggcgcgcacccgagc

SEQ ID NO: 4893 - DNA, 247 bp, Zea mays
ggtggcctgaacgtcgacgtcgacgccaacgggagaaagggcaaggggaagggcgtgtaccagttcgtcgacaagtacggcgcgaacgtcgacggatacagcccaatctacaacgaggatgactggtctcccaccggcgacgtctacgtcggtggaaccactgggcttctgatctgggccgtcaccctcgctgggatcctcggcggcggcgccctcctcgtctacaacaccagcgccctctccggct

SEQ ID NO: 4894 - DNA, 244 bp, Zea mays
aggaaatccgactgggcaggttcttgctgaagacaaccaatatgatatagtgaaattctgtaaaaatgagggccttgttcttctagctgatgaggtatatcaagagaacatctatgttgacaacaagaaatttaactctttcaagaagattgcaagatccatgggatacggcggggatgatctccctctagaaccattcagtctgtctccaaggatactatggagagtgtggtaaaagaggagg

SEQ ID NO: 4895 - DNA, 246 bp, Zea mays
ggaaaagggtgtctcccttatgctgccaaccgatgttgtcattgctgacaagtttgcccctgatgctaacagccagattgttccagcatctgcaattcctgatggttggatgggcctggatattggcccagattctgtcgcttcattcaacgcagccctggatacaaccaagacggtcatctggaacgggcccatgggtgtcttcgaatttgacaagttcgctgtaggaaccgaggctgtggcaaa

SEQ ID NO: 4896 - DNA, 249 bp, Zea mays
agcaagcaagcaagcagcgagtacatacatactaggcagccaggcagccatggcgcccaccgtgatgatggcctcgtcggccaccgccgtcgctccgttccaggggctcaagtccaccgccagcctccccgtcgcccgccgctcctccagaagcctcggcaacgtcagcaacggcggaaggatccggtgcatgcaggtgtggccggcctacggcaacaagaagttcgagacgctgtcgtacctgccgcc

SEQ ID NO: 4897 - DNA, 271 bp, Zea mays
tgcgttaatcacgagacaggaatggttgatccaaggaagtttggtttgctagcgaactggcagcgggactacacgatggagaacatcctaacccagctcaagaaagagatggctgcctcgcagaatcgaaagttagtgcagcctccagaagggacattcttctaacgaaggttcacttggcccgtcatgggatccaacagtaattgaaacttttatgggctaaaaaacagcgtctacatctggtgcccctgcctgtctttgtgatttttta

SEQ ID NO: 4898 - DNA, 272 bp, Zea mays
ttcgttccccttctcgcctccacgagccttcacaaattgccctctcagctcttctcctaatctcactctagccctagccaaatcccagacccatcccagccctagcgacaccaaccagctcgccagcgaccatggggaacccggagaagctgatgaatcagatcttcgacctcaagttcacctccaagtcgctgcagcggcaggcgcgcaagtgcgagaaggaggagaaggagcagaagctcaaggtcaagaaggcgatcgagaagggcaac

SEQ ID NO: 4899 - DNA, 267 bp, Zea mays
tgcgttaatcacgagacaggaatggttgatccaaggaagtttggtttgctagcgaactggcagcgggactacacgatggagaacatcctaacccagctcaagaaagagatggctgcctcgcagaatcgaaagttagtgcagcctccagaagggacattcttctaacgaaggttcacttggcccgtcatgggatccaacagtaattgaaacttttatgggctaaaaaacagcgtctacatctggtgcccctgcctgtctttgtgattt

SEQ ID NO: 4900 - DNA, 268 bp, Zea mays
ttcgttccccttctcgcctccacgagccttcacaaattgccctctcagctcttctcctaatctcactctagccctagccaaatcccagacccatcccagccctagcgacaccaaccagctcgccagcgaccatggggaacccggagaagctgatgaatcagatcttcgacctcaagttcacctccaagtcgctgcagcggcaggcgcgcaagtgcgagaaggaggagaaggagcagaagctcaaggtcaagaaggcgatcgagaaggg

SEQ ID NO: 4901 - DNA, 266 bp, Zea mays
ccaccatcgatctgcaagtctcgctacgtagcagtgcaatacaaaaaaagcagccgcaatggcgagccacaccatggccctctcctccacggccttcgccggcaaggccgtgaacgtgccgtcgtcgtccgccttcggcgaggcccgcgtgacgatgcgcaagacggcggcgaaggccaagcctgcgccggcgtccgggagcccgtggtacggccccgaccgcgtgctgtacctgggcccactgtccggcgagccaccgagctacc

SEQ ID NO: 4902 - DNA, 267 bp, Zea mays
catttggtagcaactacagttcaggcgaacgttatgggagtttcagtggtacaaaggaagctgactcatacggtgatagttacagggacaaagaatctgttaaaacttccacaagcaatagcggcagtcggaaatttggcagcaagctgaggaaggatgcgaacctgataggaggaatgaggattatagttcacccagctctttgagacccccatctaatacaaataacactgaggacgactttgatgacttcgatcctcgtggatc

SEQ ID NO: 4903 - DNA, 267 bp, Zea mays
acccttctcttcggtgacaagccggtcaccgtctttggcatcaggaaccctgaggaaatcccgtggggtgaggctggcgctgagtacgtcgtggagtccaccggcgtcttcactgacaaggacaaggctgctgcacatctcaagggtggtgccaagaaggttgttatctctgccccaagcaaagacgcacccatgtttgttgttggtgtcaatgaggacaagtacacctcggatgttaacattgtttccaatgctagctgcaccaca

SEQ ID NO: 4904 - DNA, 269 bp, Zea mays
cagcaatggtggatgtttggatcgaggtggaggctaaccagtacaccgctgcactgaatcccatcctcttccaggtcctcatcagtccgatgcttgggggaaccaccgaccagaaagttgtggatgagaaccttgagaagctgaagaaggtgctagaggtgtacgaggcacgcctgaccaagtgcaagtaccttgctggagacttcctcagcctcgccgacctgaaccatgtgtctgtcactctctgcctgttcgctacgccctacgca

SEQ ID NO: 4905 - DNA, 79 bp, Zea mays
gtttcattgattcttgaagagatcgagcttcttttgcatcacaacgtcgaggaagtcttgcaactacggctcaagctgc

SEQ ID NO: 4906 - DNA, 265 bp, Zea mays
cgacccccctcctcccagtccccacacactgcacgccgccgccgggtcctcctagggtttcgccgcgatgtcgctccggccgagcgagcgggagcagatgcggaagggcaactacaagcagacggtggacgcggaggagagccgccgccgccgcgagggccagatgatggacatgcgcaaggccaagcgcgaggaaagtctccagaagaagcgctgcgatgggtttcccgcctccgccgccggtgtgccgccgatgggccactcc

SEQ ID NO: 4907 - DNA, 88 bp, Zea mays
cacgcacgcatacacagcacagagtgaggtaagcatccgaaaaaagctgtgatctgatcgaaatggccgccgccaccatggctctcac

SEQ ID NO: 4908 - DNA, 250 bp, Zea mays
ctcaaggacttcagggagctcgtgtgttaaatgcttatgcaaggtatccttgatgacgcccccgagcaagtgaagattgttagagtgtcatgtggagagtaccatacagcagctatatctgaaaatggggaggtgtatacttggggactgggaagcatggggcagcttgggcattgctccctccaatctggagataatgagctgatccctaggcgagttgtggcccttgatggtatagtagttggggacg

SEQ ID NO: 4909 - DNA, 264 bp, Zea mays
caggcatcctcaacaactggagggcgtccttcaagccacaggacccagtccaagcaagccatttccagtcagatggaagagtgctatactgcctcgaactaaccaagaacttcaatagtggcgacactgataccatggaacaggaagttgctgtactgctatctcggcttagattcatacagtctactctattccacaccgatgtcacgtacctggagtttttggacagggtgcacacctctgagctgaagctgagggcacaaa

SEQ ID NO: 4910 - DNA, 298 bp, Zea mays
actccatccactactttactcaaagtctagagctagcttttgcttggctcaccagacaaacagcagcagatggcgtcgacgatcatggccgccacctcccgcatcgtcgcggcaaagacgccgtttcttggccagggtcgcgccgccgccaatgccagccccctccgcgacgtcgccgccgccgctgctggcggccggatcaccatgggcaacgacctgtggtacggcccggaccgcgtcaagtacctgggccccttctccgctcagacgccctcgtacctgaccggcgagttccccg

SEQ ID NO: 4911 - DNA, 294 bp, Zea mays
gtcatttaccagtatcgaagagttccttgagccacttgagctgtgctacaaatcactgtgtgactgcggcgacaaggccatcgcggacgggagcctcctggacctcctgcgccaggtgttcacgttcgggctctccctggtgaagctggacatccggcaggagtcggagcggcacaccgacgtgatcgacgccatcagcacgcacctcggcatcgggtcgtaccgcgagtggtccgaggacaagatgcaggagtgggctgctgtcggagctgcgaggcaagcgtccgctgctgc

SEQ ID NO: 4912 - DNA, 292 bp, Zea mays
ggaagctcaagttagaagaagcaccagtgcctgatcgatggcggcgcaggctctcctctccggccggcagctgctgggccgccccgtgcagtcggccgtctctaggtcgtcggcgaggaaggcgcccttcgtcgtcagggccagctccagccctccagccaagcaaggtgccgacaggagctgtggttcgcgtccaagcagtccctctcctacctcgatggcacgctgcccggcgactatggcttcgacccgctgggcctctcggacccggaggcaccgggggcttcatcga

SEQ ID NO: 4913 - DNA, 292 bp, Zea mays
agcaagcaagctcgatctactactactactagctggtacacatacgagccagcctgccagccagcttgccatggcgcccaccgtgatgatggcctcgtcggcaaccgccgtcgccccgttccagggtctcaagtccgccgccagcctccccgtcgcccgccgcagcaccaggagcctcggcaacgtcagcaacggcggaaggatccggtgcatgcaggtgtggccggcctacggcaacaagaagttcgagacgctgtcgtacctgccgccgctgtcgacggacgacctgctg

SEQ ID NO: 4914 - DNA, 290 bp, Zea mays
gatttatccacctattaatgtcctgccatctctttcacgattgatgaagagtgctattggtgagggcatgacacgtcgagaccattcggatgtatctaatcagctttatgccaactatgctattggaaaggatgttcaggccatgaaggctgtcgttggagaggaggcactctcgtctgaggatctgctttacttagagttccttgactagtttgagaggaagtttgtgacacaaggagcatatgacacacggaacatcttccagtcactcgatcttgcatggacattgc

SEQ ID NO: 4915 - DNA, 293 bp, Zea mays
accagcttagcgtcaggatgccctgatctcagagccgtagacttgggcggttgtgttcttataacagatgagagtgtggttgctcttgccaacggatgtccgcacctgcgctcgctgggcctctacttctgccagaacatcacggaccgcgccatgtactcgctcgcaaacatccgcgtgaagagcaagcgtcggaggagggatgcagtgaaagacgggctcgcgaacctcaacatcagccagtgcaccgccctgacgcctccggcggtgcacgccgtctgcgactccttccc

SEQ ID NO: 4916 - DNA, 293 bp, Zea mays
aagaaagcttacccaatggtgtcctcgccggttacccagttgtgggtttccgggctgtgctggttgatggctcatatcacgatgtggattcaagtgtcttagcattccaaattgcagccagaggagccttccgtgagggaatgaggaaagctggtccaaggcttctagagcctataatgaaagttgaagtgataactcctgaagagcatctgggtgatgttatcggtgatttgaactctagaagaggacaggtcaacagcttcggggataagcctagtggactcaaggtggtt

SEQ ID NO: 4917 - DNA, 288 bp, Zea mays
ctccaaagcgccctcctgccccgcaaaatggagacctccttcctgcccaccacactccccaacacaaggcctctccccgcgctccgaacctacgccccagccgcctcgatccttccccaacagcgccctcgtcgctccaccatacgcgcagcatcacccggggccggaaggaggagacggtgaccaccgtccgggagcaactggaggggtgctacctcctggcgggtatcaagtacgagggcctgacggtgaagcagctgcagggaatccgcgacgcgctccccgaca

SEQ ID NO: 4918 - DNA, 287 bp, Zea mays
accacatcgccgaccccgtcaacaacaacgcctgggcttacgccaccgacttcgtccccggcaagtgagcgagggcatgatgcttgcatgcgtgtaccgtagacgtaccgtattcctacgtactgcaggttgcaccagtatttgtgaagggagctgtgcgtgggagccagagattgtaccgctagtgtatttttgtatgcacgccgtggagctgatcaatgaaatatgctgtaaatatattatgtcttaaaaaaaaaaaagaaaaatgagagagaaaaaaaagaaaa

SEQ ID NO: 4919 - DNA, 285 bp, Zea mays
tcgtcttcttcaacttccagcgggagaacgtggcgaacaggtgcccgcgcagaacggcaagacgcacttcgacgccggcgacgagcgcgccaaggagttcgcggccctgctcaagtccaacgaccccgtgggcttcaacctcgtcgacgtcctcgcctggggctcgctcggccacatcgtcgcctactacatcctcgccacctccagcaacggatacgaccccaacttcttctgagcggtcgtcgaggatgtattctacagacagccgtgtgcgtgcgtgtgtgc

SEQ ID NO: 4920 - DNA, 286 bp, Zea mays
cgagaggctccagccggacgaggaggaaagaggagcagcagggccgggggagagatgttcctgtgggactggttctacggggtgctggcctccctcggcctgtggcagaaggagccgaagatcctcttcctcggcctcgacaacgccggcaagaccacgctgctccacatgctcaaggacgagcggttggtgcagcaccagccgacgcagcacccgacgtcggaggagctcagcatcggcaagatcaagttcaaggccttcgacctcggcggccaccagatcgcgc

SEQ ID NO: 4921 - DNA, 287 bp, Zea mays
attttggactaagcgcccttccgcaaaaccaacgaaaagatggtttggtgcataccacatgtggcagccctaactacatagccccggagggagtcttccatttgacgaccaaaatatggttgtcctctatcagaagattctgaaagggaatgctcacattccaaagtggctctctcaaggtgcccaagatctactgcgaaagatcctggatcctaacccgatcacgcgcgtagatgtggatgggataagggcacacgattggttcaagcaaggctacgctccttctg

SEQ ID NO: 4922 - DNA, 287 bp, Zea mays
ggcttctcaatcgttgtttttggcaacaaaattagcacacaaactggaattggcacgtccattgccatagctggtgttgctatgtactcttacattaaggctaagattgaagaggagaaaaggaaaaagagcgcatgatgagctgactgctgtgaatattttaccttctgcgtctgggacacaacaacaacatcgtcgacaatcaagattatgccttgttttgtagtattcgtcttgagtcgctttgtttattaccaatctattatctggtgttgaacagcagcaca

SEQ ID NO: 4923 - DNA, 287 bp, Zea mays
gtggaaggccgtgaagatcctgacaggggcgtgcagcctcagccactgactcaggattttttgatgatgtcttctgggaaacgcaagacggatgagtatcctggtcagctcccttctggttcttttgtaccacaacaagatggaagtgctgatcagatagtagaatttgttgtgtcaaaggaaaatgcgaatcaactttggagttccatcggcaataagcttgaaacaccaaccaagacaataactccagttattccgcagcgtgatgggattcaagataactacaa

SEQ ID NO: 4924 - DNA, 281 bp, Zea mays
  unsure (1)..(281): unsure at all n locations
ctggcgacggcggcggccgagacggcgtcggcggcttcgtgcacgccgggcagctggcggcttgcccgccggcgatcacggccggcgcgaggccctccgcgtcgtgctgctccaacctcaaggcgcacanggggtgcttctgccagttcgtgaagaaccccacctacgggcgctacgtcaacagccccaacgcgcgcaaggtcgtcgcctgctgcggcgtctccgtgccgcggtgctagtacgtgtacgtgtgtgcaatgtgcatgcatgtacgtgcgcac

SEQ ID NO: 4925 - DNA, 281 bp, Zea mays
gttcttcgagacgttcgcggctccgttcaccaagagaggtctgctgcgcaagttcctgctgctgggcggcggctcacttctggcctacgtcagcgcgtcggcgtcaccggacctcctgccgatcaagaagggacctcaggagccgccgcagccgggcccgcgcggcaagatctaagctcagcttctccatttgcatggtctagtagcttgctttgtactgctagcgccggtcgatccgtcgcaatcgtcatggatcatctctctatcttgttgttacgctg

SEQ ID NO: 4926 - DNA, 279 bp, Zea mays
gcgttatcctttgagcagtttgggcgctgagcaagtccagtgagagagggagagcggcgagaggatggctgggatggcatcgctgcagggcgccatggcgtcgctctccatctccgcgctaggcagcgcgacggcgagcagcagcagcttctggggcaaccggctcgccacctactccgcgccgcagcctggggtaaggtttatggtcaagatatgcccaattgaaatgagacttaagagatgggagcgaaagaagtgtaaaccaaacagtcttcctgt

SEQ ID NO: 4927 - DNA, 281 bp, Zea mays
cgacaagccctacgggattgggggtggcctgaccgtcgacgtcgacgcgcaacgggagaaagggcaagggcaagggcgtgtaccagttcgtcgacaagtacggcgcgaacgtcgacggatacagcccaatctacaacgaggatgactggtctcccaccggcgacgtctacgtcggtggaaccactgggcttctgatctgggccgtcaccctcgctgggatcctcggcggcggcgccctcctcgtctacaacaccagcgccctctccggctaaggatatcca

SEQ ID NO: 4928 - DNA, 268 bp, Zea mays
gcgaaacccacaaaccctctccctcctgtactccggccgacacatccaggggcgatgacgctgggtagctccggcgccggatcgagcgtcgtcgttcctcgaaacttcaggctattagaggagctcgagcgtggagagaagggcattggtgatgggacagtgagctatggaatggatgatgctgatgacatctacatgcggtcatggactggtaccatcattggccctcacaatactgtacatgagggtcgcatctaccagctgaagt

SEQ ID NO: 4929 - DNA, 265 bp, Zea mays
agaacaaccaaggtgtggtttcagccgtaaagtggtcaacattttgaagcaagaaggggtcgaatttgggagctttgacatccttacagataatgatgttcgtgaaggtatgaagaagttctccaactggcccacttttcctcaactgtactgcaaaggcgagctgcttggtggatgtgatattgttattgctatgcatgacagtggtgaattgaaggatgtttttgaggagcacaatattcccctcaaaccacagggtagcaaa

SEQ ID NO: 4930 - DNA, 268 bp, Zea mays
ttggacagcaagttcccttctctctgtggctttctcttgcccctgtggtcattggtgtttcaatggcatcccttactgagctttcattcaactggactggcttcatcaatgccatgatatcaaacatctcattcacttacaggagcatttattccaagaaagctatgactgacatggatagcaccaacgtgtatgcttacatctcaataatcgctctaattgtttgcattccacctgcattgatctttgaagggcccaagctaatgca

SEQ ID NO: 4931 - DNA, 269 bp, Zea mays
cagctgttgtgagctccattgaggaggaagttcacaagctccagtgggccacgatgtggggagctgatactgtcatggacctttcaacagggcgacatatccatgagacgcgggaatggattattcgcaactctccggttcctattgggactgttcctatttaccaagcacttgagaaagtaaatggtattgctgaaaatctgagctgggaaatttttagggataccttgattgaacaagctgagcagggcgttgattacttcacaatc

SEQ ID NO: 4932 - DNA, 264 bp, Zea mays
acacacacacaaccagatctcccccaaatccacccgtcgggacctccgcttcaagatgcagatctttgtgaaaaccctgactggcaagactatcaccctcgaggtggagtcgtctgacaccattgacaacgttaaggccaagatccaggacaaggagggcatccccccagaccagcagcggctcatctttgctggcaaacagcttgaggacgggcgcacgcttgctgactacaacatccagaaggagagcaccctccaccttgt

SEQ ID NO: 4933 - DNA, 264 bp, Zea mays
gtcggcctcaccaacaacctgggcctcttcgagtcggacgcggcgctgctgaccaacgcaaccatgaaggcgctggtcgactccttcgtgcgcacgaggccacgtggaagaccaagttcgccaactccatgctcaagatggggcggatcgaggtgctcacggggacgcagggcgagatcaggcgcaactgcagggtcatcaaccctgctaatgccgccgccgacgtcgtccttgcccgtcagccaggttcatcaggatccactg

SEQ ID NO: 4934 - DNA, 265 bp, Zea mays
ggaagaactcaagccctttgggaagcagctcagggacaaatacgtggagacacagcagcttctcctccagatcgctgggcacaaggatattcttgaaggcgatccattcctgaagcaggggctggtgctgcgcaacccctacatcaccaccctgaacgtgttccaggcctacacgctgaagcggataagggaccccaacttcaaggtgacgccccagccgccgctgtccaaggagttcgccgacgagaacaagcccgccggactg

SEQ ID NO: 4935 - DNA, 264 bp, Zea mays
cgtgattccgcatcccgttcgcgagcgcgacacacgctgagagctcacggctgaccttcccgacggcctccagctccatcttgattcttgaggcgaagcccggtgcgtaagagtctgccatggccagcgagaataaggtctttgggttcgaggaagtcgccaagcacaacgtcaccaaggactgctggatcatcatcgccggcaaggtgtatgacgtcactccgtttatggatgagcatcctggtggagacgaggttttgctag

SEQ ID NO: 4936 - DNA, 265 bp, Zea mays
cctcaacgccatgaaccaggggcccaacccgtggcacgtggccttctcctacgcgcgggcgctgcagaacacctgcctcaagacctggggcggcgagccggagaaggtcaaggcggcgcaggacgcgctgctgctgcgcgccaagggcaactccctggcgcactcggcaagtacacctccgacggcgaggccgccgaggccaaggagggaatgttcgtcaagaactacagctactaattaatcgcccggccatcacccgggatac

SEQ ID NO: 4937 - DNA, 260 bp, Zea mays
aagaagacgagtgtcaagtgaacctgaaacttgcggtgtcactggctggtacagctgagtgtgagtgagtgatcgagctagctgagctccgatcctcgctagctagctaggataccgccataccacaagtcttcttcacaagtttaggagtgacagcaacaagagatcgatggcctctgccaccgtgctcaagtcctccttccttcccaagaagtccgaatggggcgccaccaggcaggccgccgcgcccaggccgccca

SEQ ID NO: 4938 - DNA, 260 bp, Zea mays
ctcgctccaagccgcggccaccctgatgcagccggccaagatcggcggccgggcgccctttgcctcgctgccgtcccgcccgtcgtcgcaactcgcctgcagggcgttcggcgtcgacgccggcgccgccaggatcacgtgctccctgcaggacgtcgccagcaggtgcgtcgacgccgcgaagtcgccggcttcgcgctcgccacctcggcgctcctcgtctcgggcgcgaggcggagggcacgcccaagaggctgacc

SEQ ID NO: 4939 - DNA, 262 bp, Zea mays
cgcacgcatacacagcacagagtgaggtaagcatccgacaaaggctgtgatctgatcgacatggccgccgccaccatggctctcacctcccgcgcgctcgtcggcaagccggcgaccagcaccagggacgtcttcggcgaggggcgcatcaccatgcgcaagactgctggcaagcccaagccagcggcgtccggcagcccctggtacggggccgaccgcgtgctgtacctgggcccgctgtccggccagcccccaagctacc

SEQ ID NO: 4940 - DNA, 260 bp, Zea mays
ctcagggacaaatacgtggagacacagcagcttctcctccaggtcgctgggcacaaggatattcttgaaggcgatccattcctgaagcaggggctggtgctgcgcaacccctacatcaccaccctgaacgtgttccaggcctacacgctgaagcggataagggaccccaacttcaaggtgacgccccagccgccgctgtccaaggagttcgccgacgagaacaagcccgccggactggtcaagctgaacccggcgagcga

SEQ ID NO: 4941 - DNA, 262 bp, Zea mays
gcaagctcgatctactactactactagctggtacacatactagccagcctgccagccagcttgccatggcgcccaccgtgatgatggcctcgtcggcaaccgccgtcgccccgttccagggtctcaagtccgccgccagcctccccgtcgcccgccgcagcaccaggagcctcggcaacgtcagcatcggcggaaggatccggtgcatgcaggtgtggccggcctacggcaacaagaagttcgagacgctgtcgtacctgcc

SEQ ID NO: 4942 - DNA, 282 bp, Zea mays
cattattcgacctcacctcaccttgccaccggccatggctgccgtgaccgccgcggccatctctctgtcctcctcctcctcctcctcccctgtggcacatggtcttcagcaccgaaggcgagatcccgtatagagaggggcagtccatcggcatcatcgctgatggcgaagacaagaacggcaagccgcacaagctcaggctatactccatcgccagcagcgccctcggagatttcggcgactccaagacggtatcgctttgcgtgaagaggctagtctaca

SEQ ID NO: 4943 - DNA, 284 bp, Zea mays
gacttaattactcctgcaacagtatcaattattttgttcacgcagccatcccgacctattctattacaggtggagaaaatcaaggcgttgatgctaatgggaattcactcgacttctcaacgaagctgctccacctcgcatggcacccgaccgagaattctattgcatgtgctgctgcaaatagcttgtatatgtattatgcgtagagaatgccctacagaaaatttgttttttttgtggcttgctctcggcgaaggcccagggcccttcaactgcaaccagag

SEQ ID NO: 4944 - DNA, 281 bp, Zea mays
cgtgatgtctcaggttgcatggcaggtgttcgttgttttcattcccgtggctgctacgtgtttctggtatcagcgatactacattgataccgccagggagatgcaaaggctagtaggtgtctgcaaagctcctatcatacagcattttgccgaatcaataacaggatcgactaccatcagaagttttggcaaggaagatcagtttgtatcagcaaatagccatctaatggatgcctactccagaccgaaattctacaacgctggagcgatggaatggcttt

SEQ ID NO: 4945 - DNA, 281 bp, Zea mays
caaagaattcgacatgcatgtgatcatcgagaccaaccgcacaacggcgaggatcttccctgctgtcctagacgtcgagaacccagagttcaagaggaagcttgacaggctggttgagatcaaccagaagatcattgccgtcggagagtccgacgaaatccccctagtgaagaacctgaagaggattcctcttgtcgcctctctggtgtccgagatcatcgccgcctacctcatgccccccatcgagtctggctcggttgatttcgccgaatttgagcccc

SEQ ID NO: 4946 - DNA, 278 bp, Zea mays
ccctaagggttttacacccaagtttagcttagctccccttgtaggacggttgtctgagcttcttggcattcaggtgcaaaaagccgacgatgttattggccctgaagttgagaagctggtggcggccttgcccaacggtggggttctgctgcttgagaacgtaagattctacaaggaagaggagaagaatgacccagagtttgcacagaagcttgcctccctagcagatctttatgttaacgatgcatttggaacagcccacagggcgcatgcatcga

SEQ ID NO: 4947 - DNA, 279 bp, Zea mays
gcaagaccaagaagaacacggacttcatctcctacgtcggcgacggcttcaagctgctgatcccgtccaagtggaaccccagcaaggagcgggagttccccgggcaggtgctccgctacgaggacaacttcgacgccaacagcaacgtgtccgtcatcatccagcccacctccaagaaggccatcaccgagtacggctcccccgaggagttcctctcgcaggtcgactacctgctcggcaagcaggcctacggcggcaagaccgactccgagggcgggt

SEQ ID NO: 4948 - DNA, 277 bp, Zea mays
gtgccgcctcgtctctctcctctctgctgcgcccccctatcgtgcgtgattctatccaggattctagggttcgttcgcctcgtctcgcgatggacaagggcagcgtcgtcgtgcccccggcccctgccgccgccgccgcgaagaaggccaagcgcttcgagatcaagaagtggaacgccgtctctctctgggcctgggacatcgtggtggacaactgcgccatctgccgcaaccacatcatggacctttgcatcgagtgccaggcgaaccaggcgag

SEQ ID NO: 4949 - DNA, 279 bp, Zea mays
gaagccgttcgcgcaggccgagctgcagctgcagagctttcccagcgtgctcctgttcccgggccgcaccgccaggcccatcaagtacccgtcggagaagagggacgtcgactcgctcctcgccttcgtcaacagcctccggtgagagacgacctccagtgagcgagaaccatcgttctctgtcagtctgtatgatcttatgttggtctttatgagtttatctaggttcgtagagaagggaggtggaggggactgggtttggtagtgacacaggaagga

SEQ ID NO: 4950 - DNA, 276 bp, Zea mays
aaggagagtacgtggaggagcagccatggcttcatcggtggccgccgcggcgagcacattcctgggcacccgcctggcggacccggcgccacagaacgggcgcatcgtggcccggttcgggttcgggttgggcggcaaggcgaacgtgctccgaagaaggtggcgaagacatcgacctcctctgaccggccgctgtggttccccggcgccgtggcgccgactacctggacggctcgctggtcggcgactacgggttcgacccgttcggtctcggga

SEQ ID NO: 4951 - DNA, 268 bp, Zea mays
gccgtcgcatcctccatgcccggcatgagatactccattgcaagcagctacaattttgtcaccgacttgatggacagccatctagtggctgggctccgggtggtcgacagggcatgctgcggatcgggaaaactgaacgccgcggtcatgtgcgcccagccaaacacgacttactgttcggatcgcgacgactacatgttctgggacatgctacatcctacgcaggcaacaaatgaacgtggggtggtcgccatcttctacggcccgc

SEQ ID NO: 4952 - DNA, 273 bp, Zea mays
ctcaagaacggccgcctcgccatgttctccatgttcggattcttcggccaggccatcgtcaccgggaagggcccgctcgagaacctcgctgaccacattgccgaccccgtcaacaacaacgcttgggcctacgccaccaacttcgtccccggcaagtgagggaggcgccgccggtgacctttaggtgtccggatgcatgtgagcgcacgctggttttcagtttgtaccatgatgtaaactattgttcaatcgacaaggaataattgtgttcat

SEQ ID NO: 4953 - DNA, 270 bp, Zea mays
ccatggcctccctctcctctgccgccgtcaccggcccttccttcgccgcaccagcgccagcccgcgccgtggtcagaaggaggtccttcaccgtgcgcgcctctctccgcaaggccacctgcaccgccgccgtggcaatggctgccagcgccctgcttgccggcggtgccatggcccaggaggtgctgctgggcgcaggcgacggcgggctcgtcttcgagcccagccagttcaccgtcaaggccggcgacaccatcacattcaagaaca

SEQ ID NO: 4954 - DNA, 257 bp, Zea mays
cgatgcaaagactccatctgaagtttaggtactagcttgccatgagatatatattcttctgtaagaacatcacttgcatgctctttttgtcatatctactccttctgttccaagtataggacgttttgacttttctagacagataacttttggtatgcatttagatatgcattatgtctggatacatagaaaaacaatatatctagaaaagccaaaacattctataatttgtaatagagggattatatgattacttc

SEQ ID NO: 4955 - DNA, 266 bp, Zea mays
gtcgcagcagctagcgcccggccggccagtcgagtgagtccatcctgcatcgccatccaatggccgccaccgccctgagcatgagcatcctccgcgcgccgccgccctgcttctcgtccccactcaggctcagggtcgcggttgccaagccgctggcggcccccatgcggcgccactgctgcgcgcgcaggccacctacaacgtgaagctgatcacgccggagggggaggtggagctgcaggtgcccgacgacgtctacatcctgg

SEQ ID NO: 4956 - DNA, 271 bp, Zea mays
cttcttgttgccaaagaattccctcccctagccgccgccgccgctcgtctccctgagaggtgccgggaccgaggaactggccgagttctaggtagagaatcggttttgcttgtctcagcacggggtctgctgcgtctggtggtggtgaaggggagaaattcgtgagatctgttccggatcaggcgtgcgagctcgggaatcaggggtttcacacatagcttcgtcgatttgaatttgatgtactaatggagtctaagggtggcaaaaagtc

SEQ ID NO: 4957 - DNA, 297 bp, Zea mays
atcctacccggacgccttccaccgcgtcatcggcttcgagaacatcaagcagacgcatgcgtcacttcatcgcctacaagcccccgggcagcgactagaccgctgccgccggccgccccccgccggctagctagctagctagctcctgcgtgagctagtagctagtgccatgcgtcgtctctgtcgttcagctttgcttcgggtcaccgtgtaccctttgcttgcttggtttcttctttccttttgtcctgtttttttcatcttttccccggccatggttcctttgctttccagcag

SEQ ID NO: 4958 - DNA, 295 bp, Zea mays
cgctgtccggctcgcccccgagctacctgaccggcgagttccccggcgactacgggtgggacacgcggggctgtcggcggacccggagaccttcgccaagaaccgcgagctggaggtgatccactgccgctgggccatgctcggcgcgctcgggtgcgtgttcccggagctgctcgcccgcaacggcgtcaagttcggcgaggcggtgtggttcaaggcgggctcccagatcttcagcgagggcgggctggactacctcggcaacccgagcctggtccacgcgcagagcatcctg

SEQ ID NO: 4959 - DNA, 285 bp, Zea mays
cgcaggtggccaagcgctacggcgtcaagctcaccttgttccacggccgcggaggcaccgtgggcaggggtggcgggcccacgcaccttgccatcctgtcccagccgccggacaccatcaacgggtccatccgtgtgacggtgcagggcgaggtcatcgagttctgcttcggggaggagcacctgtgcttccagactctgcagcgcttcacggccggcacgctggagcacggcatgcatccgccggtctctcccaagcccgagtggcgcaagctcatggacgaga

SEQ ID NO: 4960 - DNA, 289 bp, Zea mays
cgctgcccggcgactatggcttcgacccgctgggcctctcggacccggaggcaccgggggcttcatcgagcccaagtggctggcctacggcgaggtgatcaacggccgctacgccatgctgggcgcggtgggcgccatcgccccggagatcttcggcaagatgggcatcatccccccggagaccgcgctgccgtggttcaagacgggcgtcatcccgcccgcgggcacctacaactactgggccgactcctacacgctcttcgtcttcaacatggcgctcatgggcttc

SEQ ID NO: 4961 - DNA, 269 bp, Zea mays
tgcagatccccaaggcgggcaagatctacgccttcaacgagggcaactacgcgctctgggacgacaagctgaagctgtacatggacagcctcaaggagcccggcgactcggggaagccctactccgcgcggtacataggcagcctcgtcggggacttccaccgcactcttctctacggagggatctacgggtaccccagggacaagaagagcaagaacggcaagctgcggcttctctacgagtgcgcccccatgagcttcatcgtcgag

SEQ ID NO: 4962 - DNA, 288 bp, Zea mays
ctgatagcttgctccaggacgtacgtacgtacgtaggatcgatccatcgatcgctagctagctgacgaccatggcgtccctctcctctgccgccatcaccgccccttccttcacggccgcgcccgctcgcgcagtggtcagcaggaggtccttcaccgtgcgtgcctctctccgcaaggccactgccaccgccgccgtggccgttgccgccagcgtcctgcttgccggcggcggcgccatggcccaggaggtgctgctgggcgcaggcgacggcgggctcgtcttcga

SEQ ID NO: 4963 - DNA, 285 bp, Zea mays
ctggacggctcgctggtcggcgactacgggttcgacccgttcggtctcgggaagcccgtggagtacctgcagttcgagttggactcgctggaccagaacctggccaagaatgaggccggcggcatcatcggcacccggttcgagtcctccgaagtcaagtccaccccgttgcagccctacagcgaggtgttcggcctccagcggttccgcgagtgcgagctcatccacggccgctgggccatgctcgccaccctcggcgccctctccgtcgagtggctcaccggc

SEQ ID NO: 4964 - DNA, 284 bp, Zea mays
gcagatctcttgccttggtgtacagtggaatgtaccttggatcagtcaccggcctgtctttgtcacctctgttgattagcagatttggctggccttctgtcttttatgcatttggatctcttggaaccgtttggtttgcactgtggcaaagcaaagcacacagctctccagatgatgatccggagctaagtaaagctgaaaagaggcatatactgggtggcagtgccttaaaggagcctgtcacttccataccatggaggctaattctatcaaaggctccagtg

SEQ ID NO: 4965 - DNA, 281 bp, Zea mays
ccccaccgctcagttcctccagttcccgtcggagttgccgtagccgccgccacggttgccaccgccgtagccaagttatcctgttcgctaccgtgatgtttaccctagtccagagggtttatcttcgttcgtctcgtttgttgttgcccatctgtgtttttgattgcaaggtcgctctgtgtcagttgttagtgctgtgttcatcctcggctccagcagacccatgcatcaaccagcatggactgtggatcgatggatgctgttactcctgtcaggatttg

SEQ ID NO: 4966 - DNA, 289 bp, Zea mays
gcaagctcgatctactactactactagctggtacacatactagccagcctgccagccagcttgccatggcgcccaccgtgatgatggcctcgtcggcaaccgccgtcgccccgttccagggtctcaagtccgccgccagcctccccgtcgcccgccgcagcaccaggagcctcggcaacgtcagcaacggcggaaggatccggtgcatgcagtgtggccggcctacggcaacaagaagttcgagacgctgtcgtacctgccgccgctgtcgacggacgacctgctgaag

SEQ ID NO: 4967 - DNA, 284 bp, Zea mays
gttgctgagaaagtgttcgccaatgtgggcaagactatcgggtacaaagttggaacaatgattgagatccccagggcagctctggtggctgatgagatagcggacaggctgaattcttctccttcggaacgaacgacctgacgcagatgacctttgggtacagcagggatgatgtgggaaagttcattcccgtctatcttgctcagggcattctccaacatgaccccttcgaggtcctggaccagaggggagtgggcgagctggtgaagcttgctacagagagg

SEQ ID NO: 4968 - DNA, 283 bp, Zea mays
gagactggcaatgatgctgctgagtttattcttcttggtgctgatacagtacaggtatgtaccggtgtgatgattcatggttatccccttgtgaagaagctttgcgcagagttacaggatttcatgagagagcacaacttttcatcaattgaagagtttcgaggggcctcgcttccgtatttcacgacgcacacagatctggttcaccggcaacaagaggcggtcaggcagaggaaggccatcaagaagggccttcaatcagacaaggaatggacgggtgatg

SEQ ID NO: 4969 - DNA, 282 bp, Zea mays
aaacccgtcctctgtccgtcctaccaccacagctcaccgcggtttggctttctcccctcttccgcacccgcttctcgctccggattccctctgctctttccctaacgaaggtagccatggcggggagaggtaaggcgatcggctcaggcgccgccaagaaggccacgtccaggagctccaaggctggcctccagttccccgtgggaaggatcgccaggttcctcaaggccggcaagtatgccgagagagtcggcgccggcgcccctgtctacctcgctgccg

SEQ ID NO: 4970 - DNA, 280 bp, Zea mays
tgcttgatctccctccgccactccatccatctcctcgctcccagtccccgggaagcatggcgtccgtcaccgcccgcgccccggtagcggcccttcgcccgtcgtcggcatcgctcaagtcgtcgtcggccttccttggccactctagccgcctcggccgcaccgcgtctcccacgaggcgcagctcaaggcggaggccaagggcgagtggctccccggccttccctccccctcctacctcgacggcagcctggcgggtgacaatggcttcgacccgttg

SEQ ID NO: 4971 - DNA, 281 bp, Zea mays
ctcctcgccatcacataaaaccagtgcaagcagaagcagcgcgatggcgagcagcaccatggccctctcctccacagccttcgccggcaaggcagtgaacgtgccgtcgtctctcttcggcgaggcccgcgtgacgatgcgcaagacggcggcgaaggcaaagccggcggcgagctccggcagcccgtggtacggccccgaccgcgtgctctacctgggcccgctgtccggcgcgcccccgagctacctgacgggcgagttaccgggcgactacggctggg

SEQ ID NO: 4972 - DNA, 276 bp, Zea mays
tggacctctgacatctcggaggaccctgctgaagagattagggaggcgcccaagcgggactcgagtgaggggcagtaaagccggctttatgtgcctagaaactagtagctagtgtttgctgctgtcgaatgacactatgcaatgtgatctggaacctggtttcttgggtgcgacgcttgtagccgtgttatgactgtcgtccgtaaaatttgggggctccccgtaaggtatgctgcctggcaaggcctcggtgtcccacctcgtctgtggcgtggg

SEQ ID NO: 4973 - DNA, 276 bp, Zea mays
acgcatactgcatacacaacacagagcatcagaaggagctacgatctgatcgacatggctgccgccaccatggctatcacctcccgcgcgctcgtcggcaagccggcggctggcacgagggacgtcttcggcgagggccgcatcaccatgcgcaagaccgccgccaagcccaagccggcggcctccggcagcccctggtacggtgccgaccgcgtcctgtacctgggcccgctgtccggctcacctccgagctacctgaccggcgagttccccggc

SEQ ID NO: 4974 - DNA, 271 bp, Zea mays
aaaaactgggtggggtttggagatctctgatcttaagaaacaactcgaagatgctcggtcaaaaggcattgatgttagggccttggtggttatcaatccaggaaatccgactgggcaggttcttgctgaagacaaccaatatgatatagtgaaattctgtaaaaatgagggccttgttcttctagctgatgaggtatatcaagagaacatctatgttgacaacaagaaatttaactctttcaagaagattgcaagatccatgggatacggc

SEQ ID NO: 4975 - DNA, 272 bp, Zea mays
caaggagagtacgtggaggagcagccatggcttcatcggtggccgccgcggcgagcacattcctgggcacccgcctggcggacccggcgccacagaacgggcgcatcgtggcccggttcgggttcgggttgggcggcaaggcgaacatgctccgaagaaggtggcgaagacatcgacctcctctgaccggccgctgtggttccccggcgccgtggcgcacgactacctggacggctcgctggtcggcgactacgggttcgacccgttcggtc

SEQ ID NO: 4976 - DNA, 285 bp, Zea mays
gcagcacacactgcacgcagctagctaggagcagcagcagcggcggcgatggcggcctccatgatctcctcgtcagctctggcggtggcgcctcagggcctgccgcccctcggccgccgcgcctcctccttcgccgtcgtctgctccaagaagaagatcaagaccgacaagccctacgggattgggggtggcctgaccgtcgacgtcgacgccaacgggagaaagggcaagggcaagggcgtgtaccagttcgtcgacaagtacggcgcgaacgtcgacggatac

SEQ ID NO: 4977 - DNA, 203 bp, Zea mays
agcaaccacaacaagggtgaaccttcaccattttattttagtcaggcagagtgttgtgccctttgcattacggtattccattcagttacaggtgaattaataccgctgtgtaccgccaaccggatttacttaaagaagccaaatttgtatcgctgccaattccacaaacagaatttgcagacttttaatcaccagactgggaa

SEQ ID NO: 4978 - DNA, 280 bp, Zea mays
ggagaagttatacgactctggcaaagctcgtgcaatcggcgtgagtaacttctcttgtaagaagctgcatgatttgcttgccgttgcacgagtgcctccagcagtcaaccaggttgagtgtcatccggtttggcagcaagacaagctccggaagctatgccaatccaatggtgttcatctttctgcattctcgcctttaggctcacctggatctccttggatcaatgggccaagtgtcctcaagaaccccattgtggtctctgttgcagacaagttgcag

SEQ ID NO: 4979 - DNA, 280 bp, Zea mays
ctctctctgctcgcagccatggcgaagaattacccaaccgtgagcgccgagtacagcgaggccgtcgagaaggccaggcgcaagctccgcgccctcatcgccgagaagagctgcgcgcccctcatgctccgcctcgcgtggcactccgcggggacgttcgacgtgtcgtcgaggaccggcggtcccttcggtactatgaagtgcccggcggaactggctcacggcgccaacgcggggctggacatcgcggtgcggctgctcgagcccatcaaggaggagt

SEQ ID NO: 4980 - DNA, 275 bp, Zea mays
cgtcatttaccagtatcgaagagttccttgagccacttgagctgtgctacaaatcactgtgtgactgcggcgacaaggccatcgcggacgggagcctcctggacctcctgcgccaggtgttcacgttcgggctctccctggtgaagctggacatccggcaggagtcggagcggcacaccgacgtgatcgacgccatcaccacgcacctcggcatcgggtcgtaccgcgagtggtccgaggacaagaggcaggagtggctgctgtcggagctgcga

SEQ ID NO: 4981 - DNA, 276 bp, Zea mays
cgtacgtacgtagatcgatccatcgatcgctagctagctgacggccatggcgtccctctcctctgccgccatcaccgccccttcctgtcacggccgcgcccgctcgcgcagtggtcagcaggaggtccttcaccgtgcgtgcctctctccgcaaggccactgccaccgccgccgtggccgttgccgccagcgtcctgcttgccggcggcggcgccatggcccaggaggtgctgctgggcgcaggcgacggcgggctcgtcttcgagcccagccagt

SEQ ID NO: 4982 - DNA, 274 bp, Zea mays
  unsure (1)..(274): unsure at all n locations
cgacaggacgctggccaattacctgagcgagcgcggcttcccgtccaacctggagcgtctcatgttcgggcgcgtgctgcagggcctgggcccgctggagcgcgaggcgctggtggtgaagcaggtgatgcggcagctgatcacgtcgctgaagcgcatccacgccacgggcggcgtgcaccgcgacatcaagccgtccaacctcgtcgtgacccgccgcgcgcangtgaagctcatcgacttcggagccgccaccgacctccgcatcggcaag

SEQ ID NO: 4983 - DNA, 266 bp, Zea mays
cgcgacggccgcatggagaagttctactgggcgcccacccgcgaggaccgcatcggcgtctgcaagggcatcttccgcaccgacggcgtcgacgaggagcacgtcgtccagctggtcgacaccttccctggccagtccatcgacttcttcggcgcgctgcgtgcccgggtctacgacgacgaggtccgacggtgggtgagcgagaccggcgtcgagaacatcgccaggaagctcgtcaactccaaggagggcccgcccacgttcga

SEQ ID NO: 4984 - DNA, 277 bp, Zea mays
gtcggagggaaccgaaaactcagggtctcgaatttcctaggagcggaggcgatggctgggaaggaaggaaaaggattgctcgccgcgaagacgacggcggccaagtcggcggagaaggacaaggggaagaaggcccccatctcacggtcctcccgcgcgggcctccagtttcctgttggacgaatccaccgtcagctgaagcaaaggactcaggcaaatggccgcgttggtgccactgcagccgtctactccgccgccatcctggagtacttaactg

SEQ ID NO: 4985 - DNA, 275 bp, Zea mays
gttttcccattccaccaagtgaagggaccatattttccataccattttttttcacctatgagcttgtatagcagtgaatgctccagtgtttcagctatcaagtctatgaaggatatggtcaaaacaatgcacagaaatggaatagaggttctcttggaggttgttttcacgcatactgctgaaggaggggcggagtgtcagatgatatcacttcgaggcatcgatggttcctcgtactacattgctgatggaatcgctggatgcaaggcaagtgt

SEQ ID NO: 4986 - DNA, 275 bp, Zea mays
caagcaagctcgatctactactactactagctggtacacatactagccagcctgccagccagcttgccatggcgcccaccgtgatgatggcctcgtcggcaaccgccgtcgccccgttccagggtctcaagtccgccgccagcctccccgtcgcccgccgcagcaccaggagcctcggcaacgtcagcaacggcggaaggatccggtgcatgcaggtgtggccggcctacggcaacaagaagttcgagacgctgtcgtacctgccgccgctgtcg

SEQ ID NO: 4987 - DNA, 272 bp, Zea mays
cagccccttaaccctcgttcctctagccgtctcgcgcaccacagcctccatttctcctccgacggcggtgcggctagctcaaccatggcggactccaaggccacctcggcggtcaccctccgcactcgcaagttcatgaccaaccgcctgctggcccgcaaacaatttgtgcttgaggttatccaccccggccgcgccaacgtctccaaggcggagttgaaggagaggcttgccaagatgtacgaggtgaaggaccccaacaccatcttcgt

SEQ ID NO: 4988 - DNA, 271 bp, Zea mays
cgcaccgctactcggaccgccacgactgctgcttcgactacagggccgccggccgcgacgccatcgccagggacaaccccgtcgtgcgcgccgccaagatcgttaggttctaggcgtctcggatccggccggacgagctagctagctagctagctaggggcgggcacacacacacacacacgcggtgatgggcgccgagatccgtcgccggtcctcatcgccctctaatctgtagtccgtcccccttcctctcctctccctctttgattgt

SEQ ID NO: 4989 - DNA, 272 bp, Zea mays
cacaacaagaagaagcgtagtcgtcgccggaaggaaaggcgcggacaagatgtcgtggcaggcgtacgtcgacgagcacctgatgtgcgagatcgaaggacagcatctcagcgccgccgccatcgtcggtcacgacggcagcgtttgggcgcagtccgagagcttccccgagttaaagcctgaggaggttgctggtatcataaaggactttgatgaacctggtactcttgcaccaactggtcttttcgttggaggtacaaagtacatggtga

SEQ ID NO: 4990 - DNA, 272 bp, Zea mays
cggttgccactgcagttgttcctgatgaagtggacaagatcaagggcattctggtacaatggagtgatattgaccatgttaacctcattctgacattaggtgggactggcttcacacccagagatgtcacaccggaagcaacaaaaatggtgatacagaaagaagcgcctggtctcacatttgttatgcttcaagaaagtttgaagattacaccattcgcaatgctatcccgggccacagctggaatcagaggatcaacacttatcatcaac

SEQ ID NO: 4991 - DNA, 269 bp, Zea mays
gcgagatagccctgagtacaagtacacagtggcaatgatgggttacggccctgaagacaaggacgcggtgctggagctgacctacaactatggtgtcaccgagtatgccaaggggaatgcatatgcccagatcgccattggcaccgacgatgtctacaggaccgcggaggcggcgaactagtccggaggccaggtggtgcgggagccggggcccttgccagggatcaacaccaagatcacagccatcctggacctgatggctggaaatt

SEQ ID NO: 4992 - DNA, 268 bp, Zea mays
gacaggatgactcgaggcttattccgctacgatgtcactgcctgtgagaccaaggtcattcctggcaaccttgggtttgttgcacaactcaatgaagggcgccatcttaagaagcgccctactgagtttcgtgtggaccgtgtgctccagccgtttgaccctgccaaattcaatttcacaaaagttggccaggaagaggttctcttccaatttgagaatagtggtggtgatgacagctatttcctgaacaacgctccaatcattgctg

SEQ ID NO: 4993 - DNA, 266 bp, Zea mays
caggctctggcatttatttatgagaagcatatcgtccatgccttgtttgctgaggttgcagacaggtatggagaccgagaaggtggctacacaaggatcatcccgacgttcccgaagcggggagataatgcacctatggcgtacattgagcttgtttaggattttccatcggttgctgtggtttcattggtgccatgcaggctgagtggtcatgtttgcgcattgccgttcggagatctgtttccttttttcctttatcaagttgt

SEQ ID NO: 4994 - DNA, 267 bp, Zea mays
gcgacacgatcgcgagcgcacgcacgtaagcacgttgtcggaagctcaagttagaagaagcaccagtgcctgatcgatggcggcccaggctctcctctccggccggcagctgctgggccgccccgtgcagtcggccgtctctaggtcgtcggcgaggaaggcgcccttcgtcgtcagggccagctccagccctccagccaagcaaggtgccgacaggagctgtggttcgcgtccaagcagtccctctcctacctcgatggcacgctg

SEQ ID NO: 4995 - DNA, 264 bp, Zea mays
gggaagcgaacaaggaatcgagtcgatcgagatggtggcagttcggcaagtggctgacgaggcagatcgagcgggacctgcccggagtggcaggaccagttcctgcgctacaaggagctgaagcggtgcgtcaaggcccgctccggcggctgcccgccgttgcccgccgaggaggccgagttcgtggccgagatcgacgcggagaccgagaagatcaacgccttcttcctcgaccaggaggaggagttcatcatccgccaccgg

SEQ ID NO: 4996 - DNA, 260 bp, Zea mays
gtcaaggaacatgttgagactcctgatgatgttggtgcgtacaaaatgcctgaagcttatgacatgggcgaaaatgtcaatcaagagaagagattcgctgtggccatgcaacggtacaaagatcctaaggccaatgataaaatgaacccttttgctgaacaggaagcatgggaagaacaccaaataggaaaatcgaaactgcaatttggatccaaagataagaagccgtcttcagatgagtatcagtatgtatttgaaga

SEQ ID NO: 4997 - DNA, 263 bp, Zea mays
tcctcccaccgcagcagcaggcaagcgcgaggcggaggcggagagatggagtcggaccagggcaagctcttcatcggcggcatctcctgggaaacaacggaggagaagctgagcgagcacttctccgcctacggagaggttacgcaggccgccgtcatgcgcgacaagacgacgggccgcccccgaggcttcgggtttgtcgtcttcgccgaccccgccgtcgtcgaccgagcgctgcaggacccccacaccctcgacggccg

SEQ ID NO: 4998 - DNA, 262 bp, Zea mays
ctatagcaaccggtccagcactttcacgctcagcttcagcaatggctgcctccaccatggcgatctcctccacggcgatggccggcacccccatcaaggtgggttccttcggcgagggccgcatcaccatgcgcaagaccgtgggcaagcccaaggtggcggcgtccggcagcccctggtacggccccgaccgcgtcaagtacctcggccccttctccggcgagcccccgagctacctcaccggcgagttccccggcggact

SEQ ID NO: 4999 - DNA, 247 bp, Zea mays
aatgagggccttgttcttctagctgatgaggtatatcaagagaacatctatgttgacaacaagaaatttaactctttcaagaagattgcaagatccatgggatacggcgaggatgatctccctctagtatcatttcagtctgtctccaaaggatactatggagagtgtggtaaaagaggaggttacatggagattactggcttcagtgctccggtaagagagcagatctacaaggtagcttcagtga

SEQ ID NO: 5000 - DNA, 246 bp, Zea mays
gcaagatcagggccaaggcggtcacggaggactggaggcagaaatccaagcccatccctcctggcgccgtctaccctgccaaggaccactgcaggatcttgagcgacaagtccacgggagaggccggaaggaaggcatggatgaaatgtactttggagtctatgaccaactcttgtatgccaggaagaccgaacctgttgaaggagcccagtggacgggaatagtgacaacaatcgctgtcgagat

SEQ ID NO: 5001 - DNA, 243 bp, Zea mays
tttccatgttcggcttcttcgtccaggccatcgtcaccggcaagggcccgctcgagaacctcgctgaccacatcgctgacccagtcaacaacaacgcatgggcctacgccaccaacttcgtccccggcaactaagctcaacggctatgctatgcgacttcattgtctttcggatcggagagggtgtacgtacgtggattgattgatgctgcgagatgcatgtgtgtcttttgtttcacgttgc

SEQ ID NO: 5002 - DNA, 246 bp, Zea mays
cccactcccgggtctccagcattcctatcctctccccgcccgcccgtgccgccgccgccgccgccgccgcggcttcccttcctctcccgagccaagatgaatgttgaaaagctcaagaagatggcaggtgctgtgcgcaccggggggaagggtagcgtgcgcaggaagaagaaggcagtccacaagactacaaccacagatgacaaacggcttcaaagcaccttgaaaagaataggagtgaacagc

SEQ ID NO: 5003 - DNA, 244 bp, Zea mays
cttccctcgcgccgccgccaccgcaagagtatctcaactccgcctcgagaccttcccccctcgctggtctcagccatggtgaaatattcgacggagccgaccaaccccaccaagtccgccaaggccatgggccgtgacctacgtgttcacttcaagaacacacgtgagacagcttttgcccttaggaagttgtcactcaccaaggccaaaagttaccttgaggatgtgatcgcccacaagcagg

SEQ ID NO: 5004 - DNA, 243 bp, Zea mays
ctaccagcgactcagcgagcgagagcagcacacactgcacgcagctagctaggagcagcagcagcggcggcgatggcggcctccatgatctcctcgtcagctctggcggtggcgcctcagggcctgccgcccctcggccgccgcgcctcctccttcgccgtcgtctgctccaagaagaagatcaagaccgacaagccctacgggattgggggtggcctgaccgtcgacgtcgacgccaacggg

SEQ ID NO: 5005 - DNA, 238 bp, Zea mays
atcatggtttatgccgatccatttcataactactgtgttgccctggttgttccagcgcaccaggccttggagaagtgggctcagaattccgggataaactatgaaggctttgcagagctttgccaaaacgaccgagcaattaaggaggttcagcaatcgctatcaaaggccgcaaaagcagcgaggctcgagaaattcgaggtgccagcgaagatcgtgctgttgcctgaaccgtgga

SEQ ID NO: 5006 - DNA, 240 bp, Zea mays
cgcatccacctcccaaacccctactcccccaggaagcaatggcttcccccacccagggccaggtcatcacctgcaaagcggcggtggcgtacgagccgaacaagccactcgtgatcgaggacgtgcaggtggcgccgccgcaggccggcgtaggtccgcgtcaagatcctattcaccgcgctctgccacaccgaccactacacctggagcggcaaggatcctgagggtcttttcccttgc

SEQ ID NO: 5007 - DNA, 238 bp, Zea mays
gtgacaatggaagcaatggccactgcgttcggtgtaactgttgatttcattgaccaggaactgtcacggttcattgcagctcgggaagctgcactgcaagattgataaggttgctggtgttctggagactaaccgacctgatgagaggcatgctttctaccaggcgaccatcaagcaaggggacttcttgctgaaccgcatccagaagctttcacgggtcattgacctgtaaggactg

SEQ ID NO: 5008 - DNA, 237 bp, Zea mays
ggaactcgtcgttctttatcagaagattttcaagggagactgtcagatccccaagtggctttcgcctgccgcgcaggaccttctcaagaggatcctccaaccgaatccgatgaagaggatcaacgtcgcggggatcagggagcacgagtggttcaagaaggactacgtgcctgctgttccgcacgatgatgacgaagacgtccttcctagtccagctccctcgataaagccaatcga

SEQ ID NO: 5009 - DNA, 234 bp, Zea mays
cagccgctcactccagccattacccgcagctagcaaacaaatggccaccgtcctgagcagcccccgcgcgccggccttctccttctccctccgcgccgcgccaggcccactaccgtggccatgacccgtggcggtggcgccagcagcaggctgcgcgcgcaggccacctacaacgtgaagctcatcacgccggacggggaggtggagctgcaggtgcccgacgacgtctacatc

SEQ ID NO: 5010 - DNA, 233 bp, Zea mays
gttcggccggcggtacgacctggagctggacccggccagggagagccccgagacgcgggatctgatgcgactcgtggacgaagggtacgacctgctgggccagatcaactggtccgaccacctccccggcctcgcgtgcctcgacctgcagagcacgacggccaggtgcgaccgcctcgtcccgctcgtgacccgcttcgtcggcggcatcgtcgacgagcatcgcgcccgga

SEQ ID NO: 5011 - DNA, 235 bp, Zea mays
aagcaagcaagcagcgagtacatacatactaggcagccaggcagccatggcgcccaccgtgatgatggcctcgtcggccaccgccgtcgctccgttccaggggctcaagtccaccgccagcctccccgtcgcccgccgctcctccagaagcctcggcaacgtcagcaacggcggaaggatccggtgcatgcaggtgtggccggcctacggcaacaagaagttcgagacgctgtcg

SEQ ID NO: 5012 - DNA, 234 bp, Zea mays
aaaggatactatggagagtgtggtaaaagaggaggttacatggagattactggcttcagtgctccggtaagagagcagatctacaaggtagcttcagtgaacctgtgctccaatatcactggtcaaatccttgcgagcctcgtcatgaatccaccaaaggttggggacgaatcatatgcttcctacaaggcagagaaagatggaatccttcagtctttagctcgccgtgcaaag

SEQ ID NO: 5013 - DNA, 246 bp, Zea mays
gcttgcgcactttgccctgttctttaaccagggacaatgctgctgcgctggatctcgcacgtttgtacatgagcgtgtttatgatgagtttgtggagaaggccaaggctcgtgcattgaagcgcgtcgttggtgatccgttcaggaaaggtgttgaacagggcccgcagattgacgacgagcaattcaagaagatcttgcgctacattaggtatggtgttgacggtggagctacccttgtgacggg

SEQ ID NO: 5014 - DNA, 245 bp, Zea mays
cagcgaggtgttcggcctccagcggttccgcgagtgcgagctcatccacggccgctgggccatgctcgccaccctcggcgccctctccgtcgagtggctcaccggcgtcacctggcaggacgccggcaaggtggagctggtggacgggtcctcctacctgggccagccgctgccgttctccatctcgacgctcatctggatcgaggtgctcgtgatcggctacatcgagttccagcgcaacgccg

SEQ ID NO: 5015 - DNA, 247 bp, Zea mays
cggcttccaggtcatcgtcatgggcctcgtcgagggcttccgcatcaacggcctcgacggcgtcggcgagggcaacaacctctaccccggcggccagtacttcgacccgctgggcctcgcagacgaccccgtcaccttcgccgagctcaaggtcaaggagatcaagaacggccgcctcgcgatgttcaccatgttcggcttcttcgtccaggccatcgtcaccggcaaggggcacctcgagaacctg

SEQ ID NO: 5016 - DNA, 245 bp, Zea mays
aaaaaaaacacgagaaaaatcaaatcaggagaaggggattccagagagccccgttcgggtagggaagggaaggagaggcgaacggcaggcgagatgggggcggccgaatccgtgccggagacctccatacacgaattcaccgtcaaggattgcaacggcaaggaagtgagcctggaaacctacaaggggaaggtcctccttgttgttaacgtcgcctccaaatgtgggttcacggagaccaatta

SEQ ID NO: 5017 - DNA, 242 bp, Zea mays
tactactactactagctggtacacatactagccatcctgccagccagccagcttgccatggcgcccaccgtgatgatggcctcgtcggcaaccgccgtcgccccgttccagggtctcaagtccgccgccagcctccccgtcgcccgccgcagcaccaggagcctcggcaacgtcagcaacggcggaaggatccggtgcatgcaggtgtggccggcctacggcaacaagaagttcgagacgct

SEQ ID NO: 5018 - DNA, 242 bp, Zea mays
ggacgcccggtcagcgctcatcgccatggtccagtcgctcagccaagccaagcacggcgtcgacgtggtgtccggcacccgcgtcaagacccacttcgccaggcctaactggcgcaacgtctacaagcgcatcgcgctcaaccaccagaaccagcgcgtcggagtgttctactgcggcgccccggtgctgaccaaggagctgcgcgagctggcgcaggacttctcgcggaagaccaacacca

SEQ ID NO: 5019 - DNA, 229 bp, Zea mays
cataactgcaggagagcaacggcagcaagaaaccttgtaaacatcggagcatagatcgcggcggtgatggcggccaaggtgaggacggagctggacgtgggcgccgacggcgtggccgtaatcaccatctacaatccgcccgtcaactccctctccatcgacgtcttacatagcttaaaagaaagctatgaagaagcacttcggagaaacgatgttaaagctattgtcg

SEQ ID NO: 5020 - DNA, 281 bp, Zea mays
ggggtaccgcatcgccggtggcccgctcggggaggtggtcgacccgctgtaccccggcggcagcttcgacccgctcgggctcgccgacgacccggaggcgttcgcggactcaaggtcaaggagatcaagaacggccgcctcgccatgttctccatgttcggcttcttcgtgcaggccatcgtcaccggcaagggtcccgttgagaacctcgccgaccacctcgctgaccctgtcaacaacaacgcctgggcctacgctaccaacttcgtccccggcaagtg

SEQ ID NO: 5021 - DNA, 283 bp, Zea mays
ggcgctgatcaagcatcatgagggtacccagtctgctggcagagctggtaagaagcctcggcggaacatcaacgtgcacagcgcatacctccacgtgctcggggactccgtccagagcgtcggggtcatggtgggcggggcgatcatctggtacaagccggagtggaaggtcatcgacctcatctgcacgctcgtcttctcggtggtggtgctgttcaccacgatccggatgctgcgcacatgcctcgaagtgttgatggagagcacgccccgcgagatcgac

SEQ ID NO: 5022 - DNA, 283 bp, Zea mays
tacgactagctcaagagaagtcggacctccaggatatgggcctgaagaaaaccaaggcagtggcatttcctgtaatacaagcagagagcaaatattgtttatgagccctacaaccatctcgagagaacttggtccaccaggatatttgcccagagaaaaccagcgcagtgacacttcatggaatacaagctgtgagtcgggactatttatgagtcctgcgaccacctcaatagaacatggtccaccaggatatgggcctggagaaaaccaggagaatgacagt

SEQ ID NO: 5023 - DNA, 280 bp, Zea mays
tcacgctcgttcttctataaaaggctacggaggaggatcgcagaagatgttcttgcaaaagaaataaggcagatagtcggtgataaatttacgcaccaattagcaatggagctcatcaaggaatggtaccttgcttctcaggccacaacaggaagcactggatgggatgacgatgatgcttttgttgcctggaaggacagtcctgaaaactacaaggggcatatccaaaagcttagggctcaaaaagtgtctcattcgctctctgatcttgctgactcca

SEQ ID NO: 5024 - DNA, 109 bp, Zea mays
ctgcgcgcagggcgcgagcgcggagggcacgcccaagatgctgacctacgacgagatccagagcaaaacgtacatggaggtgaagggcacgggcacggcgaaccagtgc

SEQ ID NO: 5025 - DNA, 276 bp, Zea mays
aacattggtacccaagattgtttgctttcacaacgttacaacatatatatatcatatatgcatggacaggtacaatgcctctccagcagcaccagcaacaagggtggttagcagcagggactataaacaacagagtaccatccgcgttgatagattttttattactgcaaaattgatccccgcagcactaccggtagttgcggtagacgggagtgtacatgcagttctctgcatatttcaccaggtcgctggggggaggcagacgggtcgccagac

SEQ ID NO: 5026 - DNA, 273 bp, Zea mays
ggggcttggcctgagcatgggccgcgagcggcccagcggacattgtgtgccaggcggcgagcagcatctccgccgaccgcgtccccgacatggagaagcggaagctgatgaacctcctcctcctcggcgccatctcgttgcccaccgtcggcatggtcgtcccctacggcgccttcttcgtccctgccggctccgggaacgccggcggcgggacctacgcgaaggacaagctgggcaacgacatcacggtggaggcgtggctcaacacgcacg

SEQ ID NO: 5027 - DNA, 272 bp, Zea mays
cactcgggtaaagctatctcgagctagctagctgctgtaaccgttgccatggccaaaatggtgttgctctgcgtgctcgtctccttcctcctgatgcccttggcctccctagccctgacgcaggacttctgcgtcgccgacctgacctgcagcgacacgccggcggggtacccgtgcaagtccagcgtcaccgccaacgacttctacttccacggcctggccggccagggcaaaataaacccactcatcaaggccgccgtgaccccggcctt

SEQ ID NO: 5028 - DNA, 275 bp, Zea mays
cgaaaaccaccttgtgttctctgacgatgttgggatcctcaagacaggctgcggcaactcgtacgccccatttcctaaaggttgcttctacaccacctccggtgggctgcagagcttcgagcacccgttgcacgaggtcaaagcggtgccacgcgtggacagccaaggccagatgtgcggctccatcttcaaggtcgacagcgagagcaagaagaagcaggacgctagcatcccccgcgtcggcagtgctgccgactggtccaaccagttctgac

SEQ ID NO: 5029 - DNA, 274 bp, Zea mays
cttcatcggtggccgccgcggcgagcacattcctgggcacccgcctggcggacccggcgccacagaacgggcgcatcgtggcccggttcgggttcgggttgggcggcaaggcgaacctgctccgaagaaggtggcgaatacatcgacctcctctgaccggccgctgtggttccccggcgccgtggcgccggactacctggacggctcgctggtcggcgactacgggttcgacccgttcggtctcgggaagcccgtggagtacctgcagttcgag

SEQ ID NO: 5030 - DNA, 275 bp, Zea mays
gtagtcgcagcagctagcgcccggccggccagtcgagtgagtccatcctccatcgccatccaatggccgccaccgccctgagcatgagcatcctccgcgcgccgccgccctgcttctcgtccccactcaggctcagggtcgcggttgccaagccgctggcggcccccatgcggcgccagctgctgcgcgcgcaggccacctacaacgtgaagctgatcacgccggatggggaggtggagctgcaggtgcccgacgacggtctacatcctggactt

SEQ ID NO: 5031 - DNA, 271 bp, Zea mays
cagcgccactgtccagtgcgcgcgtcaagcttgcttagctagccgccatggcctccctcgccgccgtctccgtgaagcccgtggccatcaagggtctcgccggcagctctatctccggaaggaagctcgccgtcgccaggccgtcggcccgctccatccgcaggccccgcgcaccgccgtggtggccaagtacggcgacaagagcgtctacttcgacctcgacgacatcggcaacaccaccggacagtgggacctctacggctctgacgcg

SEQ ID NO: 5032 - DNA, 269 bp, Zea mays
cgcggggctgtcggcggacccggagacgttcgccaagaaccgggagctggaggtcatccactcccgctgggccatgctgggcgcgttgggctgcgtgttcccggagctgctcgcccgcaacggcgtcaagttcggcgaggccgtgtggttcaaggccgggtcgcagatcttcagcgagggtgggctggactacctcggcaacccgagcctgatccacgcgcagagcatcctcgccatctgggcctgccaggtcgtgctcatgggcgcca

SEQ ID NO: 5033 - DNA, 271 bp, Zea mays
cgagacgttcctcatcaccatcaacgcggccggctgcgtgatcgagaccgtctacgtggtcatgtacttcgtctacgcgaccaagaagggcaggatgttcaccgccaaaatcatgctcctcctcaacgtcggcgccttcggggccatccttctcctcacccttctcctcttcaagggtgacaagcgcgtcgtcatgcttggctggatctgcgtcggcttctccgtcagcgtcttcgtcgcgccgctcagcatcatgaggcgggtgatccag

SEQ ID NO: 5034 - DNA, 266 bp, Zea mays
gggactgagaagaaacctccaaacacctttctacctctctacgaactacctgccgccggaaaaccctagagcgctcgaccatggatccgcagcagccggagcctgtcagttacctctgcggagattgcggagtgagaacaccctgaagcccggagatgtcatccagtgccgtgaatgtggctaccgcatcctctacaagaagcggacccgccggattgtccaatatgaagcgcgctgaagagtgaagacaagggaaaacactgaag

SEQ ID NO: 5035 - DNA, 267 bp, Zea mays
gaagaactcaagccctttgggaagcagctcagggacaaatacgtggagacacagcagcttctcctccagatcgctgggcacaaggatattcttgaaggcgatccattcctgaagcaggggctggtgctgcgcaacccctacatcaccaccctgaacgtgttccaggcctacacgctgaagcggataagggaccccaacttcaaggtgacgccccagccgccgctgtccaaggagttcgccgacgagaacaagcccgccggactggtc

SEQ ID NO: 5036 - DNA, 247 bp, Zea mays
cttccttggctttggagacggaaccctactctatctcaacttaaatcggaaaagaagtgtatcaccaaaggattgctaccgagacattcacctggcttgagctggcttttgctatagcgtgcaaggggttgctgggtgtcgtacctacctgacttatcattatctgtggttacattctggaccctgtattttctatgctttcatgtctctctactttctagtattaattatcaataagttggtttgg

SEQ ID NO: 5037 - DNA, 263 bp, Zea mays
ggagagtacgtggaggagcagccatggcttcatcggtggccgccgcggcgagcacattcctgggcacccgcctggcggacccggcgccacagaacgggcgcatcgtggcccggttcgggttcgggttgggcggcaaggcgaagctgctccgaagaaggtggcgaagacatcgacctcctctgaccggccgctgtggttccccggcgccgtggcgcccgactacctggacggctcgctggtcggcgactacgggttcgacccgt

SEQ ID NO: 5038 - DNA, 260 bp, Zea mays
cttgcaaacctagaaaatattgaagttataaaattgatcagtcaggtcatcaaggactttgcaagcggcgagataaaacaagcttccactctttttgattgtgacatcacacttgacgactaccttctcaagagctactacaagactgcatctttgattgcagccagcacaaaatcagcttccatattcagtggcgtcacaccactatttgtgaaaaaatgtatgcatatggcaggaatcttggtctatccttccaggtt

SEQ ID NO: 5039 - DNA, 266 bp, Zea mays
gacgccacagcttgtgttgtgcgcgcgcaatggcactcgtgtccgcctcctcgtcctccaccaccgccgtcgcggcgctccccaggaatgggcagcagcgggcgtcgtcgtcgttgttctcctcctcctcctcttcctccttcctcgtcggcaagacgctgctgaggcaggccgaggcagcccggccgtcgttcgccgtgcgcgccgcggcggattccgacaggccgatctggttccccggcagcacccctccaccgtggctcgac

SEQ ID NO: 5040 - DNA, 272 bp, Zea mays
ctatctcgagctagctagctgctgtaaccgttgccatggccaaaatggtgttgctctgcgtgctcgtctccttcctcctgatgcccttggcctccctagccctgacgcaggacttctgcgtcgccgacctgacctgcagcgacacgccggcggggtacccgtgcaagtccagcgtcaccgccaacgacttctacttccacggcctggccggccagggcaaaataaacccactcatcaaggccgccgtgaccccggccttcgtgggccagttc

SEQ ID NO: 5041 - DNA, 246 bp, Zea mays
ctacttgctcggcaagcaggcctacggcggcaagaccgactccgagggcgggttcgagaccgacgccgtggccaccgccaacgtgctggagagctccacccccgtggtggacggcaagcagtactacagcatcaccgtgctgaccaggacggcggacggcgacgagggcggcaagcaccagctcatcaccgccaccgtctccgacggcagactctacatctgtaaggcgcaggccggcgacaagcg

SEQ ID NO: 5042 - DNA, 271 bp, Zea mays
cagccatccgcttctcttcggttcagctctcgagtttccaggatgaaggtaatagctgcctacctgcttgctgttctgggtggaaacacttccccgactgctgatgatgttaagagcattctggaatcagttggtgctgaagctgatgaagaaaaactagagttcctgctcacagaactcaaagacaaggacataacagaagtgattgcagctggaagggaaaggttatcctctgtgccttcaggtggtggtgcaattgacatgggagctc

SEQ ID NO: 5043 - DNA, 272 bp, Zea mays
gcaagtatgccactcccggtgcaggtgctggtgtgggcaatggcaggagcaactgtgttcggtggtttttatgctttcttcatccaccaggaaaaaaccgcccagctggaacccccaaaaccataacgagggtgcccgtcctgctagccggtgtgcttgctgtgcgatcgtttggcatgtgcttgttgaggggttgctaggggattggagaggattgaagggattaaatctcctcctattcaattttgaataggaggggatttaatcccctt

SEQ ID NO: 5044 - DNA, 269 bp, Zea mays
ggaggactacttcccgaagctggcggacgtggacctgttcctccggatcatctgcgccaaggccaagggcgtcactaagcggtgggacagcctcttcaacgagctgctgtccgagtacgcgctctccggcggcaagcagggcgaccacaactctgaagacttcgtgcacctcttgctgtcgctgcagaaagactacggtctcaccacggataacatcaagggcatacttgtgaacatgttcgaagcagccatcgagacatcattcctgg

SEQ ID NO: 5045 - DNA, 269 bp, Zea mays
cggctattgatatgtggagcatcggttgcatttttgcggagattttgactgggaagcctttattccctggtaaaaatgtggttcaccaactggatttgatgactgatctcctgggtacaccatcaacagatactatttcacagattcggaatgagaaagcaaggaggtatctaagcagcatgaggaggaaacagccaatacccttctcagagaagttccccaatgcagatcattcggcgctcaagctcttacaaaggcttcttgcattt

SEQ ID NO: 5046 - DNA, 267 bp, Zea mays
tgctcgcattcctaaaggtgttctgcttgtcggtcctcctgggactggtaaaactttgcttgccaaggcaattgcaggagaggctggcgtaccatttttctcaatttcaggttctgagtttgtggagatgtttgttggtgttggtgcttccagagtacgtgaccttttcaagaaggccaaggagaacgctccttgcatagtgtttgtcgatgagattgatgctgttggaaggcaaagaggtacaggtattggtggtggaaatgatga

SEQ ID NO: 5047 - DNA, 266 bp, Zea mays
ggagccgatgtattgacaaaggaaaacatagctgaaccaatgcgggatatcagaagagcacttttggaggccgatgtaagtttgccagtagtaagaagatttattgagtctgtaagtgaaaaggctgtaggcactgatgtgatccgaggtgtccgacctgaccagcagttggtgaaggttgtgagtgatgaactggtacaactgatgggcggggaggtatcagatttggtgtttgcaaaatctggaccaactattatattattggc

SEQ ID NO: 5048 - DNA, 270 bp, Zea mays
cttggatcctatcttgcctgtactggccaaggtttttgatcaggcactagaaggaggcggtgccaagaatattaacttccgagaattggcagcagatctagcacagataacttttgattatccattcaggatacctccgtattttgctttgattattagagccatcggagtattagaaggcatagctttggtgggagatcctgaatttgccattgtggatgaagcatacccatacatcgcacagaggctactaacggacgaatcgcctcg

SEQ ID NO: 5049 - DNA, 269 bp, Zea mays
gggaaatctgggaaggatggctggtatcctcctggtcatggtgatgtgtttccttctttgaataacagcggaaaacttgacatcttattggctcagggcaaggagtatgtctttgttgcaaactcagacaacttgggtgctatagtcgacatcaagatcctaaaccatctgatcaataaccagaacgagtactgcatggaggttactccaaagacgctggctgacgttaagggtggcactctcatctcttacgaaggaagagttcagct

SEQ ID NO: 5050 - DNA, 269 bp, Zea mays
caaagaattccctcccctagccgccgccgccgctcgtctccctgagaggtgccgggaccgaggaactggccgagttctaggtagagaatcgggtttgcttgtctcagcacggggtctgctgcgtctggtggtggtgaaggggagaaattcgtgagatctgttccggatcaggcgtgcgagctcgggaatcaggggtttcacacatagcttcgtcgatttgaatttgatgtactaatggagtctaagggtggcaaaaagtctagcagtag

SEQ ID NO: 5051 - DNA, 264 bp, Zea mays
cggcgacaagaggtggttcaagggcgccaggaagggagtcgagaaggccgccgcctccttcagcgtcgcatgatgcagtaatattgtttcttcgatgggatgggatgcacgcactacgtagagagcttggctaggccaggcctggctgagcacgcttgtgtgttccttcgactgtacatgagaacaaagactaagaccttgttcgtttctatcggattacacctggaattgttccagctaaggccttattcggcacaatagtat

SEQ ID NO: 5052 - DNA, 264 bp, Zea mays
tgggtatcaagtttcagaataaaggcttacttgttgaagctataacacatgcatcaagaccatcatcaggtgtttcctgttaccagcgcctggaatttgttggtgatgctgtattggaccatctcattacgaagcacttattttttacttatacggacctacctccaggccgcttgactgacttgagagctgcagctgttaataatgagaactttgcaagggttgcagttaaacataagctacatgtacatcttcgccatggat

SEQ ID NO: 5053 - DNA, 258 bp, Zea mays
atctagagctccctaactgcaccggccgccacaccaccgtaccccgacccctcgacaacaatggccaccgtcctaggcagcccccgcgcgccggcgcttcttcttctcgccgtcctccctccgtgccgcgccggcgcccaccgccgtggcgctgcctgctgccaacgtgggcatcatgggccgtagcgccagagcaggggcaggctgcgcgcgcaggccatctaccatgtgaagctgatgacgccggaggggcaggtg

SEQ ID NO: 5054 - DNA, 335 bp, Zea mays
cggctcgagggcacttgtccggcacctttcagcgtgtgagactatgggatctgccggaaccatctgcacggataaaacgggaactttgactactaaccatatggtggtcgacaagatatgggcatccgaggtctcaaaatcggttaccgatagcagtagtttggaagatctggcttctgccgtttctccagccacattgagcctgcttctgcaaggaatttttgagaacaccagcgcagaggtagtcaatgagaaggatggcaagcagactgtcttgggaactccgacagatgaggcaatatttgagtttggcttgaaactggaaggtcttggtg

SEQ ID NO: 5055 - DNA, 333 bp, Zea mays
  unsure (1)..(333): unsure at all n locations
ccggcatcgacgaggcgaaaccctagcgcccgagtccctctccctgctcccacaacccatggcggcggatatggcgtacgcgccgccgatgaaggctggcaaggccgggttcgaggctggcatgatggatccacagcacaggatccgcatcacgctctcctccaagagcgtcaagaacctcgagaaagtctgcggggatctggtgaagggcgccaagggtaaggagctcaaggtcaagggccccgtgcggatgcctaccaaggtgctccacatcaccaccaggaagtctccctgtggagaaggtaccaacacctgngatcgctttgagatgag

SEQ ID NO: 5056 - DNA, 327 bp, Zea mays
ggcagagaagctcaaggctgagtacaccaagaagatcgacgcttacaacaacaagcagtctggagacgccacggcgtctggtgattccgacaagtccaagtccgaggtgaacgacgaggacgaggagggtgacgagtgatgtatgacggatgaaactctgtccaagtgtttgcagtcagggaaaaaaatcttcgtcgttgtcggcctaaccgggctttctcgaaggactttctagatgcagtagattagtgccgtcttctctgagtagtttccttgcaagtgtcgtcccgtccctggagtgaggcagtttagtttgtagtttcttcg

SEQ ID NO: 5057 - DNA, 324 bp, Zea mays
agcaagtgaagttgtcaaatgctggaggaagacttattattgcttcagatggcatttgggatgcattatcctcagaagccgctgctaagtcttgcagaggtttgcctgctgagcttgccgcaaagcaagttgttaaggaggcactcaggacaagagggctaaaggatgatacaacttgcattgttgttgacataatcccacctggtcaaacaatacggcctctgtctcctcctagaaagacgagcaagctgaagtcttttatttttagaaagaaagcgtaagacccttctcagaagttgactagacagcattcagctgttggta

SEQ ID NO: 5058 - DNA, 300 bp, Zea mays
tcggctcgaggttccttagaccttttgtgatcgttatgcagaggagcaatgctccagaggtacgagagctgattgttaggtgcgtctcacagatggttctgagtcgggttaataatataaagtctggttggaagggtgtttttatggtttttacttttgctgcagctgatgatacaagaagtactgtcctattggcatttgagacggtggaaaaaattgttcgagattattttcatcacataactgaaacagagacaacggcatttagctgatgtgctacttgtcttatgcatttacagt

SEQ ID NO: 5059 - DNA, 303 bp, Zea mays
ctgcggcgggcccggatgtgcgtgcgggccggactcccgcgtggagaccatctcccggctggcgcagtggcgcatcgataccttcggcccctgctcctaccgccggtcggacccctttaagctcggcatctggaactggtacctgtcggtggagaagagccgctccatcgttgtgcgcctcttcccggagcccggccgtgtggccaaggagcagccccctctcgcgcgcttcgtgctccgcgtctcctgggccggcccgccgcgacgctcctgcgtctcgcctgtgcacgagatcttctggta

SEQ ID NO: 5060 - DNA, 274 bp, Zea mays
catcgaggagggcatcttcgaggtgaaggccactgcgggcgacactcaccttggcggcgaggacttcgacaatcgcatggtgaaccacttcgtccaagagttcaagcgcaagaataagaaggacataagcggcaacccccgtgcactgcgccggctgcgcacggcgtgcgagcgcgccaagcgacgctgtcatcgactgctcagacgaccattgagatcgactccctgttcgagggcatcgatttctactccacgatcaccagggctcgcttcg

SEQ ID NO: 5061 - DNA, 304 bp, Zea mays
gtccaatagctgccaaaggtcacaaagattcagtttacgcactggcgatgaatgatacaggaacccttcttctctctggtggcactgagaaggttgtccgagtgtgggatccgaggacaggatcgaaaaacatgaaattgagagggcacactgacaatatcagagccttgcttgttgattctacgaggaggtattgcctatcgggatcatctgattcaatgataagactatgggatctaggacagcagcgttgtgttcattcttatgctgtgcatactgattctgtttgggcacttgcaagcac

SEQ ID NO: 5062 - DNA, 297 bp, Zea mays
acagaacatactcctatactgaagcgctgagaagtagataagaataataatatggggttcagtgaggcacaggaagagctcgtcctccgttcatggaaagccatgaagagcgactccgagtcgactgctcttaagttcttcctcaggatctttgagatcgcgccgggtgccaagcagatgttctccttcctgcgcgacgccggcgacgcgccgctggagaaacacccgaagctcaaggccacgacgtcacggtcttcgttatggctgcgagtcgcgagcagctgaggagcacggcga

SEQ ID NO: 5063 - DNA, 320 bp, Zea mays
accatccgcacctctctccatctccctgctcctccgcctccttcttgatccagccaagccagggatcgccatgtcggactcggaggagcaccacttcgaatcgaaggccgacgccggagcgtccaagacctacccgcagcaggctggcaccgtccgtaagaacggcttcatcgtcatcaagaaccgcccctgcaaggttgtggaggtttctacctcaaagactggtaagcatggccatgccaaatgccactttgttgccatagacatattcaacgggaaaaagctcgaagatattgttccttcgtcacacaactgtgata

SEQ ID NO: 5064 - DNA, 318 bp, Zea mays
gaggcggagaagcaggtcactcgaccagctaaatccctgggtgtacaagccggctgagctatggcaggcgaaggagcaggagcaccaccacccgccgcccaagaagcgcactgcaccatggtgttcacgctcaaggagatggaggaggcgaccaacctgttcagcgaccgcaacctcatcggcaagggaggcttcggccgggtttacagaggcgtgctcaaggatggccagatcgtcgccgtcaagaagatggagctgccgacttgcaagcaggccgacggcgagcgcgagttccgggtggagatcgacatcctgagc

SEQ ID NO: 5065 - DNA, 319 bp, Zea mays
  unsure (1)..(319): unsure at all n locations
aggatacncagttgctgcaactggccttctccatcttcgatgcagatgctgatggacacatcagtttgcaggaacttgaaagcattctaaacatctgtgggtcaaaaggtgaatagagatgagctcttgaaatctgtggaggcagctcaccaagaggtgcagcagcagcagatcaaggttgatgccagcaaggacaacggtattgactggaatacatttcaccaggttatgagcaggcccatcgaagaggaagaagtcaaaactgtatggaagatcctggacagtgagaagaagggtcacatttctgtggtggacatct

SEQ ID NO: 5066 - DNA, 312 bp, Zea mays
tgctcttctgcgctggcctccttcaagcacatagtagccaacgcaaaaggcaggaggatcgctgtgttcttggattacgacggcaccctgtcgccgatcgtcgacgatcccgacaaagcgttcatgtcccctgtgatgagagctgctgttagaaatgtcgcgaagtacttccctaccgcgattgtcagcggaaggtcccgtaagaaggtgtttgaatttgtaaaactgacggaactgtactacgctggtagtcacgggatggacatagtgacatctgcagcagcacatgctactgaaaagtgcaaagaagcc

SEQ ID NO: 5067 - DNA, 271 bp, Zea mays
atttcataatgcgagtacacgattctctgatggggctcgttttggattgggtgccgaggttggcataagcacagggcgtatacatgctcgcgggcctgtgggtgttgaaggtctcttaacaacacgctggatcatgcgaggaagtgggcaagtggtgaatggtgacaagaatgttgcatacacccataagaaccttcccttacaatgaggctgtttttgtgcttgatcaggattcgtgtctatccagtgatgtttgatagtttcatcaggc

SEQ ID NO: 5068 - DNA, 280 bp, Zea mays
gcatttttatgaacgcatgggtgacacacttgctttacagtatggtggttcggctgctcacaataagatattctctgcgaaaagagggcacttgaagtttgccattcaatctcaagagttctttaggacactgcaacggtactacagtaatgcatatatggatgcttacaaacaagctgcgataaacttatttttaggatacttccagccacaggtgggaaaacctgcactttgggagccagaatctggtgatgagcatgtacttgatgacgagacatgt

SEQ ID NO: 5069 - DNA, 305 bp, Zea mays
gcaggaagccagtggtttggtgcattgttacggagtatgccaagggcggatcagttaggcagtttctggcaaagaggcagaataggtcagttccactaaaactggcggttaagcaagcactggatgttgcaagggggatggcgtatgttcatggtcttggcttcattcatagggatcttaagtcagataacctcttgatatctggtgataaatctatcaagatagctgactttggagtagctcggattgaagtaaaaactgaggggatgacacctgaaacgggaacctatcgttggatggcacag

SEQ ID NO: 5070 - DNA, 309 bp, Zea mays
gcaaccagctagctcgggcggcacaggcagccatcatgtcggaggagaagcaccaccacttcttcaaccaccacaagaaggacgaggagcagcccgccggcgagtacgggtactccgagaccgaggtggtcaccgccaccggcgagggcgagtacgagaggtacaagaaggaggagaaggagcacaagcacaagcagcacctcggcgaggccggcgccatcgccgccggcgccttcgcactctacgagaagcacgaggcgaagaaggaccccgagcacgcgcacaggcacaagatcacggaggaggtcg

SEQ ID NO: 5071 - DNA, 310 bp, Zea mays
caaaatcaagaaacgtcgccatggttcaggcagtgaaactgaaggccaggaaggagggatattggctgcaggaactgacaaggagcgatcactctctgctgaagacgcagtttgctgcatctgtcttgcaaaatatgcgcacaatgatgagctccgtgaacttccatgtgcacactgtttccacaaggactgtgttgataaatggctcaagataaatgcactttgccctctgtgcaaatctgagatagtgagctcgtctggtacttctgatgcccgccaatcagaccagaacaccgttcctgtgcaggag

SEQ ID NO: 5072 - DNA, 303 bp, Zea mays
gtgctctccaggctctgatggagggtcttcaggtccttcacttggatgacgttgtctctgaagctgacatcttcgtgaccaccactggcaacaatgatatcatcatggttgaccacatgaggaagatgaagaacaatgccattgtctgcaacattggccactttgacaatgaaattgatatgctcggccttgagacctaccctggcgtcaagcgcatcaccatcaagccccagactgaccgctgggtgttccccgagaccaacactggcatcattgtccttgctgacggtcgcctgatgaacc

SEQ ID NO: 5073 - DNA, 252 bp, Zea mays
cgaaaccctaacgccgccgccgcttcacaggtaaaccgccgccatggtctcgggttccggcgtatgcgcgaacatgcagtggtggacgcgcgccaccacatgctgggccgcttgtcgtcgattatcgccaaggaactgctcaatgggcagaatgtggtcgtcgtccgctgcgacgagatctgtatgtccggtgggctcgtacgccagaagatgaagtacctccgctttctccgcaagcggatgaacaccaag

SEQ ID NO: 5074 - DNA, 232 bp, Zea mays
ggatgttaagggtgtaaagaaacttcttacacagggagtggattctaactactgcgacaaacaaggatttactttgctgcatttggctgctttgtttaaccaaactgaaattgctcttattctcatggaccatggggcaaatgttgaaagcaaaaatgggcaaggggaaactcctttggactgtgctccggcaatgctgcaatacaaaatgcgccaacgggtggaagaactc

SEQ ID NO: 5075 - DNA, 288 bp, Zea mays
agaaatcgttccaaccgatcaaaccttatataaattagacaaacaatccagctaggagtcgttccgaatgctcaaatccactggaccgaacaggccctcagagtgcacgtaccacgaagcaagccattagacatcaatatgtattctcatgatcactgctacatgcagctctatagaacaaaagaaacaaaatcacgtagccacctagaccctttgtaaaaaaatgtacatgaagttctagtctgatccagtctgtgcccaacgagatttctggttcagggcatttca

SEQ ID NO: 5076 - DNA, 299 bp, Zea mays
gtttcgtaagtggtgagggactgagggtctcggagtggattgatttgggattctgttcgaagatttgcagaggggggcaatggcgaccgcggggaaggtgatcaagtgcaaagctgcggtggcatgggaggccggcaagccactgtcgatcgaggaggtggaggtagcgcctccgcagccatggaggtgcgcgtcaagatcctcttcacctcgctctgccacaccgacgtctacttctgggaggccaaggggcagactcccgtgttccctcggatctttggccatgaggctggaggtat

SEQ ID NO: 5077 - DNA, 301 bp, Zea mays
gtggatggacgcaacatctgggctgatgatcttgctacatctctcagcactctccagtctcttgaggctgttgttgggaaggacaagcttgtcgtatcaacttcctgctcgctcatgcacaccgctgtggatcttgtgaacgagactaagcttgacagcgagattaagtcttggcttgcttttgctgcccagaaggttgttgaggttgatgctcttgctaaggcattggctggtcaaaaggatgaggcttacttcgcagcaaatgctgctgctcaggcctcgaggaaatcctcaccccgtg

SEQ ID NO: 5078 - DNA, 303 bp, Zea mays
gcttagcttgtatgtgctgagctttggctccccccggcgcaccgctgaagcctcgactcgcaggcagccatgccgatgataatcgagcgtgatctccacatggccacagggaacggacaaactagctacacaagaaattctaggattcaagagaaagctatgtttcagatgaagtcggtccttgaggaggccactagagcagtatgcacagctctcctcccacaaaccatggttgtggccgacttaggctgctcatccgggcctaacacactgcgcttcgtcactgaggtgactagaatcata

SEQ ID NO: 5079 - DNA, 267 bp, Zea mays
gttggtgattatttgtctgtgaagggacctaagggccgattcaagtaccacgttggccaagtgagggcatttggaatgctggctggtggatcaggcattactccaatgtttcaagttgccagagcaattcttgagaaccctaatgacaacaccaaggttcacttaatttatgctaatgtcacatatgaagacattcttctgaaggatgagctggacgacatggccaaaacctatcctggccggtttaagatctactaagtggtggat

SEQ ID NO: 5080 - DNA, 304 bp, Zea mays
gccatttacaacgacaccaccatgtcgtctgtccaggaggagcttaataacacacaggacatgctccaaggttacgtggagctctacaattacagtctctcctacgtgaagaccatggcgatcgggtgcgcgatccagctaggcatccctagcgccatccaccgccgaggtggggcagcaacaatctcggacatcatcaccgagaccggcgtcgacccgtcgaagctcccgtatctccgacggctcatgcgcgtgcttaccgtctccagcatcttggccaccacaggcacagacgagactgaga

SEQ ID NO: 5081 - DNA, 305 bp, Zea mays
cactgaggatgtttccagtgaaataatgaaagaaatgcaggccaagcctgaccttatcattggcaactacagcgatggcaacctagtcgccactctgctcgcgcacaagttgggagtcactcagtgtaccatcgctcatgccttggagaaaaccaaataccccaactcggacatatacttggacaaattcgacagccagtaccacttctcttgccagttcacagctgaccttattgccatgaaccacaccgatttcatcatcaccagcacattccaagaaatcgcgggaagcaaggacaccgtgg

SEQ ID NO: 5082 - DNA, 294 bp, Zea mays
cggctcgagtggcggccggcctggaagccagcgggcagcggttcttgtgggtggtccgagcaccgcccagcgacgacccggccaagaagttcgagaggccgccggagccggaccttgacgcgctcctcccggaggggttcctggcccggaccaaggataggggtctcgtggtcaggtcgtgggcgccgcagcgggacgtgctggcgcacgcgtccgtgggcggcttcgtgacgcactgcggctgaagctcggtcctggaggcggtgatcgcgggcgtgccgatggtggcgtggc

SEQ ID NO: 5083 - DNA, 302 bp, Zea mays
tggaaggaaaggagaagaacattgctgtgattgttggcacagtcacagatgacaagaggatccaagaggttccagcaatgaaggttactgccctgaggttcaccgagacggcaagggccaggattgtcaatgctggtggggagtgcctcacatttgaccagcttgctctccgtgctccacttggcgagaacacagtcctcttgaggggccccaagaatgcccgtgaggcggtgaggcacttcggcaaggctcctggagtgccgcacagccacaccaagccatatgtgcgctccaagggaagg

SEQ ID NO: 5084 - DNA, 299 bp, Zea mays
taccgtcctcatctccacccagcacgacgagacagtgaccaatgatgagatcgctgctgacctgaaggagcatgtcatcaagcctgtcatccctgagcagtaccttgacgagaagaccatcttccaccttaacccatctggccgctttgtcattggtggacctcacggcgatgctggcctcactggccgcaagatcatcattgacacctacggtggctggggagcccatggtggtggcgcttctccggcaaggaccaaccaaggttgaccgcagcggacctatgtcgcaagcaggctgc

SEQ ID NO: 5085 - DNA, 292 bp, Zea mays
gtcagatattgttgttaagattggtctccggaaaggttctaaatcttttgaagaagcccgagcagcaggattcaccgaagagagtgggacgctgggtgatatatgggagactgtatcaaacagtgatcttgttttgctactgatatctgattctgctcaggctgataactacgagaaaattttctcgcacatgaaaccaaacagtattcttggtttgtcacatggatttctccttggacatttgcaatctctgggttttgatttccctagaaacatcagtgtggttgctgta

SEQ ID NO: 5086 - DNA, 295 bp, Zea mays
caactccgtgaacgacaacccggtcatcgacgtccaccgcggcaaggcgctgcacggcggcaacttccagggcacccccatcggcgtgtccatggacaacgcccgcctcgccatcgccaacatcggcaagctcatgttcgcgcagttctccgagctcgtcaacgagttctacaacaacgggctcacctccaacctggccggcagccgcaaccccagcctggactacggcttcaagggcacgagatcgccatggcctcctactgctccgagctccagtacctgggcaaccccatca

SEQ ID NO: 5087 - DNA, 297 bp, Zea mays
cacagccaccgcgatggcgcagatcatcgatggcaaggccatcgccgccgacgtccgccgcgaggtcgccgccgatgtggccgcgctctcgtcggcccacggactcgtgccggggctggccgtggtcatcgtggggagcaggaaggactcgcagacgtacgtgaacatgaagcgcaaggcgtgcgccgaggtcggcatctgctccatcgacgtcgacctcccggacgacatctccgagaccgcgctcgtcgccgaggttcatcgcctcaacgctgaccccgccgtgcacgggatcct

SEQ ID NO: 5088 - DNA, 294 bp, Zea mays
acggtgatgagatgaccagggtattctggcagtctatcaaggacaagcttatcctcccatttctggacctggacatcaagtactatgatttggggatactgcaccgtgaagcaactgatgacaaggtcacagtggaggctgcagaggctactctcaagtacaacgtggctattaagtgtgcgaccattactccagatgaaactcgggttaaggagttcaatctgaaacacatgtggaagagcccaaatggcacaattaggaacattataaatggcactgtgttcagagagccta

SEQ ID NO: 5089 - DNA, 295 bp, Zea mays
gttgggcgcagagaatccccaagcaaacaaacagggtagagggagaggagatgagaggagaggagaggttgggtctgggacaccatggctccgatgaagctgtacggggcggtgatgtcgtggaacgtgacgaggtgcgcaacggcgctggaggaggctggctccgactacgagatcgtgcccatcaacttcgccaccgccgagcacaagagccccgagcacctcgtccgcaacccgtttggtcaggttccagctctgcaggatggtgacttgtacctcttcgaatcacgagcaa

SEQ ID NO: 5090 - DNA, 290 bp, Zea mays
  unsure (1)..(290): unsure at all n locations
gtgttgttctcccgtgataaataaacccgggcctgtgcaggaggaggctccgcgtggaggcgatcaggacgcagcgggagaagcagcggacggaggtgcccgtcgaggagtccgcccccgccaggtacgccgccgcgcccctggacggaaacggagccgtagcggacggctccgtggttccttcctcggacgacagctgggttatcaagctcgagcagtcgttcaacattttcgctacggattcggtgattatggtactcaanggcgtgtatggtgatcggtactacgcc

SEQ ID NO: 5091 - DNA, 344 bp, Zea mays
aagagttcttcttgttaggcaaggcaaaagcagaagcaaaaagagaaaggtcttgttgccgatggggagctcagggttctcgtggacgcttccggaccaccccaagctccccaaggggaaaccggtggctgtcgtcgtgctggacggatggggcgaggccaaccccgaccagtacaactgcatccatgtcgctcagactcctgtcatggactcgctaaagaatggcgctcctgagaaatggagactagtgaaggctcatggaacagctgtgggcctcccatctgatgatgacatgggcaacagtgaagttggtcacaatgcacttggtgctggtcgaattttcg

SEQ ID NO: 5092 - DNA, 168 bp, Zea mays
  unsure (1)..(168): unsure at all n locations
tggctgctgtgcaccggagagcgcggcgtgggaaagtggtccggcaagcgcctgcactacaanggcgcggcgttccaccgcgtggtgcccgggttcatgtgccagngcggcgacatcacggcgggcaacggcacgggcggcgagtccgcgatcggtgacgcccgtact

SEQ ID NO: 5093 - DNA, 330 bp, Zea mays
  unsure (1)..(330): unsure at all n locations
gtatgcactttgcagatagctagctagtagttaggggatcaggcatgggtaaagtcgatgcggaggtgaagggcgnggtgctgctgggccgctacgagctcggccgcgtgctgggtcacggcgacttcgggcgcgtcgacgggcgcgggacctgcgcaccgggcgggccgtggcggtgaaggtgctcgacaaggacaagatgctgcgcacgggcatgatggagcagatcaagcgcgagatcgccgtcatgaagcgcatgtcgcaccccagcatcgtgtagctccacgaggtgatggccacgcgctccaagatctacctcgcgctggagct

SEQ ID NO: 5094 - DNA, 343 bp, Zea mays
  unsure (1)..(343): unsure at all n locations
tggcgtgatagagccatcgatgagcaaagtaaagatcattcagtttgccacggaggctgccattactatcctgaggattgacgacatgatcaagcttaccaaggaagaagagggtaacgaagagtaagcaccgcccaccagtagtgggctagtggactcccatgggatggttgccatagcatgtagcacttgttttttccccttatcgtttacttttgctagctgtgagcattcgtttgtaggaaaagtgagaacggatgtgtatcaatccgtgttgggtgccgatgactcacggatgaatcaaatctttgcgtatattggggccanaacagttctatctgaa

SEQ ID NO: 5095 - DNA, 328 bp, Zea mays
  unsure (1)..(328): unsure at all n locations
gtctggtccccacccctcagcgcgacgaaggtaagatgttcctgcggaggatcctgaccggcgggggcggcctggcggccctgagggcggcgcgcgccgtgaaggagacgacggggatcgtgggccttgaggtggtgcctaacgcgcgagaggttctggtagggctctacgagcgcacgctcaaagagatcaaggccgtccccgaagacgagggttaccgcaaggccgttgaatccttcaccggtcaccgcctccagatctgccaggaggaggaggactggaagcgcatcgangaccgaatcggatgcgggcaggtcgangagctcat

SEQ ID NO: 5096 - DNA, 337 bp, Zea mays
gctgtgcttggttggaatgcttgcattgctttggtctgtggaaattgtgtcgtctggaaaggtgctccaacaactccactgatcactattgcaatgacaaaaatagtggctagtgtattggagaagaacaacttgccaggcgcaatttttacatctttttgtgggggcactgaaattggtcaagcaattgcccttgacattaggatacctttggtttcattcactggaagtacaagggctggtctaatggttcagcaacaagttagtgcaagatttggtaaatgccttcttgaacttagcggaaacaatgcccatcatgttatggatgatgcagata

SEQ ID NO: 5097 - DNA, 335 bp, Zea mays
cgcttcgccctctcgctccagccgcttcacagcgccgccgctcgcctctccgactgccgcgagaatgccgttcaagacgttcgtggagatcgggcgcgtggcccttgtgaactacggcaaagactacggccgcctcgtcgtcatcgtcgatgtggtcgaccagaacagggcacttgtggacgcccctgatatggtcaggtgccagattaacttcaaacggctctcacttactgacatcaagattgacatcaaacgcgttcccaagaagtcaaccctgatcaaggctatggaggaagctgatgtgaagacgaatgggaaaacagtcatggggcaag

SEQ ID NO: 5098 - DNA, 337 bp, Zea mays
tgcgtagttatgatgttcgttcagatgaggccacattcactagtgttctgaaagcttgttctgagatggcatctcttacagatggaaaagagatacatggcctcattgtaaaatctggttttgtttcctatgaaactgcaaccagtgccctcatggacatgtactccaagtgtggggatgttatttcttcctttgaaatcttcaaggaattgaaaaacaggcaaaatataatgccatggaactccatgattgttggttttgcgaaaaatggttatgcaaatgaggcacttcttctcttccagaagatgcaagaatcacaaatagagcctgatgatgt

SEQ ID NO: 5099 - DNA, 333 bp, Zea mays
gtttcagcttgtatacccactctgtcgcacagcgtcgcccgtcgccgctgagatcctaggaagaaatggagctctctcgcaagctcttcacggccgtcctcctcgtcatgctgctgctgctgtccgcagaggtcgggccggtggcggtggcggaggcgcggacgtgccagtcgcagagccacaggttccggggcccctgcctccgccggtccaactgcgccaacgtctgcaggaccgaggggttccccgacggcaggtgccgcggcttccgccgccgctgcttctgcaccacgcactgccactgattcgctcgcccagcggccggctggcgcg

SEQ ID NO: 5100 - DNA, 336 bp, Zea mays
cacgcactgcagcaccacttcctgcgctgctgctcatcacacaccgtagtactaacactccagcgccacaatggctcccaaggttgcgctcttccttgccctcagcctcctcttcgctgccgccgcgcatggctgcgaaccctacgttcccggcccagtcgtcccaacgccgcccgtcgtgccgtcgcacagccacgggcgctgcccgatcgacgcactaaagctcaaggtgtgcgccaacgtgctggacctcgtcaaggtcggtctaccccagcacgagcaatgttgcccgctgctggacgggctggtggacctcgacgccgcactgtgcctctg

SEQ ID NO: 5101 - DNA, 330 bp, Zea mays
  unsure (1)..(330): unsure at all n locations
gcgttcttggcacagaggatctcctctgtcaatgccatctccgctctctgcgaggcaaccggagccaatgtctctgaggtggcttacgccgtgggcaaggacacgagaattggccccaagttcctgaacgccagtgntgggttcggtggctcatgcttccagaaggacatcctgaacctggtgtacatctgcgagtgcaacgacctgcccgaggtggccaactactggaagcaggtgatcaggatcaacgactaccagaagagccggttcgtgaaccgcgtcgtggcctccatgttcaacaccgtcgccggcaagaagatcgccgtcctc

SEQ ID NO: 5102 - DNA, 331 bp, Zea mays
gcggcggcgtaggtagcggcggtctcaaccccaggcgagctcggctccggtcacccgtcgatccacgcaaccatgtcgaggaggaagaccagggagcccaaggaggagaacgttacccttggacccactgtccgtgaaggagagtttgtctttggtgttgctcacatctttgcatccttcaatgacaccttcattcatgtcactgatttgtctgggagggaaactttggttcggatcactggtggcatgaaggttaaggctgatcgtgatgagtcgtctccttatgctgctatgcttgctgctcaagatgttgcacagcgttgcaaggagc

SEQ ID NO: 5103 - DNA, 332 bp, Zea mays
  unsure (1)..(332): unsure at all n locations
ggcgaggagtcaagtccatcaagacatggaagacgcttgatgataaacatctgagcacaattgactctgaggttctctggaacagaggctctaatgggaggcgcgggaaaaatcctgatcgtagttaacttttgatgcagacaggaatggtgctccataagggatctctacatcggtgtgtattgttggatggccagtttactatagaatcagaaatatgcagaagtgtgtacatgggggagaaggtcaaatacagacacatacacgcaggtttctgctgttgcatttttccatgttattagaaaataagtaatcanaattcagtgctgctg

SEQ ID NO: 5104 - DNA, 329 bp, Zea mays
cggctcgagcaaacacaagtcgtcgtaggcagcgagcgtctctcctctcccacgcatcgcgccaaggaagagagagagatcgccgctccccgtctcggcgtcggtggcgggtgccctccctcctcgagcgagatctgtctggtcacagatctatctgacaaaatggtgaagatctgctgcatcggtgctggctatgtcggtggcccaaccatggccgtcattgccctcaagtgcccagacattgaggtcgtcgtcgtcgacatctccaagccccgcattgaggcctggaacagtgacaccctgccgatctacgagcctggtctcgatga

SEQ ID NO: 5105 - DNA, 196 bp, Zea mays
caggcaccgggacccctctcctccccgccgacgcctacgaccgcgccatggctcgcttctgggcagcctacgtcgacgacaagttctacaaggagtggaaccggctgttctggtcgacgacggcggagaaggcggcggaggcgctcggcgtcgtcgtccccgtggtggagacgctggagcaggcgttcagggagtg

SEQ ID NO: 5106 - DNA, 270 bp, Zea mays
aatcagaggtgcttcaagcaatggttcaaatgggtgtccttgttcctactggagatatgactgttgtcagaagaaccgctcaatttttccttaatagctttcaagagtgcctaacagcacaaaggaaggagagagaaatggcaaccgcagaactgggtttcaaaaagcaattaactaaggaggagaagtttgaaaagaggaagcagagacttgctacaatcggagacgatcttttggcgattgctgctgatcaaccatttcgcttccctg

SEQ ID NO: 5107 - DNA, 314 bp, Zea mays
gtgacactttcatccctccggttgacttctcagtgttccagccatggtattcatctttcccggtgatagagagcaacattaggcattcgtttgtgtcttttgttcgtgttagaaagtcagtggcagaaactcatgagtcaaatggcaaggactcaaccgaggttgataccaagaatgacaaatttgaaacagagaatttctcttttctccccaagatggtatatgaccgccatgaggagtaccaatatctcaatcttgttgaagatattataaggtctggtgctcagaaaaacgacaggacaggaactggaaca

SEQ ID NO: 5108 - DNA, 312 bp, Zea mays
caaacagcaagttaaggatgctaaatttcctgatctagaggtcattcgcatgttgtgggatgtgctcatggaggctgttcagtggtctgggaagaaccagcaacagaattctaatgcagcacttcggcaggtgaaagcatgggctgagcttttgaatgctttttgcacgagtggcagactcgaactggaacttatatacaaagtacagacacagtgctatgaggatgctaagctgatgaagctgtttcctgaaatcataagaacactgtatgaccaagatgtcctagctgaagatactgtcctgctttggtt

SEQ ID NO: 5109 - DNA, 188 bp, Zea mays
gcgagttgatgagtatgggcttggagtaagggagagcttggctgaggctgtaagtgctgttataagcatccttggcatgcagccttgtgaggggactgacgtggtcccaagcaattcaaggtcgcacacttgtctgctctctggtgtgtttattggcaacgtgaaagtcttggtgagactttcatttg

SEQ ID NO: 5110 - DNA, 309 bp, Zea mays
ggtgcatatagtcacagtcagggtatcaaaggactgcgtgatgcaattgctgctggaatcatgtcacgtgatggattccctgcaaatgcagatgacattttcattacagacggagcaagtcctggggtccacatgatgatgcaattactgattaggaatgagaaagatggcattctgtgcccaattcctcagtaccctttgtactcagcctccatagctcttcatggtggagctcatgtcccctattaccttaatgaaaaaactgggtggggtttggagatctctgatcttaagacgcaactggaaaat

SEQ ID NO: 5111 - DNA, 308 bp, Zea mays
gtcggaatcctaaggatcaacagtatatgaagatgaccttgaaccagctgctcgttgagttggatggctttaagcagaatgaggggataattgtcattgctgcaacgaactttcctgagtcgctagataaagccctagtcagacctgggcgttttgaccgtcatattgttgttcccaacccagatgttgaaggtcgacgccaaattctagaatcccatatgtcaaagatcttgaaaggtgatgatgtggacttaatgatcattgctagaggaacaccgggattctctggtgcagaccttgctaacttg

SEQ ID NO: 5112 - DNA, 305 bp, Zea mays
  unsure (1)..(305): unsure at all n locations
gagctctgctgggagaatcaaatgaatttgttggagacaaggttgcgtatgccctgtctcagggactaaaggtcattgcatgtgttggtgagacacttgagcagagggaggctgggtctaccatggaggttgttgctgcacaaacaaaagcaattgctgagaagatcaaggactggagcaacgtagttgttgcctatgaaccagtttgggctattggaactggtaaagttgccaccccagctcaggctcaggaagtgcacgcctccctgagggattggctanagaccaacgtcagccctgaggtt

SEQ ID NO: 5113 - DNA, 184 bp, Zea mays
gtgcattggaaatgtttcggttatgagggctgcactggaatgctgccacaagggctggggaacctccgtcatcgtcggcgtcgccgcctctggccaggagatcgccacacgaccattccagctcgtgactgggcgtgtctggaagggaaccgctttcggtggcttcaagagccggacccaggtc

SEQ ID NO: 5114 - DNA, 259 bp, Zea mays
catacccttttcagccatgtctactttgacaaagtccatgtgctggaagatggtcaacaagactaaggataagttaaaccaagttggtatggtcatatatcagaaaccaatggacaatatttgctatgagaaaagatctgaaaacagcccgccattgtgcaaggaatctgatgatgcagatgctgcttggaatgtaccgttggaagcatgcatgcacaaactgcctggtggctcaaaagtccgaggatcaaaatggcca

SEQ ID NO: 5115 - DNA, 258 bp, Zea mays
cggcgtcttcgtactcgcctatctccgcgacccaaagcgttcccccttctcccattcttctctcatttctcaccaccgccgccgctaccccctttcgacaacaccatgagggagtgcatctcgatccacatcggccaggccggtatccaggtcggaaacgcgtgctgggagctgtactgcctcgagcatggcattcaggctgatggtcagatgcccggtgacaagaccattgggggacgtgatgatgctttcaacacc

SEQ ID NO: 5116 - DNA, 301 bp, Zea mays
agcacccgcaccaatctctgcgtctcttcgtcttcggctgcgcggcggcggcagcagcggaggaggttgaggagatgctgtccggcgacatccccccgagccagaccatctacctcaacaacctcaacgagaaggtcaagaaagaagaattgaagagatcgctttatgccttgtgctcacagtatggaaggatactggatgtggtggccctgaaaacacaaaaactgagagggcaagcatgggtggcgtttagcgaaattacagctgctaccaatgctttccgtggattgcaagattttga

SEQ ID NO: 5117 - DNA, 298 bp, Zea mays
gtccatatgagcaacaagcattcgcatcgaagactgattggcgtgtcagagccatctctgccacaaacttgtatctacgtgtaaatcacatttatgtcaattctgatgatataaaggaaactggctacacttacattatgccaaagaacatattgaagaaattcatatgcgtacagatctgcgtacacaaatcgctggattcttatatgggctgagtccacaggacaatcctcaagtcaaagagattaggtgtatagccatccctccgcagcatggaacacaccagatggtgactctg

SEQ ID NO: 5118 - DNA, 298 bp, Zea mays
caacggctgctgccgctcggagcctctccagacgttcacgatccgtaagtgctcggcctttcgatttctgttcatatgttccgtcaggtgaatacgggatcggtttcgtctgaatttcgcgactgttgccgctcgagcagacgggctatggccggactacgacgacgggacctggccgtcgtgctgccgccgcacccaattcgagatggacaagatattgccactgaaggaggtgcttgacaagtactggccgtccctctactgctccaaatctggaacatgcttcagcggcaaggga

SEQ ID NO: 5119 - DNA, 233 bp, Zea mays
cgtgaacccgccgccgacgcagcagcaggagacgcgccaaggagagcccgcatagaggcgactatgagggccaagtggaagaagaagcgcatgacgaggctgaagaggaagcgccgaaagatgaggcagagatccaagtaggctgatggggattgtggatggtggtgtcggcatagttgtgttacgtttcttcgatgcgtgagttcatggagagatgtcacatcctagttcgt

SEQ ID NO: 5120 - DNA, 319 bp, Zea mays
aaattagggttttcctattaatttatatcgtaaggacggaacataaatgtcaaactacaagtctaagctcttcaaaaccatcgctgccaagccttctgccattgaagaatctgtcgctcaagctctcttcgaagttgaaaactccgttgctgaccttaaggacctcttgaaggatctctacgttgctggtgtcagagaaatcgaaaccaccaccaagggcaagaagaagaacgtcctcatcgtctacgttccttatgcctctcttcgtctcctctacagagttcaccccaagctcgtccctgaactcgaaaagagactc

SEQ ID NO: 5121 - DNA, 139 bp, Zea mays
ctccaggtaaggaaagggttcgtactcatggcgccgccgcagccaaagtcgggcctcttcgttggcatcaacaagggtcatgtcgtcaccaagcgcgagctgcctccccgcccgtgccaccgcatagggaaatcaacga

SEQ ID NO: 5122 - DNA, 136 bp, Zea mays
ggcctccaactccacggatgacactgccaaagaggctgctagctttacctcccaggtcatcatcatgaaccaccctggacagattggcaatggctatgccccagttctggactgccacacctcacacattgctgtc

SEQ ID NO: 5123 - DNA, 308 bp, Zea mays
accgcatcgcattctacgattcgaagctctctctgctcgcagccatggcgaagaattacccaaccgtgagcgccgagtacagcgaggccgtcgagaaggccaggcgcaagcaccgcgccctcatcgccgagaagagctgcgcgcccctcatgctccgcctcgcgtggcactccgcggggacgttcgacgtgtcgtcgaggaccggcggtcccttcggtactatgaagtgcccggcggaactggctcacggcgccaacgcggggctggacatcgcggtgcggctgctcgagcccatcaaggaggagttc

SEQ ID NO: 5124 - DNA, 318 bp, Zea mays
tgctggcttgccagttctagttttacggtggcaatgaagcttgctcctaatagagagaaatttatggaggtcattagtggaaccggtgacatcaatgcagatattgagaaattttgcacgaccttctctcctttcctcaaagaaaaccacaactttctggcgagcgtcggtcttgatgatctgaaggcttcatagatcaatctccatgctgattacaacaaaataagcatgtcttacgaaactcaaagtgttgccgagggtatacctgtttcccgtagccatctcccccttgaacaactttaggagatggtaataatt

SEQ ID NO: 5125 - DNA, 307 bp, Zea mays
cctccctttgcccttccctccctccctctccccgcgggccgccagaggcaatttcgccctcgattcgaccccgattcgtccgcccgcgaccgggattccctccgccaagcgcggatctgaacgctgcgctccgtgtcgccgctcgaatccgccatgaagggggccaaatccaagggcgccgccaaggccgatgccaagctggcggtgaagagcaagggggcggagaagcccgccaagggcaggaaagggaaggccggcaacgaccccaacaagcctaagagggctcccagcgctttcttcgtgttca

SEQ ID NO: 5126 - DNA, 305 bp, Zea mays
attgactaggttattgctgatcacttgtcagctgaagaggttgaggacataaaggatatgttcaaggtgatggatactgataatgatggcatagtttcttatgaagagttaaagagtgggattgcaaaatttggttctcatcttgcagaatcagaagtgcaaatgcttattgaagctgtggatacaaatggtagaggagcactagattatggtgaatttttggccgtctcacttcatttacaaaggatggcaaacgatgagcaccttcggcgggccttcctatttttcgacaaggatggcaatgg

SEQ ID NO: 5127 - DNA, 134 bp, Zea mays
cggctcgagcggagtgcgaccacctcatcgcgctggccaaggacaagctggagaagtctctggtggcggacaacaagtccggtaagagtgtccagagtgaggtgcgcaccagttccggcatgttcctcgagaag

SEQ ID NO: 5128 - DNA, 308 bp, Zea mays
ctcgaaggcagcgaagtcgagccttcccttccctccaatcgatcacccgctccgatccgctagctagctagcagcgcgatggcttccctcaccgtgtccacgaagaccgcggcggccggcggcaacaagcagcgcgagggcgcggaggtcatcacgggcgcggaggcctgcttcgcgcactccaagcagatgctccaggcgctgggcttcccgggcggcgtgatgccgctgcgggggctggaggagtgcggctgggtgcgcgagaccgggttcgtgtggatgcggcagaaggccccctacgagcacta

SEQ ID NO: 5129 - DNA, 310 bp, Zea mays
ctcgcctgttcggttttaggagacctgcgccgctcctccggccacgcgagcacgccgaaatggtcgcccacaggttccatcagtaccaggtggtgggtcgcgcgctgccgaccccgaccgatgagcaccccaagatctaccgcatgaagctctgggccactaacgaggttcgcgccaagtcgaagttctggtacttcctgagaaagctgaagaaggtgaagaagagcaatggccagatgctcgccatcaacgagatcttcgagcgcaaccctaccaccatcaagaactacggcatctggctgcggtacca

SEQ ID NO: 5130 - DNA, 130 bp, Zea mays
gttggcttctcctccccctccggttcgggttcgggttcgtgaggttctccggggttcgggttcgtgggtgatcggatcgagatggctgcgtcggatgttgagtaccgctgcttcgtcggcagcctcgcct

SEQ ID NO: 5131 - DNA, 315 bp, Zea mays
ctcacggcggtgaagagcaacacggagctcaggaagctcttcatcgagaccaagagcaagtccatcatcgtcatcgaggacatcgactgctccatcgacctcaccggcaagcgaaagaagaagaagaaggacaagaacgatacgaagaagaagaagaaggcgccgtgggaagaagaagacaaggacgaaggcagcaaggtgactctttcagggctcctcaacttcatcgacgggctgtggtcggcgtgcggcggcgagcgcatcatcgtgttcaccaccaaccacaaggacaagctggacccggcgctgatccgg

SEQ ID NO: 5132 - DNA, 312 bp, Zea mays
aactgttctccgagaatatggtatgacctcagtcaccgaaggcatcgacgcaatcgcaacaacccgggtggttgtcaccggagatgtgaccaacaactccaaacatgccttgactggccgcgctttcaaccgctccttcagcgggagcggggcagcaatggacatcgtcgtctccagtgtcagagcttacctgagtgccctgaacaagatgtgtagctttgctggtgccgcgaaagccagcggcgaggtacctgagagtgcaagcgtccaaagcgcagagtgagcttggcgacgatttggttctcatgtgga

SEQ ID NO: 5133 - DNA, 299 bp, Zea mays
gttctcatcacttaatctgaccaaactggatgttctgtccgggttgtcagaaattaaggtgggtgtttcttatacccagactgatggacagaagctgcaatccttccctggggatcttgatacccttgagcaagtacaggtcaactatgaggttctgcctgggtggcaaagtgacatttcttctgttcgaagatacgatgaacttccccaagctgcccgcctttatgtggagaggatagaagaacttgttggtgttcccgtgcactacattggtgttggacctggcagagatgctctca

SEQ ID NO: 5134 - DNA, 299 bp, Zea mays
gccgtagccgccgccgccggacgagacaggttgaggcggggcggcaatggccgcggggaccttgaggtgctcaccgcgctcgacaccgcgaagacgcaatggtaccacttcaccgccatcgtggtcgccggcatggggttcttcaccgacgcctacgacctcttctgcatctccctcgtgactaagctcctcggccgcatctactacaccgtggaggggtccgcgacgcccggcaccctcccgccgcacgtgtccgcgtccgtcaacggcgtggccttcgtgggcacgctgtcagggca

SEQ ID NO: 5135 - DNA, 305 bp, Zea mays
ccaacaccacctcgcctgcgatcttcgtagcctccgtcgcgtcgagcatcgatcatgtcggcctactgcggaaagtacaaggatgagctcatcaagaatgctgcctacattggcacccccggcaagggtatccttgctgctgatgagtccactggcaccattggcaagcgcctttccagcatcaatgtcgagaacgttgaggagaaccgccgtgccctccgtgagctcctattctgctgccctggtgctctccagtacatcagcggtgtgatcctcttcgaggagaccctgtaccagaagaccaa

SEQ ID NO: 5136 - DNA, 308 bp, Zea mays
gtgaagatggctttgcgtcagaaactgaaactgccacactgcgagcatcatttaagcaggaggttgctgtctggcatgagctcaaccatccgaatgttacaaagtttgttggtgcatcaatgggtactacagaccttaagattccagccaatagttctaacagtggtgggcgcactgagctgccgccaagagcatgttgtgttgtggtcgaatatctcgctggaggatcactgaagcagtatttaataaagaacaggcgaaggaagcttgcatacaaggttgttgttcagatagcactggatcttgcc

SEQ ID NO: 5137 - DNA, 183 bp, Zea mays
tgcgcggcgctgccaaaggcggtggaggctgcacgggcggctgtcgagaacggcacggcagggataccgaacagaatcgccgagtgccgctcctacccgctctaccgcttcgtgcgcgaggagctcggagccgtgtacctcaccggcgagaagacgcgctctcccggcgaggagctgaacaag

SEQ ID NO: 5138 - DNA, 182 bp, Zea mays
tagggttttgctgctctccgaccccgagctccgaatgccgcagcatcaggcgcggcccccctcgcgtgtgaccgagatggcgctgccgaatcaggggaccgttgattaccccagcttcaagctcgtcatcgtcggcgatggtggaactggtaaaactacatttgtgaagaggcatctcactg

SEQ ID NO: 5139 - DNA, 183 bp, Zea mays
gagagaccgaagaagcgggagagatggctcgtaccaagcagactgctcgcaagtccacgggagggaaggctcccaggaagcagcttgccaccaaggctgcccgtaagtctgcccccaccactggtggagtgaagaagcctcaccgctaccgccctggaactgttgccctccgtgagatccgca

SEQ ID NO: 5140 - DNA, 183 bp, Zea mays
ccggccgcggcttctacggccccggcggcgcctacgccgtcttcgcgggccgcgaggccagccgcgccctcggcaagatgtccaaggacgaggccgacgtctccggggacctctccgggctcaccgacaaggagctcggcgtcctcgccgactgggagatcaagttccaggccaagtaccccg

SEQ ID NO: 5141 - DNA, 347 bp, Zea mays
  unsure (1)..(347): unsure at all n locations
cgttttctggtcgaagacggcgcagagcatgacgtctcgcccaatgaaggggatgctgactggcccagtcacaatcctcaactggtccttcgtccggaacgaccagccgaggtttgagacttgctaccagatcgctcttgcgatcaagaaggaagtcgaggatcttgaggctggtggtattcaggttatccaaatcgacgaggctgcactgagagaagggctgccgctccgcaaggctgagcatgcattctacttggactgggctgtccactccttcagaattaccaactgcgagatccangacaccacgcagatgcacacccacatgtgctactccaacttcaacg

SEQ ID NO: 5142 - DNA, 348 bp, Zea mays
gttgaaccagatggggctggcctgcgtgcagctgttcaagatagacgaggctgcgcactgtcttgaggaggcgagggcggtgctggagcaggagtgtggcgcttctcatcctgacactcttggcgtgtacagcaaccttgctgcaatctatgacgccatgggaagagtggacgacgcgattgagatcctggagcacgtgctgaaggtgagggaagagaagcttggcacggcgaaccccgacgtggaggacgagaagaagcggctggcagagctgctgaaggaggcggggcggtcgcggaaccggaagcagaagtcgctggagaacctgttcggtaccaactcacagcg

SEQ ID NO: 5143 - DNA, 185 bp, Zea mays
taactcgaaaccttttcttgtgctctgtctgtgtgtttccaaagcaaacgaaagaggtcgaggatgtcttgcagctgcggatcaagctgcaactgcggatcaagctgcaactgcggcaagatgtaccctgacctggaggagaagagcggcgggggcgctcaggccagcgccgccgccgtcgtcct

SEQ ID NO: 5144 - DNA, 330 bp, Zea mays
  unsure (1)..(330): unsure at all n locations
acncacaccnncgtaccgtagattcccccaaaccctcccccaaaaccccagagcggagaagagcgcaagatgttcggcttcgggcaccacggccaccacggccagaacccgccggcgcacggcggcgtgcaccagcccaccttcaagatcttctgcaaggccgacgaggggtactgcctcaccgtccgcgacggcaacgtggtgctggcccccgccaacccgcgcgacgagcaccagcactggtacaaggacatgcgcttcagcacccaggtcaaggacgaagagggcaaccctgcgttcgccctcgtcaacaaggccactgggctcgcc

SEQ ID NO: 5145 - DNA, 179 bp, Zea mays
cgccgcacgccgacttcgccggcaactgggtctactgggtcggcccgctcatcggcggcggactcgctggcctcgtctacggcgacgtcttcatcggcggctcctaccagcaagtcgccgaccaggactacgcctaagtagtgtgctccgttcgtctggattcagctcatccaacgcag

SEQ ID NO: 5146 - DNA, 297 bp, Zea mays
  unsure (1)..(297): unsure at all n locations
ctgtcattctcaaggcatcatgcatcgagatgtcaagccccataatgtaatgatagatcatgagcttcgaaaacttcggttgatagactggggcttagctgagttctaccatccaggcaaggaatacaatgtccgtgttgcatcgaggtatttcaagggacctgaactccttgttgatttacaagactatgattattctttagacatgtggagtcttggttgcatgtttgctggaatgatatgtcgcaaggcaccgatctttatggccatgacaaccatgacccacttgnntgagat

SEQ ID NO: 5147 - DNA, 342 bp, Zea mays
tgcggaaagcatctggtcctcttcctgatccaccaaatgatgagtatgacaaaactttttcaatgaaccaggcacgttccatcaggatgaacgtgagcactggtgctgctcgtccgaatcctcaaggatcatttcactatgggtctatcaatgtgagccaagtttacaagctgaggaatgaaccacctgttatcatcaatgggaagaaacggactacactgagtggtatctcttattccccacccgacactcctctaaggttggcagatctgtacgacaagaaggatgtctacacacttgacttccctacaatgccaattgatggaccgcgagtgatcagaa

SEQ ID NO: 5148 - DNA, 338 bp, Zea mays
ccttaatctcaaattcgcaatcctcctccgacgccttgtttctggatcatccagcggggggacgccggtgtattgctcggtcctcctccctggttgcccgaggcagccgtgacggaggcggaggtagcgggggggaccatgtacagatcggcgggggtcgcgatggcgtggaacgtgttccggttctgcacggctctccgtgggctgggttccatcatgatcctactcgtcctcgccatcgtcggcgttacctactacgctgtcgtcctctgcaactacggccccgccctcctcaccggcggcggcaacactctcgccgcgctcgctgtcctgctcct

SEQ ID NO: 5149 - DNA, 328 bp, Zea mays
ccaatcgtgacccaaatgaagctgctcaattggctgcaaaataccgcggacaagggtttcaaactctaaagctcaaggttgggaagaacttgaattcagatatagaagttctgaaagctatacggcttgtccatccagattgctcgtttattttggatgccaatgagggatacacagcaaatcaagcaattgaggttctcgatagactaaatgaaatgggagtgacccctgtgctcttcgagcaaccagttcacagagatgattgggaaggtctccgagatgtcagcgctgtggccatggagaaatacaaggtcgctgttgctgctga

SEQ ID NO: 5150 - DNA, 329 bp, Zea mays
  unsure (1)..(329): unsure at all n locations
tgcagatccggttggatgganaaaattgcctagtaactggagcgaattctggcattggttttgctacggctgagggtttggcttcacatggtgctaccgtctatatggtctgtcgtaacaaggagagaggggaggcagctctcaaccaaataagatccaaaactggcaatgcaaatgttcatctggagatatgtgacctttcatctatcaatcaagtaaaatcgtttgcaacaaagttcacttcgatggataaaccactccatgtcttggtaaacaatgctggcttactagagcacaagcatgagattacagcagagaggttggagctc

SEQ ID NO: 5151 - DNA, 332 bp, Zea mays
  unsure (1)..(332): unsure at all n locations
gttcattgcccacttcacctcctacttctgcaacaagaagttaccttgagatgtctaaacagtggaaggcctcacccttgccaactgaacctgttgaactttttattgggatcctgtcatctgctaaccatttcgccgagcgtatggcagttcggaaatcatggatgatttctaccaggagatcatctgatgttgttgcgcgcttctttgttgctctgaatggaagaaacgaggtcaatgaagagctgaagaaggaagcagattactttggggacattgttatagttccattcatggataactatgaccttgttattctanaaactatcgcc

SEQ ID NO: 5152 - DNA, 334 bp, Zea mays
tgggcaactcggtgaccaaccacgtccagagcgctgagcagcacaaccaggacgtgaactccctgggcctcatctcctccaggaagaccgccgaggccatcgacatcctgaagctgatgtcgtccacgttcctgatcgccctgtgccaggccatcgacctgcggcacctcgaggagaacgtgaaggccgcggtgaagaactgcgtgacgcaggtggccaagaagtccctgagcctgaacgccaggggcgggctccacaacgcgcgcttctgcgagaaggacctgcagacggcgatcgaccgcgaggcggtgttcgcgtacgcggacgacccgtg

SEQ ID NO: 5153 - DNA, 333 bp, Zea mays
  unsure (1)..(333): unsure at all n locations
gattttagccgccgccgctgctcatctcacatccctcgagaagacgcctgctcctcgccgatcgatacgatggccgtcttctccgacctccacaccgccgacggcctcaagtccctcgaggctcacctcgccggcaaaacctatgtgtctggtgactccattactaaggatgacattaaggtcttcgccgcggtgccgtcgaagcctggcgctgagtttcctaatgccgcccgctggtacgagaccgtctctgcggctgtagcctcaagattcnctggtaaggctgttggtgtanatctgcctgcgggatcagctcctgcggcagctgctcct

SEQ ID NO: 5154 - DNA, 329 bp, Zea mays
tgggaatgtgataattgacttctactggggtatggagctgtaccctcggattggcaagtactttgatatcaaagtattcaccaactgtcgtttcggtatgatgtcctgggctgttcttgccgtaacctattgcataaagcagtatgaaatgaatggcagagttgctgattctatgcttgtgaatactgcacttgatgttgatctatatcactaagttcttttggtgggaatctggatattggtgtactatggacattgctcatgatagagctggtttctatatctgctggggatgcttggtatgggttccatccatatatacttcccct

SEQ ID NO: 5155 - DNA, 294 bp, Zea mays
cggctcgagcgaacaacgggtattgtgctcgactctggtgatggtgtgagccacaccgtccctatctacgaagggtacacgcttcctcatgctattcttcgattggaccttgctggtcgtgaccttaccgacaacctgatgaagatccttactgagaggggttactccttcactacgactgccgagcgagaaattgtcagggacatcaaggaaaaacttgcctacgttgcccttgattatgaacaggagctggagactgccaggaccagctctagtgttgagaagagccacgag

SEQ ID NO: 5156 - DNA, 321 bp, Zea mays
ctcgccgtctgccttctgcgcctccatttcggcctctgtcgcttgcaagttcaatctcacctccaaccatgggtaaagagaagtcccacatcaacattgtggttattggccatgtcgactctggcaagtcgaccaccacaggacaccttatctacaagcttggaggcattgacaagcgtgtgatcgagaggtttgagaaggaggctgctgaaatgaataagcggtccttcaagtacgcgtgggtgctcgacaagctcaaggctgagcgtgagagaggtatcaccattgatattgctctgtggaagtttgagaccaccagta

SEQ ID NO: 5157 - DNA, 331 bp, Zea mays
cggagtcattctcaccaagcccttccttgatgtctgcaagcaaatattgcctgtcctcgataaatttggagctgctatggcaattgtagagagtgatatcggcggcaatatcacaagactggaaaacaagtatacttcagaaccatcaaagtatgaacacttgtacagcatgattcaggaagaagttcaaaacaagaccgcaaaaggttcctcaagctgcacaaatgggcttctgtggctgacgagggccatggacttccttgttgagttgtttcgtaacctgcttgagcatcgagactgggccatgagtcaatcttgcactgattcatac

SEQ ID NO: 5158 - DNA, 196 bp, Zea mays
gttatgaatgtcgatggtgcgatcgggtcactttttttggatcttctgtctggaagcggaatgttcaccaaacaggagatcgacgagattgtggaaattggttatcttaatggtctctttgtccttgcacgatcaattggcctgatcgggcacaccttcgaccagaagaggcttaagcagccactctaccgcgacc

SEQ ID NO: 5159 - DNA, 282 bp, Zea mays
attctttggaccctcttttggaggaggtggtggaagcagcacgggaagaaggcaaaggaggggagaagatgtagtccactcacttaaagtttctctggaagatctttacaatggaatctcaaagaagctctctctttcgcgcaatgtcatctgctccaagtgcaagggggctcgaagtctggtgcttcaatgaggtgccctgggtgccagggctcaggtatgaaagtcaccattcgtcagctggggccttccatgatacagcagatgcagcagccttgcaac

SEQ ID NO: 5160 - DNA, 226 bp, Zea mays
  unsure (1)..(226): unsure at all n locations
aagaaacataatgtacctgttccagtttcaaagaaatcaatatacagccgagaccgaaacttgtggcaccttagccatgagggtgacatcctggaggacccagcanatgagccaaaggaagatatgtatatgatgtcgattgctccagaaaatgcgccctcgaaacctgagtatttggagattggtatcattgctggtgttcctgtttcaatcaatggccgagacc

SEQ ID NO: 5161 - DNA, 324 bp, Zea mays
ctccgttgctcgcctcgggtcaaaccctaagcagggagttgatttatccgctgcagccatgagtaagttgcagtctgagtctgtcaaggatgccatctcccagattgttggggatgccaaggagaagaataggaagttcactgagactgtggaacttcagattggtctgaagaattatgatccacagaaggacaagcgtttcagtggctctgttaagttgccccatatccctcgtcccaagatgaaggtgtgcatgcttggtgatgcccagcatgttgaggaggccgagaagatgggacttgactacatggatgttgaggctct

SEQ ID NO: 5162 - DNA, 323 bp, Zea mays
ctccttggttgcggtgcgcctccctcctgtgtgcgtgcgtgcgatcgacgcagaggcgcgggcgctcgcaccaccacgaccacgacccgatggctttcatgcgctcccgctcaaatgcatcttctggcatgggagttgctcctaacattagggagacattcgtcgagcttcagatgaagaaggcattccgatatgttatcttcaaaatcgaagagaagcaaaagcaggtggttgtggagaagacaggggctactactgagagctatgatgactttttggcctctctgccagagaatgactgccgatatgcgctgtatgatttt

SEQ ID NO: 5163 - DNA, 320 bp, Zea mays
aagctaattgacatgcatgagttgcaaacaggggcatatactctagacctgaagcttcctgcttctgaattgcgaggacatcacccaatttggagaatagccacgataatatcagccatagtgttatttgttttggctgcttgccttcttctgtggtggaagcatggtagagatattaaagatgcagtgcacggagattggagatcaaggcattcgtctacccaatcccagcagaatagtgctatgctggacatctcgcagtcaattcgttttgatgatgatgtggaggattgaaaaagtcatgaactcaaagtgtactc

SEQ ID NO: 5164 - DNA, 315 bp, Zea mays
ctccgagggcccagctaggcacagcctgatctacagaggcctgattcccctcctcgccgagggctccgcgaaggctacggattcagagtcgacggaggtgatccttgaggccgcgttgaagtcggccgtgcagaagcagctctgcaagcctggtgatgccatcgtggctcttcatcgtatcggcgtcgcctccgtcatcaagatctgcatcgtgaagtgatcaccatgacctgactcctaagccctggggcttggttctcactgctgggattccatgaaacagcttttctgcctcctttttactgcattttttcc

SEQ ID NO: 5165 - DNA, 301 bp, Zea mays
caagagatagatctgtccgcggccatggcggcggcggcggcggcggcggacaaggcgtggacgccgcgaggaaagaggaggaggaggagcaggtagtgaatccgtgggaggtgtcggcggggaagggcggcatcgactacgacaagctcgtggaccagttcggctgccagcgcatcgacgacgcgctcgtggaccgcatcgcacgcctcaccgcccgaccaccgcactgcttcctccgccgaggcctcttcttcgcgcaccgtgatttgaacgagatactggatttgtatgagaacgggca

SEQ ID NO: 5166 - DNA, 316 bp, Zea mays
ctgatggctacatgtttgagcttatccagagggctgacacacctgagcctctttgccaggtcatgcttcgtgttggtgaccttgagcgttctatcaagttttatgagaaggccctagggatgaagctcctaaggagaaaggatgtacctgattacgagtataccattgccatgttgggctatgctgatgaggacaagacaactgttctggagctgacgtacaactatggagtcacagaatacagcaagggcaatgcatatgctcaggttgccattggcaccaatgatgtgtacaagagcgccgaggcggttgatct

SEQ ID NO: 5167 - DNA, 311 bp, Zea mays
  unsure (1)..(311): unsure at all n locations
gcgagcacgagcatccatcgtttcnccttcttcgccatcgcgtgcgctcgccgcagccatcttccatggcggaccagctcacggacgagcagatcgcggagttcaaggaggccttcagcctcttcgataaggatggcgacggctgcatcactaccaaggagcttgggactgtgatgcgctcccttggccagaaccccactgaagcagagctgcaggacatgatcaacgaggttgatgctgatggcagatgggaccattgacttcgcagagttcctgaagctgatggcaangaggatgagagacaccgactc

SEQ ID NO: 5168 - DNA, 267 bp, Zea mays
ctcagcgccgccgccatcgtcggtcacgacggcagcgtttgggcgcagtccgagagcttccccgagttaaagcctgaggaggttgctggtatcataaaggactttgatgaacctggtactcttgcaccaactggtcttttcgttggaggtacaaagtacatggtgatccaaggtgaacctggagttgtcatccgaggaaagaagggcactgggggcattactatcaagaaaaccggcatgtccttgattattggtgtctacgacgag

SEQ ID NO: 5169 - DNA, 310 bp, Zea mays
agtttgagcgagagatttacaagtggttgcgtgattgagagagttatagtcctcggtttacgatccggagtgaagaaggctattattgagcctggaaaccaagaagtagaaattgagtcagggccaattagtttaaggagtggttccagcccagttgtgccaacaatccggaggcccaatgttcgcatcgcagacagttggacaatatggatagcgtaagaggttgtccattcacgtctggagcctgatgtctcttttgtttgctgtcaggttgcgaagttaaggcaatctttagaagtttagttgtggc

SEQ ID NO: 5170 - DNA, 316 bp, Zea mays
cgatttcgccctcgattcgaccccgattcgtccgcccgcgaccgggattccctccgccaagcgcggatctgaacgctgcgctccgtgtcgccgctcgaatccgccatgaacggggccaaatccaagggcgccgccaaggccgatgccaagctggcggtgaagagcaagggggcggagaagcccgccaagggcaggaaagggaaggccggcaaggaccccaacaagcctaagagggctcccagcgctttcttcgtgttcatggaggagattcgcgaagagttcaaggagaagaaccctaagagcaagtctgtcgctg

SEQ ID NO: 5171 - DNA, 315 bp, Zea mays
agactctgtctaacgaagctatccaatcttctcacttccaaacactaccactacctgccatacacacattcgagtaatacctcgccttcacaactgacaacatgcctttcactgctagcgatatctgcgagagcctccttgccatcatcctccctcccgtgggtgtcttcctcgagcgtggctgcggtgccgacttcttcatcaacatcctccttaccatcttgggttacatccccggtatcatccacgctctgtacatcattctgaagtactaagcctcttcgcacctcgctcctcagctcggcggcgctactc

SEQ ID NO: 5172 - DNA, 311 bp, Zea mays
  unsure (1)..(311): unsure at all n locations
ccgctttggcgcgcgccatnccgggcgagtgcgccccctcccccgcgccagcctcaggccctcaaggcctcagggcatcgccgacgccgcaacttcgctgaggaagcccgcacccctgcccgggtccgatggccaacagcaacctcccgcggcggatcatcaaggagactcagcggctgctcagcgagccagcaccggggatcagcgcgtcgccctcggacgagaacatgcgctacttcaacgttatgatccttgggccggcgcagtcccctatgaaggtggagtttttaagcttgaactctttttacctg

SEQ ID NO: 5173 - DNA, 311 bp, Zea mays
gacggtgctggcggcgctgctggtggccgggcctcgccgcgtgcgcgggcgcagctcaaggaggggttctacgactactcctgcccacaggcggagaggatcgtcaaggactacgtgaatgcgcacatcccccacgcgcccgacgtcgcctccaccctgctccgcacccacttccacgactgcgtcgtcaggggctgcgacgcgtcagtgctgctcaacgcgacgggctgcagcgaggcggagaaggacgcggcgcccaacctgacgctgcgcgcttcggcttcatcgaccgcatcaaggcgctgctcgag

SEQ ID NO: 5174 - DNA, 315 bp, Zea mays
atcgaagacgtgatcgaggagtgcgaggtgttctacttcgtcggggtggagaccacgttggtgctgctcatgtggacgatggtggtgctcagcatgcacccggagtggcaggaccgcgcgagggaggaggtgacggctctgttcggcagggacgacaagcccgagtatgacggcctaagccgcctcagagtcgtgaccatggtgctctacgaggtgctccgactgtgcccgccggccacctccgtcgtccgacaaacgtacaaggagatggaggtcggaggcgtcacctaccccgccggcgtgatcctggagctg

SEQ ID NO: 5175 - DNA, 350 bp, Zea mays
tggactgagggtagggagtgcggggttcggctcgagcttggtcgcattgagtatctgcgttctgataagactggcacattaacacagaatgagatggaactgaagaagattcatgttggaaccgtttcgtatgccaatgaagccatggaggaagttgcgtcatatatcagacaaggcttcgctatagctgacagcactcgtcagtctatgattacgccatcaacagttttcggtgctcaagttggtagcggtgctgccaccagaacgaggagagagattggtactcgcgtaagagatttgttgttagcattggctttgtgtcacaatgtcactccaaccacagacgagga

SEQ ID NO: 5176 - DNA, 308 bp, Zea mays
ccacaatcagttttcaagagttagaccaaaagagataccgcacgcgactacttctagggattggcctacttgtactgcaaaatcttagtggaatcaacggtgtactgttttatgcaagtggcatcttcgaagctgcaggggttacaaacagcgacttggccacctgttcacttggtgctattcaggtccttgctactggagttacaacatggctgttagaccgagctggacgacgcatccttctcattatttctacctctggcatgactctatgccttcttgccgtttctgttgtattttttctcaag

SEQ ID NO: 5177 - DNA, 310 bp, Zea mays
  unsure (1)..(310): unsure at all n locations
cttccgtgcgctgcgttcctgctctcttgctctcctcgctctcagaccacagttgccgccgccgccgccctaggccagggtgctgaggctttcgttggcctcttcgccggcagcgagcacccaccagcagttctgtagagatggctgatggtgaggacatccagcctcttgtctgcgacaatggcaccggaatggtcaaggctggttttgccggcgatgatgcaccaagggctgtattccctagcatcgttgggcgtcctcgtcacaccggtgtcatggtanggatggggcagaaggatgcatatgttgg

SEQ ID NO: 5178 - DNA, 307 bp, Zea mays
ggagttttatgccattgagacttttgggtctacgggagagggatttgtcacggaggacttgggatgcagtcattacatgaggaactttgatgtcggacatgtgcctttgaggttagcaaaggccaagcaactgcttgggaccatcaaccacaacttcggaacgctcgccttttgccggcggtacttggaccggcttggtgagaccaagtacctcatggctctgaagaatctttgtgacaatggcatcgttcagccgtaccctcccctgtgcgatgtgagagcgagctacgtctcacagtttgagcac

SEQ ID NO: 5179 - DNA, 306 bp, Zea mays
gttagctggggtggtgtgtcctggtctcatcccaatactgaatctgtagcgtttcttggtcgtgcaggatcatttcaagaagaagcccagcttcccgataaccctcaagtacatcgacccgacctacatgatccgcgccgtccggtcgaatgcttctgacaacgtctactgcactctgctggcccacagcgccctccatggcgccatggcggggtacaccggcttcacggtcgctccggtcaacggcaggcacgcctacatcccgttctataggatcaccgagaagcagaacaaggtggtgatcac

SEQ ID NO: 5180 - DNA, 307 bp, Zea mays
attgttgttggtgatcatacattgtcggtcttagagatatggggtgctgagtaccaggaacaggatgcactacttgtaaaacttgagagcagaagcctcttagaatcgctttgtgagagggaaagagtttcgatggctgtcattgggaaaattgatggcagtggaaaaattgtgttgattgatagcgctgctgtggagtattccaagctgaatgacctccctcctccaacccctgttgaagaacttgagcttgaaaaggttttaggagatatgcctcagaagaccttcgagtttaggcgtgtttctc

SEQ ID NO: 5181 - DNA, 302 bp, Zea mays
ccaatggaagcacagcgacatcgccctcaaggactccaagacgcttctcttcggcgagaagccggtcaccgtctttggcatcaggaaccccgaggagatcccgtggggtgaggctggtgctgagtatgtcgtggagtccaccggtgtcttcactgacaaggacaaggctgctgcacatctgagaggtggtgccaagaaggttgttatctctgccccaagcaaagatgcgcccatgtttgttgttggtgtcaatgaggacaagtacacctccgatgttaacattgtttccaatgctagctgca

SEQ ID NO: 5182 - DNA, 307 bp, Zea mays
accaagcagaccccagcagaagaagcgaagtcgtcgccggagcaggaggaagagcgagcagcaagatgtcgtggcaggcgtacgtcgatgaccacctgctgtgcgacatcgaaggccagcacctcagcgccgccgccatcgtcggccacgacggcagcgtctgggcacagtccgagaacttccccgagttaaagcctgaggaggttgctgggatgataaaggactttgatgaacctggaactcttgcaccaactggtctttttgttggaggtacgaagtacatggtgatccaaggtgaacctggagt

SEQ ID NO: 5183 - DNA, 300 bp, Zea mays
ctgatttcgggctggcgaaggatggtccgaccggcgacaagagccatgtctccactagggtgatggggactcacgggtatgcagctccagaataccttgcgacaggtcatctgaccaccaagagcgacgtgtacagctttggggtggtgctcctagagatgctgtcagggcggcgggcgctggacaagaaccgcccgaacggggagcacaacctggtggagtgggctaggccatacctgagaagcaagcggcgcatatttcgcatcctggacccacggctgggcgggcagtactcccttg

SEQ ID NO: 5184 - DNA, 300 bp, Zea mays
gaagcgcaacgtcgaggacctcatcctctccgttggatctggtggcggactgctccagttgctgctgccgcacctgctggtggtgctgcggctgctgctgccccggctgtcgaggagaagaaggaagaggccaaggaggagtctgatgacgacatgggcttcagcctgttcgactgaggagaccccctcacccagccattagcaaatttcacttgtgctgtcaaagactatcttgtcttatgttatgtctctaggcttttgttacaactacccaagttttgagtttttgagatgtggcta

SEQ ID NO: 5185 - DNA, 294 bp, Zea mays
atctagaagcacccctctccctctctctctcttcgccgtccgaagctccgcaccccaatctaatcgacacctcaccgagatgggccgcaagttcttcgtcggtggcaactggaaatgcaatggaaccacagatcaggtcgagaagattgtcaaaaccctgaatgaaggacaggttcccccttcagatgttgtggaggtcgttgtcagccctccttatgtcttccttcctgtggtcaagagccagctgcgccaagagttccatgttgctgctcagaactgctgggtgaagaaggg

SEQ ID NO: 5186 - DNA, 121 bp, Zea mays
tggcgatcgagccagccgctgaagagcccatctatgtcaacgcgaagacgtaccacgctattctccggaggagacagctccgtgcaaagctagaggctgaaaacaagctcgtgaaaagccg

SEQ ID NO: 5187 - DNA, 299 bp, Zea mays
  unsure (1)..(299): unsure at all n locations
cgagggcttccatccaaagctatcagacttcggtcttgctaagttgggtcctgttggtgacaagtctcatgtctcaacgcgtgttatgggaacatatggttattgtgctccagaatatgctatgacaggacaacttacagttaagtcagatgntttcataccntgnagtcgtttctctcgcgccgnatcttgncggtcatggcncncttcggtcgnacccggccgcgccaaacctttgtttggcacgcccttttcaatgacagcgcaactcccaaagtggctgaccgggctggagggca

SEQ ID NO: 5188 - DNA, 314 bp, Zea mays
gagaaagcaagcggctcaatatgaggataaaggtggcatgtctgatgagcgtgctctctcactcctttctgtcaagccacccaagtcagggcagcttgatcctctgcactctgctgcaactcgcatacaaaataagttcagaggatggaaggggagaaaggaatttcttcttattaggcagcgaaatgtgaagatccaggctcatgtgcgaggtcaccaagtgaggaagcattatcggaaaatagtttggtctgttgggatcgtggagaaagttatattgcgttggaggcgtagaggggctgggttacgtgggt

SEQ ID NO: 5189 - DNA, 314 bp, Zea mays
gcaatgaggtgttctttcgcataaagaggtccacccagctgaagaagctgatgaacgcttattgtgaccgccagtctgtggacatgaatgccattgcgttcctgtttgatggccgcagcttcgcggcgagcagacccctgatgagctggagatggaggacggcgacgagatcgatgccatgcttcaccagaccggaggcagcgttcctagcaccacctaaaagcatcagtcgcggacttcgttttgctctccgccctgcgtagtagtaaacaaaagggaaaaagtctttttaaggaacttgtgatgctctggct

SEQ ID NO: 5190 - DNA, 117 bp, Zea mays
cttgtttcaaagattaagccatgcaaatgtaagtataggtcgacagaatctttcggggttgaatgtacgacgagactgtgaacggctcattaaatcagcaataattagatcggtgga

SEQ ID NO: 5191 - DNA, 320 bp, Zea mays
gcggtctgctcgttcgatctgtgcagcagatctgaggtcacgggcgaccgtgaagcagcttcaatcgtcggcatggcgctcgtattgcatagtggggctggaaacaagaatgccttcaaagcacttattgctgcagaatacagtgggatcaaggttgagttgaccaaggacattgagaaggggggcgtccaccagggccccgcgagtcttcagcggacagcccccccgaaggttcctgttctggagactcctgatggccctgtttttgagagtaatgctatcgcacgctatgttgctcgcttgaaggatgacaaccctct

SEQ ID NO: 5192 - DNA, 162 bp, Zea mays
cgttctcgcagtcgtcgacgttcttcacgaaacaggcggcgaccctggaccggcgcgtcgggcggcacttgcaggtaccaccggccgcgctgcagagcttcatcagcatcaccatcgtggtcttcatccccctctacgaccgcgtcctcgtgccggtggcgc

SEQ ID NO: 5193 - DNA, 316 bp, Zea mays
gttaccgttctctgcaagctcctgtttggtggcaagaaaccagtggcacctgtgaaacctgcagctgaggcgaagaagcccaaggccgcggagacggacggtgctggaagcagtggtgacaaggatgagaaagaggatgaaaaggaggagacaggcccacgtcggaggactcgaacgaagacatagacctgtttttgacgtgttttagctcttctggcgtctgcttattttgagaactcttaatatttgtgagtgtataataggagcttatgtcacctctgcggcttcccacgctgctgatttgtctttaatggtt

SEQ ID NO: 5194 - DNA, 122 bp, Zea mays
tggaccggccatcaccactcaacgacaatcaagatggtcaatctgcgaactcagaagcgcctggcctcagcggtcatcggctgtggcaagcgcaagatctggctcgagcccaacgagcagag

SEQ ID NO: 5195 - DNA, 134 bp, Zea mays
gccagacactccgtagtctgtaccccaagcaccggcgcggcggcggcggctaccatggcagtcgggaagaacaagaggatctccaagggaaagaagggtggtaagaaaaagaccgtcgatcccttctctaagaa

SEQ ID NO: 5196 - DNA, 314 bp, Zea mays
  unsure (1)..(314): unsure at all n locations
ctaaggcaccgactcgccggggacagagagagaccgacgcgccggcagatcccaagctcaccggagagggggaagagggcgaccgatagcggcgatgggtttcatcatggacttcgcggagaatatgatcctccgtctgatggaggacccggacaagcgcgaccaggttcggcgggagcatgtctacaagatgaaggagcggtgcgagcgcactaaggcggcgtggagcctccctctgcgcccctacggcttctggaccttcgaccgcttcaactcgcagctctcctgngcatcccagatcagccaggccgccg

SEQ ID NO: 5197 - DNA, 311 bp, Zea mays
gtcctaatgaagtatttgtgtgaccgggcggatcctccaattccttgtgagcttgtgaggggccatcttgactatacacctcatgcttggaacattgttcctgttaaaaagaggaatggctgggtaaggatgattgttgatgcttgttaccccaccaacataaagggagagacagatccagagtacatttgcacggatataccactcagtcgacttcaaattgtgctcgatgatgagggctatactcctcggtgctctttcccatctgtgtcatcatgcatagaaattgaagttacaccttctagttctgt

SEQ ID NO: 5198 - DNA, 314 bp, Zea mays
cttctccctcttgccggtcccgaataaagagcagcagcgcaagaggtcggtagagcgagaagaaggcaatggcggccgagagcttccttttcacctcggagtccgtgaacgaggggcaccccgacaagctgtgcgaccaggtgtcggacgccgggctttacgcaaggctgtcgcaggagcccgacagcaaggtggcctgcgagacctgcaccaagaccaacatggtgatggtgttcggcgagatcacgaccaaggcgaccgtggactacgagaagatcgtgcgcgacacctgccgcgagatcgggttcacctcc

SEQ ID NO: 5199 - DNA, 309 bp, Zea mays
ggaccttggacttgatagcttggacactgtggagatcgtgatggcgtttgaggaagaattttcctttgagattcctgacaacgaagcagagaagattgactccatcaagacagcggttgatttcattgcttcgcatcctcaagcaaaataagaggatttcttttttttcgtatttcaaagtgtgttttgcatccagaacttatgcgacacgggactagttttctctagcttgccgcagtagataggaagtcatttctttacctttctgaatccgcgtgtaccaaacgattgttgtgttcttgtgacctc

SEQ ID NO: 5200 - DNA, 310 bp, Zea mays
  unsure (1)..(310): unsure at all n locations
tgcggcggcggcggacaaaagcaggcgaaggcgaaggtgcgagggaaggtgcaccagccatggtgacgtcaacttctaccgcaactatggtaagacgttcaagaaaccaaggcgtccttatgagaaggagcgtcttgatgctgaactgaagctggtcggtgagtatgggctgaggtgcaagcgtgactttggagggtccagtatgcactgagcaggatccgtaatgctgcaangcacttgctcacccttgacgagaagaaccccgtcgtatctttgagggtgaagcgcttcttcgccgcatgaaccgcta

SEQ ID NO: 5201 - DNA, 322 bp, Zea mays
attgggcctctttctagagtctggcaagtcatacactttgtgcctggttgaggcttggtctgctgaatctatgagcaggagaagcaatgcatggggtagaaaagttgaggcaatagatgaaagtgatgacacctgtggtttctgtggagatggtggtgaattactttgctgtgacaattgcccatcgacatatcatcaagcttgcttgtctgctaaggagcttccagaaggtagttggtactgccataattgcacttgtcaggtttgtggggggccatttagtgagaaggaggtttcaacattctcggcgattttcaaatgt

SEQ ID NO: 5202 - DNA, 324 bp, Zea mays
ggaggcgcacacaacatggggcctcaggatggcatggttggtgctcgacggcagcctcccgcaccagaagctgctcccgccgccgtccgacttacccaaatgttgattagactcttcctccatctctatcctgccggtcgcttcaaattaaagggaattgtgaattagacaaatgtttgtttttttcttgtttactttcttcattgccaattgcaattttttcaacttgcattttaactagtccgttccgttcctagctgacctggactttttgtaattttttttcttccatttgtttgccaccacaaatgtttttgtacactc

SEQ ID NO: 5203 - DNA, 321 bp, Zea mays
ccgaggcaagatggttctccagaacgacatcgaccttctgaacccgccggcagagctcgagaaactcaagcacaagaagaagcgcctcgtccaatcccccaactccttcttcatggatgtcaagtgccagggatgcttcagcataaccacggttttcagccactcccagactgttgttgtgtgcccaggctgccaaactgttctctgccagcccacgggaggaaaggcgaggctcacggagggatgctctttccgccggataggagactagagtggagtctgttattagtactggatcggttgtcaatctccagtatgtgg

SEQ ID NO: 5204 - DNA, 321 bp, Zea mays
  unsure (1)..(321): unsure at all n locations
cgcaacttcacagcgtatcatcgttttccatcgctcctactcctatcatccagaaaatctgagcggtattgatggcgcccaaggcggagaagaagccggcggcgaagaaggtggcggaggaggagccctcggagaaggcggctccggcggagaaggcccccgcggggaagaagcccaaggcggagaagcggctacctgcgggcaagtccgccggcaangagggcggcgacaagaagggtaggaagaaggcgaagaagagcgtggagacctacaagatctacatcttcaaggtcctgaagcaggtgcatcccgacatcggca

SEQ ID NO: 5205 - DNA, 321 bp, Zea mays
cgcttccgcctcccgagttgcgccgccgtctccatctccacccctccatcctccgcggcgcccctgcactacggccatcgcactcccctcgctagcccttttcctctgtccccaccttgcccgcgcatcctccgtgcggccgtcgcggtttcttcgctggatctgcgcccgatcaccggcgggttcgcgctattcagcatggctgctgcctcctccgccacctccgtccacgacttcaccgtcaaggatgctagcgggaaagatgtggaccttagcacctataaggggaaggttctgctcatagtcaatgttgcatctcag

SEQ ID NO: 5206 - DNA, 317 bp, Zea mays
accaggtaagcagcagcaggaaccctagcaccgccgcatccgcagccatgggtatcgacctcgttgccggtgggaggaacaagaagaccaagcgcacagcgccgaagtccgacgatgtttatctcaagctccttgtcaagctctaccgtttcttggtcaggaggaccaagagcaacttcaatgctgtcattctcaagaggctcttcatgagcagaaccaatcgcccacaaatctccatgcgcggccttgtcaggttcatggaaggataggagaagaacattgctgtgaatgtgtgcacagtcacagatgacaagagg

SEQ ID NO: 5207 - DNA, 314 bp, Zea mays
  unsure (1)..(314): unsure at all n locations
aanatacaaagaaatgatggatgcctatagagagatgttaacatacataaaatctgctgtcacccggaactacagtgagaaatgtataaacaacataatggattttgcttctggatcagctagtcagaactttagtcttctgcaagagttctaccagacaacactgaaagcgcttgaagaagcgaaaaatgagagattatggttcaagacaaacttgaagctctgcaaaatttggtttgatatgggcgaatatggtcgcatgagcaagatattgaaggagctgcataaatcttgccanacggaagatggttctg

SEQ ID NO: 5208 - DNA, 311 bp, Zea mays
  unsure (1)..(311): unsure at all n locations
caatattagtaacggccttcacgctccaggatggatcatcacattatctgaagggactgctgcttgtgttttgctacattgtcatctccttatgctttttcgttttgagacagcatggaaatggaagcaacgatgatcagctgggtgtagcaagcaagccatggaggatttagggcgcctgagctggcagtagtttctcaacaagtagcgtggactttggtttgcacgattttgcatggaacactggaggggagacccgtgaagtttgactanagtatgtagactgcgggaagatgctgttcagctgatgt

SEQ ID NO: 5209 - DNA, 310 bp, Zea mays
attcgggatgcctggctacatatacactataattgcagtctctcttttgtgcaagatcgcagcactgcggtcgttttcgttggagcgattgcagtacttcagagagagagaatctgggatgagctctctggcatacttccttgctagggacacgattgatcatttcagtactgttgtgaagccgatcatttacctgtctatgttctactacttcaataacccaagatcaacaattgctgataactacattgtgctcctcgcgcttgtgtactgtgtgactgggataggatacacttttgccatctgcttc

SEQ ID NO: 5210 - DNA, 315 bp, Zea mays
tcctcgcatttccttgcaaccgattgccttcccccctcccaacccaagaccgatggcgcccaaggccgagaagaagcccgcggcgaagaagccggcggaggaggagcccgcggcggagaagacgaccgccgggaagaagcccaaggcggagaagcggatccccgctggcaagtccgccggcaaggagggcggcgagggcaagcgtggcaagaagaagggcaagaagagcgtggagacgtacaagatctacatcttcaaggtgctgaagcaggtgcacccggacatcggcatctcctccaaggccatgtccatcat

SEQ ID NO: 5211 - DNA, 304 bp, Zea mays
gtctcacacacggccgccgcccttgccttcgtgcgttccccgcgtagagtttagggttttgtcgccgccatggcgatcctctcggcgctcgccaccgaggtgttcatccccgtcgccgccgtcatcggcatcgccttcgccgtcgtgcagtgggtgctcgtgtcgcgggtgaagctctccccggctgcagccgcgtccggcggcagccagaacggctacggcgactacctcatcgacgaggaggaggggctcaacgaccacaacgtcgtcgtcaagtgcgccgagatccagaccgctatctccg

SEQ ID NO: 5212 - DNA, 308 bp, Zea mays
ctcacgagtgatttcggcggcggcggcggaagtaagaggcgatggggcactccaacgtgtggaactcgcaccccaagaactacgggcccggatcccgcgtctgccgggtctgtgcgaaccctcatggactgatcaggaagtacgggctgatgtgctgcaggcagtgcttccgcagcaacgccaaggacattggcttcatcaagtaccgctgaagtcagctgggcgggctatctgaatgccatctcttggacagtgtagtagatgcgatgccacaattttaattactgtcatttagatgttcccttcag

SEQ ID NO: 5213 - DNA, 314 bp, Zea mays
  unsure (1)..(314): unsure at all n locations
cggacatagagaagatccgtcgcctggttcgccagtccaagtgcctccaggacaagatgactgccaaggagatctcaacctggctggcggtcgtcaagcaggaagaggagctgtaccagaagctgaacccgggcgcacgccaccggcgtctactggtggcatcgcaagtgccatatccttcaacaccagctcgagcgagtatgatgtggacatcatcgatgagtgccanggggacgatgccggtacacagaggacggcagtcactgatccaagcgcgttcaaccttggtgccgctatcctaagcgacaagttcc

SEQ ID NO: 5214 - DNA, 295 bp, Zea mays
ctggtggctcaggccttttggttgcggtgtaattctaggaggttatgatagggatgggccacagctctacatgatagaaccctcaggagtttcctacaaatacttcggtgctgcattgggcgaagggagacaggctgcaaagactgagatagaaaagttgaaactttcggagcttacctgccgggaaggcattgttgaagttgcaaagataatttatggagtgcatgacgaagcgaagggcaaagcttttgagttggagtttagctggatctgtgatgaatcgaaccgtcagcat

SEQ ID NO: 5215 - DNA, 291 bp, Zea mays
gccgcagagcgcatggctgacatcaaggttgccgcggggattccgaagacctcgacggagacgtggtcaccgtacccaaggagcgaaacagcggtgagatgcaggtgtggaaggacctcatcttgtccccgaccccggcgatccgacgcatactgctatcggccgtcggctgcacttcttccagcaggcttctggctgcgattccgtcgtcctgtacagccctagcgtgttcaggggcgcgggaatcaccggcgacaacaagctcctgggcgtcaactgcgccgtgggcgt

SEQ ID NO: 5216 - DNA, 257 bp, Zea mays
agcgtctctactcctcttcctcctctctctactctccaagttctcttctccgtcgaccgctctacacgtctcttgtcgacctggacaccgaggtggaagaaggaagcagtcagcagatggatccatggatcagcagccagccttctctgagccttgacctgcgcgtcggcctgccgccgctcagcctccaccagcaggcgccggtggccgtcgccttgcccaggcccaagctgctcgtcgaagaagacttcctcctg

SEQ ID NO: 5217 - DNA, 301 bp, Zea mays
gctggaggcagttgtagtatcaccggctgacaggtttgacatggaagcccttcctcctaccttgacatctgcttctgagcagccacctctctatgatggcacaaccagattgtatatgtcctacgtttgcccgtatgcgcaacgggcatggatcacgaggaattacaagggtttgcaggagaagatcaagctagtccctatgaacatggcagataagcctggatggtataaggaggtttaccccaacaaccaggtgccttcgttggagcacaacaagagggtcataggagagagcttggat

SEQ ID NO: 5218 - DNA, 298 bp, Zea mays
  unsure (1)..(298): unsure at all n locations
ccaaagccttgggaggatcacaagctactcaagcaaaaaaacgtgaaattgaggacaattcgaggaaaataggggcattattttcaaaactaaatagtggtgacatatctccaaacgtttcatcaaaactcattcagctgtgcagtgcgattgatgctagcgattttgtcaccgcgatgcacctccaggtactcttaacgacaagcgactgggacgagtgcaacttctggcttgcggcattgaagcggatgatcaagacaaggcagaatttcagaatgtanaccttgtgtggccttct

SEQ ID NO: 5219 - DNA, 307 bp, Zea mays
cgcatcgttctcggtctcgttcaaggggtagagatcgaagatctaggtcacgttcaagaagcaagcgagttagtggattcgatgcgccacccccgcaagcaatgggttcaacatttccagttattccaaccccaagtcagttaccaggctcttcgcttcctaacattggtggcatgtttccaaacatgctccctttcggtgttgctgggcagttcaatccccttgtcatccagccacaagcaatgactcaacaggctactcgtcatgctcggcgtgtttatgtcggtggccttcctccatctgccaa

SEQ ID NO: 5220 - DNA, 303 bp, Zea mays
catcatccgcgacgggctcaaggctgaccccaagaagtaccgcaagatgaaggagaggcttgtcggcgtctctgaggagaccaccacgggtgtcaagaggctctaccagatgcaggagaccggcgccctcctcttccctgccattaacgtcaacgattccgtcaccaagagcaagtttgacaacctgtatggttgccgccactcgctccctgatggtctgatgagggccactgacgttatgatcgccggaaaggttgccgtggtctgcggatacggtgatgtcggcacaggttgtgctgctgc

SEQ ID NO: 5221 - DNA, 295 bp, Zea mays
gtcgcttccgctccacaggatcctctgcgccacccacaaccgtgtgaccgtccgtgctgccggcgaccccgatccgccgacccgtcccgtcccaccacaccctaccgccgctcgcagctatgtcgccgtcggagccgacgcgggaggagagcgtgtacatggccaagctggcagagcaggcggagcggtacgaggagatggtcgagttcatggagcgcgtcgcgcgctccgccggcggcgccggcgaggggaggagctctccgtggaggagcgcaacctgctgtccgtcgcctac

SEQ ID NO: 5222 - DNA, 296 bp, Zea mays
caggacgagactcgcagctagctgacacggccgagaagcagcttgcattgcaggcgtagtacgtacccagcagcagctagcactagcagtccatcggagcgacgatggtgagaaggacggtgctggcggcgctgctggtggccgccgccctcgccggcgggcgcgggcgcactcaaggaggggttctacgactactcctgcccacaggcggagaagatcgtcaaggactacgtgaaggcgcacatcccccacgcgcccgacgtcgcctccacgctgctccgcacccacttccacga

SEQ ID NO: 5223 - DNA, 299 bp, Zea mays
ggcggcttcaaacacttgtcttcaaggctggcatggccaagtccattcaccatgctcgtgtcttgatcaagcagcgtcacatcagggttggcaggcaaattgtcaacgtcccatcattcatggtgagggtggagtctgagaagcacattgacttttcactgtcaagcccattcggtggaggccccgcaggaagggtgaagagaaagaatcagaagaaggcaagcggtggcggggatgctggtgatgaggatgaggagtgaggatggacaagtagtgttacaccaatataataatattat

SEQ ID NO: 5224 - DNA, 297 bp, Zea mays
gctagggttccgtcctcgatccgatccgccgagtgcacaccacctttccccactccgatcgaatcgatggccgccgagggcgagaagaagatgataaccctcaaaagctccgatggcgaggagttcgaggtggaagaggcggtggcgatggagtcgcagaccatccgccacatgatcgaggatgactgcgccgacaacggcatccctcttcctaacgttaactccaagatcctatccaaggtaatcgagtactgcaacaagcacgtacatgccgccgccgccgccgccgccgcctcg

SEQ ID NO: 5225 - DNA, 298 bp, Zea mays
cccagtaccctctcaccaccgacaacatcaaatccgtcctcatcgtaagcgctcctcacaatctctcaccttagatccacaaacgaaacagctctccacgttcactctgtttcttccacacactgcgcaggacatgtttggagcaagcagcgagacgtcggcgacgacgctgaagtggacaatggccgagctgatgcggaacccggcggtgatgcggaaggcgcaagatgaggtcaggggagcactcgccggccacgacgaggtggcggaggacagcctggtcaatctgcggtacctg

SEQ ID NO: 5226 - DNA, 302 bp, Zea mays
tggaaggaaaggagaagaacattgctgtgattgttggcacagtcacagatgacaagaggatccaagaggttccagcaatgaaggttactgccctgaggttcaccgagacggcaagggccaggattgtcaatgctggtggggagtgcctcacatttgaccagcttgctctccgtgctccacttggcgagaacacagtcctcttgaggggccccaagaatgcccgtgatgcggtgaggcacttcggcaaggctcctggagtgccgcacagccacaccaagccatatgtgcgctccaagggaagg

SEQ ID NO: 5227 - DNA, 293 bp, Zea mays
agcagctgatgcactagttaatagagggaccacattcaaagagattggcagagttaatgaagcaattcaggattctgttcacgcagcaacaatcatgccaaacatgccagaagcccatgccaacttggcctcagcatacaaggacagtgggcatgtagaaacggctataattagctacaagcaggctctccggctgcgtcctgattttcctgaggcaacctgtaatctcctgcatactctacagtgtgtctgtgactgggaaaacagagatggcatgtttcgagatgttgaag

SEQ ID NO: 5228 - DNA, 287 bp, Zea mays
ggacagaaagtgcagattgtaggagatgatcttctcgttaccaaccccaccagggtcgccaaggccatcaatgagaagacctgcaatgctctcctcttgaaggtgaaccaaatcgggtctgtgaccgagagtatcgaagctgtcaggatgtccaagcgcgccggatggggagtgatggcaagccacaggagtggcgagacagaggacaccttcattgctgacctctcagttggcctgtctacgggccagatcaagacgggagctccttgccggtctgagcgcctggc

SEQ ID NO: 5229 - DNA, 170 bp, Zea mays
agcagctggtggacgcggacggcatcctgttcggcttcccggcgcggttcggcatgatggcggcgcagatgaaggcgctgttcgactccacgggcggcctctggcagcggcaggcgctggcgggcaagcccgcggggttcttcttcgcgctgggcacccagggcggcggg

SEQ ID NO: 5230 - DNA, 292 bp, Zea mays
agcaaacaaaacgctaagaagctccgtagctgaattcagatattacaaacacaaaaggggagtgcagaaccaaaatggctgcctcgaccttccttctcgttgctcttctagcattggtcacttctcaggccattgcctctgatcctagcccgctccaagacttctgtgttgccgataaagactctccagtgaaggtgaatggatttgtttgcaaggaccctatgactgtgaacgccgacgacttcttcaaggctgcaaaacttgaccagccaatggacaccagcaaaagcaa

SEQ ID NO: 5231 - DNA, 294 bp, Zea mays
  unsure (1)..(294): unsure at all n locations
gcaaattgcagctattaatcttgagaaaggaaaccaaaaagagtgcaagaattcgttggaggatgggaaaaccaccctggatagtatgactgatgtcgatcccacagttcatgctagcttttactggatatcatctcaataccacaagtcatgccaagaatttgcagagttctataagaacgctcttctctatctggcctacacaactgtggagtctctatctgagtcattcaagctagacttggcttntgatctttctctagcagccttgctgggtgataacatttataattt

SEQ ID NO: 5232 - DNA, 290 bp, Zea mays
gctgatggcacctttgtacctcgagaaagaagaaagaggactgatgaaaaatctgaaaagaagcagaagcgcgagcatcaccatgatgctggtgctagtcaaattggcatgggtgtaactgcttaccctggtgtttatggggctccacagctcacccagatacctatagcaggaggacaaagggtcatgatgccagagattatcgtaccaaacaacatcttgtttgtccaaaacttgccacacgagacgacgcccatgatgctccagatgctcttctgccagtaccctgg

SEQ ID NO: 5233 - DNA, 299 bp, Zea mays
ccgacaaggtcggggccctgctgctctgcgacatggcgcacatcagcgggctcgtcgccgcgcaggaagctgcaaatccttttgaatattgtgatgtggttaccacaaccacgcacaagtccctcagagggccaagggctggcatgatcttctacaggaaaggccctaagccccccaagaagggccagcctgagggtgctgtttatgattacgaagacaagatcaactttgcagtgttcccatctctccaaggtggccctcacaaccaccagattgctgcacttgctgttgctctacag

SEQ ID NO: 5234 - DNA, 298 bp, Zea mays
ggatgctttctggcttccctgaagctgccacacttgctagatgggtttgccagagttatcactaccatctaggtatggaattacttaatcaatcagatggagctggtgaagcattgttgaaaatgctctggcatcatccagatgctgttctgtgctgctcctttaaggagaaacctatgtttacgtttgcaaacaaggcagggctggacatgttagaaacatctcttgttgccctgcaagacctgacgctagacaagatcttcgacgagtcaggaaggaaagcactattctcagacat

SEQ ID NO: 5235 - DNA, 305 bp, Zea mays
ggacggggcaccactgcctgtcgccctcaagaagccccaccatccccaccgccagcagatcgattcgcgaaagagacgaccgccgccgcatcggaccgtgcccgagccccccttctcctcgctgactcggctcccctcctccgccgtcgccggaggcaagcacagtggggaccacagaagcattagctgggtgaacccactcaaagggggcagggaattgtgtgctagtttgaatggctgctacaaagcttcaggccctttggaaccacccggctggccccaaaaccattcatttctgggcgcca

SEQ ID NO: 5236 - DNA, 298 bp, Zea mays
atttcttgaagcatttctgggagggtgatgaggacgaatgaaggccaagaagactcggctgttcggcgccaacccaccgatcctctacgttctccactacttggggcggaaccatggctgtgcttccgggactacgattgcaactggaacgtcgagatcttgcgggaattcgcgagtgacgttgcgcatgcccgctggtggaaggtgcacaacaagatgccgaagaagcttcagagctattgcctcctgaggtcaaggctgaaggctgggctggagtgggagcggcggcaggccgaga

SEQ ID NO: 5237 - DNA, 306 bp, Zea mays
aagagttcaagcgcaagaataagaaggacataagcggcaacccccgtgcactgcgccggctgcgcacggcgtgcgagcgcgccaagcgcacgctgtcatcgactgcccagacgaccattgagatcgactccctgttcgagggcatcgatttctactccacgatcaccagggctcgcttcgaggagctcaatatggacttgttccggaagtgcatggaacctgtggagaagtgcttgcgcgacgccaagatggacaagagcagcgtgcacgacgtcgtgctcgtcggtggctccacccgcatcccca

SEQ ID NO: 5238 - DNA, 220 bp, Zea mays
gtcggaatcctaaggatcaacagtatatgaagatgaccttgaaccagctgctcgttgagttggatggctttaagcagaatgaggggataattgtcattgctgcaacgaactttcctgagtcgctagataaagccctagtcagacctgggcgttttgaccgtcatattgttgttcccaacccagatgttgaaggtcgacgccaaattctagaatcccatat

SEQ ID NO: 5239 - DNA, 276 bp, Zea mays
caagttccacacttcacaaaagacttggctcggaggtgccaggaaaatgaagggaagcccatcgagagtatctttgatctagctgagatggctgtcgatgagatgcgggatctcttacaactatcgaactctcagctgcaagacatcattgaattcatcaagcggttccccaatgttgatatgacctatgaggtccgtgagggtgatgatataagcgctggtgacaatgtaaccgtgcaggtaactctggagcgtgacatgactaacgtttcatct

SEQ ID NO: 5240 - DNA, 296 bp, Zea mays
  unsure (1)..(296): unsure at all n locations
aaatgcggatagggaatttcttgcccagaagactgccccacatcgtgatttttacaatgtcaggaaggttgacactcatgttcatcattcagcatgcatgaatcaaaaacatctgttgaggttcataaaatccanactaagaaaagaacctgatgaggtggtcattttcagagatggtacttatatgactttanaagaggtttttgagagcttggacttaactgggtatgatctgaaatgtgatttgctagatgtccatgcagacaaaagcacatttcatcgttttgacaattcaa

SEQ ID NO: 5241 - DNA, 269 bp, Zea mays
accgcctgcgcgttcctcctattacacatataggcccctccctgcgtgtatgcttgttaccgtcgtgtcgaaccttgtactacgaggctccatcgaacatcgatggcttgcttctttatcagaacatgtttgaataaacgctatttggtaaaaaaaaaaaaaaaaaaaaaaaaaaaaaaaaaaaaaaaaaaaaaaaaaaaaaaaaaaaaaaaaaaaaaaaaaaaaaaaaaacaaaaaaactataacagaaggaaagatgaaacagagcc

SEQ ID NO: 5242 - DNA, 291 bp, Zea mays
atccgtttggatgatgcgcaacattattcacttcaacacattggcaaatcaggctgtggagcgggcagctggtactgacggccataagataacatacagtgtcataaagcatcggttgggggatctattttatcgcctagtatcccaaaagttcgaggatcctgcagaaggcgaagaagctttggtcggcaagtttaagaaactttatgacgaccttaccactgggttccgcaacctagaagatgaggcacggtgaactgctgtagattttgtgtaagacaataatggctg

SEQ ID NO: 5243 - DNA, 299 bp, Zea mays
ggcaaacagttctgaggtgtgagcaatggcggccggccagtttgcagcagcaggagtcctcaccggccttctcgctctcgcaacacttgcaagctgcaacactgatggcgacatactgtacaagcagaggctagcatgggaggatccaaacaacgtgctgcagagctgggatccaaccctcgccaatccctgcacgtggtttcatgttacctgcaacctgaacaactccgtcgtccgtgtggatttgggaaaggcaggcatctccggccccctgcttccagatcttggagcacttgaga

SEQ ID NO: 5244 - DNA, 298 bp, Zea mays
agccccttactttaaggacatgaccatgtccccacctggcccctctacagtgaaagatgcctactgcttgctgaacttcggggacagcattactacagatcacatttcacctgcaggaagcatacacaaagacagtcctgctgccaagtatttgatggagcgtggtgtggaccggaaggacttcaactcatatggtagccgtcgtggtaatgatgaagtaatggcaaggggaacgtttgcaaacattaggatcgtgaacaagtttttgaacggagaagttggacccaagaccattcat

SEQ ID NO: 5245 - DNA, 299 bp, Zea mays
caaggagggcctgaagctggacgagagtgaggatgagaagaagcgcaaggaggagctcaaggagaagtttgagggcctctgcaaggtcatcaaggaggtgctgggcgacaaggtggagaaggtggtggtctccgaccgcgtggtggactccccctgctgcctggtgaccggcgagtacggttggaccgccaacatggagcggatcatgaaagcccaggcgctgagggactccagcatgtctgggtacatgtcctccaagaagacgatggagatcaaccccgagaacgccatcatggagg

SEQ ID NO: 5246 - DNA, 298 bp, Zea mays
gttggtggtcttcttcagaagggcagtgatgtcgtctatgttactgatgatggtcaggaacagcagtacaatgtgcctcaagtcaagggtcatcgacttagaggtgggccacagatgattcagctgagcttggatggcaagaggatatacgtgacaaactcacttttcagccgatgggatgagcagtttttcggtgatgatcttgtcaagaagggctcccacatgttgcagatcgatgtcgacaccgagaaaggaggcctggctgtcaaccccaacttcttcgtcgattttggcaccg

SEQ ID NO: 5247 - DNA, 301 bp, Zea mays
gaacaagatcctcaaggtcatccgcaagaatcttgtcaagaagtgcgttgagctgttttttgagattgcggagaacaaggaggactacaacaagttctatgaggccttctccaagaacctcaagcttggcatccacgaggactccacgaacaggaccaagattgctgagctcctgaggtaccactcgaccaagagcggggatgagctgaccagcctcaaggattatgtgaccaggatgaaggagggccagaacgacatcttctacatcactggtgagagcaagaaggctgtggagaactcc

SEQ ID NO: 5248 - DNA, 176 bp, Zea mays
tggttggacatctctactacttctttgcagtgttgcaccctcttgccaccgggaagagctacctcaagactcctaaatgggtacataagattgttgctcgattcaggataggcatgcaagcgaactcacccgtccgtccaccagccaatggcaacagcgggtctggtgtgttaaga

SEQ ID NO: 5249 - DNA, 300 bp, Zea mays
tgtagaggcttccaagaagagcccgttgttttctcaattcataaaggacttgtcagttccaaaagcgaccagggtgaaggctatagccgaaatatttgctgacgctgggttttcagatgttacaaagaatttcttggctgtcctggcggacaatggcaggctgaaatatattgaacgcattgcggagagatttgttgatttgactatggaacataagggggagatgaaggttgtggtcaggacagttatttcactcaccaaggaggaggagaaagaactcaaggaaaccttgcaggatat

SEQ ID NO: 5250 - DNA, 286 bp, Zea mays
aacatgctcatgtggctgccagaacccaagtgggtcaaactgtgtgaatgaggattcacctaatctacaagctgcaattgatggtcctggcaaatggactggtcagccccttgtacaatgcacttcccacatgtgcccgataagaatccactggcatgtgaagctcaactacaaggattactggagagtgaaaatcactatcacaaacttcaacttccgcatgaattacacgcagtggaacttagtagctcagcatccaaactttgataatatcactcagttgttc

SEQ ID NO: 5251 - DNA, 285 bp, Zea mays
gcggcggaggcggagcgtaagcaggcgaatgcgatggtgagaagtaatgtgcaccagccatggtgcacgtcaacttctaccgcaactatggtaagacgttcaagaaaccaaggcgtccttatgagaaggagcgtcttgatgctgaactgaagctggtcggtgagtatgggctgaggtgcaagcgtgactttggagggtccagtatgcactgagcaggatccgtaatgctgcaaggcacttgctcacccttgacgagaagaacccccgtcgtatctttgagggtga

SEQ ID NO: 5252 - DNA, 283 bp, Zea mays
caaagccactccaaacccccgcttccagaaccttctcgaaactctccgcctcctcctctactcgctccgatggcgaaggaaccgatgcgcgtgctcgtcactggcgccgcaggcaaattggatatgctcttgttcccatgattgctaggggagttatgcttggtgcagaccagcctgtaattctgcacatgcttgatattccgcaagcagctgaagcccttaatggtgttaagatggagttggttgatgctgcatttcctcttctgaagggagtcgttgcgac

SEQ ID NO: 5253 - DNA, 291 bp, Zea mays
cgagctgatgccgctgagccacgtgctggccaccaagctcggcgcgcgcctgacggaggtccgcaaggacggcacctgcgcctggctcaggcccgacggcaagacccaggtgacggtggagtacgtgaacgagggcggcgccatggtgcccgtccgcgtgcacaccgtgctcatctccacccagcacgacgagaccgtcaccaacgacgagatcgccgccgacctcaaggagcacgtcatcaagcccgtcatcccggagaggtacctggacgagaagaccatcttccacct

SEQ ID NO: 5254 - DNA, 289 bp, Zea mays
cgggatggctacaaggctggaaacctgaaatcagccatgaactgcagttacgtgaaagactatgagttcgttgtcatcttcgatgctgatttccaaccacaggcggacttcctgaagcgcaccgtgccccatttcaagggaaaggatgacgtcgggttggttcaggcgagatggtcgttcgtaaacaaggatgagaacttgctgaccaggcttcagaacataaatctttgcttccacttcgaggtggagcagcaggtgaacggggcgtttctcaacttcttcgggttca

SEQ ID NO: 5255 - DNA, 334 bp, Zea mays
atcaagtttgagcctgagctaccgaaagataagctctcggcaatcgccgaccttggcgtcggtatcgagaacaagatagctctcaagttcgacactgtgttttggcccgacgttgaagtgataggtagggtggccccgacgtcaaacgcctgtggctactttctcaaccttaacaaagccacaggaaacccggttctggtgtgcatggtggccggaaggttcgcgtacgagatcgagaagctgtcggacgaagagtccgtgaacttcgtcatgtaccagctcaggaacatgctgccgcagcaactgacccggttcagtatctggtctcgcgctg

SEQ ID NO: 5256 - DNA, 328 bp, Zea mays
cggggacagcgtcgggtacctggacatcgccctggtgtcgcacgtcggctgggtgaaggcggtggagaagatcgcgggggtcactctgctggacgaggcgaaggttcgcaacctggtggcgtgggctgaccggctgtgcgcccacccggccgtggtggacgcgatccctgacgccgacaagttcgttgagttcagcgtgacctatgggtcgttctcttaatcctatcaatgctcccaaagtgagcaaaatggctccgcattgcgctttgtgattttcactgcgcatgtgccggtgcatgtcaccgtcaatagcatgtagtttgtatac

SEQ ID NO: 5257 - DNA, 286 bp, Zea mays
  unsure (1)..(286): unsure at all n locations
tctcgagcgaattcggctcgaggtgctcgacaaattgtcatgttgggactatgattcgtcgccgaagtcttgtaggaagaagcagcttcggctgaagctgtccgcatgagacgaccgaagatcctcttcgtgaagcttcggaattacaaaccaacttaaaagtagaatgaccttttagtccataaatgtttgagtcgctgttgtaatcccttataaggggcataattgtaattcgccacaggctgtgtcctgtgcctatanatagtgaacagtattcctttactgt

SEQ ID NO: 5258 - DNA, 241 bp, Zea mays
cttgcaatcacaacgaacagaagctctcgatctcaccgacaccgaggaagaagagatcaatggcgtccgagcagggagtcgtgatcgcgtgccacagcaaggctgagttcgacgcccacatgaccaaggcccaggaagccggcaagctggtggtcatcgacttcactgccgcctggtgcggtccatgccgcgccatcgccccactgttcgtcgaacacgccaagaagttcactcaggtcgt

SEQ ID NO: 5259 - DNA, 243 bp, Zea mays
gggtcgccctgcagagcgaggatgtcgagctcgtcgccgtcaacgaccccttcatcaccacggattacatgacgtacatgttcaagtacgacaccgtgcacggccaatggaagcacagcgacatcgccctcaaggactccaagacgcttctcttcggcgagaagccggtcaccgtctttggcatcaggaaccccgaggagatcccgtggggtgaggctggtgctgagtatgtcgtggagtcca

SEQ ID NO: 5260 - DNA, 240 bp, Zea mays
cccacgagcaaccgataatccgccggcgttgagatgttggtttatcaggatctcctatctggcgacgagctcctgtcggattcattcacctacaaggagctcgagaacggcgtcctgtgggaggtcgagggaaagtgggtcacccaaggtcctgttgatgtggacattggtgccaatccatccgccgatggtggtgaggacgaaagcgttgatgacacagctgtgaaggtggttgatatt

SEQ ID NO: 5261 - DNA, 322 bp, Zea mays
  unsure (1)..(322): unsure at all n locations
cgcacctcccttcgcgcctcctccgcgcagatcgccaggcgaggaaccagaccgcaggcaggatgcagtacaagaacctggggcggtcgggcctccgcgtcagccagctctcgtacggcgcgtgggtcaccttcgggaaccagctggacgtgaaggaggccaaggtgctactgcaggcgtgccgggacgctggcgtcaacttcttcgacaacgccgaggtgtacgccaacgggcgcgccgaggagatcatgggccaggccatccgggacctgngctggcgccgctccgacgtcgtcatctccaccaagctcttctggggcgg

SEQ ID NO: 5262 - DNA, 328 bp, Zea mays
  unsure (1)..(328): unsure at all n locations
atcaagctaggcaggcctggtcncgaagaacacccttctctggtcgtcgcatcgcagggcagctagctaggtagctaacatccgccatggcgcgcgggggagacggcctgcaggtgctgagcgcgctggacgcggcgaagaccagtggtaccacttcacggccatcatcgtcgccggcatgggcttcttcacggacgcctacgacctcttctgcatctccctcgtcaccaagctgctgggccgcatctactacacggacaccagcaaggacagccccgggtcgctgccgcccaacgtcgcggcggcggtcaacggcgtggccttctgc

SEQ ID NO: 5263 - DNA, 240 bp, Zea mays
  unsure (1)..(240): unsure at all n locations
cttcgtaagccttcagaccgacgaatttgagcaactgcacccagagcgcgatccattgccggggaagaagcaacttgttgcgagcctcctctatggcgagctccgaccatggttccaccaccgcccccaaggacgtgccgggcagctacggcctgccgctggtgggcgccgtgccgaccgcctcgacttctactacttccagnggcaggacaagtacttcgagtcgcgcgtggagcgcta

SEQ ID NO: 5264 - DNA, 326 bp, Zea mays
gatcaatttcatcatttgatcggtttttatcacttttccatcgatttttcatcgactttcgatttatatcactttcttcatcatgactggacgcggcaaaggcggaaaaggcctcggcaaaggcggcgcaaagcgtcatcgtaagattttgcgcgacaacatccagggtatcaccaagcccgctattcgtcgtcttgcacgtcgtggtgaagaaagtgatataaatcgaaagtcgatgaaaaatctcctcttcgcacgagcgcaacaccatccacccaccagttcgaagcggaggcgaccggcaacctgcggcggagatgtcaggc

SEQ ID NO: 5265 - DNA, 328 bp, Zea mays
gagagttgggcgcagagaatccccaagcaaacaaacagggtagagggagaggagaggagaggagaggagaggttgggtctgggacaccatggctccgatgaagctgtacggggcggtgatgtcgtggaacgtgacgaggtgcgcaacggcgctggaggaggctggctccgactacgagatcgtgcccatcaacttcgccaccgccgagcacaagagccccgagcacctcgtccgcaacccgtttggtcaggttccagctctgcaggatggtgacttgtacctcttcgaatcacgagcaatctgcaagtacgctgctcgcaaaaacaag

SEQ ID NO: 5266 - DNA, 328 bp, Zea mays
tatcgatctccttgagcctatcaaagcacagaatccaaagataacatatgcagacctgtatcagcttgctggagtggttgcagtcgaagtgactggggggccaactgttgaatttattcctggcagacgtgattcgtcggtgtgcccccgtgaagggcgtctgccagatgctaagaaaggtgcaccacatctgagggacatcttttatcggatgggcttatcggacaaagatattgtagctctatcagggggacatactctgggaagggctcaccctgagaggtctggattcgatggtgcctggacaaaggagcctcttaagtttgat

SEQ ID NO: 5267 - DNA, 323 bp, Zea mays
ctaaattcccaatccctcaaaggaaggaggattcttcagcgtctcgcttgccggccccgaatcgcagtcgccgcccggatccgaggaaacaagtcgtcgtcttgctccaccgtccgcccgccgccatgagcttcatcttcggcaagaagaagactcctgctgagctgctgcgggagaataagcggatgctggacaagtccatccgggagattgagagggagaggcagggcctgcaggctcaggagaagaagctcatcaacgagatcaagaaggtggccaagcagggtcagatgggagctgtaaaaattatggcaaaggatctt

SEQ ID NO: 5268 - DNA, 322 bp, Zea mays
  unsure (1)..(322): unsure at all n locations
tgtacgtggtggtcncgggcgtgctgcccgtggggtgcttcccgatctacctgacgctgtaccagacctccagcgccggcgactacgaccagtacggctgcctgaagcgcttcaacgcgctgtcggcgcacacaactcgctgctgcaggccaaggtgtcgagcctgcagagcaagtaccccggcgcgcgggtcatgtacgccgacttctacagccacgtgtacgacatggtgaagagccccggcagctacgggttcagcaccaacctcagggcctgctgcggcgccggcggcggcaagtacaactaccagaacggcgcgcgg

SEQ ID NO: 5269 - DNA, 292 bp, Zea mays
tcctcgcatttccttgcaaccgattgccttcccccctcccaacccaagaccgatggcgcccaaggccgagaagaagcccgcggcgaagaagccggcggaggaggagcccgcggcggagaagacgaccgccgggaagaagcccaaggcggagaagcggatccccgctggcaagtccgccggcaaggagggcggcgagggcaagcgtggcaagaagaagggcaagaagagcgtggagacgtacaagatctacatcttcaaggtgctgaagcaggtgcacccggacatcggcatc

SEQ ID NO: 5270 - DNA, 321 bp, Zea mays
tcttaacaaggataatgcaccagacgtgaaggccaaatttataatcgaagctgctaaccatccaactgatccagaggcagatgagattctcgccaagaaaggagtagtagtattacctgatatctatgccaattcaggtggcgtggtcgttagctactttgaatgggttcagaacattcaaggtttcatgtgggccgaggaaaaagtaaacgatgaactagaaaagtacatgagcagtgcttttcaacacatgaaggccatgtgcaagtctctggattgcgaccttaggatgggggccttcaccttaggagttaacagggt

SEQ ID NO: 5271 - DNA, 289 bp, Zea mays
cggctcgagctcaagattcacgcttgctttctgaaatacaagagcagcagaacttgttgaagacctacgaggtcatggtaaagaagttccagtcccagatccagtccagagacactgagataacccatctacagcagcaaattgatgaagctaaacttcggaaatcaaagctagagaagaaactgaaacagaggggcctacttaacagggagtcggaggaatctgacgaagaagagaactacttttccattgaattgacaccaagtttgtttacatctgccgttgataa

SEQ ID NO: 5272 - DNA, 322 bp, Zea mays
cagccggcggcctcgcgctctctcccccgccgctccttctctacgccaggcctgccaacatgaagctcgtcaggtttcttatgaaactaaacaatgagacggtcaccatcgagctcaagaacggcacggttgttcacggtaccatcaccggtgttgacataagcatgaacactcatctgaagacagtgaagcttacactgaaagggaagaaccctgtaacgctcgaccacctcagcgtgcgaggaaacaacatccgctattacattcttcctgacagcttaaacttggagactttgctggtagaggaaacccctagggttaa

SEQ ID NO: 5273 - DNA, 302 bp, Zea mays
  unsure (1)..(302): unsure at all n locations
tggaaaggaagggttgaactatgagcgccgtggcggtttcgtcgtcgctgaacccggacgcgccgctcttcatcccggcggcgctgctgcaggtggaggacttctcgccgcagtggtgggacctcatcaccaccactgcctggttccgcgaccactggtcncgcgagcgcgcccacctggacgagatggccgagcagatcgacgcggccggcgtcctccccgacgacgacgacctcttctacgacgnacagctcgagcagggcnccgtcgtcgccgcccttaagacagattcggtgctcaag

SEQ ID NO: 5274 - DNA, 348 bp, Zea mays
tcggcacgcaggctagcagcacagcagcagccagagccatcccctctcctcgctacgcttcgcttcctcggcgccgattcctcctcctcctcctccaccctcgtccgtcgccttccggcgcgcgagctcgcccgagatggcgaacgcgagatcgggtgtcgctgtgaacgatgagtgcatgctgaagtttggcgagctgcagtcgaagaggctgcaccgcttcataactttcaagatggacgacaagttcaaggagatagttgtggaccaggtcggggatcgcgctaccagctacgatgacttcacaaacagcctccctgagaatgactgccgatacgcgatctatga

SEQ ID NO: 5275 - DNA, 349 bp, Zea mays
  unsure (1)..(349): unsure at all n locations
aaaattttggtctatgaatacttgccaaacaaaagcttggacttctttatctttgatgaaaacaggaaatcgttactggattggaaaaagcgtctagcgataattgaaggaatagcagaaggacttctctacctgcataagcactcccgtttgcgtgtcattcatcgagatcttaaaccaagtaacattctcctggacagcgaaatgaatcctaaaatttcagactttgggttagcaaaaatatttagctcaaataacatcgaaggaagcactacaaggagagtggttggtacatatggttatatggctcncgagtatgcctctgagggcatcttctctatcaaatctg

SEQ ID NO: 5276 - DNA, 337 bp, Zea mays
  unsure (1)..(337): unsure at all n locations
cggctcgagggatgacaccacagcctctcaagatccgtgctgatatagagatgaaatgcttccagtttgatggagtgctccatattaagcaagctatgaagaagctgaagctgcgggcaatgataactgtcctgtgaagattaagctagttgctcctccactttatgttttgaccacacagacccttgacaaggatcaaggcatttcagttctcactactgcagtcaaggcttgtacagcagagattgaaaagtacaaaggaaagttagtagtgaaggaaccaccaagagctgttagtgagcgggaagacaagctattcctcngacagattgattcc

SEQ ID NO: 5277 - DNA, 337 bp, Zea mays
  unsure (1)..(337): unsure at all n locations
gtttcgcgtccgcctcagcccgccgcaaagagaggtaagttcaggagacatcttcgagaagctgaaatggctcctaaagctgctcctgccaagaagggtgatgccaagacccaggccttgaaggttgccaaggctgtgaagtctggggcagccaagaagaagaccaagaagatccgcacgtctgtgacatttcaccgccccacgaccctgaagaaggctaggcgacccacagtaccacgaatcagcactaccggatagaacaagcttgatcagtaccaaattctcaagtaccccttaccacagaatcagcgatgnagaagattgaagataacaacac

SEQ ID NO: 5278 - DNA, 342 bp, Zea mays
cgttagactaggttaggctaggctagggtgtcgaccagctcgcggtaatggtggccttcaggttccatcagtaccaggtggtggggcgcgcgctgccgacgcccggcgacgagcaccccaagatctaccgcatgaagctctgggccaccaacgaagtccgcgccaagagcaagttctggtacttcctgaggaagttgaagaaggttaagaagagcaacggtcaggtcctggccatcaacgagatcttcgagcgtaacccgacgacgatcaagaactatggcatctggctgcgctaccagagcagaaccggctaccacaacatgtacaaggagtaccgcgaca

SEQ ID NO: 5279 - DNA, 328 bp, Zea mays
catccgtggttgagccatacaacagtgtcctgtccacccactctctcctcgagcacactgatgttgctgtcctgctcgacaatgaggccatctatgacatctgccgccgctcccttgacattgagcgcccaacctacaccaacctcaacaggcttgtctcccaggtcatctcatccctgacggcttccctgaggttcgatggtgctctgaacgttgatgtgaacgagttccagaccaacctggtgccctacccgaggatccacttcatgctttcgtcctacgctcgagtcatttctgctgagaaggcctactacgagcagctgtccgt

SEQ ID NO: 5280 - DNA, 342 bp, Zea mays
cgcccgtctcgatcccacaggatccgagagacctcacaagccgccacgccaggtcgccatcccatcgcggcgcctgccccacccccgccctgctcccgcccggtagtagtagcagagcctcgccgccgctgccgagaatagatggggttcgtgtccttcgtcgggcgggtgctcttcgtcgccgctttcctcctctccgcctaccaggagtttaatgaatttggcgctgatggtgggccagcagctaaggcccttcagcccaagttcaatgtgtttgtacaaaatatctctgcacatctgggagtagctgtcccgcacattgagttgaagcatgtgattgct

SEQ ID NO: 5281 - DNA, 339 bp, Zea mays
tgcgcccatttgatcgattcctgatggcgcccaaggccgagaagaagcccgcggagaagaagccggcggaggagaaggccgagaagaagccaagggcggagaagcgcgtgccgagcaaggagggcggcgagaagaagggaaagaagaaggcgaagaagagcgtcgagacgtacaagatctacatcttcaaggtgctcaagcaggtgcacccggacattggcatctcgtccaaggccatgtcgatcatgaactccttcatcaacgacatcttcgagaagctcgccgccgaggcagccaagctcgcacgctacaacaagaagcccacatcactcgcgggag

SEQ ID NO: 5282 - DNA, 342 bp, Zea mays
tgagagctgtctatggaggttttgctgcagctctgagggaccagaaggtctgggtcatgaatatcgtgccgatcgattcaccagacacgctgcccatcatctacgagcgcggtttgtttggcatgtaccatgactggtgcgagtctttcagcacttacccaagaacgtatgaccttctgcacgcggaccatctgttctcaaagctcagaaagagatgcaaactggctgcagttttcgccgaggtcgaccgtgtactgaggccacagggcaagctgatcgtgagggacaccgcggacacgataaatgagctggagagcatggccaagtccgtgcagtgggagg

SEQ ID NO: 5283 - DNA, 334 bp, Zea mays
gctccgtcgtgctccccgacgacgcgcccatgcgcaagtacatccgcttctaccgcgacttcgtcctcgccctcaacagcgcgctcgacgccgacgaccgcgtcgagatctgccagctccccgtcggcgacggcgtcacgctctgccgccgcgtcaagtgaaaaaaagaaagaaaaaaaaaacacacataccctgcgttcctgccgcacccggctccgtctggcgccaccgccaccgacggcggcgcgcaccccccgttccaatcatatcgtagacgacgcgcagcattacattatcaatcaccggctctggctctgtcttggcactgtactgt

SEQ ID NO: 5284 - DNA, 322 bp, Zea mays
gagccgaacaagtgggaccactcgcccttttccgccgccctcgatgagccatccggtcgcatctacgcgcgatgctctcaggacatgaagtgtgtggggatgcagtaccttgaagccattcgccgtctccgttctgcatgatttgttccagatcgaaatatctatataacatctgttcctgacgaggagattcgtgggcatggcggtgttgaaccaattgtttcatccaacgagttcaacgatatgaacgtggcattagtccttgatgaatggctagctctctagggaggagtacgtgtgtctatgagacgtaccttgtggc

SEQ ID NO: 5285 - DNA, 299 bp, Zea mays
ccagacataagaccgataaacactgatggtgcccaaaagctagtatatcaggttgggcagaagagaggtcgcttaatagtggacgaaaatgatgatgagcaacctaagaaaaagatcagaatggggatgccggcaactcagtggattagtgtctacaatgcccgtcgacctatgaaacagaggtaccactacaacgtagccgataatagattggtgcagcatattcaaaaggggaacgaagatggcttgtttattagttcagttgcctccagctcaaacctgtgggctttaattatgga

SEQ ID NO: 5286 - DNA, 287 bp, Zea mays
ggtagccatgaccaccccctgaagatgccccttccaaatatcatcagatcagatgtgttgaaaaaggctccagagtttaagtttggctggaggaccgacgaagagtttgcgagggagacgcttgcaggcgtgaacccagtgctcatcaaacgtctgacggagttcccagctaaaagtaccctggacccaagtcaatacggagaccatacgagcaagatcaccgaagctcacatccagcataacatggaaggcctgtcagtgcagaatgcactgaagaagaacaggct

SEQ ID NO: 5287 - DNA, 180 bp, Zea mays
acaaatccgacctgatccacttgagagctatctctgaggacgaaggcaaagcgttggctgagaaggaagggctgttcttcctcgagacgtcagctatggaggccatcaacgtggacgaagccttccagactattatcacggaggtgtatgcgcatcgtcaacaggaaagcgctggccgcc

SEQ ID NO: 5288 - DNA, 294 bp, Zea mays
gcaggcggtcggcatcctatgaaggtgaagtactctgttgggttcaagtcagatggcaagatcacagccttgcacattgatcttgggatcaatgctggaatatcaccggatgtgagcccaatgttgccacctgctatcataggtgctctcaaaaagtacaactggggcaatcttgcatttgataccaaggtctgcaagacaaatgtctcatcaaaatcagcaatgaggggtcctggagatgttcagggctctttcatcgctgaagccatcattgagcatgttgcctcagcactt

SEQ ID NO: 5289 - DNA, 296 bp, Zea mays
ggcggacgtaaggcgaaggagtagcagcagcaggcggcgccgagtagcggctccccatctcgagcttgccaccatggctagaggattgaagaagcatttgaagaggctcaatgcccccaagcattggatgctggacaagcttggcggagcttttgctcccaagccatcttctggacctcacaagtctagggagtgcctgccactgatcctcatcatcaggaacaggctcaagtatgctcttacataccgtgaggtcatttccatcctgatgcaacgccatgtacttgttgatggca

SEQ ID NO: 5290 - DNA, 291 bp, Zea mays
cacaggcccgcgatcccctccccctcttccttctccggattcgcggcgatctagccggcggggggcggcgcacgataggcggggcaaaaccagcggctcaacgtcgtgccgacggtgacgatgctcggcgtcatgaaggcgcggctcgtcggcgccacccgcggccacgcgctattgaagaagaagtcagacgcgctcacggtccagttccgcgccatcctcaagaagatcgtcgccgcctaggagtccatgggcgagacgatgcgcgcctcctccttctccctcgccgag

SEQ ID NO: 5291 - DNA, 288 bp, Zea mays
cgccgctcgacgcccaccgcgcaccatggcggaacagactgagaaggctttcctcaagcagcctaaggtgttcctcagctcaaagaaatctggcaagggtaagaagccaggcaagggtggcaatcgattttggaagagcattggccttggtttcaagactcccagggaagcaattgaagggacctacattgacaagaaatgtccattcactggaaccgtttctatcagaggcagaattattgctggaacatgccacagtgctaagatgaacagaaccatcattgttcg

SEQ ID NO: 5292 - DNA, 287 bp, Zea mays
gagttcaagaaggttgccaatttccttggtcggttcaagtccatccccagcatagttgagcttgacagcttgaaggtttctggtgatgtctggtttggctctggaattacactcaagggcaaggtgacaattatcgccaagcctggagtgaagttggagattccagatggagacgtacttgagaacaaggatgtcaatggccctgaggatctttaagcaatgtttatcatcaccagttttcccaaggacatgtcacaggaactgccaagcctaatcactcctactga

SEQ ID NO: 5293 - DNA, 288 bp, Zea mays
gttctagatcgcgagccgccgcgttatgcccaacatccaccagcacctcctccccaagaaggctggctcgtccaaggcttccaccgtcgatgacgatgacaactgaagctgcccactggagaaggcattcgctaccgtcttgtttcctaggtttagcacgcagttagtcgccatgtctttgagagagttcgatgtgtttgggaatgacaatagttcctttcttggttccctaagttcgttgaatcagatgtgaatacggctaaggtttttgggttatgcaactctggg

SEQ ID NO: 5294 - DNA, 287 bp, Zea mays
cgcacaccaatcgcccacaagcgctcgcaggagaggtcgaaaccctagcttttgcggcggcggcgagagaagatgatctacgacgtgaactcccccctcttccgttccttcctcagccagaagggcggcgccgacaagaggaaaatggaggagcataaaccaaaggagcagaggcccaaggctaacgagaacaagcctgtgatgaacgaatgaatatctccagaagctttgttcaatgtgcaaccaagtccgatgtccgtttgctctggtcagcttaaaaccaacgc

SEQ ID NO: 5295 - DNA, 291 bp, Zea mays
cttgcccaagataccctacctgagagcggtggtgctggagggtctccggcgccatccgccggggcaccagatgccgccacgcagggtgagggaggacgtggaggtgggtgactacgtggtgcccaagggctcagcgatcaacttcatgctgtacgacctgggcatggacgacgccacgtgggaccgcccagcagtgttcatgccggagaggttcctgcccggcggggaagccgaggcgctggacatcaccggcaccaaggagatgaagatgataccgtttggggcgggcag

SEQ ID NO: 5296 - DNA, 280 bp, Zea mays
caagtacgctgctcgcaaaaacaagccagagctgttgagggaaggaaacctcgaggaggcagcaatggtggatgtttggatcgaggtggaggctaaccagtacaccgctgcactgaatcccatcctcttccaggtcctcatcagtcctatgcttgggggaaccaccgaccagaaagttgtggatgagaaccttgagaagctgaagaaggtgctagaggtgtacgaggcacgcctgaccaagtgcaagtaccttgctggagacttcctcagcctcgccgac

SEQ ID NO: 5297 - DNA, 279 bp, Zea mays
acctgtcctcgcgtctcccttcccagatccatcgactcgctcgggccgcccctcccgtcgtccccgttcgaaggtgcggcagccggcaggcgagcgatttgattcgacatgaatcccgagtacgactaccttttcaaacttctgcttattggtgattctggtgttgggaaatcatgcttgcttctcagatttgcagacgattcttatttggacagctatatcagcacaattggggttgatttcaaaattcgcacagtggagcaagatgggaagaccata

SEQ ID NO: 5298 - DNA, 278 bp, Zea mays
ctgagttgcttgcagagaggcagaaattggccccatttgtgcaagttcttcctttctgtaccaggctcttgaaccaagagattttgcgcgcatcttctatggcgcctaaccataactttgttgatcctgagagaattgagcatggtagcccattaaggttacctggccacccagtgaatggtcagccgatggatctggagggctggtcagggattcaaacagaggcttctcagcatatgggggttctacaagcatcatcaatgggctggaatggtgct

SEQ ID NO: 5299 - DNA, 278 bp, Zea mays
gggacacattgttgatgagaatgaagaaatcacagtggcaagatgtgattgatttgaatcttacaggcgttttcctttgcacgcaggctgcaacaaaagtaatgatgaagaagaaaaagggaagaattatcaatatagcatcggttgttggtcttactggtaatgctggacaagctaattatgctgctgccaaggctggggttattgggttcacaaaaacagttgctagggagtatgccagcagaaatattaatgcaaacgttatcgctcctggattt

SEQ ID NO: 5300 - DNA, 280 bp, Zea mays
gtgacgtgaagcaggcagaagctgtgccacttcttccaaagaagattgctccggccaaagagcagaagcctaaggaagccaaaaaggaggccccgaagcctaaggaagctgagaaaccagcagaggaagaggaggctccaaagcctaagccaaagaatccccttgatttgcttcctccgagcaagttgattcttgacgattggaagaggctgtattctaacacgaaaaccaacttccgtgaggttgctattaaaggtttctgggacatgtatgacccaga

SEQ ID NO: 5301 - DNA, 183 bp, Zea mays
cccacggaagtttcggcggcgccggcgtgctcgtgatctcaaccaaggcgtgtctccgctccggtcacccgtcactccacgcaaacatgtcgaggaggaagaccagggagcccaaggaggagaacgtcacccttggacccactgtccgtgaaggagagtatgtctttggtgtcgctcacatct

SEQ ID NO: 5302 - DNA, 183 bp, Zea mays
ccgacatcgtcccttcgtccccacgagcaaccgataatccgccggcgttgagatgttggtttatcaggatctcctatctggcgacgagctcctgtcggattcattcacctacaaggagctcgagaacggcgtcctgtgggaggtcgagggaaagtgggtcacccaaggtcctgttgatgtgga

SEQ ID NO: 5303 - DNA, 183 bp, Zea mays
aagtggctcacccccaacgaggacggcgtgtccatggccgccctcgcgctcatgaaccaggacaaggtcctcatggagagctggtactatctcaaggacgcggtgctggacggcggcatcccgttcaacaaggcgtacgggatgacggcgttcgagtaccacgggacggacccgcgcttcaac

SEQ ID NO: 5304 - DNA, 251 bp, Zea mays
agaaaaggctgcatgttgtttcaaagcttcacgctatcttgcgtccattccttctaaggcgtatgaaggaggatgtggaacagatgcttccacgaaagaaagagataatcatatatgccaacatgactgagcaacagaagcaaatccagcatcacctgatcgaaaaaacatttgacaactacttgcacgaggaatcagatattatattgaaaagacctggcattagggcaaggttgcataatctaatgatt

SEQ ID NO: 5305 - DNA, 158 bp, Zea mays
ctcataagcacataccatacagggaaaacaaaaatctcacaggaacagcacgatatgccagtgtaaatacccatcttggagttgagcaaagcagaagagatgatctggaatctcttggttatgtgctcatgtatttcttaagaggaagtctcccttgg

SEQ ID NO: 5306 - DNA, 238 bp, Zea mays
cagcaaggtcgacatgtcgtctccgccgccggtgaagctgatcggcttcttcggcagcccgtacgcgttccgcgcggaggcggcgctgtgcctgacaggcgtgccgtacgagctgatcctggaggacctgttcggcagcaagagcgagctcctgctccaccacatacccgtgcacaagaaggtgcccgtgctcctccacggcgacggccgggcatctccgagtccctggtcatcgccg

SEQ ID NO: 5307 - DNA, 138 bp, Zea mays
gatgtgcagagcgatttcttagctcaaggttttggctcattgggtttgatgacttcggtactggtgtgccctgatggaaagacgatcgaagctgaagctgcccatggtactgttacccgtcattaccgtgttcaccag

SEQ ID NO: 5308 - DNA, 317 bp, Zea mays
ctgagaaggccataaacaagattagagctagaaagaatgagctcttgtatgctgaagttgaatatatgcaaagaagggagatggatctgcagactgacaacatgtacctgaggagcaagatcgccgagaataataatgaaacggggcagccagcgatgaacatgattggagtgccgtcgacgagcgagtacgatcacatggcctcttttgttgactcgagaaactttcttcaggtgaacatgcagcagcagcagcctcagcactactcccatcagctgcaaccaacgaccctccaactcggatgatgaaattaagaa

SEQ ID NO: 5309 - DNA, 297 bp, Zea mays
ctcctccgcgccgccacagccgggcgcgcctctcgatcgagatccaggagatatgcctcgttatgatgatcgccatgggaatacacgcttgtatgttggaagattggcccctcgcacccgttcccgcgacctagaatatcttttcagcaaatatggaagaatacgtgaagtggagttgaagcgtgactatgcattcattgaattcagtgacccccgtgatgctgatgatgcgcagtacaacctagatggcagggaagtcgatggaagccgtattattgttgaatttgctaaaggagt

SEQ ID NO: 5310 - DNA, 287 bp, Zea mays
  unsure (1)..(287): unsure at all n locations
tccaggtattagcagtcgaccggttcctcggagcacgatgaagtttgttgctgcctacctgcttgctgtcctcgctgggaacgccagcccctccgctgacgatttgactgccattctggagtcagttggctgtgaagttgacaatgaaaagatggaactcctgctgtcccaactgagcggtaaggacatcaccgagctcattgccgcgggcagggagaatttgcttcaatcccatgtgtgncggcggtgtcctgttgcggcactgcacctgctgctggcggactgct

SEQ ID NO: 5311 - DNA, 305 bp, Zea mays
gcgagcaaggtgataggtaccgtgaattggcccatagggtggatgaggctcttgggttcatgactgcagcagggcttacagttgaccacccgataatgacgactactgacttctggacctcgcacgagtgccttctcttaccctacgagcagtctcttacccgtaaagactccaccagtggccttttctacgattgttcggcccacatgttgtgggttggtgagcgcactcgtcaactcgatggagcgcatgttgaattccttcgtggtgttgccaatcctcttggcataaaggtgagcgacaaa

SEQ ID NO: 5312 - DNA, 317 bp, Zea mays
tgccgggactcacgcgtcgtcatcgacgaggccatcgcctacgccgagggcctcaagctgggcggcaacggcaacgacgtctgggtcttcgatatcgacgacacgtccctctccaatctcccctactatgccacccacggcttcggcactaagctatacaacgcgacgagcttcaacgagtacgcgctggacgggagcgcgccggtgctcacggacacgcagcggctgttcaacaagctcgtctcgctgggcatcaagccggtgttcgtgacgggccgcaccgaggactacatgtgcatcaccgtcaccaacctccg

SEQ ID NO: 5313 - DNA, 297 bp, Zea mays
cgacgatgcgctcgccggacggcaacaagctggacatgctagcgcaggagcacctcggcagcatgctctacctcaaggcgaccatcaacgagacgctgcgcctgcacccgccggcgccgttcctcctcgcgcactactccaccgccgactccgagatcgacggctacttcgtcacagccgggacgcgcgtcctcgtcaacgcctgggcgctcgggacggaccgcacgacgtgggacaagccggacgagttcatgccggagcggttcgtgcaggaaccgggcgccgtggacgtccaca

SEQ ID NO: 5314 - DNA, 314 bp, Zea mays
  unsure (1)..(314): unsure at all n locations
cggctcgagtcnccatcgtgttcgcggtgttcatggtccacctggacacgatccccatcaccggcaccggcatcaacccggccacgagcttgggcgctgctgtcatctacaacaacgacaacgcctgggatgaccactggatcttctgggtgggtccattcatcggcgccgcatcgccgcggcgtaccaccagtacgtgctgacagccagcgccgccaagctgggatcgtctgcctccttcagccgctagatcgatggcctcccgccggacaacgacagccggagcgtgaactgtagatatacagacgctggac

SEQ ID NO: 5315 - DNA, 331 bp, Zea mays
ctgggcttgcaacaattatgatggagatgtgcagagcgatttcttagctcaaggttttggctcattgggtttgatgacttcggtactggtgtgccctgatggaaagacgatcgaagctgaagcatgccatggtactgttacccgtcattaccgtgttcaccagaaaggaggtgaaactagtacgaacagtattgcctcaatctttgcgtggacaagaggacttgcacacagggcaaagcttgatgacaatgctagactacttgacttcacccagaagcttgaggctgcctgcgatggagccgtcgagtctgggaagatgaccaacgacctt

SEQ ID NO: 5316 - DNA, 326 bp, Zea mays
cttgattgttccaggtattagcagtcgaccggttcctcggagcacgatgaagtttgttgctgcctacctgcttgctgtcctcgctgggaacgccagcccctccgctgacgatttgactgccattctggagtcagttggctgtgaagttgacaatgaaaagatggaactcctgctgtcccaactgagcggtaaggacatcaccgagctcattgccgcgggcagggagaagtttgcatcagtcccatgtggtggcggcggagtcgctgttgcggcagctgcacctgctgctggcggactgcttctgcagtgacgcaaagaaacaagag

SEQ ID NO: 5317 - DNA, 333 bp, Zea mays
ctcctcgtctctggtccattcaagatcaatggagtaccgatccgtcgtgtcaaccagacctatgtcattgctacatcaaccaaggttgacatctcaggtgttgatgtcgcgaagtttgatgacaagtactttgccagggagaaaaagcagaaggtgaagaagacggagggtgagctttttgagacagagaaggaggcgtccaagtctctgcctgatttcagaaaggatgaccagaaggccgtggatgctgctctgatcgaggctattgaggctatcccagagctgaaggcctatcatggcgctcggttctcgcttacggatggtgacaagccc

SEQ ID NO: 5318 - DNA, 336 bp, Zea mays
taacacttgcccgactgctgatgatgttaagagcattctggaatcagttggtgctgaagctgatgaagaaaaactagagttcctgctcacagaactcaaagacaaggacataacagaagtgattgcagctggaagggaaaggttatcctctgtgccttcaggaggtggtgcaattgacatgggagctccagcagctgtagctggcggtggcgcacacctgctgaagaggcaaagaaggaagaaaaggttgaagagaaggaagagtctgatgaagatatgggtttcagcttgttcgattaaaacaccactgccagtttacagtttctctcgcgaatg

SEQ ID NO: 5319 - DNA, 276 bp, Zea mays
tccaactccagcacgcagatcagatgcgtccatccattcgcggaccggaatgaaacgaacggttgaactatgagcgccgtggcggtttcgtcgtcgctgaacccggacgcgccgctcttcatcccggcggcgctgctgcaggtggaggacttctcgccgcagtggtgggacctcatcgccaccactgcctggttccgcgaccagtggtcccgcgagctcgcccacctggacgagatcgccgagcagatcgacgcggccggacgtctccccgacgac

SEQ ID NO: 5320 - DNA, 331 bp, Zea mays
tggccaacatgcccactaacaactccgccctcatcgcaatcatcgccgacgaggacaccgtcactggcttcttgatggccggcgttggcaatgttgatctgcgcaagaaaaccaactacctcctcgtcgacaacaagacgacagttaaacaaatcgaggatgcgttcaaagaatttactacgagggaggatattgctattgtgctcatcagtcagtatattgccaacatgataaggtttctggtggatagctacaacaagcccgtccctgctattctggagatcccatccaaggaccatccatatgatccagcgcacgactctgtgctctc

SEQ ID NO: 5321 - DNA, 122 bp, Zea mays
ccgtcgtcagctgcggactccgcctccattttgctctgtttcttgcaagttgctcatgcggtagttcccccaactgccaccatgcagaacgaggagggtaagactgtggacctctatgtccc

SEQ ID NO: 5322 - DNA, 262 bp, Zea mays
gcagtcacacccatttcttgtgtcagtctccctctccctctctccgatcctctctactagcagagaggcaagttcaatcttctagctagcagcatcggagaaggcagagctcgactgacacaatggcgggaggccagctcaacgtgctgacacactcgaccaggccaagacacaatggtaccattcatggcgatcgcacgcggaggggtctcacgcgaacgttgtcgacgcccggacaagcttcgcgatcatatcgccactc

SEQ ID NO: 5323 - DNA, 319 bp, Zea mays
ggaaagtggtcgcaggactcgtgaaacaagtcttggaggccttccctcgtctcaaagtaaccaacgggcgaatggttttagaggttcgcccggtgatcgactgggacaagggaaaggctgtcgagttcctgcttcggtcgctcggcctaagcgactccgaagatgtggttcctatctacatcggagacgatcgaacagacgaagacgccttcaaggtactgcgagatcgaagctgtggatacggaatcctagtctcgcaggtgcccaaggacactgaagccttctactcgctgagagacccgtctgaagtgatggggtt

SEQ ID NO: 5324 - DNA, 309 bp, Zea mays
cggaccctgaacccggacgaggcggactggttctacaccccggtctacaccacgtgcgacctcacgccgtggggccatcccctcaccgtcaagtccccgcggatgatgaggagcgccatccagtacgtctccaagcgctggccctactggaacacgacggagggggccgaccatttcttcgtcactccacatgactttggagcgtgcttctacttccaggaagagaaggccatccagcgaggtgtcctcccggtgctgcgccgcgctacgctggtccagacgtttgggcagaagaaccatgtctgcctc

SEQ ID NO: 5325 - DNA, 316 bp, Zea mays
  unsure (1)..(316): unsure at all n locations
caacacacncacgatgcctccacacagtttgacaggaccgacaacgacatcactcccatgggtggcttcccccactatggtatcgtgaacggtgactacctgatgatcaagggatgctgtgtgggtccaaacaacacggtggtgaccctccgccagtccctcctgaagcagacttcccggctggcgctggaggacatcaagctcaagttcatcgacacatcgtccaaatttgggcatggtcgcttccagactaccgatgacaagcagacgttctttggtaagctcaaggcgtaacgtgctgcggtgcacgacaagt

SEQ ID NO: 5326 - DNA, 319 bp, Zea mays
acataaggatcacaagcctgatcaaactgatgagcggcactcagttgaagatgctggaggttttgtgatgtgggcaggaacatggcgcgttggtggtgtacttgctgtttcgcgtgcttttggtgacaaactcttaaagcaatatgtggttgtggatccggagatccgagaggaagttgttgatgacacactcgagtttcttatccttgcaagtgatgggctgtgggatgtggtctctaacgaggaagctgttgcgatgactagatccattaaggacccacaagaggctgcaaagatgctcttgcaagatgcgtacaag

SEQ ID NO: 5327 - DNA, 312 bp, Zea mays
aacgtaatgacagtgaagcatctacgaggattaagactgaacttcttgtgcaaatgcagggtgttggtcataatgatgataaagttcttgttcttgctgccacgaatacgccatatgctctggaccaggctgtgcggcgaagatttgacaagcgtatctacattccgctacctgacacgaaagcaaggcagcatatgtttaaggtccatctcggggatacaccacacagtttaactgaaagcgatttcgagagcttggcccgtcgaacagatggattttctggttctgatgttgctgtttgtgttaaggatg

SEQ ID NO: 5328 - DNA, 232 bp, Zea mays
tggctgcgcgatcgaccggaaggtgctccgcgacaacatccagggcatcaccaagccggcgatccggacgctggctaggaggggtggcgtgaagcgcatctcggggctcatctacgaggagacccgcggcgtgctcaagatctttctcgagaacgtcatccgcgacgccgtcacctgcaccgagcacgcgcgccgcaagaccgtgaccgccatggacgtcgtctacgcgctc

SEQ ID NO: 5329 - DNA, 311 bp, Zea mays
gcgccgcgagccacagctagcaccaccaccttgcaccgcacccgcaccgagacgaacagatcgaccatggctgccggcggcgacgacaccaccatcgcgcaggtccacagcggcatcgacagcagcaacaagacgctgctcaagagcgaggccctctacaagtacgtgctggacacgtcggtgctgccgcacgagccggagagcatgcgtgagctgcggctggtgaccgacaagcacgagtgggggttcatgcagtcgtccccggacgaggcgtcgctgctgcggatgctgatcaagctgagcggcgcgcg

SEQ ID NO: 5330 - DNA, 280 bp, Zea mays
gcgcacaagaactgtcttggatgttggatgtggtgttgccagctttggtggatacctgcttgacaggaatgccattactatgtcatttgccccaaaagacgagcatgaggctcagatacagtttgccctagagcgtggaattccagcatttctagcagtaattggaacacaaaagcttccgtttcctgataatgtgttcgatgttgtacactgtgcaaggtgccaggtccattggtatgcaaatggtggaaaaccatgttggagcttaatagagtactga

SEQ ID NO: 5331 - DNA, 300 bp, Zea mays
ggagggtcttcaggtccttcccttggaggacgttgtctctgaagctgacatcttcgtgaccaccactggcaacaaggatatcatcatggttgaccacatgaggaagatgaagaacaatgccatggctgcaacattggccactttgacaatgaaattgatatgctcggccttgagacctaccctggcgtcaagcgcatcaccatcaagccccagactgaccgctgggtgttccccgagaccaacactggcatcattgtccttgctgagggtcgcctgatgaaccttgggtgtgctactggc

SEQ ID NO: 5332 - DNA, 295 bp, Zea mays
tacatggattaactgttatgattccttaaatctatatttcctgaacctgaaagggcacaagggctggctcatattctgatgaaggttctcagaagaagcctgcaggtatgtctcattgaatttttattttgacttatttatattaatgtggttagcacttgattaattatttgcctattctcctgaacttttgatgaaggagctggccgtgataatgattgggagtgtcaaattgccataacatcactttggctttcgcacagtctgtaattgagaaatgcacacactagactgc

SEQ ID NO: 5333 - DNA, 306 bp, Zea mays
gtgaagcagatgatttgctgttgcaacaagatggatgccaccacacccaagtactccaaggcccgttatgatgagattgtgaaggaagtctcttcctacctgaagaaggttggatacaaccctgacaagatccactttgttcccatctctggtttcgaaggtgacaacatgattgagaggtccaccaaccttgactggtacaagggcccaaccctacttgaggctttggacttgatcaatgagccgaagaggccttcagacaagcccctgcgtctccccctacaggatgtgtacaagattggtggt

SEQ ID NO: 5334 - DNA, 306 bp, Zea mays
gcaagactatcaccctcgaggtggagtcgtctgacaccattgacaacgttaaggccaagatccaggacaaggagggcatccccccagaccagcagcggctcatctttgctggcaaacagcttgaggacgggcgcacgcttgctgactacaacatccagaaggagagcaccctccaccttgtgctccgtctcaggggaggcatgcagatctttgtgaaaaccctgaccggcaagactatcaccctcgaggtggagtcctctgacaccattgacaacgtcaaggccaagatccaggacaaggagggca

SEQ ID NO: 5335 - DNA, 305 bp, Zea mays
cggcgagacgtttcgtgggatcgactcgttggttgacgtcggtggtggccatggtggcgccgccgccaccatcgccgccgccttcccccacctcaagtgcagcgtgcttgacctcccgcacgttgtcgccggtgctccgtctgatggcaacgtgcagttcgtcgcaggcaatatgtttgagagtattccacctgcaaccgctgttttcctcaagaaaactctacatgactggggtgacgatgagtgtgtcaagatattgaagaattgcaagcacagcatatctccacgggatgcaggtgggaagg

SEQ ID NO: 5336 - DNA, 297 bp, Zea mays
ccgcgtcaccgtcaagctcaccgtgcagaaccggcaggccaaggtctccgtcgtcccctccgccgcggcgctcgtcatcaaggcgctcaaggaacccgagagggacaggaagaaggtcaagaacatcaagcacagcggcaacatcagcctcgacgacgtcatcgagatcgccaagaccatgcggaacaggtccatggccaaggagttggccgggaacgtcaaggagatcctgggtgactgcgtcacgtcgggtgcacgtcgatgggaggacccaaggacttcagcagagatcgatga

SEQ ID NO: 5337 - DNA, 296 bp, Zea mays
ctcccatatccgctcccctacctctccagcatcctcccgtctccgtcgtctcgtctccgctcctcacctcgccagccatgggcaagatgcagatcggaatcaacggtttcggaaggatcggcaggctcgtggccagggtcgccctgcagagcgaggatgtcgagctcgtcgccgtcaacgaccccttcatcaccacggattacatgacgtacatgttcaagtacgacaccgtgcacggccaatggaagcacagcgacatcgccctcaaggactccaagacgcttctcttcggcgag

SEQ ID NO: 5338 - DNA, 203 bp, Zea mays
ggatgatggttatctttatatttgtatgttaattagtctctttgctgttaaatttcgtgtaagttggtcctgccgatggagaatcgagcagctccctttttttgttctatcaactatgctgtaattctggctatgtatcggcaaaaacaattctatatgctgagttggagtcggcaaaaattcatatatgctgagttggagac

SEQ ID NO: 5339 - DNA, 301 bp, Zea mays
cggctcgagcaagtatgttatattaggagaaaaaggcaaagttcagctgttgcgtgactcgaagaacagcattgaaatgaccgcaagtgaactacagaagaaccctatcaactatacacagattgctgtgctcgcggatgacatattgaaaaatgtggaatatgatgttctaagggttattttcaacaagttccattctgtcatatcgtttaagcccacaatggtaacgatactgtcccctgaggttgcagaaaaagaagcagaaactggtgggaaaatgggtgacctagattcttatgag

SEQ ID NO: 5340 - DNA, 282 bp, Zea mays
cttgactgacgccaataacagcgaaagatgtttgaataactttagaaagctgtctcctcagactgctggtagcatatatgccccctatgtttattgggatctcagcacatctagcattctcagcatggagtttatggatgccaaggatgtcactgatgttactggcattagatccattggagctcaccctgttgatgcttcagacctagtcagtctagcatttgctgcgatgattttgcagcatggctttgatcattgtgatcaccatgctgccaatatgat

SEQ ID NO: 5341 - DNA, 297 bp, Zea mays
gttcatgccatcactgctacccagaagactgttgatgggccctcatctaaggactggtggggtggaagggctgctagtttcaacatcattcccagcagcactggagctgctaaggctgttggcaaagtgcttcctgtcctcaatggaaaattgactggaatgtctttccgtgtcccaactgtcgatgtttctgttgttgatctgactgttaggcttgagaagtctgccacctatgatgagatcaaggctgcggtcaaggccgaggcagagggtagcctcaagggcattctgggttat

SEQ ID NO: 5342 - DNA, 295 bp, Zea mays
gtattgggctagaggtgtgccggcagctggccgggaacggcatcaccgtcgtcttaacagccagggacgagacgaggggcgcactgccttggaggagctcagagcgctgggtctttccgacgtcgttttccatctgctggacatcacggacgcgtcgagcatcgctaggctagccggtttcttgaaggcccgtttcgggaggctagacattctgataaataatgccgcgtttggcggcgtcgaatacgcccggggtcctgctgctgctgctgggtcagtgacaagtgaagaagaa

SEQ ID NO: 5343 - DNA, 299 bp, Zea mays
gccgcctgaaaaacccttgcgtcggcgcgtcgctgagctgagtccctttcctttcccccggtcgccgccgggcaagcgccgtccaacctgtgcgtcaccgcctccgccttcagtttcgcctccagcaggggcgccgcgtggggtattcggttcgtcgtcgaggagagacagtcacttctgccgagggagcagggatgaagccggtcgtggggatcgtggtgtcaaacaagatgcagaagtcggtggtggttgcggtggaccgcctcttccactataagatgtacaaccgctatgtcaag

SEQ ID NO: 5344 - DNA, 292 bp, Zea mays
cggccatgggcctcaacgtcgtccgcgatgccttcgacgacacggccggcgccgccgagtacgtggccgccaacggcctccgcgacacggccgccatcgcgtcctcccgcgccgccgagctgtacggtatggaggtgctggcggacggcatccaggacgactccggcaacgtcacccgcttcgtgatgctggcccgggagcccgtcgtgccgcgcaccgaccgccccttcaagaccagcatcgtgttcgcgcacgacagggagggcacctccgtgctcttcaaggtgctctc

SEQ ID NO: 5345 - DNA, 290 bp, Zea mays
ctcgctgcctttatttcctgttggcgacgctctcgccaggtcttcggcggcccgttcggcggcgactagcgcctccgtttgccaggtcttcgtcgtccgtttcgccgtcgactggtgcccagcaggtacatctggaagaatgggggtttaccttagcacaccgaaaactgacaaggtatccgacgatggggaaaacgataaacttaaattcggactttcatctatgcaagggtggcgtgcaactatggaagacgctcactcggctttgctagatcttgacaatgacactg

SEQ ID NO: 5346 - DNA, 293 bp, Zea mays
gagcaaagatagttctgtctcggctagctattggtgatcttggaacacagtattttgcagatcgagacattttctgtgctggccgtgtcactgaagaagatttgcaacgtgttgctgcagcaactggtggaactgttcaaacttctgtaaataatgtcatcaatgatgtactcggttcctgtgaggtattcgaggaaaagcaagtaggcaatgaaagattcaacatatttagtggctgcccttctggccagacagcgactattgttctccgtggtggtgcagaccagttcatt

SEQ ID NO: 5347 - DNA, 340 bp, Zea mays
  unsure (1)..(340): unsure at all n locations
gagagccaatcctaaattcccaatccctcaaaggaaggaggattcttcagcgtctcgcttgccggccccgaatcgcagtcgccgcccggatccgaggaaacaagtcgtcgtcttgctccaccgtccgcccgccgccatgagcttcatcttcggcaagaagaagactcctgctgagctgctgcgggagaataagcggatgctggacaagtccatccgggagattgagagggagaggcagggcctgcaggcccaggagaagaagctcatcaacgagatcaagaaggtggccaagcagggtcagatgggagctgtanaaattatggcaaaggatcttatccgc

SEQ ID NO: 5348 - DNA, 367 bp, Zea mays
cgacgagtcaggtacgaactcggaatcggctcgaggttccggacgtggcgttcgtcaaggacctggtggcgtggacgctgccggcgctggcgagggacggcgtgggcgaacggtggaaggggttcgtgtacgcgctggaggggatctacgacagggaggcagcgctgaccaagacccgcgccctcaaggggcatgatgatggcaactcgctgaccaacctgctgtggtggctccacagccgaggcagcgtcgtcggtgacggcgacgctgggttcggccgctgctgctggtaccgccagtactgccactgacgaaagtgtggtgaccagcacgagtgtggttgttcatgtctgcttgcggacagagc

SEQ ID NO: 5349 - DNA, 334 bp, Zea mays
  unsure (1)..(334): unsure at all n locations
aanaaaaacaaaccgtagttttgcctcttcgtgaagccattgatgctgttatgatttctattcaatttgaaaacgtgattgaggacattttgcaggcatgtgaaaacaaaaacccacagataaaatcagaagtagtgcagtttattagtcggtatatttcgaattctcaactaaatttcttaagtaataagaaaaatttgaaattgctgaccaatgctctgattagaactttaaatgacaacgacggcagtgtgcgtgaattttcagccgaatctttaggaatattaatgaaagctgttggcganaaggcgatgacacctcttcttgctgaagt

SEQ ID NO: 5350 - DNA, 332 bp, Zea mays
ccgtcgtctgctgcggactccgcctccattttgctctgtttcttgcaagttgctcttgcggtagttcccccaactgccaccatgcagaacgaggagggtaagactgtggacctctatgtccccaggaagtgctcggccacaaacaggatcatcactgccaaggaccatgcctctgtccagatcaacattggccacttggatgcgaatggcctgtatgatggtcacttcacaacgtttgctctctctgggtttgtccgtgctcagggcgacgcagacagctccttggacaggctgtggcagaagaaggctgatatcaagcagtagattttaca

SEQ ID NO: 5351 - DNA, 335 bp, Zea mays
aagagggtgagccagatatctgagaaagtggcgactgggattttgtccggagtggtgaaggtcactggttacttcacaagctctctggccaactcgaaagctggcaagaagttcttcaacatgttgcctggagagatcgttcttgcttcgcttgacggatttgggaagatctgcgacgccgtggaggtggccggaaagaacgttttgtccacgtcgtcaactgtgacgaccgggctagtatctcacaggtacggagacaaagccgccgccgcaacgaacgaagggctggacgccgccgggcacgccatcgggacggcattgggcgtgttcaagat

SEQ ID NO: 5352 - DNA, 339 bp, Zea mays
aatatcgccaaaccctagctcccgatctcgatggcgaaccctcgcgtcttcttcgacatgaccgtcggcggcgccccggcgggccggatcgtgatggagctgtacgccaacgaggtgcccaagaccgcggagaacttccgcgcgctgtgcacgggcgagaagggcgtgggcaagtccgggaagccgctccactacaagggctccaccttccaccgcgtcatccccgagttcatgtgccagggcggcgacttcacccgcggcaacggcaccggcggcgagtccatctacggcgagaagttccccgacgagaagttcgtgcgcaacacaccgcccccggtg

SEQ ID NO: 5353 - DNA, 329 bp, Zea mays
cttgcccacaggcggccaaaccgcaccctccttcgcgtcgtttcccatctcttcctcctttagagctaccactatataaatcagggctcattttctcgctcctcacaggctcatctcgctttggatcgattggtttcgtaagtggtgagggactgagggtctcggagtggattgatttgggattctgttcgaagatttgctgaggggggcaatggcgaccgcggggaaggtgatcaagtgcaaagctgcggtggcatgggaggccggcaagccactgtcgatcgaggaggtggaggtagcgcctccgcaggccatggaggtgcgcgtca

SEQ ID NO: 5354 - DNA, 334 bp, Zea mays
cggctcgagatcttgttctgccaaacaaagatgaatcactatctgtggatgctcgccaagaaattgacttaaaggttggagtagcatttactcgatttcagacccgatatttccaaggaaaatatggaaaccttgattcaagagtgatttcgtatggtccatgccaaacacctacacttggattctgtgtacaacgccatcagcaaatcaccacatttaaaccagagaaattctggtccttgaaaacgtatattatcaaagatagtgatgaaatacagctagaatgggaccggaagaaactttttgattttgatgttactgtaatgtttcagaa

SEQ ID NO: 5355 - DNA, 332 bp, Zea mays
tgcccaactacatagctcctgaggttctgcaaaacagaggctatgacggctccttgtcagatctctggtcttgtggggtgatcctctacgtgatgcttgttggctgccttcccttcgacgacaggaacctcgtcgttctttatcagaagattttcaagggagactgccagatccccaagtggctttcgcctgccgcgcaggaccttctcaagaggatcctccaaccgaatccgatgaagaggatcaacgtcgccgggatcagggagcacgagtggttcaagaaggactacgtgcctgctgttccgcacgatgatgacgaagacgtccttccc

SEQ ID NO: 5356 - DNA, 328 bp, Zea mays
cgacaagagccgccgccgccgcgcaaagccacttcaacgccgtcactcctcggggcgcaaccatggtggccgcaaagaagacgaagaagtccacggacaacatcaacaacaagcttcagcttgtgatgaagagcggcaagtacacgctcggctacaagactgtcctcaggaccctcaggaattctaagtcaaagctagtgatcattgctaacaactgtcctccgcttcggaagtctgaaattgagtactatgctatgctggctaaggtgacagtccaccacttccatggaaacaatgttgaccttggaacagcctgtggaaaatactt

SEQ ID NO: 5357 - DNA, 327 bp, Zea mays
catccgtttgcctcttctccctcttgccggtcacgaataaagagcagcagcgcaagaggtcggtagagcgagaagaaggcaatggcggccgagagcttccttttcacctcggagtccgtgaacgaggggcaccccgacaagctgtgcgaccaggtgtcggacgccgtgcttgacgcatgcctcgcgcaggaccccgacagcaaggtggcctgcgagacctgcaccaagaccaacatggtgatggtgttcggcgagatcacgaccaaggcgaccgtggactacgagaagatcgtgcgcgacacctgccgcgagatcgggttcacctcc

SEQ ID NO: 5358 - DNA, 323 bp, Zea mays
cggctcgagctccaggctccgactccaagaaggtgacccctgaggtgattgctgagtacaccgtccgtaccctccagaggaccgtccctgctgctgtgcctgctgttgtcttcctctctggtggacagagcgaggaggaggccacccgcaacctcaatgccatgaacaagctcagcaccaagaagccgtggtccctgtctttctccttcggccgtgccctccaggcgagcaccctcaaggcctgggctggcaaggtggagaacctggagaaggctagagctgccttcctcgccaggtgcaaggccaactctgaggctaccctc

SEQ ID NO: 5359 - DNA, 316 bp, Zea mays
cgcctcgccgcagcacacacgaggccggcggcgccatggccatgaagctggacatgtccgcgctcgagaccaacttcgccaacctgaccgcctccgccggcgacgacacgtacttctccgccgaggcccccgacgtgccgtccatggtgctccccatctgcgacgacttcgacggcttccaggcggccaccaaggatatggtgaagaataagaaggggacgaccacgcttgccttcatcttcgacaagggcgtcatcgtcgccgctgattccagggccagcatgggcggttatatatcctcacaaaccgtgaggaa

SEQ ID NO: 5360 - DNA, 332 bp, Zea mays
cagcaggctgcctccacttcgcgcgcaaagcagtaaatcggagtaaccatggacggcggatcctccacaccggcgagccccccaccgacggtatccgcgtcggcggcgaatatggaggagtaccggaactggaagaagaacgcggcggtgctttacgacctcgtcatctcccacccgctcgagtggccatcgctcaccgtgcagtggctcccatcggagtcctcggcccgcagccaccggctcgtcgtgggtacgcacacctccgacgaggcccccaacaacctcatggtcttggacgcggtgctaccgctcccacctcgcctcgctgcagc

SEQ ID NO: 5361 - DNA, 327 bp, Zea mays
gcgcattcgtgcagcctgcgttctacgaagcgttcggcctgactgtgatcgagtccatgacgtgcggtctgccaacgatcgcgacctgccatggtggccctgctgagatcatcgtggacggggtatctggcctgcacattgacccttaccacagcgacaaggccgcggatatcctggtcaacttctttgacaaatgcaaggcagatccgagctactgggacaagatctcacagggcggcctgcagagaatctatgagaagtacacctggaagctctactccgagaggctgatgaccctgaccggcgtgtacgggttctggaagtacg

SEQ ID NO: 5362 - DNA, 328 bp, Zea mays
tgagacaacaaagcaatttgttgtctctttcttaggagctggcgagtactcggcatggcagatgctagttcaaggaatgacacctcgactgttttagacatggatgataagaatcaaaggttagaaaatggacagagtggagctatggccctggcttcgaattcatctgatcggtctgacagatctgacaaacctatggaccaaaaggttttacgacggcttgcccaaaatcgtgaggcagcaaggaaaagtcggctgaggaaaaaggcatatgtgcaacaactagagagcagcaagctaaaacttgcaagcctggagcaagaactcc

SEQ ID NO: 5363 - DNA, 306 bp, Zea mays
gtcatattctccttgctcgatgatttgctggagatcagccagaaccactcccagaaggactacagaaacatggaagggtcacttgtgctcgccatgaagctggttgcgaaggtatacctccagctcttgccggaccttttcggcctaagcagtttctgcaagctgtggctgggggtcctgagccggatggagaagtacgtcaaggtcaaggtccgaggcaagcggacgatccggctgcaggaggtggtcccggacctgctcaagaacatcctgctcgtgatgaagagcaagggcatccttgcgaag

SEQ ID NO: 5364 - DNA, 319 bp, Zea mays
ccaattccaggcaggcaggtcggcgaggagggcaggaagaccgaacgaccgagccgtgcgggggctcgggacgggaacgggacaggaccccaaaatctcagatccttcctgcccgcccgcccgtgcccgtcgacgcgtcgttcttgccggccgcgccccacctccgccctctcctcctccagggggatcggatacgccacaggctgcgcgatggtgctgtgggtcttcggctacggctccctcatctggaaccccggcttcgacttcgacgacaaaatcctcggcttcatcaagggctacaagcgcacctttaatctcg

SEQ ID NO: 5365 - DNA, 323 bp, Zea mays
gcggcgctcttcgacctctcggactcgctcaagcacccgcgagagaaggaggccaaacgccaggcgctcctcgagctcgtagattacgtgcaggctccagctcaggccgcgggcgccaacgcgcccacgcgcctcccggaccacgtccaggaggcgctagtccttgccatctctgccaacatcttccgcccgctgccacccgcgctgcacgagtccgccgccgcgatcgaccccggcgccgcgcccgacgacgacgaggagccatacctggacccctcctggccacacctccagctcgtctatgagctccttctccgctacgt

SEQ ID NO: 5366 - DNA, 296 bp, Zea mays
  unsure (1)..(296): unsure at all n locations
aacgggcagagcttcggtggacgggtccttcccatacggcctgcgggtgcgcacggcgcgctgaacgtgttcgcgtggggagtcctgctgcccatcggcgccatcctggcgcgctacttccggcggatggacccgctctggttctacctccacgtgggcgtccagctcgccggcttcatcatcggcctggccggcgtcgtcgccggagtggcgctgtacaacaagatccaggccgacatcccgcgcacnaggggctcggcgtcttcgtcctcttcctcggcatcctgcaggtgctg

SEQ ID NO: 5367 - DNA, 306 bp, Zea mays
  unsure (1)..(306): unsure at all n locations
ccctggcggattacaacatccagaaggagagcactctccacctggtgctccgcctcaggggtggcatgcagatttttgtgaagacattgactggcaagaccatcaccttggaggtggagagctctgacaccattgacaatgtgaaggccaagatccaggacaaggagggcattcccccagaccagcagcgtctgatctttgcgggcaagcagctggaggatggccgcactctcgcggactacaacatccagaaggagagcaccttcaccttgttctccgcctcagaggtggtatgcagatctntgt

SEQ ID NO: 5368 - DNA, 300 bp, Zea mays
gctgagcttagctccactccagctccaatcacagtcgtgaccagagcgcgagagctagctagagggccgtgaaaatgccgatcaataggatcgccctggggagccaccaggaggtgtaccacccgggcgccctcaaggcggcgttcgctgagttcatctccaccctcatcttcgtcttcgccggccagggctccggcatggccttcagcaagctgaccggcggcggcccgacgaccccggcgggcctgatcgctgcggcggtggcgcacgcgttcgcgctgttcgtggcggtgtcggtgg

SEQ ID NO: 5369 - DNA, 302 bp, Zea mays
gctatcaaccctatttgatatctccagagaagggtttacgttccttaataaaaggagttcttgaaatggccaaggagccatcacgactctgtgttgaagaggtacaccgagttttgttagacatagtaaatgctgctgcaaatgctacaccaggactaggaagataccctccattcaagcgggaggtcattgcaattgcatctaatgcattagatgctttcaaaagtgatgcaaaaaagatggtggttgcacttgttgatatggagcgagcttttgttcctccacaacacttcatccgatta

SEQ ID NO: 5370 - DNA, 300 bp, Zea mays
cgcgagtgaaggttgtccacacatcgaggtggatctatgggcagatatatattccagaaataaattggattcttatggttctttgcgtcgctgtcactattgcatttcgtgatactactcttattggcaatgcctacggtattgcatgcatgactgttatgcttgttactacattcttgatggcattaatagtcatctttgtttggcaaaggaacataatattttccctagttttcctggttttctttggatccattgaagctgtatatctttcgtcatctctcatgaaggttcctcagg

SEQ ID NO: 5371 - DNA, 304 bp, Zea mays
ggcaggaagaggcctgtgcccaagggtattgtctatggcaagcccaagcaccagggtatcacccagctcaagttccagaggaacaagaggtctgtcgctgaggagagagctggacgtaagcttggtggactgagggttcttaactcctactgggtgaatgaggatagtacctacaagtactttgagatcatccttgtggacgttgcccacaaagccatcaaaaccgacccgaggatcaactggctatgcaaccctgtgcacaagcaccgtgagctccgtggcctcacctcagcaggcaagaagt

SEQ ID NO: 5372 - DNA, 291 bp, Zea mays
ctggccacaagtggggatggaactttgtctgtgaacaacctgcggaggaataaagtaaggtcacgatctgaattttcagaagatgagttgctatccttggtgttaatgaagcatggtaaaaaggttgtgtgtggaactccaagtggagcactcttattatattcatggggatactttaatgattgcagtgaccgctttatcggacacacgcagtctgtggatacaatgctgaagctggatgaagacactttggtttctggatcatcagatggtgtgatcagattggtgggc

SEQ ID NO: 5373 - DNA, 294 bp, Zea mays
cggacatagagaagatccgtcgcctggttcgccagtccaagtgcctccaggacaagatgactgccaaggagatctcaacctggctggcggtcgtcaagcaggaagaggagctgtaccagaagctgaacccgggcgcacgcccaccggcgtctactggtggcatcgcaagtgccatatccttcaacaccagctcgagcgagtatgatgtggacatcatcgatgagtgcaagggggacgaggccggtaaccagaggacggcagtcactgacccaaccgcgttcaaccttggtgccg

SEQ ID NO: 5374 - DNA, 294 bp, Zea mays
ctctatgtcaaggttgagttgcgcccgtttggtcttcataacctaggcaacagttgctatgcaaatgctgttcttcagtgtttgatgtttactcgaccactcacaacatatcttttggaagggcttcactcaaaaaactgttctcaaaacggatggtgcttcatgtgtgaatttgaaaaactcattgtggagggcaaacggcgcaagattgccttgtcaccaactgggatactctctcatttgaatgacattggcagtagctttggtcctggtaaacaagaagatgctcatgaa

SEQ ID NO: 5375 - DNA, 292 bp, Zea mays
ctcgcgccgccgccatgtcgaagcgcgggacgggagggacggcggggaacaagttccgcatgtcgctgggtctccccgtcgcagcgaacgtgaactgcgcggacaatacaggcgccaagaacctctacatcatctccgtcaagggcatcaagggtaggctcaaccgcctgccgtccgcctgcgtcggcgacatggtcatggccaccgtcaagaagggtaagcccgacctcaggaagaaggtcatgcccgccgtcatcgtccgccagcgcaactgtggcgccgcaaggacgga

SEQ ID NO: 5376 - DNA, 292 bp, Zea mays
tggcgtgatagagccatcgatgagcaaagtaaagatcattcagtttgccacggaggctgccattactatcctgaggattgacgacatgatcaagcttaccaaggaagaagagggtaacgaagagtaagcaccgcccaccagtagtgggctagtggactcccatgggatggttgccatagcatgtagcacttgttttttccccttatcgtttacttttgctagctgtgagcattcgtttgtaggaaaagtgagaacggatgtgtatcaatccgtgttgggtgccgatgactca

SEQ ID NO: 5377 - DNA, 283 bp, Zea mays
cactcccctgtctcgctaggattccccccaaaccctcccccaaaaccccagagcggagaagagcgcaagatgttcggcttcgggcaccacggccaccacggccagaacccgccggcgcacggcggcgtgcaccagcccaccttcaagatcttctgcaaggccgacgaggggtactgcctcaccgtccgcgacggcaacgtggtgctggcccccgccaacccgcgcgacgagcaccagcactggtacaaggacatgcgcttcagcacccaggtcaaggacgagg

SEQ ID NO: 5378 - DNA, 291 bp, Zea mays
catttctccgcggaagcagatcctctccgctcgtcagcctccccctcctcctgctgcctcctcgcttcaagcaacacccgaagcggcaacaacaaccaccaccaccaccggacctgccatacgaccccttggcttcccactccactgaagcagggcgagagggagagagaggaaggaggaggagaagccatggcgaacgacggcgacgggaagggccgcgtcgcgacggcgccaggggcagggtacgggtacgcggcgtacggaggctaccagggggcggaggagcggaag

SEQ ID NO: 5379 - DNA, 290 bp, Zea mays
tcctaaccaggctcactaatccttaccaatcctttcacccaaatcatacataagatagatgttcaatatgtctagggacccattggtcgtcggcaatgttgtgggagatattgtggatcccttcatcacaactgcgtcactgagagtgttctacaataataaggagatgacaaatggttctgagcttaagccatctcaagtgatgaatgagccaagggtgcacgtcggtgggcgtgacatgaggactctttacacacttgtcatggtggacccagatgcaccaagcccca

SEQ ID NO: 5380 - DNA, 290 bp, Zea mays
gttgttctgatggatcttctatggtctgatccgactgagaacgatagtgtagagggtctcaggccaaatgcacgaggccctggtcttgttaccttcgggcccgacagagttatggagttctgcaacaacaatgacctgcagttgattgtgcgagcacacgagtgcgtgatggatggcttcgagcgtttcgctcaaggtcacctgatcactcttttctcagcgacaaattactgcggaacggcaaacaacgcaggagcgatcttagttctcggaagggatctggtcgttgt

SEQ ID NO: 5381 - DNA, 291 bp, Zea mays
tgcagctgttgtgttggcaagatacatctctttgaaaatggagatggaggaagagttcgatgcaacccggtggcttgatagatctctcatacgtctttgttcaagatttggggattaccggaaggatgatccctcttcatttagcctgcattcaaatttctcattgttccctcagtttatgtttaatcttcggcgttcacaatttgttcaggttttcaataacagtccagatgagacagcttatttcaggatgttactcaatcgtgagagtatcactaactcggttgccat

SEQ ID NO: 5382 - DNA, 162 bp, Zea mays
cgcctcgggtcaaaccctaagcagggagttgatttatccgctgcagccatgagtaagttgcagtctgagtctgtcaaggatgccatctcccagattgttggggatgccaaggagaagaataggaagttcactgagactgtggaacttcagattggtctgaag

SEQ ID NO: 5383 - DNA, 299 bp, Zea mays
gcgccgcgagccacagctagcaccaccaccttgcaccgcacccgcaccgagacgaacagatcgaccatggctgccggcggcgacgacaccaccatcgcgcaggtccacagcggcatcgacagcagcaacaagacgctgctcaagagcgaggccctctacaagtacgtgctggacacgtcggtgctgccgcacgagccggagagcatgcgtgagctgcggctggtgaccgacaagcacgagtgggggttcatgcagtcgtcaccggacgaggcgtcgctgctgcggatgctgatcaagct

SEQ ID NO: 5384 - DNA, 337 bp, Zea mays
gatgttttggatggaagcagtattggtttcgtggagaccctagagaatgatcttttggagcttagagcgaagggtgttgatgcacaaattgcatctggtggtggaaggatgtatgttacgatggaccgttatgagaatgactgggatgtggttaaacgtggttgggatgcccaagtgcttggagaagcaccctacaaattcaaaagtgcacttgaggctgtgaaaacactgagagcacagcccatagccaatgatcagtacttgcccccatttgtgatagttgatgacagtggcaatgctgttgggcctgtattagatggtgatgcagttgtcacta

SEQ ID NO: 5385 - DNA, 291 bp, Zea mays
  unsure (1)..(291): unsure at all n locations
gaagccatcacccagaaagtggatgcctacagcttcggaatggtgctgctggagatcgtgtcagggaggaggaactcgcctaaggtatacaccaccaacagctgccacgtttcttatttcccgttgcaggccatcacgacgatgctccacgacggagatgtgaatagcttggtagatccacagctgcacggcgagttcaacttggaagaggctttaaggctatgcanagttgcattttggtgtattcaggataacgagcttgaccggccaacaatgggtgaagtggttcag

SEQ ID NO: 5386 - DNA, 258 bp, Zea mays
ggcgttcccaccacgaaatgttatcttgctctagtgcaactgtcttgtatgaaacatgatttaaaacacttagtcattgatacatataaaaatgcactcttgaattataggctaataataataggcattaccaagggtactgcgaccatgaaattgccacttccaattcagcgccattttctccaacaagtcgttccgtgtgctggccgttggtcgcaggattgaactcaaggacccctccaacaatttcatcgccgg

SEQ ID NO: 5387 - DNA, 289 bp, Zea mays
cgctaacttcacagatgttgcttctacatttagtggcatcattcgggctttaagagagaaggagtccaaattaaaggctgcaaggatgaacatttatgtccggagaggtggtccgaactaccaaactggactcgccaaaatgcgcaccctaggcgccgaacttggcgttccaattgaggtctatggaccagaggcgaccatgactgggatctgcaaagaagccattgattgcatcatggccgcgtaaatcacaaatgtggttgttccatttgaagtcacatccgttttg

SEQ ID NO: 5388 - DNA, 295 bp, Zea mays
atgcaattagggaaagtacatcaagaataaagattttcaataaatcgtttcaggagaagaaaactatccgcccttcattttcagcagagcgtatttatggtggggtattgttggcaatgtgttctagtgacttcatctgcttttatgactgggctgattgtagactaatacgccgaatcgatgtgaatgttaagaatgtttactgggctgatagtggtgacctagttgcaatagcaagtgatacatcattctacatcctcaagtacaatagagatattgttgcttcttatctaga

SEQ ID NO: 5389 - DNA, 253 bp, Zea mays
ggttgaccacatgaggaagatgaagaacaatgccattgtctgcaacattggccactttgacaatgaaattgatatgctcggccttgagacctaccctggcgtcaagcgcatcaccatcaagccccagactgaccgctgggtgttccccgagaccaacactggcatcattgtccttgctgagggtcgcctgatgaaccttgggtgtgctactggccatcctagctttgtcatgtcctgctcattcactaaccag

SEQ ID NO: 5390 - DNA, 328 bp, Zea mays
gtttccttgttctgaggtgtcattcgctagtgctcagagccggcttggttttctcgaaagatcagcagccactcttgattcaggactttgtcacacctgatagcatctagttaatacatctttatccaagatggcactgcaaaacattggtgcttcaaacagggatgatgccttctacaggtacaagatgcccagaatgattaccaagatagaaggtcgtggtaatggtatcaagacaaatattgtgaacatggttgacatagcaaaagcacttgccaggcctgcttcctatacaaccaaatactttggatgtgagcttggtgcacag

SEQ ID NO: 5391 - DNA, 285 bp, Zea mays
ggaaaccctagccgccatatctcacgatccactcgagcaccaagccgagggaaggtgaggagcgatggcgcgcggcgtggtgtcggcgaagggcggcgcggtcgcgggcaagaggaaggggtcggtttccttcacgatcgactgcaccaagccagtggaggacaagatcatggaggtcgcctcgctcgagaagttcctgcaggagcgcatcaaggtcgccggcggcaaggctggcaacctcggcgactccgtcaacatctctcgcgagatagacaaggtcaccgt

SEQ ID NO: 5392 - DNA, 328 bp, Zea mays
gtccggtccggtgcccacctatttcctctcgcagcctcttctccccaaaccctaatcttgctcctgcctatctctgctccaatccgttggtcgagcggcggcgatggaggggaaggaggaaggtcggatcttcgtgggcggcctgtcgtggcaaacggacgagcgcaagcttcaggacgcctttggtcgcttcggcaaggtcgtcgatgttcagatcatgctggagagacacacataccgccacaggggctttggcttcgtgacattcgaagatcgaagggcagttgacagcgctatcaaagagatgcgtggccaagagttagatggt

SEQ ID NO: 5393 - DNA, 154 bp, Zea mays
tggtcgagctcggtggccatcagcaagtacgtcgatgggaagcacggcggcaagctccccaccaacttccgcaagcagctcaccgtgcagctgaagaagctcgctgccgccggtaagctgacgatggtgaagaactccttcaagctgccggcca

SEQ ID NO: 5394 - DNA, 339 bp, Zea mays
cgcttcttctcgcccagttcaagtgccacaccggccgctcgtcgccttcccatctcgccgcgccatggatttctgcagccacctccgtctcgcggctgtgctcgcgctcctcaccggatgcgcttctgcggcgagccggggcgctggttccttcgacccatcccgcgtggttcaactctcttggcgccccagggcgttcttgcacaagggtttcctgttggatgcggagtgcgaccacctcatcgcgctggccaaggacaagctggagaagtctatggtggcggacaacaagtccggtaagagtgtccagagtgaggtgcgcaccagttccggcatgtt

SEQ ID NO: 5395 - DNA, 344 bp, Zea mays
  unsure (1)..(344): unsure at all n locations
ggagcattcgagaagccgaagaaaattcgaagacgaggagcagctacactgcggacggacttcgggcatggagggccagttccaggttggcaaggaggaggtcatccaagcatggtacatggacgacagtgaagaggaccagaggcttcctcatcatcgcgagcccaaagaattcatccctctcgacaaactttccgaactaggaatattaagctggcgcctaaatgctgatgattgggagaatgatgagaacctcaagaaaattcgtgaagccaggggttactcttacatggacatttgtgatgtgtgcccagagaagttgccanattacgaggctaagataa

SEQ ID NO: 5396 - DNA, 285 bp, Zea mays
ctgctcgatgatcgaggccttggatgagctgaacccggctggccccgcggcagggaaacacaaggccatgtagatgcgagtcgcagggggtgcattcacttccctgctgaactgaaaacaaagtatgattgggtccatcctaggctcccccatagatatagctctttttcagaggtaagatggactaattcagcagcaggttctttttatagattcttcgttgttatgaagcacgcggtactattgtagtagatgaatgcgatctgtcgcgactgtcatctacat

SEQ ID NO: 5397 - DNA, 334 bp, Zea mays
  unsure (1)..(334): unsure at all n locations
ctggaacgccgatccatcaggttctgatcgattcttctgccccgatccgcagcggcaagcggagatgaactgcgagacctgtcagctgaaagaactggagctggaactgacggagatcagggatgttctgcgctgtattttgcacaccatattcttccatagaaccctcagcctggttcgccccaaagatgttgactgtgatttcctcgatattacttatgtacaatgtggtctaccggaactagaaaaggaagttgacgaaaagatagaccagttcagtgcatgggtggagaaacaccanaccgcagaagccagatctgcctctcctttttcg

SEQ ID NO: 5398 - DNA, 336 bp, Zea mays
  unsure (1)..(336): unsure at all n locations
ccaagaccaacctccctgaatttgagggaccagagaaaattgttattcggcgctatagtgattttgaatggttgcatgatcggcttgctgagaggtacaaaggcatttttataccccctcttccggagaagaatgctgttgagaaattccggtttagcaaggagttcattgaattgcggcgtcaagctctggatttattcgttaacaggatagcttcacaccctgaactcaagcaaagtgatgtcttgaggacatttttgcaagcagatgaagagataatggatagggcaagatcttatgagactggtatttntaagaaaccggcagatttcatac

SEQ ID NO: 5399 - DNA, 259 bp, Zea mays
tgtggtgccttcgactacaacctcaacttccacaaggtggtggtggtgggcatcgctgtctgtgccgggctgcacatcatctcccacctgacgtgcgacttcccgctgctgctccacgccacggacgccgagtacgcgccgctggggcagtacttcggggtgccccgcccgcccaactactggtggatcgtgcgctgcacggaggggtggacggtgctggtgatgctggtgctcatggccgtggcgttcaccctggcga

SEQ ID NO: 5400 - DNA, 331 bp, Zea mays
ggccaacagaccaaagagctatcttaaaaggacattaggttgggatcagtatccccatggacggtggggtgattctcggaacccatcatatggagcacttactgaccaccagttcacaagaccacgaggccgtggtaagaagctccaagaggaatgggctgttccactgaaatctgtggaggacattagtgagcgcttcacaaacttctgtcaagggaaactcacaagcagcccatggtcagaattggacggtcttcaaccagagacaaagattatcgatgaccagttggtgaatattaaccagaagggtttccttacaattaacagccaa

SEQ ID NO: 5401 - DNA, 328 bp, Zea mays
agagagtctaatttctatgatgcggagaagacaaagaactttttgatggaagcaaagctacctgatgcccgcccactgattaatgtttgtgaccgctttggatttgttccagatctgactcactatctatatacaaacaatatgcttcggtatattgagggctatgtacaaaaagtcaatcctggtaatgctcccttggtagttgggcaacttctggatgatgaatgcccggaagatttcatcaagggtttgattctctctgttcgttctctgcttcctgttgagccactagttgatgaatgcgagaagaggaaccgcctacggttgc

SEQ ID NO: 5402 - DNA, 323 bp, Zea mays
caactcgccgtctgccttctgcgcctccatttcggcctctgtcgcttgcaagttcaatctcacctccaaccatgggtaaagagaagtcccacatcaacattgtggttattggccacgttgactctggcaagtcgaccaccacaggacacctgatctacaagcttggaggcattgacaagcgtgtgatcgagaggtttgagaaggaggctgctgaaatgaacaagcggtccttcaagtacgcatgggtgctcgacaagctcaaggctgagcgtgagagaggtatcaccattgatatcgctctgtggaagtttgagaccacaagt

SEQ ID NO: 5403 - DNA, 304 bp, Zea mays
tcggaggaagtgctgggcaagggcggcgaggagtgcctggcgtggctggacgcgcacccagggccagcgtggtgttcctctgcttcggcagcatcggccggttcagcgccgagcagataagggaggtggcggccggcctggaagccagccggcagcgcttcctgtgggtggtccgggcgccgcccagcgacgatccggccaagaagttcgagaagccgccggagccggacctggacgcgctcctccgcgaggtttcttggccaggaccaaggacaggggcctcgtcgtcaaatcgtgggcaccg

SEQ ID NO: 5404 - DNA, 330 bp, Zea mays
  unsure (1)..(330): unsure at all n locations
aagctctgcaacctcgagctcttcacgcccaggaggctcgaggcgctgcgccccatcagggaggacgaggtcaacgccatggtcgagtccgtgcaccgcgccgccactgccccgagtaatgaaggaaagccaatggtagtgaggaagcacctttctatggtggccttcaacaacataacaaggctggcatttgggaagcggttcatgaatgcaaacggtgatgttgacgaacaagggcgtgagtttaagactattgtgaacaacgggatcaagattggtgcatctctctctgttgctgagttcatttggtatttgagatggntgtgtcca

SEQ ID NO: 5405 - DNA, 326 bp, Zea mays
ctcatccgcacctctctccatctccctgctcctccgcctccttcttgatccagccaagccagggatcgccatgtcggactcggaggagcaccacttcgaatcgaaggccgacgccggagcgtccaagacctacccgcagcaggctggcaccgtccgtaagaacggcttcatcgtcatcaagaaccgcccctgcatagttgtggaggtttctacctcaaagactggtaagcatggccatgccaaatgccactttgttgccatagacatattcaacgggaaaaagctcgaagatattgttccttcgtcacacaactgtgatattccgc

SEQ ID NO: 5406 - DNA, 324 bp, Zea mays
gcgccagggcctcaatgttgttgatgttgtcgccctctcaggtggtcacaccattggtatgtctcggtgcactagtttccggcagaggctatacaaccagacaggcaatggcatggctgacagcacactggatgtatcctacgccgcaaagctgaggcagggatgcccccgctctggtggtgacaacaacctcttccccttggacttcatcacccctgccaagtttgacaatttttactacaagaacctcctggccggcataggccttctaagctctgatgagattctgttaaccaagagcgctgagacagcggccctcgtgaa

SEQ ID NO: 5407 - DNA, 323 bp, Zea mays
gctggacttctacacgggcttcgagggcgtgtcgacgctggtggacgtgggcggcggcgtgggcgccacgctgcacgccatcacgtcccgccacccgcacatctccggggtcaacttcgacctgccgcacgtcatctccgatgcgccgccgttccccggcgtgcgccacgtgggcggggacatgttcgcgtccgtgcccgccggcgacgccatcctcatgaagtggatcctccacgactggagcgacgcgcactgcgccacgctgctcaagaactgctacgacgcgctgccggaaaatggcaaggtcatcgtcgtcgagtgcg

SEQ ID NO: 5408 - DNA, 321 bp, Zea mays
caaaatgtgcccaccacaataaccaccatgatgggttcatgaacttcatgcacagggacgaagaggtgaactacttcccttcgaggtttgatcccgcccgtcacgcggagaaggtccccattcctccccgtgttctaacaggctgtcgtgagaagtgcatcattcagaaggagaacaacttcaagcaggctggcgagagatatcgttccttcgaccctgcaaggcaagaccggttcatccagcgatgggttgacgcactgacagaccctcgcgtgacccatgaacaccgtaccatttggatctcctactggtcccagtgcg

SEQ ID NO: 5409 - DNA, 318 bp, Zea mays
gctatgcctttttactgcgctcttccaactttatctgaatatatgattgagagcggatggactcggtgctacttcaatatcagcgaaattggtttttctatgtacctctgttatatggctatgtatctcatctttgtggagtttggaatttactggatgcacagggagttgcatgacataaaaccattatacaaatatctgcatgcaacccaccatatttacaacaaggagaataccttgtctccatttgctggacttgcatttcatccactggatggtattctgcaagcaataccgcatgtgttcgcgctcttcctc

SEQ ID NO: 5410 - DNA, 178 bp, Zea mays
cgggcattgccgtttgatggcaacattaacttccacaagactattgcagcagcaattgtggttggtgttgtccttcatgcagggaaccaccttgtatgtgattgtccacggctcattagttcatcataggtgaagtatgctccactgcgcaaatactttggggaagataaaccaacat

SEQ ID NO: 5411 - DNA, 339 bp, Zea mays
atttatggagtgcatgacgaatccaaggacaaagcttttgagttggagttgagctggatctgtgatgaatcgaaccgccagcatcagaaggttccgaatgaattgttggagcaggccaaagctgctgctcaggcagctcttgaggagatggatgctgactaagaaacatgacaaatatgcccatgcttcatgtttttgtgctgttgatatctttgatccctttggggtgacaccgtgacagactggacattgccaatttgttggattttatttggatgtcatgtacaactccattcatggaagtctgaatctggattgactgatataagagctgtggtg

SEQ ID NO: 5412 - DNA, 340 bp, Zea mays
  unsure (1)..(340): unsure at all n locations
atctagctagtagctcnctgaaaagttcactagagaagcatttcacggaggagccatgtctgaggagaagcaccaccaccacctgttccaccaccgcagagcagaggaggaggaaggcgcctccggcgaggtcgactacgagaagaaggagaagcaccacaagcacatggagcagctcggccagctcggcgccatcgccgccggcgcgtacgctctgcacgagaagcacaaggccaagaaggacccggagaacgagcacggccaccgggtcaaggaggaggtggccgccgtcgccgccgtgggctccgccgggttcgccttccacgagcatcacgagaag

SEQ ID NO: 5413 - DNA, 344 bp, Zea mays
cggcggcggctacggtggcggcggtggctacggtggtggtggtggcggctacggcggtggcaaccgtggcggcggctacggcaactccgacgggaactggaggaactgagcggtggggcccgcgcggccaagttatcctgttcgctaccgtgatgtttaccctagtccagagggtttatcttcgttcgtctcgtttgttgttgcccatctgtgtttttgattgcaaggtcgctctgtgtcagttgttagtgctgtgttcatcctcggctccagcagacccatgcatcaaccagcatggactgtggatcgatggatgctgttactccgtgtcagatttgttctaa

SEQ ID NO: 5414 - DNA, 332 bp, Zea mays
cgcaaccgcaagcaagcgaagctagagcctgcctgaccagagctagctgagctacagccaacagcagctggtctgactgacatggcgaaggacatcgaggcatcggggcccgaggcgggcgagttctcggccaaggactacaccgaccctccgccggcgccgctggtcgacgcggaggagctcacccagtggtccctgtaccgcgcggtcatcgccgagttcatcgccacgctgctcttcctctacatcaccgtggccaccgtgatcgggtacaagcaccagacggacgcgtcggcgtcgggcaccgacgcggcgtgcggcggcgtcggcat

SEQ ID NO: 5415 - DNA, 314 bp, Zea mays
  unsure (1)..(314): unsure at all n locations
gcaagganggcgcacttgtgcccgccgcatctgcttcttcgcccacgatgaagatgagctccgccatgtgcctcacaatagtggtgcaggtctgctgtctcnccgtgcctcttcatccattgacatgannnnnnnnnnnnnnnnnctagggcttctacctggatctcctaccaggcactttgtgccaccacctctgtcaccatctgctgccaacaatggtggaggtgctgctgctcatggctccaaggtagcaggtgcgctcttctttcaatgcaagagatgcacagctgatgacttggtcgtctggaatggga

SEQ ID NO: 5416 - DNA, 335 bp, Zea mays
  unsure (1)..(335): unsure at all n locations
cggagaatggctttcaaatatggtccttcagtggcaagcatctttacaaggtgtcaaaggatcatttctatcagtttatatggcgcccgagaccgccctcactactgacggccgagaaggaagaagagatctcaaggaacctgaagaagtatagcaagaagtacgaacaagaagaccaggatgcattcaatcagttgagcgagcaggaccgcaagaggcggacacagcttcaggaagaatgggactcatgggttgccaagtggaagcagatgcatgaggaggagcgtgcttacangcaggagctcagggatggggangccagcgacgacgaggaa

SEQ ID NO: 5417 - DNA, 329 bp, Zea mays
  unsure (1)..(329): unsure at all n locations
gctgcatataccttttaggtgcttggagaaatttggtctgtggcatttaaatatcacttccgtatgccaccttactacacacttgttctccggtcacgtgcctctttggaaggactagccgtggcagcagatgggactttcaaaacatttcaagcagcatacccatatgttgttcggaagcttctgtccgaaaattcacttgaaacaagaagactcttgaatcaggcaatttgtaacaagaggaaagagttccaatggcagaagattgacgcgtttctanaattggcttcagcgaggaccaacttcaagtatagcagtgaagttttgcc

SEQ ID NO: 5418 - DNA, 313 bp, Zea mays
cggctcgaggtgccggtggtggtcaaagttctctgggttatctctttggaagcggtgagccccccaaaccagcagtggcaccagctgcaagtgctccacctgttgagaaaccatctgctgcaaagactgatgcggccaagcaggttgctgctggggttagcagccaaaccaataactaccacagggctgatggtcagaacactggcaacttccttacggaccgtccttcaaccaaggtccacgctgctcctggcggtggctcttccctgggctacctgttcggtggcaactgatgctcgtgctggtgcgctca

SEQ ID NO: 5419 - DNA, 326 bp, Zea mays
cgggcacgagccgtcgccgagaacgttacatacttgttccggaggccatctattggggatatagtgtttatcaaagtaccgactgctgtgcataattatggtgtctataatgatgttgtctttattaagagagtattggcaacaccaggagacttcattgaggtccgacaagggcagcttattgtacatggtgtcgcactagaggagcattacgcagcagcaacgtcattgtacacaatggacgcaatggttcagagatctctaagagtcacaagagagcagatgatcaagaactggactggctgctctatgttgtcgacttcttg

SEQ ID NO: 5420 - DNA, 331 bp, Zea mays
  unsure (1)..(331): unsure at all n locations
ttcagctattcaactgaacagtttgaacattgaacttggtaattacaaggaacagattggtanaacttcaaaagaatgtgaaagattccgcaccaaagtatctgaacttgaggaaacatgcagtacacaacaagaacagattcggacatttcaaaagcagcttgcagttgcgactgagaagttgaagcttgctgatgtaactgcgatagaggcgatgactggttatgaagaacagaaggagaaaataaaataccttgaggagcgtatagcacaggcagagtctcaaatgtgtgaaagcgacgagttacggganaaactgcacaacactata

SEQ ID NO: 5421 - DNA, 324 bp, Zea mays
atcgcccacaagcaggccatcgcgttccgcagtattgtggtggtgttgggcgtactgctcaggctaagtctcgccactcaaatggtcagggacgctggcctgccaagtctgctaaattcattctagaccttctcaagaatgcagagagcaatgctgaggtgaaaggacttgatgtggataccctctatgtgtcgcacattcaagttaatcaggctcagaagcagcgacgcaggacataccgtgctcatggacgcatcaacccttacatgtcctccccatgccacatagagctcatcttgtcggagaaggaagagccagtgaaga

SEQ ID NO: 5422 - DNA, 315 bp, Zea mays
atcgggaaccgccgccgacgccgcaggaggagacgcatcgaggttagcacgcgaagaagcgaccatgagggccaagtggaagaagaagcgcatgaggaggctcaagaggaagcgcagaaagatgaggcagagatccaagtaggcagatcgagatggattgtggacctgatgacatgcgtgggtacatacatttcttcggatgcgttggtgtgcctgtggagagatgtcaacctgccatggtgtcacggtccgccatcagttgaacgtcttgcctgcacttcagtaggccacttttcatggttctagttgtatttg

SEQ ID NO: 5423 - DNA, 165 bp, Zea mays
gtccaacggaagtgcgtcagacgtcatccgcgagaagctcgtcattattggagacggtgcctgcggcaagacaagtttactcagcgtcttcacacttggatatttccctacacattatatcccaaccgtcttcgaaaactacgtaaccgactgcagagtagatgg

SEQ ID NO: 5424 - DNA, 166 bp, Zea mays
tgaacgcgtcgtcaccatgaacgcggacgctcgcctcaagaaccgcaacggcacggccgagttcgcctacacgctgctctacgccaacacctccgacacgaagggcgacgccgccggcatcaccgccacaggcattccaaacagcatctccatttgagttctgtct

SEQ ID NO: 5425 - DNA, 353 bp, Zea mays
tcagtcgatcagggccttgaagtcggattcggctcgaggggagctctcaactgggccaaagtagttcatgagcaccaagggtggcgcctcattagctgtatctggctccatgctggcctagttcacttggttgtcaacatgctaagcttgctcttcattggaatccgccttgagcaacaatttgggtttgtgcgcattggtgtcatctacttgatatctggctttgggggcagtgtgttgtctgcacttttcttacacagtaactacgtctctgttcgtgcctctggggctttgtttggcctccttggatctatgctttcagagcttattataaattggactatctattcaac

SEQ ID NO: 5426 - DNA, 320 bp, Zea mays
caaaacacacgaatagccaaaatggtcaaggctgtcgctgtcctccgtggagactccaacatcaagggttccgtcacctttgagcaggccgacgagaactcccctaccaccatctcatggaacatcaccggccatgacgccaacgctgagcgtggcatgcacgtccaccagttcggtgacaacaccaacggctgcacatctgccggtcctcacttcaaccccttcggaaagacccacggtgccccctcgcgacgagaacgtcacgtcggtgacttgggtaacttcaagaccgatgctcagggcaatgctgtcggctccgt

SEQ ID NO: 5427 - DNA, 293 bp, Zea mays
  unsure (1)..(293): unsure at all n locations
cgtccgccanacacccactcactcgcttcattcgcctccgccgctcgtacaagcaggtggagacaggatgccggctggccacggcctgcgctcgcggacgcgcgacctcttctcgcgccccttccgcaagaggggctacatcccgctcaccacctacctccgcacctacaagatacgcgattacgtcgatgtcaatgtgaacggcgccgtccacaaggggatgccgcacaagttgtacgacggccgcaccggtcgcgtctggagactcaccaagcgcgccatcggcgtcgagg

SEQ ID NO: 5428 - DNA, 322 bp, Zea mays
cgcgacttggatagggtacgtgagtgaaaaagcgggatgacaagattgaccgagaggttcagaaggtgagagatgagcttgaacaattattggatgacgacgatgacatggctgagctttatttgtctagaaagttggctggggcatcttcccctgtgagtggttctggtggaccaaattggttccctgcctccccaactattggttcaaaaatatcaagagcaagcagagccagtgcagctactgtgcatgggaatgagaatgatgttgaagagctagagatgttgctggaggcatatttcatgcaagttgatggcacatt

SEQ ID NO: 5429 - DNA, 304 bp, Zea mays
ggacaaggcgatcaagaggtttcaggtgaggaacatcgtggaacaggcggccatcagggacgtccaggaagcatgcgtctatgatggctacgtcctcccgaagctgtacgccaaggtgcaccactgcgtctcgtgcgcgatccacgctcacatcgtccgcgtccgatcccgtgagaagcgcagggaccgcaagccgccggagcgcttcaggcgcatggaggataggcctgctggtggacaaggaggcccccgccctggtcctggtgctgctgctacagctccagctccagcaccggttgctgct

SEQ ID NO: 5430 - DNA, 323 bp, Zea mays
ggcctctggagatctccaacgccgactcggcgacagatgacgaccggagccgggacctggaccgggcggcgctgatgcggcagctggacgagacgcagcagagctggctcctggccgggcccggcgaccaggcgggcaagaagaagaagaggtacgtcgacctgggctgcgtcgtcgtcgaccgcaagatcttcatgtggaccgtcggcaccatcctcggcctcggcgtcttcatcggcttcatcatgatgatcgtcaagctcgtcccgcacaagcgcccgccgccgccgccgcccgaccagtacacgcaggcgctgcacaag

SEQ ID NO: 5431 - DNA, 316 bp, Zea mays
gataaggtgcgcacactgagaaagaagtacccttcccttgacatagaggttgatggtggtctaggtccttcaaccatagacgtggccgcatctgctggggccaattgcatcgtcgctggaagctctatatttggcgctgcggacccaggagccatcatatctgtgctgaggaagagcgtcgagggctctcagaacaaaaactgattttggtgtttctgctgtaaagtactccctccgtttttttttattcgtcgcgttttagttcaaacatgaactagcggacgactgatattcgagaatggagggagtacttcga

SEQ ID NO: 5432 - DNA, 327 bp, Zea mays
ccgtcgtctcccgttcggaacgccaagccccccctccggcgaaatggcccccaagcgaggtggcagggcgccggtgccggccaagaagaagacggataaagtgacgaaccctctattcgagaagaggccgaagcagttcggcatcggcggcgcgttgccgcccaagaaggacctgcaccggttcgtcaagtggcccaaggtcgtgcgtatccagcggcagcgccgcatcctcaagcagcgcctcaaggtaccaccggcgctcaaccagttcacccgcaccctcgtaaagaacctcgctacgaacctgtttaagatgcttctcaagta

SEQ ID NO: 5433 - DNA, 303 bp, Zea mays
gccgtacaaccttcgagttgctgctgtatatggtggtgtttccaagtttgaccagtttaaagaactgaaagcaggttgtgaagtagtcattgcaaccccagggagattaatagacttgctgaagatgaaggcattgaagatgtttagagcaacttatctggtccttgatgaagctgatcgaatgttcgatcttggatttgagcacaaatacgatcattgttggtcagttagaccagtcgacaacatactttttctgcacaatgcatacaagtagacgtttgcagagaatatgactgatctata

SEQ ID NO: 5434 - DNA, 190 bp, Zea mays
ggcgggcccgccggccgcttctgcgacggccgcctcgtcatcgacttcctcatggacgcaatggatatgccactcctcaacgcgtacctggagtctctaggcacgccaagctttcggaccggcgttaattttgctcaagctggatgttcgatcacaccagcaaagccgacatcagtcagcccattctcat

SEQ ID NO: 5435 - DNA, 313 bp, Zea mays
  unsure (1)..(313): unsure at all n locations
cggctcgaggtgcggaacgagccagagaacaggtatggcggcggcgcggcacctcagatccggcctccccctcctccgcgcccacctcgcatcctccgaatccgcggccgtcgctcaggtttcgaggggcttcgcgtcgcaggccgccaagcccaccgggaaggagatcaaggttccaaaggctctgtttggcggcacaggcaactatgccagtgcactgttcctcacagcagctaaatctaatgcattggacaaagttgaatctgagattanagctattgtagaggcttccaagaagagcccgttgttttct

SEQ ID NO: 5436 - DNA, 179 bp, Zea mays
aggctcgagcatcgggaacgccgccgacgccgcagaggagacgcatcgaggttagcacgcgaagaagcgaccatgagggccaagtggaagaagaagcgcatgaggaggctcaagaggaagcgcagaaagatgaggcagagatccaagtaggcagatcgagatggattgtggacctgatg

SEQ ID NO: 5437 - DNA, 299 bp, Zea mays
agttaatgcctatgagatttcaaggagcaaggctatattgcttgattatgatggaacactggttcctcaaacttcaatcaacaaggaacctaattcagagggtttgaacatcatcaataccctttgctcagatagtagaaacatcgcttttcctggcagtggtagagacaaagatatgttaggaaagtgggtctcctcatgtccaaaattggggattgcagctgaacatgggtacttcctgaggtggtctagcgaagaagagtggcaaacatgcactcaggccatggactttggatgga

SEQ ID NO: 5438 - DNA, 313 bp, Zea mays
  unsure (1)..(313): unsure at all n locations
tctgaagcgtgggtatgtggcctccaactccaaggatgaccctgccaaggaggctgctagctttacctcccaggtcatcatcatgaaccaccctggccagattggcaatggctatgccccagttctggactgccacacctcacacattgctgtcaagtttgctgagctcgttaccaagattgataggcgatccggcaaggagctggagaaggagcccaaatttctcaagaacggtgatgctggtatggtgaagatggttcncactaagcccatggtggtggagacttttctcagtatcctcctcttggtcgat

SEQ ID NO: 5439 - DNA, 319 bp, Zea mays
gtccttcagaaagataagtctgagcgcctccgcaaggttctggagtatataaatgaagtgcattccttatgtggagtccttggaattgattttggaagtactgtacacgaagttcatcccagtttgcatcagaatggtgttgagcagtccagaaatatcagtaacagcacactggagggccttgctagtacaatttataagctaaaagcggaacgaaagtctagaatccacaaggcgagagagatcatggaatcgttgtgtcaactttggagactcatggactctcctgaagaagaaaagagacagtgtagtaaggtat

SEQ ID NO: 5440 - DNA, 301 bp, Zea mays
cccttgcctccgatccccaattcctccttcggatctcgcattcagcgcacgcaggtgtgaaggaagggggacgcggaggaagatggggctcgcgttcgggaagctcttcagccggctcttcgccaagaaggagatgcggatcctcatggttggcctcgacgccgccggtaaaaccaccatcctctacaagctcaagctcggcgagatcgtcaccaccatccccaccatcggtttcaatgttgaaactgttgagtacaagaacattagcttcactgtctgggatgtcgggggtcaggacaaa

SEQ ID NO: 5441 - DNA, 298 bp, Zea mays
gttaccgttctctgcaagctcctgtttggtggcaagaaaccagtggcacctgtgaaacctgcagctgaggcgaagaagcccaaggccgcggagacggacggtgctggaagcagtggtgacaaggatgagaaagaggatgaaaaggaggagacaggcccacgtcggaggacccgaaggtagacatagacctgtttttgacgtgttttagctcttctggcgtctgcttattttgagaactcttaatatttgtgagtgtataataggagcttatgtcacctctgcggcttcccccgctgct

SEQ ID NO: 5442 - DNA, 301 bp, Zea mays
ctttgaaaagaaaacccaccccaccgccgcgggggaccaagcggacgagcaggaatggcgtacgcggcgaggcggaagaagcgggtgggccgctacgaggtgggccggaccatcggccagggcaccttcgccaaggtcaagttcgccgtcgacgccgacaccggcgcgcccgtcgccatgaaggtgctcgacaaggagaccatcttcgcccaccgcatgctccaccagatcaaaagggaaatatcaatcatgaagatcgtaagacatcccaacatagtcaggcttaatgaggtgttggcag

SEQ ID NO: 5443 - DNA, 299 bp, Zea mays
ccgcgggagggagagcagcagcgcacatcagacatgtcgtcggggcggtacatggcctactcgccctcgccgtcgaccaccctccactccccccgcatcgccggcctccgcgccccgtctgccgccgtggccgaacaggagaagtaccttgccgaactgctcgcggagaggcagaagcttggcccgttcgtcccagtgatcccgcatagtgtacgcttgctgaatcaagaaattttacgtgtttccacactattggagaacgcatcccttttaaatcaaagtggccttgaacatggtag

SEQ ID NO: 5444 - DNA, 300 bp, Zea mays
cccgcattccacctcgcggagatccagtccagccctagggtttcgccagcgggagccaaactccacgagcgggggaagaggggaaagcagggacgacgagggggcagccatggggcagcagtcgctgatctacgcgttcgtggcccgtggcacggtcatactggccgagtacacggagttcaccggcaacttcaccaccatcgcctcccagtgcctcatgaagctccccgcaagcaacaacaagttcacctacaactgcgacggtcacactttcaattacctcgtggaagacggattcac

SEQ ID NO: 5445 - DNA, 300 bp, Zea mays
tgcaaccgagagcgatcggcgatgggctccttcctctcgagcttagtcacgccccctccggccgccgacgaccccaactgcgccgtggtggccgcccactccaaggccacctacgacgagcagtgggcggcccacaagagcagcagcaagctgatggtgatcgacttctcggcctcctggtgcgggccctgccgcttcatcgagccggccttcaaggagctggcctcccgcttctccgacgccatcttcgtcaaggtcgacgtcgacgagctcgcggaggtcgcaaggacatggaaggta

SEQ ID NO: 5446 - DNA, 301 bp, Zea mays
  unsure (1)..(301): unsure at all n locations
gtcncctgctccattctcagccgccgccaatcccttcccgtgctccgcaaccgctgagtgagaagaagagatggccggcaagggcgatggcccggctatcggcatcgatctcggcacgacgtactcttgcgtcggcgtgtggcagcacgaccgcgtcgagatcattgccaacgaccagggtaaccgcaccacgccctcgtacgtcgccttcaccgactccgagcgcctcatcggagatgcggccaagaaccaggtcgccatgaaccccatcaacaccgtctttgatgccaagcgtctcatc

SEQ ID NO: 5447 - DNA, 293 bp, Zea mays
caagaagaagagagatgaacgccgacttcggcgcgcccaaggagctcgccggacgcctgcagcagcggcgggccctgtaccagccccgcctcgcgccatgcctccagggaccgacggtaagggcggagtacggtgacgcggacacaaccatcgatcgcacctgtgcgccagccgtcgcgcaagccttcccgcacacctttggccagccgctcgtcagcttcgtcgcgccggccgccgacgccggcgccgttcgaggagcgccacgcgatcagggatggcgtggtgttctctgg

SEQ ID NO: 5448 - DNA, 296 bp, Zea mays
cctgcgtgcaggtgcagtttatgaaagaaagtatctgcttgggacttcgatggctaggcctgttattgctaaggcaatggttgatgttgccaaggaagttggtgcggatgcagttgcccatggttgcactggaaaaggcaatgatcaggttcgctttgagcttacattctatgctttaaatcctgaacttaaagtggtggcaccttggagggagtgggatatcacaggacgtgaagatgctattgaatatgcaaagaaacataatgtacctgttccagtttcagagaaatcaatat

SEQ ID NO: 5449 - DNA, 297 bp, Zea mays
aaaagcccttgcccacgccatgacgctcagcaagaagcaaggcgcaggcactgatcagcaggccttgctggatgctcagctgcagctctggcaccacaccatcgcttttgtcaagtccatggcgctcaatgccgccgtagacctccgcatagcggacgccatccacctgcacggcggctcagccaccctctcgcagatagtcaccaaggtcacactccacccgtccaagataccatgcctgcgacgcctcatgcgcgtgctcactctcaccggcgtcttcagcgtcaactccggcgc

SEQ ID NO: 5450 - DNA, 292 bp, Zea mays
aaagaagataagtgagaggatgaagcttcttcaagatcttgttcctggatgcagtaagatcactggcaaggcagtcatgctcgatgagattatcaactatgtgcagtcattgcaacgacaagtcgagttcttgtcaatgaaactcgcaactgttaaccccgagcttggctttgacattgagcagatcatatccaaacaaatgctgctttcacaagacagacatcttgctttctatggagtcgaaccaggatcaagcggccttactggcccatttaaccaaggaatcatgcag

SEQ ID NO: 5451 - DNA, 91 bp, Zea mays
  unsure (1)..(91): unsure at all n locations
gcgagcttctcctcagctccaaccccgtgctcaagaaggtgcccgtgctcatccaccacggcaagcccgtctgcgagtcncagatcatcgt

SEQ ID NO: 5452 - DNA, 281 bp, Zea mays
cggctcgaggctattcaggttcttgccacttttgttacaaccatgttcttggacagagctgggcggcgaatcctccttattatttcttctgctgggatgactctaagtcttcttgtagttgctattgtattttacatcaaggataatatttcacatgactctgacttgtatgacatcttaagtatggtgtccttggttggtgtcgtggcttatgtcattgccttctccttcggtatgggtgccattcttggatcataatgtctgagatcctcccagttagc

SEQ ID NO: 5453 - DNA, 284 bp, Zea mays
ttcggctttgactctgggaaaagctctcctcctacaagagcaatcagcctctccatctaacggaagctctagatgttttgaccgcaatccactcgagaagggttgtaccggggattctgtttctcctgccagcacaagcgcccgtatagacgggccggacgattatgttgaaggattatctttgctccatctagcatgccgcgccgcggacctgggcatggttgagctgctcttgcagtacggcgccaatgtaaactccacagattcaagagggcggacgccgc

SEQ ID NO: 5454 - DNA, 288 bp, Zea mays
ggacatcaagatgtactccagctacgaggacctctccctggcgctcgagaagatgttcagctgcttcatcgctggtcaaagtggtctgcataaatcatcgagcaaagacaggctgactaatggctcaaaggtggatgccctcaaagaccaggagtatgtccttacatatgaggataaggatgcagactggatgcttgtcggtgatcttccctgggattattttacctctatctgccggaagctcaaaatcatgaggggctctgatgctgttggaatagctccacgaac

SEQ ID NO: 5455 - DNA, 289 bp, Zea mays
ctgcagccttccatccacgaactcccgttctccatttccagccatggcggtgtcgatcgagctcaccaaggagtacggctacgtcgtgctggtgctggtggcctatgtcttcctcaacctttggatgggcttccaggtcggcaaggcccgcagaaagtacaaggtgttctaccccaccatgtacgccatcgagtcggagaacaaggacgccaagctcttcaactgcgtgcagagggggcaccagaactctctagagtggatgcccgttttcttcgtcatactgctgctg

SEQ ID NO: 5456 - DNA, 292 bp, Zea mays
aagcagaagtggaaggaagcaggcggccaccatggtgaatggacgcacgggacagcgcgtcaggctctacgtccggggcaccatcctcggatacaagaggtccaagtcgaaccagtacgagaccacgtcgctcattcagatcgagggggtgaacaccaaggaggacgtcgcgtggtacgctggcaagcgcatggcgtacatctacaaggctaagactaagggcaggggagacgctaaaaggtgcatctggggcaaggtcacccgcccgcacggcaactcgggcgtcgtccgg

SEQ ID NO: 5457 - DNA, 292 bp, Zea mays
aaatcactgaagtaaatgaaatcttcaaagatcttgctgtgctagtccatgatcaaggagcaatgatagatgacattgattcccatatagagaatgctgttgtagcaacttcgcaggctaaaggtcagctttcaaaagctgccaagactcagaagtcgaactcttcgctgatatgcttgttactggttatcttcggcgtggtcctgctcatagtgataatagtacttgcagcataaaagcttggaaggcagctgaggttccgatgatcgagcttattgcgatgaattcctta

SEQ ID NO: 5458 - DNA, 289 bp, Zea mays
  unsure (1)..(289): unsure at all n locations
ctgggcagcaagattggatgaactaccaaggcgctcagcaagcacggaaggacatgaaagttccttgtgaaataatcagggtgccgcaggtggacattttgtgttcatagacaacccttcagggttccactcggctgtcttctatgcgtgccgtaatcttctatcagtanatggagaggagggattcacatttcctgatggcctaatatctgcgtgaagtggcatgttcaacaagcttgctcaacaacagtttacataaagcaaagatatacgattgtggaaatcattg

SEQ ID NO: 5459 - DNA, 288 bp, Zea mays
cggctcgagcgagctccgaatgccgcagcatcaggcgcggccccctcgcgtgtgaccgagatggctgtgccgaatcaggggaccgttgattaccccagcttcaagctcgtcatcgtcggcgatggtggaactggtaaaactacatttgtgaagaggcatctcactggagagtttgagaagaaatatgaaccaaccattggtgtggaagttcatccgttggatttcaccactaactgtggtaagatcaagttctactgctgggataccgcaggcaagagaagtttggtg

SEQ ID NO: 5460 - DNA, 294 bp, Zea mays
ggaagttgttgtccagacggcctcgtggaatcgattccaagaagaggctctggactaatgtccttcttgctcttaatgtcctggcttatgtcgctcaggtagcatcacaaggaaagcttctcatgtggggagccaagatcaacagtctgattgatagagggcaattttggcgtttggcaacatcatctctacttcatgcaaatctcacccaccttgcattcaattgtttctctttgaactctattggggccatggttgaaatgttaagtggtcctagaagatatctagctgttt

SEQ ID NO: 5461 - DNA, 300 bp, Zea mays
caagaggacgcctcctacctggctcaagaccgctgcctccgacgtggaggagatgatcacaaaggcagcgaagaagggacagatgccgtcgcagatcggcgtcctgctccgtgaccagcacggtatcccccttgtcaagagcgtcaccggcagcaagatcctccgcatcctcaaggcccatgggctggcaccagaaatccccgaggacctgtacttcctcatcaagaaggcggtggcgataaggaagcaccttgagaggaacaggaaggacaaagactctaaattcaggctcattcttgt

SEQ ID NO: 5462 - DNA, 285 bp, Zea mays
ccaagatggaagagggtgcttctgaagattgggggcactgcctatgtggagcagctcatcaaaatgttgatcccaaggtgattatgctgatcgctagagaagttcaagtggcatgccatcatggtgtggaggtggcaatcgtggtaggagggcggaatatattctgcggtgacaattgggtagctgcaacaggcactgatcgagcctcaacgtacccaattggaatgatggcatcagtgatgaattcagtacttcttcaagcatcgctagaaaagataggtgtgg

SEQ ID NO: 5463 - DNA, 287 bp, Zea mays
caaattcctgatcgatggatttccaaggaatgaggagaatcgtgcagcctttgagaatgttaccaaaatttctcctgcatttgtgctattctttgactgttctgaagaagatatggagaaacgactcctggggcgcaatcagggaagggttgatgataacattgaaactatcaaaaaaaggttcaaaacctttgttgactcaactctgcctgtcattgagcattacaactcaaaggacaaggttaaaaagattgatgctgcaaaaccaatccccgaggtgtttgaag

SEQ ID NO: 5464 - DNA, 287 bp, Zea mays
gagaagccgtcaacgccgcgcgccgcgccggtgcggagatcgataccatgaagaagtacaacgctggtacgaacaaggcggcatccagcggtacatccctcaacaccaaacgcctcgacgacgacaccgagaacctcgcccatgagcgagttccaagtgatctgaagaagaatctcatgcaagcaaggctcgataagaagctgacacaggcacaacttgctcagatgataaatgagaagccacaggtgattcaggagtatgaatcaggcaaggcaatccccaaccag

SEQ ID NO: 5465 - DNA, 288 bp, Zea mays
cggttatggcctctgctgctgcgacggctacgatggggacggggaaggtggtttgcgtcaccggcgcatcagggtacatcgcgtcctggattgtcaggctcctactcgaccgcggctacaccgtccgcgccaccgtgcgagacaccgctgacccaaagaaaacattgcacctgactgcgttggatggtgctaaggataggctgcacttatttaaagctagcctgctagaagagggttctttcgatgctgcagttcatggatgcgacactgtatttcatactgcctctc

SEQ ID NO: 5466 - DNA, 306 bp, Zea mays
ctctagatcgcgagcggccgacctgtctcaagaccgctgcctccgataagttcagatatcaaacttcataaggattcaagccatactgctgcagaagagttttgggtacaacacagaggacacaacaggtccattaaaccaacgaagccacaaccacgattcatgacacacaaaccacagatgtttattagacgacgacatccatatagaggtacaccagagggcaccagacgacgcagatacccaggtacagcagcagcttaaatgaaccatggcttactgaccaccgcggaggcggagcaccag

SEQ ID NO: 5467 - DNA, 280 bp, Zea mays
gccgccgccccgccgtgttgctcgccgacaccgccccgccggcagccaaaatgccgttcaagaggttcgtggagatcgggcgagtggcccttgtaaactacggcaaggagtatggccgcctcgtcgtcatcgtcgacgtcgtcgaccagaacagggctctcgtggatgcccccgacatggttcgttgccaaatgaacttcaagcggctttccctgactgacatcaagattgacattaaacgtgtcccaaagaagactacactgatcaaggcaatggagga

SEQ ID NO: 5468 - DNA, 273 bp, Zea mays
ctgggttcaaagatgatgtggtcacccacctttttgctggtcttggtgctggcttctttgctgtttgtgttggttccccagttgatgtggttaagtcgagaatgatgggtgactcagcctacaaaagcactctcgattgttttgtgaagacgctaaagaatgatggccctttggcattttacaaaggcttcctgccaaactttgcaagactgggatcttggaatgtgattatgttcttgacattggagcaggttcaaaagctgtttgtgagga

SEQ ID NO: 5469 - DNA, 279 bp, Zea mays
gccgacgtcgaagctgtcgacgggcatcaagcgcgcttcgcggtcgcacgcgtaccatcgccgtgggctgtgggccatcaaggccaagaacggcggcgccttccccaaggccgacaaggccgccgccgccgtggaacccaagttctaccctgccgacgacgtcaagccccgcgttcccagcacccgcaagcctaagcctaccaagctcaggtcgagcatcacgcctgggacggtgctgatcctcctcgcagggcgcttcatggggaagagagtggtgtt

SEQ ID NO: 5470 - DNA, 280 bp, Zea mays
accagcctcccagcgtcgtccccggcggtgacctggccaaggtgcagcgtgccgtgtgcatgatctccaactccaccagtgttgtggaggtcttctcccgcattgaccacaagttcgacctcatgtacgccaagcgcgccttcgtgcactggtacgtcggtgagggtatggaggagggcgagttctccgaggctcgtgaggatctggctgcgctcgagaaggactacgaggaggtcggtgctgagtttgacgagggtgaggacggcgactgaggtgacga

SEQ ID NO: 5471 - DNA, 279 bp, Zea mays
cggctcgaggccaccctgggggcgtccaccttgaaatgactgggcagaatgtgaccgagaccatcggtggatcacggaccgtgaccttcgacgatctgagcgaccgctaccacacccactgcgacccaaggctgaatgcctcccagtccctggagctcgcctttatcatcgcagagaggctgaggaagaggaggatgcgatcggggctcaacagcagcctgccactgccgccactggctttctgagtagccggagccaaacacaaaggagggtaggaat

SEQ ID NO: 5472 - DNA, 281 bp, Zea mays
gacagatggaacgagcaggttgatgctagagtctgcagattttctacttgattccaaatgtgcagaagctttatacattctatcctacgcttgggggaatgatgatacagttcaggagagcctcggtatccgcaaggggacaattggagcatggaaacgatacagccatgcattgccttacaattatgatatccagagtgcagtggattaccattcaaggctagccacaaaaggatacagggcgctgatatacagcggcgaccacgatgcggttgtacccc

SEQ ID NO: 5473 - DNA, 274 bp, Zea mays
  unsure (1)..(274): unsure at all n locations
cggcggcttcgtgatgggcctgcggttcaaccacgcgtcggcggacggcatgggcgcggcgcagttcatcaacgcggtgggggacatggcgcgcgggctggcggaccgagggtgctgcccgtgtggcaccgggagaagttcccggacccgagcatcaagccaggcccgctccnggagctgnccgtggtggcgctggactacgtcgtgctcgacttcnccacgggctacatcgacgggctcaagcgggagtacaaggcgcacagcggcacgttct

SEQ ID NO: 5474 - DNA, 213 bp, Zea mays
gtacgtcggtgagggtatgccggagggcgagttctccgaggctcgtgaggatctggctgcgctcgagaagggctacgaagaggtcggtgctgagtttgacgagggtgacgacggcgacgagggtgacgagtactagacgctctactggcgcggcgtcgtcgggcttgtgtgccactgctatcctgtgatctgccctgagtggctcctatcgtg

SEQ ID NO: 5475 - DNA, 237 bp, Zea mays
gccccatgcgcgcaccaaggccgcgggcgtgctctgctcctacgaccccaacgtgcgcctcccgctctggccgtcgcccgacgccgcacgcgagggcatcctcagcatctggaatgaggccgacttcatcaaggtcagcgacgacgaggtggccttcctcacgcgcggggacgccaacgacgagaagaacgtgctgtccctgtggtttgacgggctcaagctgctcgtcgtcaccga

SEQ ID NO: 5476 - DNA, 285 bp, Zea mays
caccaacccatacgcataccagaggctctctgattttacttctcagcggtagatcggctgagcgagcgagcgagcgaggcacacggagctagctaaacagagcacacggatagaaaagcaagatgtcggacggcacggcgacctgcatcgacatcatcctcgccattatcctgccgccgctcggggtcttcttcaagttcggctgcggggttgagttctggatctgccttatcctcaccttcttcggctacctcaccggcatcatctacgcggtctgggcaatca

SEQ ID NO: 5477 - DNA, 286 bp, Zea mays
ctccgatgaagctgtacggggcggtgatgtcgtggaacgtgacgaggtgcgcaacggcgctggaggacgctggctccgactacgagatcgtgcccatcaacttcgccaccgccgagcacaagagccccgagcacctcgtccgcaacccgtttggtcaggttccagctctgcaggatggtgacttgtacctcttcgaatcacgagcaatctgcaagtacgctgctcgcaaaaacaagccagagctgttgagggaaggaaacctccaggaggcagccatggtggatgt

SEQ ID NO: 5478 - DNA, 298 bp, Zea mays
gctttattgtcagatgagatattccagcctaaggttatttggtcccttgctgatgtacaggcaacatgtggaacacttggcttatctacagcaactgtgaaactgatagggccagatggagaggagagaatagcatgttcagttggaacaggtccagttgatgcagcttacaaggctgttgaccaaataatccagattccaaccgtcctccgagaatacggcatgacttcagtcacagaaggcattgacgctattgcgacgactcgagtggttgtcaccggagacgtggccaacaact

SEQ ID NO: 5479 - DNA, 264 bp, Zea mays
tcaacaacaagctgcagctggtgatgaagagcggcaagtacaccctgggctacaagaccgtcctcaagacgctgcgcaactccaagggaaagctgatcatcatcgcaaacaactgccctccacttaggaagtctgagattgagtactacgccatgctggccaaagttagtgtgcaccatttccacggatacaatgttgatcttggcactgcttgcggaagtactacagggtgtgctgcctcataatcatcgacccaggtgactc

SEQ ID NO: 5480 - DNA, 293 bp, Zea mays
taccattgcgcaatttaagcacatacttggagtgaaaccagcaccacagaatgcactaagcaatgttcctgtcaaaacttattcaagatcactggaacttccaaaagagtttgacgctagatctgcatggtcccgttgcagcacaattgggaacatacttgatcaaggtcactgtggctcttgttgggcttttggtgctgtggagtgcctccaggaccgtttttgcattcacctcaacatgagcattttactttcagtcaatgacctactggcatgctgcggttttatgtgcg

SEQ ID NO: 5481 - DNA, 151 bp, Zea mays
gtttctcacatcaactcactcggtaccgggatcgctcttgctggacgtttcctatactcgcaattgaagaggcttaagcccaagcccaaggctgcttgatcatagacctttgcaggtccatccgatagaacttttggagttatgctatgcc

SEQ ID NO: 5482 - DNA, 287 bp, Zea mays
cggctcgagactcggactccaggagcggcgatgccaagcgcgaggagaagatgacagagctaagcaaaaatatcagggatatgaagtctatcctttacggcaatggtgaatcagagcctgtaactgaagcatgtgtacaattgacccaagaattcttcagggagaacactttacggctattaatcatacatcttccaaaactagatttggagactaggaaagatgctactcaagttgttgcaaacttgcaaagacagcaagtatcctcaaagatagtagcgtctgag

SEQ ID NO: 5483 - DNA, 287 bp, Zea mays
atccctcccttccgcgtggtgtgctctctgttcccctttacgccgtttcctctcccgactctctcctcgccggcgacgccgcggagtaggtgcaacagaaactgctcgaggcggaggcggagctgcggctgcacagacatgggtgatcacgaggcgcgcggtgatgacttcgagaagaaggcggagaagaagctctcgggctggggcctcttcggctccaagtacgaggacgccgccgacctcttcgacaaggctgcgaactccttcaagctcgccaagaactggag

SEQ ID NO: 5484 - DNA, 278 bp, Zea mays
ggctgggtagctacagggagcatggatcaaaagctgatcatctgggacctcacgcaccaatccagccgatgcatttgcgaacatgatgagggcgtgacatcgctgacatggctaggttcgtcaaggtacgttgcgtcaggatgcattgacggcaaggtgcgcatctgggacagcctctctggagcctgcgccagggagttcagtgggcatgcagatgtagtacagtcgctggccatcactgctgacggcaacaccatggtctccgcctcatcagatgg

SEQ ID NO: 5485 - DNA, 316 bp, Zea mays
cagcgagcgtctctcctctcccacgcatcggccaaggaagagagagagatcgccgctccccttctcggcgtcggtggtgcgggtgccctccctcctcgagcgagatctgtctggtcacagatctatctgacaaaatggtgaagatctgctgcatcggtgctggctatgtcggtggcccaaccatggccgtcattgccctcaagtgcccagacattgaggtcgtcgtcgttgacatctccaagccccgcattgaggcctggaacagtgacaccctgccaatctacgagcctggtctcgatgatgttgtgaagcagtg

SEQ ID NO: 5486 - DNA, 328 bp, Zea mays
acacgatcgagcacacaagcacgaagactcgtttaggagaaaccacaaaccaccaagccgtgcaagcatcatggagtactgtcagcaggggcagcgcggccactgcgccacgggccatgtcgaccagtacggcaacccagtcggcggcgtcgagcacggcaccggcggcatgatgcacggcactggaaccaccggcggcatgggccagctgggtgagcacggcggcgctggcatgggtggcgggcagttccagcctgcgacggaggagcacaagaccggcggcatcctgcatcgctccggcagctccagctccagctcgtcggcagac

SEQ ID NO: 5487 - DNA, 323 bp, Zea mays
ctcaatgacaggtgtcaggagctgttacgatgagggcaagcgtacagctgaaacgttgaccatggattaccaccgtggtgccaaccttgaggttaggatcgcacgtatcttcaatacatattgccctcgcatgtgcattgacgatggccgtgttgtcagtaactttgttgctcaggcactgaggaaggagcccttgacggtttatggtgatggaaagcaaaccaggagtttccaatatgtttctgatctggttgacggtctgatgaagctgatggaaggcgagcatgtcggagcattcaacctgggtaaccctggcgagttca

SEQ ID NO: 5488 - DNA, 313 bp, Zea mays
ctcctgcgtcgcgccggatgtcggcttgctccgtgaggtgaccgtcttcgacgtcagcttcaactcgctcgttggcccgctgccgcagcaggtggccgggatgcgcaaggtggagcagctggacgtcgcgcacaaccgcctgtccggggccgtcccggaggccatctgcgccctcccgcggctcaagaacctgaccatctcctacaacttcttcaccggcgagccgccgtcctgcgcgcgcgtcgtgccttcggacggtgacaggaggaactgcctgcccaaccgccgcacacagcgcacgccgcagcagtgc

SEQ ID NO: 5489 - DNA, 158 bp, Zea mays
  unsure (1)..(158): unsure at all n locations
gccattgctcaccgcacaagtgcacgctcacctggcacctcacacacgcagctaagtatctaactccggatgcagaacaaggaatatctcgacatggccgaggtagagaagcatggcctgcagctgctggacttctgngtgagcccattcgggcagcg

SEQ ID NO: 5490 - DNA, 272 bp, Zea mays
tgttccctctcctgatcgtcctgttcctcacagcagcagccatggcggccgagccggagaagcaggcggcccccgcggcacaggagacggccgtgcacatcgtgtacgttgaccgccccgaggacgccgaccctgaggagttccacatccgcaccctcacccccgtcctcggcagcgaacagaaggccagcgacgcatgctctaccactacaagaacgcgccacggttctcgcgaactcacccccagcagtcaggattcaaggacaccagtg

SEQ ID NO: 5491 - DNA, 336 bp, Zea mays
ctgatgacgatggtctgattcgggagtgtctgattgacttctacaccagttcagggaagagaaagcccgaccaagtcatcatcttcagggacggtgttagtgaaagtcagtttaatcaggtgctgaacattgagttgcaacaaatcattgaggcttgcaaatttcttgatgagaaatggaatcccaagttcacattgatcattgcccagaagaatcaccacactagatttttcattcctggaaagccagataatgttccagctggcactgttgttgacaacaaagtctgtcatccaaggaacttcgatttctacatgtgttcacatgctggaatga

SEQ ID NO: 5492 - DNA, 307 bp, Zea mays
  unsure (1)..(307): unsure at all n locations
cncgtcatcgatctcgtttcaaatccatccatcctcgtttcctccgtcccgcagcatctcaaccccatggccaagatcaagatcgggatcaatgggttcggcaggatcggaaggctggtggccagggtggctctgcagagtgacgatgtcgagctcgtcgccgtgaacgaccccttcatcagcaccgactacatgacctacatgttcaagtacgacactgtacacggacagtggaagcaccatgaagtcaaggtgaaggactccaaaacgcttctctttggtgagaaggaggttgctgtgtatggct

SEQ ID NO: 5493 - DNA, 342 bp, Zea mays
caacgtcaaatcaacacaggctgttgtttgcttcttttggtaaaggctttagctgcggcagatccaccggcggcgccccgagaatcgaagatgccggtgaaggtgttcggatcgccgacgtcggcggaggtcgcccgcgtcctggcctgcctgttcgagaaggacgtcgagttccagctcatccgcgtcgactccttccgcggcaccaagcgcctgccccagtacctcaagctccagccgcacggcgaggcgctcaccttcgaggacggcaacgtcaccctcgtcgagtcgaggaagatcctgcgccacatcgccgacaagtacaagaatcacgggtacagg

SEQ ID NO: 5494 - DNA, 295 bp, Zea mays
ccatcgccatccggtcgagcacttcggcctctgctccttgcacgttcaatctcacctcccaccatgcgtaaacagaagtaccacatcaagattgcgcttactggcgacgttcactctcggcagtcgacgagcagaggacacctgatctacaagcttggacgcattgacaagcgcgtgcttcagacgtctgagaacgaggctgctgcaatgcacaagcggtccttcaagtacgcgtgggtgctcgacaagctcaaggctcagcgtgagacacgtatcaccattgatatcgctctgt

SEQ ID NO: 5495 - DNA, 305 bp, Zea mays
cctccttgtgctccgccggcaatggcgtccaccgccgtcaagctcatcgacatcgcagtcaacttcacagatggcatgttcaagggcatctaccacggcaagcagtgccacgccgccgacatcccggccgtacttgcgcgcgcgtgggctgcacgcgtcgaccgcatcattgtcaccggatgctccctgaaagagtccagagaggcattgcagatcgccgagaccgacgggagactgttctgcactgtgggagtgcaccaacgagatgcggggagttcgaggagagtggagacccgaaggtcatt

SEQ ID NO: 5496 - DNA, 280 bp, Zea mays
gcgagacttatcgtcgtccgcggcgaagatggtgtcgctgaagctccagacgctgctcgccgcgagcgtcctcaagtgtgggacaggcaaagtctggcttgaccccaatgaagtcagcgagatctccatggctaactcccgccagaacatccggaagttggttaaggatgggtttatcatcaggaagcctcagaaggttcactctaggtcacgtgcaagaagggcacatgaggccaagcagaagggaaggcactctggatacggcaagcgcaggggtacc

SEQ ID NO: 5497 - DNA, 251 bp, Zea mays
tgctcgattgtacatcggcaacctggatccccgggtgaccgctcgggagctggaggacgagttccgcacgttcggggttcttcgcagtgtctgggttgcccggaaaccacctggctttgcgtttattgattttgatgataagaaggacgcagaggatgcaatccggtgacctagatggcaagaatggatggagagttgagtaacctcgaaatgccaccgttggtcttgaagtccgtgaccggaatgttggg

SEQ ID NO: 5498 - DNA, 295 bp, Zea mays
gtggagcctgctttgacaatctctaaggttttgcgtgctatctgctccctgcttactgatcccaactcagacgagcctcttgtccctgagattgctcacatgtacaagacggatcggcctaagtacgaggcgagagccgcagctggacccagaagtacgccatgggatgacatgttcggcgttactggctaaatgcagacgattgtggtgttgcccatgaaactgttatcagggacgtatgttcttctgttccttgtgcgatctccgatccatctctaggatccgagttctagtc

SEQ ID NO: 5499 - DNA, 301 bp, Zea mays
cgttggatcacaaggacatggtccatgattctgccatcgactactatggcaagcgccttgccactgcctcttcagacttcaccgtgaagatcgtcaacattggtgctgcaaatgccccatcccaggtccttgcaacgctaagtggccactatggtcctgtgtggcgtgttgcttgggcccatccaaagtatggtgcaatccttgcatcgtgcagttatgatggccgtgtcattatttggaaggaggatgcacgaggcaattggtctcaagtccacgtcttcagtgacaacaagtcatctgt

SEQ ID NO: 5500 - DNA, 302 bp, Zea mays
gcggcggcaccggcaggcggcggccctcgggcattgtcccagcgggagcaggacatccagatgatgctcgccgccgatgtccacctcggcaccaagaactgcgacttccaggtggagcgctacgtgtacaagcgccgcactgatggtatctacattattaaccttggaaagacctgggacaagcttcagttggccgccagggtcatcgttgccattgagaatccgcaggacattatcgtgcagtctgctaggccctatggccagagggctgtcctcaagtttgcgcagtacactggtgccca

SEQ ID NO: 5501 - DNA, 301 bp, Zea mays
ctttcaatgcccatgcctatgccaaaaaatccaaagattgcccttatgttcttgacaccaggttcattgccctttgagaaattgtgggagaagtttttacagggacatgagggaagatactccatctatgtgcacgcatcacgtgaaaagcctgttcatactagttctttgtttgctggccgggatattcacagtgatgcggtagtatggggattgatttcaatggttgatgctgagaaaagattgttagcgaatgcactggaagatgttgataatcaagtttttatcttgctttctgaca

SEQ ID NO: 5502 - DNA, 232 bp, Zea mays
cgaaggtgcgctcccagatcctctctcaggagtttgggtgggacaaggacctggccaagaagatttggtgttttggacctgagaccactggcccgaacatggttgtagatatgtgcaagggagtgcagtatctcaatgaaatcaaggattctgttgtggctggtttccagtgggcatcaaaggagggtgcactggctgaggagaacatgcgtggaatttgctttgaggtatg

SEQ ID NO: 5503 - DNA, 306 bp, Zea mays
aaccaagcaccatagtgctatccgggctcagtggcagtggcaaaaccactattttctaccagcttcgggacggatcatcacatcaaggaactgtgacttcaatggaagaaaacagtgatacttttgtgctgcattcggagcaagaaaggaaaggcaaagtaaaacctgtgcatattgttgatgttcctggtcatgctaggctcaagcccaagcttgatgaagtcctgcctaaagctgctggggttgtctttattgttgatgctcaggatttcttgtctagcatgcaagctgctgcagagtaccttt

SEQ ID NO: 5504 - DNA, 293 bp, Zea mays
gcggtgctggacggcggcatcccgttcaacaaggcgtacgggatgacggcgttcgagtaccacggcacggactcgcgcttcaaccgcgtgttcaacgagggcatgaagaaccactcggtgatcatcaccaagaagctgctggacttctacacgggcttcgagggcgtgtcgacgctggtggacgtgggcggcggcgtgggcgccacgctgcacgccatcacgtcccgccacccgcacatctccggggtcaacttcgacctgccgcacgtcatctccgaggcgccgccgttccc

SEQ ID NO: 5505 - DNA, 293 bp, Zea mays
cggctcgagcacaaattctgtgtttgagccatcaagtgtgatggcaaaatgtgatcccaggcatggaaagtacatggcatgctgtttgatgtaccgtggcgacgttgttccaaaagatgtgaatgctgctgtccattcaatcaagaccaagagagcagtgcagtttgttgattggtgccctactggtttcaagtgtgggataaactaccaaccaccaactgtagtccctggaggggacctggccaaggtgcaacgagcagtctgcatgatcagcaacaacacagccgtggctg

SEQ ID NO: 5506 - DNA, 296 bp, Zea mays
cctgagtactacatgacgcagcagcttacggacaagagcgacgtgtacagcttcggcgtgctgatgctggagatggccacggcgaggaagccgctggagcgcggccggtacattgtcagggagatgaaggtggcgctggaccgtaccaaggacctgtacggcctgcacgacctgctggacccggtgctgggctcgtcgccgtccgcgctggccgggctggagcagtacgtggatctggcgctgcgctgcgtcgaggaggccggcgccgaccggccatcgatgggcgaggtggtcgg

SEQ ID NO: 5507 - DNA, 298 bp, Zea mays
gggcgctcatctaaggactggttgggtggaagggctgctagtttcaacatcattcccagcagcactggagctgctaaggctgttggcaaagtgcttcctgtcctcaatggaaaattgactggaatgtctttccgtgtcccaactgtcgatgtttctgttgttgatctgactgttaggcttgagaagtctgccacctatgatgagatcaaggctgcggtcaaggccgaggcagagggtagcctcaagggcattctgggttatgtcgaggaggaccttgtttccaccgatttccagggtg

SEQ ID NO: 5508 - DNA, 303 bp, Zea mays
  unsure (1)..(303): unsure at all n locations
cgcagcactagaggaatgggctgctactcgcattcagaatgcgtttcggaaatacaaggcaaggaagaccctgcgttgtctcaagggagtcanaagattgcgcgttgtgggtcaggcgaatccggttaagaagcagactgctgccacgctgagttacatacagtcttggaacaagttgcagtcggagataagaaaccgacgtgctttcatggtcaccgaaggacgcaacaggaagaagaagcaggagaaccaaatgaaacttgaggcaaaactgcataatttgcagattgaatggaatggagg

SEQ ID NO: 5509 - DNA, 297 bp, Zea mays
gtttgcagctgatgctgagagcaagattgtccctgccactgctatccctgatgactggatgggtcttgatgttggccctgatgccaccagaacattcaacgaagcattggacaccaccaagactgttatttggaacggccccatgggagtgtttgagttcgagaagtttgcagctggcactgaggcgattgccaagaagctagctgagcttacaaccacgaagggtgtcactaccatcatcggcggcggcgactctgttgctgctgtcgagaaggctgggctggccgacaagatgag

SEQ ID NO: 5510 - DNA, 288 bp, Zea mays
ctcttgactatgatcaggagctggagaacgccaagagcagctcatctgtggagaagagctacgagctgcctgatggccaggtgatcaccattggggcggagaggttccgatgccccgaggtcctcttccagccttccttcattggtatggaagctcctggcatccatgagaccacctacaactccatcatgaaatgcgacgtggatatcaggaaggacttgtatggtaacattgttctcagtggtggcacaaccatgttccctggcatcgctgaccgtatgagcaagg

SEQ ID NO: 5511 - DNA, 289 bp, Zea mays
cctgatcgtcctgttcctcacagcagcagccatggcggccgagccggagaagcaggcggcccccgcggcacaggagacggccgtgcacatcgtgtacgttgaccgccccgaggacgccgaccctgaggagttccacatccgcaccctcacccccgtcctcggcagcgaacagaaggccagggacgcagtgctctaccactacaagaacgccgccagcggcttctccgcgaactcaccccccagcaggtcaaggatctcaaggagcaaccaggtgttctccaggttgtgc

SEQ ID NO: 5512 - DNA, 290 bp, Zea mays
agcagcagcagcaggcggcgccgaggagcggcatcccactcagtgcttgcaaccatggctaggggattgaagaagcacttgaagaggctcaatgcgcccaagcattggatgctcgacaagcttggcggagcttttgctcccaagccatcttctggacctcacaagtccagggagtgccttcctctgatcctcatcatcaggaacaggctcaagtatgctctgaactaccgtgaggtcatttctatcctgatgcaacgccatgtacttgttgatggcaaggtcaggactga

SEQ ID NO: 5513 - DNA, 289 bp, Zea mays
gcccactcaagggtattatgggctacgtggaggaggatctggtttccaccgacttcaccggtgacatcaggtcgagcatcttcgacgccaaggccgggattgccctgaacgaccacttcatcaagctcgtctcgtggtacgacaacgagtggggctacagcaaccgcgtcgtcgacctgatccgccacatgttcaagacccagtaggctagtagagagatagatttctgcctccctatcgagggtcgtcccaatggcctttggtcgcagacaactttgctgcttgtcta

SEQ ID NO: 5514 - DNA, 292 bp, Zea mays
gggtcggatctgagacgaggcgagacgactccccctcccctcaaccggaacttgttttaccccatctcatcccacagactccacccacccgcccgctgcctccgccggatctcgtcggactcggatccgcccgaccaccccgcgccgccgccgcgcagagcagcagcagatcagagaagatggccggactcgacaccttcctcttcacctcggagtccgtgaacgagggacaccctgacaagctctgcgaccaggtctcagatgctgttctggacgcttgccttgctgagga

SEQ ID NO: 5515 - DNA, 295 bp, Zea mays
cagagaatccccaagcaaacaaacagggtagagggagaggagaggagaggagaggagaggttgggtctgggacaccatggctccgatgaagctgtacggggcggtgatgtcgtggaacgtgacgaggtgcgcaacggcgctggaggaggctggctccgactacgagatcgtgcccatcaacttcgccaccgccgagcacaagagccccgagcacctcgtccgcaacccgtttggtcaggttccagctctgcaggatggtgacttgtacctcttcgaatcacgagcaatctgcaag

SEQ ID NO: 5516 - DNA, 228 bp, Zea mays
tggggaagaaggcaaaggaggggagaagatgtagtccactcacttaaagtttctctggaagatctttacaatggaatctcaaagaagctctctctttcgcgcaatgtcatctgctccaagtgcaagggcaagggctcgaagtctggtgcttcaatgaggtgccctgggtgccagggctcaggtatgaaagtcaccattcgtcagctggggccttccatgatacagcag

SEQ ID NO: 5517 - DNA, 296 bp, Zea mays
tcttcttgttgtttatgcagaaccggcggcgtggagaactttttccactgtgataaatgtgggtgttgctacagcaatgtcttgaaggattcccaccactgcgtcgaaagagcaatgcatcacaactgccccgtctgcttcgaggtgagagacctccgtttcaacggaacattcactctgaatgttccaatctcttgatattgagaaggtttccctctgttttttttcacagtatctgttcgactccacgaaggacatcagcgtgctgcaatgtgggcataccatccatttggagt

SEQ ID NO: 5518 - DNA, 352 bp, Zea mays
ccgaatgcacgggagtaagctcgggttcggccgaggggcgcggccgacggcgcatcacgcagatcgtgtacaagggcgcgcacaaccaccccaagccgctgtccacgcgccgcaactcatccggcggcggtgcggcggaggagctgcaggccggcaacagcagcctgtcggccgtagcggcggccggctgtactggaccggagcactccggcgccaccgccgagaactcgtctgtcaccttcggcgacgacgaggcagagaacgggtcgcagcggacgatcggcgacgagcccgacgccaagcgctgcaggaggacggcgagaacgagggcagctctgcaggcggcggcggc

SEQ ID NO: 5519 - DNA, 316 bp, Zea mays
tccacacattgagtaccctgtccgcacgaaccagatccctcgtgaaatccctcctcagaagtacccatcctggttgctggttcttggtgctggcacactgcccttcggcaccctattcatcgagctcttcttcatcatgtcacgcatatggatgggtcgtgtgtactatgtatttgggttcctcttcgtcgtcttgctgctcctggttattgtctgtgctgaggtttccctggttctaacttacatgcacctgtgtgttgaggattggaagtggtggtggaagtcattcttctcatctggatcggtggcaatctac

SEQ ID NO: 5520 - DNA, 318 bp, Zea mays
cgagtgctccgttacccgtgtcaaggactacagatccagggtcttcgagatgatccggacgctcaaatacctggacaagatggatgccgacgagaacgagcgccccgagtccgatgacgacgatgacgacggcgagggcgatggcgagggcgatggcgacgatgatgacgaagatgaagaagacgaggaagaccctgggagcggcgaggtagcgaacggcggcgtcgcccatgcgcgcgcgggcgtgccctcgcacccggtggaggtgaatggggtgatcgatgtggacgaggaggagagcgacgctgacgaggtcat

SEQ ID NO: 5521 - DNA, 162 bp, Zea mays
caccaacgagatcctcgtgatgcggcggatcgtggaggccgtggcgccgcaccccaacgtcatcgcgctgcacgacgtgtacgaggacgcgcgcggcgtgcacctggtcctggagctctgctcgggcggcgagctgttcgaccggatcgtggggcgcgaccg

SEQ ID NO: 5522 - DNA, 311 bp, Zea mays
gaacattcggatctgatgacaaccaggaggactcaagcaacacaagttctggtgtatcacttggggattactttcttggtcctgccttagacactctcttgcagcgtttggcggagagtgacctcagtcgttctggcacaccgcctgccaagaaggaagcagtcgccgcgctaccaaccgtgaacatcgaggaagcgttgggctgttcagtctgtcttgaggatttcgagatgggaggagaagcgaagcagatgccctgtcagcataagttccactcgcactgcatactcccgtggctggagctccacagc

SEQ ID NO: 5523 - DNA, 305 bp, Zea mays
cggtttccaggcggttcctcctccagccagactctagagaaagaaggcgcatcgtgagagagagagagagagagagagacgcaatggcgtcggcgacgttcctggaggtgctcctcgccatcttccttccgccggtcggcgtcttccttcgctacggctgcggcgtggagttctggatcgacctcttgctgaccgtgctggggtacattccggggatcatctacgccgtgtacgtgctggtggcttaagttgtgcgaagaggaggacatgaagactctcgatctgtccagaagtacgtagtgatg

SEQ ID NO: 5524 - DNA, 318 bp, Zea mays
gcacaattggggttgatttcaaaattcgcacagtggagcaagatgggaagaccataaaacttcaaatttgggatactgctgggcaagagcgcttcaggacaatcactagcagctactaccgcggagctcatggaatcattattgtatatgacgtgacagaccaagaaagcttcaataatgtgaagcaatggttgaacgagatagaccgttatgcaagtgataatgttaacaagctccttgttgggaacaagagtgaccttactgccaacaaagttgtggcaactgagacagcaaaggcgtttgctgatgagatgggca

SEQ ID NO: 5525 - DNA, 110 bp, Zea mays
  unsure (1)..(110): unsure at all n locations
tcacactcactatacactgctctgctgcagcaagaangaagaagctagcgcctccctagctctcgttgtcagcaatggccaccaccgccgcgtccagcctcctcaagtcg

SEQ ID NO: 5526 - DNA, 315 bp, Zea mays
  unsure (1)..(315): unsure at all n locations
gctggtcaagaacgtttccgaacaattactactgcctactacagaggagccatgggcattctgcttgtatacgatgtcacggacgagtcatccttcaacaacattagaaactggatccgcaacatagagcagcacgcgtctgacaacgtgaacaagattctggtgggcaacaaggtcgacatggacgcgaagggnntggtgtccatggctcaaggccagaagcttgcagacgagtacgggatcaagtttttcgagacgagcgcgaaaacaaaccagaatgtggagcaggtcttcttcgccatggcgagggacgtg

SEQ ID NO: 5527 - DNA, 304 bp, Zea mays
catgaggcagctcctctgccagcgcttcgccttccccagcgacggcatcatcatgctcactgacgaccagaaggacccgttccgggtgcccaccaaggacaacatccggatggcgatgcagtggctggtgcaggggtgcagcagcggcgactccctggtgttccacttctctgggctgggcgcgcaggtcgccgacgcggactgcgacgagcaggacgggtacgacgaggccatctgcccggtggactcgttccagaagggccccatcctggacgacgagatcatacgagacatcgtccggccg

SEQ ID NO: 5528 - DNA, 307 bp, Zea mays
gtgacgggctggcagagcgttgggacgaatggcagaaagtagaggtggtgaggcaggaggctgagtcggcaccgctccgcaatgactggatcgtcgattccacgtacaaccttcgtgccgtggagctgtccggcccaaggtagccactccacgactccgatgaaagaaaacactgaattggccaagattcagtctaattgctgcttgtgtatatgaaaggtagcttttggaattgttagcgacaatttgaaaggatcgatcttttttttttggattcctcgctagctcagatgttggttacgctgag

SEQ ID NO: 5529 - DNA, 304 bp, Zea mays
aatcttggcaagacatgggataaactccagcttgcagcgagggttatcgttgccatcgagaacccgcaggacatcatcgtccagtctgcccgcccatatggccagcgtgctgtcctcaagttcgctcagtacactggcgcccatgccatcgctgggaggcacacccctggtacattcactaatcagctccagacctccttcagcgagcctcgactgctcatccttactgacccaaggactgaccatcagccaatcaaggagtctgctctggggaacatccctaccattgccttctgtgatactg

SEQ ID NO: 5530 - DNA, 307 bp, Zea mays
  unsure (1)..(307): unsure at all n locations
tgttggactggttggtttctgctttgagaagggcgaaaagatgttagtttacgagttcatacctaatggaacactaagcgaggctttatatggtatgaaaggaatacaattagactggagcaggaggctcaagatagctttggattcagctanagggctagcatacctccatgaccatgccaatcctcctatcattcacagagatgtgaagtccactaacattctccttaatgagaagatgaccgcaaaggtttcagactttggcctgtcgttgctggtaacagacagtgaggaagggcaactatgc

SEQ ID NO: 5531 - DNA, 306 bp, Zea mays
  unsure (1)..(306): unsure at all n locations
gcaagcctcgagtggagctcttccacggccgcggtggagatggcggcgaatctggaggacgtgccgtcactggatctgatgcacgagctgctccgccgcatgaagtgcagctccaagcccgacaagcgcctcatcctcatcggtccacctggctctggaaagggaactcagtctcctattatcaaggatgaatattgcttgtgccatttagccactggtgacatgctgagggctgctgtggcggccaagacacctctaggtatcaaagctanagaagctatgaataagggagagcttgtttcagat

SEQ ID NO: 5532 - DNA, 305 bp, Zea mays
atccgtcgattggaacccagatccgcaggccgcagcacaagagggtgggatcggatcggatcggagcagagggggaccgaccagaatccgccggcgaccaccatgggctccgcgagccgtgccgtctcgtgcctgtgctgcccctgcaagtgcctggcgtgcgggctcctgagctgcctgtgcagcatcctcgtctcgctcgccgtcgtcctcggcgtcgtcgccctcatcctctacttcatcttcaagccgcacatgatcgccgccaccgtggactcggcctcgctctcccagttcgcgctgtc

SEQ ID NO: 5533 - DNA, 303 bp, Zea mays
cgaggtgttggcatcgaaaagcggtggtgtatacgaagtagcgtgtgagcatgctcattcatgttgtgtcctacttgccaaggtagataaattcaagatcaatggcaaatggcatacctggatagattatgaccgtttccatgaactggtgacatccggaaagcctttcaagagccgagattacatggccatgacgccctcatgggctgtctatggtgcagaggaaggtggattcgatccggatcaatctcgtttcaagaaggacaggcgccatggaactgctgccctcagaagttgaagttg

SEQ ID NO: 5534 - DNA, 291 bp, Zea mays
tcggctcgagcgacgactgcgctgaagctgaactcgatcctgcgtacagagaatccgtcaagtgcaagatattcctggggttcacttcgaaccttgtgtcttccggtgttcgggagatcatccggtttcttgttcagcatcgcatggtggacgttattgttacgactgctgggggtatagaggaggacctcatcaaatgccttgcgccaacctacagaggcgacttcactctgcccggagcgctgctgcggtccagaggacttaaccggataggaaacctgctggtgccca

SEQ ID NO: 5535 - DNA, 283 bp, Zea mays
  unsure (1)..(283): unsure at all n locations
agttctccggggttcggtttcgtgggtgagcggatcgagatggcggcgtcggatgttgagtaccgctgcttcgtcggcagcctcgcanggaccacggacgaccactccctccacaacgcactcagcacctacggcgaggtcctcgagtccaagattatcctcgatagggagaagcagaggtcccgcagcttcggcttcgtcaccttctccacggaggaggcgatgcggaacccatcgagggcatgaacggcaaggagctggaaggcagcaacatcaccgtcaa

SEQ ID NO: 5536 - DNA, 288 bp, Zea mays
acttcatataccactccctaggacccagcaacacaacagccgagctttgcttaggcaagatgaacaggaagccaggagactgggactgcagggcgtgccagcacctcaacttcagccgccgagacatatgccagcgctgcagcgagccacgtggagttgctgatcgtggcagtggcggcggcggaggaggcgactacgccagcttcggtggccgcggtggctcctccttcggcggcggctttggcgctgctggctccgacgtccgccctggtgactggtactgctcct

SEQ ID NO: 5537 - DNA, 290 bp, Zea mays
tgcaaaaccaactgttgtgatgattgaggactatgaatttgaagaatatgatgaaccccctgtctttgcaaagagatcaattttcaccatccgtgcaacaggggaacaagatcagtggattcaatgtgacgactgctcaaaatggcgccggttgcctcttaatgttattgttgcgcccaaatggacatgcaccgacaactcatgggactcaaaatgctgctcctgctctgcgcctgaagagttgaccccaagagagttgcaaagtgttctgcagcagtatgaagaaatga

SEQ ID NO: 5538 - DNA, 283 bp, Zea mays
gaagattgatcccttgtcgaagttctcctgtgtggcctgagcagctagtgcttccgaggcggcaagaagcatgtcctcgtggacacggatggctccagagataacaagaccgaggccaaatccagggaaaatgtaggcgttgttcgactgtccaggtacaaaaaccttcccatcgtactccacagggtcaaatggactgccactggcaaatattacacgaccctgagtccagttatatgcttcttcagcagtacattcagaatgagaggttggatttgacagt

SEQ ID NO: 5539 - DNA, 223 bp, Zea mays
ggcgagcaggtgttcgtggtgggtcacgactggggcgccatcatcgcgtggtacctctgcctgttccggccggaccgggtggcggcgcttgtcaacaccagcgtcgccttcatgcgccacatcttcgtccgcgccgccgccgccgccgtcacgcccatcgactacttccaccgcacctacgggcccacctactacatctgccgcttccaggagcctggtgtcg

SEQ ID NO: 5540 - DNA, 290 bp, Zea mays
cgcatccgacggctccccaaccccaacaagtctcttggccaggtctccctctccccggctctccgccttcctcttccagtccccgcgcgcgagatcgccgccccgtgtgggccctagatcccgatggcctcgcgccgccgcaccctgctcaaggtcatcatcctcggcgatagtggggttgggaagacttccttgatgaaccaatatgtgaacaagaagttcagcaatcagtacaaggctacgatcggcgcggatttcctcaccaaggaggtgcagttcgaggacaggct

SEQ ID NO: 5541 - DNA, 290 bp, Zea mays
acacacacacacacacacagacaagtggtttccaaagccaagtgtgtgtactagcaaccagctagctcgggcggcagcaggcagccatcatgtcggaggagaagcaccaccacttcttcaaccaccacaagaaggacgaggagcagcccgccggcgagtacgggtactccgagaccgaggtggtcaccgccaccggcgagggcgagtacgagaggtacaagaaggacgagaaggagcacaagcacaagcagcacctcggcgaggccggcgccatcgccgccggcgccttc

SEQ ID NO: 5542 - DNA, 267 bp, Zea mays
  unsure (1)..(267): unsure at all n locations
agtcgtcgtctacaacgccgcccgcactacccccatcgcgtacacactactcgcagaaacaccgatggctcctgccantgcccagcagcagccgcagtgcaactgatcggtgtcggtggtcgaaaggtggtggacgaggtttccggctggctgcgcgtgctggacgacggcagcgtggaccgcacgtggaccggaccgcccgaagacctcccgctgatggagccggtagcgccgtacgcgcgccacgagaagggcacacgctgcacg

SEQ ID NO: 5543 - DNA, 285 bp, Zea mays
tcagatataaagggctgacccattttgacgtggacaactttgttgaagaagtgcttgtgaaggatattgactggcttcctagatctcctgagcctatgagtggttcctatatttttgtttgctcccatggaagcagggacaaaaggtggctgtcagtgcatgctcacacgtgggaggtcataagtatgcaggaaacgtcatcattttcagttctgatgccaagggagaagtgactggtcattggtatggttatgttgttcctgatgatgtgcctgttttgctgca

SEQ ID NO: 5544 - DNA, 287 bp, Zea mays
agatacaaaccatgagcatgatcagccgcctcatctccgcttgagggatcctacagtacccgaacgagtaaatgttgcactgtatgcagcgccagaatcacgctattgcccagcccgggtttacgaatatatctctgatgagaaaggtgacccaaagcttcatataaatgcacagaattgtcttcattgcaaggcttgcgacatcaaagatccaaagcagaacatcgagtggacagttccagaaggtggaggtggtcctggttacacagtaatgtagaatgctcaat

SEQ ID NO: 5545 - DNA, 281 bp, Zea mays
ctactactcgatggaaccagcaacatgggctgtgttcctcggcattgccctctgcgcacggcagcgctcttcctttcgcgcggccggcgcccggtctacaaccccccgccgggccccaagccatggccgatcatcggcaaccttaacctcatgggcgagctgccccaccgctccatgaacgagctgtccaagcggtacggtccgctcatgcagctccggttcgggtcgttgcctgttctcgtcggcgcgtcggttgagatggcaaagctcttcctcaagac

SEQ ID NO: 5546 - DNA, 278 bp, Zea mays
cccaaggccccaactacccccagtctcggaagagaactatccagaagcgcaagactccaaagccgtcgccttcctatccatcccttcctcgccgcgggggtcgcctgagatcacataaacaatggtgaaggctgttgctgtgcttggtagcagcgagggtgtcaagggcaccatcttcttcacccaagagggagatggccctaccactgtcactggaagtgtctctggcctcaagcctggcctccatgggttccatgtgcatgcacttggtgacacca

SEQ ID NO: 5547 - DNA, 279 bp, Zea mays
tgcagaatttcactaatctcgacatccacgtgggccagtcttactcatttctggtcactatggatcagaacgcaagcagtgattattacatcgtggccagtgctaggtttgtgaacgaatcgctttggaccagagtcaccggtgttgcaattttgcaatattcaaattcaaagggaaaagcatctggtcctcttcctgatccaccaaatgatgagtatgacaaaactttctcaatgaaccaggcacgttccatcaggatgaacgtgagcactggtgctg

SEQ ID NO: 5548 - DNA, 274 bp, Zea mays
gcgtcaccactcccggcgaagagatggggaaggggttcgcatcctacctggcgatgaagacggggccggacggcggcgacgcggcggcggcgcagcaggctctgatcgacgcggacctgcgggagctcggcgtcgcgcgcggaagctcgccaaccacgcattcgtcctcggcggcgggctggggttcggcacctccttcctcaaatggctggccttcctcgccgcagtgtatctcttgatattggatcgcacaaattggaagaccaacatgctg

SEQ ID NO: 5549 - DNA, 275 bp, Zea mays
aggcggcgacgtggtccacctggtgagatgggtgcagtcggttgtgcgggatgagtggaccgccgaggtgttcgacggcgagctgctgcggtaccccaacatcgatgaggagatggtagagatgctgcaggtcgcgatggcgtgcgtgtcgaggtcccccgagcggcgtcccaggatggccgacgtggtgaggaccatccaggaggtgcgtcggagcggcagcggcaccgccaccgggaccgggacgcggccgtccaccgatgcctccaccccgg

SEQ ID NO: 5550 - DNA, 278 bp, Zea mays
ctacactcccggcggcggcggcggcggcgcacagcggcagcagcatccgaagatggtgaagttcctcaagcccggcaaggccgttatcctcctccagggccgcttcgccggcaggaaggcagttatcgtgcgcgtgttcgaggagggcacccgcgaccgcccctatggccactgcctcgtcgcaggcctcgccaagtacccaaagaaggtgatccgcaacgactccgccaagaagactgcgaagaagtcgcgcgtcaagtgcttcatcaagctcgtca

SEQ ID NO: 5551 - DNA, 276 bp, Zea mays
tggggcgtcgctgaatctgcaaacccatctaccctaattaaagaagccattcatgtcattagctgtggatatgaagagaaaactgaatggggaaaagagattggctggatctatggttcagttacagaggatattctgactgggtttaagatgcactgccgtggctggagatccatctactgcatgccggtgagacctgcattcaagggatcagccccaatcaatctttccgatcgtcttcaccaagttctccggtgggctcttggttctgtcgag

SEQ ID NO: 5552 - DNA, 280 bp, Zea mays
ttcaagaggagcttgacattgatgtgcttgtgcatggagagccagagagaaatgacatggttgagtacttcggtgagcaattatctggttttgcgttcactgccaacggatgggtgcaatcctatggatcacgctgtgtgaagccacccattatctatggtgatgtcagccggccgaaccccatgactgttttctggtccaagatggcacagagcatgacccctcgtcccatgaagggaatgttgactggtccggtcacaatcctgaactggtcattcgt

SEQ ID NO: 5553 - DNA, 284 bp, Zea mays
tgcaagaagaaggctttcacaaagtatgctctcaaatatgaaaatgatgctggcaagaaggaaattcagctgcagcttgagaagatgaagaaatatgcttctgttatccgtgtcattgctcatacccagattaggaagatgaagggtttgaagcagaagaaggctcacctgatggagattcaggtcaatggtggtaccattgctgacaaggtggactacggctataaattttttgagaaagaggtccctgttgatgctgtcttccagaaggatgagatgattga

SEQ ID NO: 5554 - DNA, 242 bp, Zea mays
  unsure (1)..(242): unsure at all n locations
cgcccggaccggcacgcagcacaacatggacctcgccctcctggagacggccctgctgggcctgttcgccgcggctgtggtggccatcgccgtggccaagctgagcggcaagcggtaccgcctcccaccggggcccccgggcgcccccgtggttggaaactggctgcaggtgggcgacgacctgaaccaacgcaacctgatngccatggcgaacggttcggcgacatcttcctgctgcgcat

SEQ ID NO: 5555 - DNA, 310 bp, Zea mays
  unsure (1)..(310): unsure at all n locations
cgaagatgaaatggaatgtgaactgcataaaccaatatcaagaagtattactgtgaacgccnggcctgcatctcngctgccttgccaagtcagccatcgcccgcggtcagccaaaggcccgggagctctacacccgctacgagcctgtggcagagcggcgtgccgccgaggcctgggtggccctgaaccgtctccctctggtgccctcggtcaccagggccgtcctccccactgccgcacagctctctgccaggtacaattcggcggtgcgtgatggtgccaagcgcgggaacgccgtggccacctatct

SEQ ID NO: 5556 - DNA, 260 bp, Zea mays
ccagacagacgtcaactccaggagacaagacagtgagaactgaagagaaggatgggcttcgagaagcagatcctgagatccggcaccggccccaagccgataaagggccagaaggtcaccgttcactgcaccggctacgggaaggatcgtgatctgtccaagacattttggagcaccaaggaccctgggcagcagccattcagtttcagcattggtcagggttcagtgatcaaaggatgggacgagggagttatgaccat

SEQ ID NO: 5557 - DNA, 259 bp, Zea mays
aggagagcaattaagagatacatccaaaagcctgataagaaacagttgctgctgtgcctcttggactggatgattggacaaggctattctgtagactcgtcatcaaggaacttacttttgaagaatgcacaactttttggcgaaaaacaagttatagcagaaatcctttctaagcagcagatagcatcaaggactattggcctaagacacaaaaaatgataaaggaaagattttgtatatgtaaattgttcatatacat

SEQ ID NO: 5558 - DNA, 204 bp, Zea mays
cagaggtgtggctgtgccggaccagtcgagcccctacggtgtccggttgctgatcaaggactacccttacgccgtggacgggctggtcatctggtgggcgatcgagcggtgggtcaaggagtacctggacgtctactaccccaacgacggcgagctccagcgcgacgtggagctgcaggcgtggtggaaggaggtgcgcaagga

SEQ ID NO: 5559 - DNA, 308 bp, Zea mays
ctcgagaactccatttcgatctcatttgaactcaacccatcctcgtttcctccgtctagcagcctctcaccctcatggccaagatcaagatcgggatcaatgggtttggcaggatcggcaggctggtggccagggtggccctgcagagcgacgacgtcgagctcgtcgccgtgaacgaccccttcatcagcaccgattacatgacctacatgttcaagtatgacactgtgcacggacagtggaagcaccatgaggtcaaggtgaaggactccaagacccttctctttggtgagaaggaggttgctgtg

SEQ ID NO: 5560 - DNA, 309 bp, Zea mays
cgagggacagaatgacatatactatatcactggtgagagcaagaaggcagtggagaactcccccttccttgagaagctgaagaacaggggctatgaggttctgtacatggttgatgccattgacgagtatgctgttggtcagctcaaggagtttgagggcaagaagcttgtctctgccaccaaggagggtctgaagcttgatgagactgaggacgagaagaagaggaaggaggagctgaaggagaagtttgaggggctgtgcaaggtcatcaaggaggttctgggtgacaaagttgagaaggtggtggt

SEQ ID NO: 5561 - DNA, 250 bp, Zea mays
cggctcgagagctaactttgtttatgtcagtcctttttttgtttgtgatgttcgttcatctatttagtactacctccgttcttgaatatttgtcgctcgctagtttatttttaaactaaaacgcgacaaataaaaaagaacggatagagtactttatttcacatgcactacattatgatggacagtttctaatccaaacctatcatctcatccaatttgacagagctgggcttttgagaacatcggtttc

SEQ ID NO: 5562 - DNA, 234 bp, Zea mays
ctcaggatcaacgtcgaccgcggcgtgatgatcggcgacggtaagtcccgcttcaccatcagcgggcagcccatcttccacttcgtcgggacgtccaccttcagcgagtacaccgtcatccatgtcggctgcctggccaagatcaaccccgaggcgcctctcgacaaagtctgcatcctcagctgtggtatctcgaccggccttggcgcgacactgaatgtggcgaaaccagcc

SEQ ID NO: 5563 - DNA, 283 bp, Zea mays
attcaaaatgggtggttctaaccgagaaggcggcaaggcgaagcgcttaaaggccccgaagaagcagaacaaggacctcgacgaagacgacttggctttccttgagaagaagaaggctgacgagaaggctcgcaaggagttggctgccaaggccggcggcagaggccctctgaacactggcacccagggcatcaagaagagcggcaagaaatagacgacatacgacgaagcaatatgttattgagaaacgtttacatgagcttgctgcgaagtttgcgataat

SEQ ID NO: 5564 - DNA, 299 bp, Zea mays
ctcagatctcagtcacctgcgccgccgcttcgttcgtgtggaggggagaagagaggaaatggcggcgaccgagggcgtgctcctggggatgggcaaccccctcctcgacatctccgccgtcgtcgatgacgccttcctgacaaagtatgacatcaagctgaacaatgctattctcgctgaggagaagcacttgcctatgtatgacgagttggctagcaagagcaatgttgaatatattgccggaggagccacccagaactctatcagggttgcccaatggatgcttcaaactcctggtg

SEQ ID NO: 5565 - DNA, 219 bp, Zea mays
agccgcccgagcaagatccaggcgatcaccctgcccatgatcctcacgccgccctacaaggacctcgtcgcgcaggcgcacaacggctctggcaagaccacctgtttcgtcctcggcatgctcagccgcgtcgacccgcaacgcaagataccccaggctatctgcatttgccccaccagggagcttgcgcacagaataaggcagttctcatgaggatgg

SEQ ID NO: 5566 - DNA, 307 bp, Zea mays
  unsure (1)..(307): unsure at all n locations
tcgacgtcgtcgtctccttccgcggcacggtcaccggttccgagtgggtggccaacatgatgagctccctcgagcaggccaggttcgatccggcggacccgcgccccgacgtgaaggtcgagtcgggcttcctctccgtctacacctccgacgacgccacctgccgcttcacctacggcagctgccgaaaccagctgctttccgaggtcactcgcctcatcagcaaatacaaacacgaggagatgagcatcacgctggccggccacagcatgggcagctcnctcgccctcctcttgggctacgactt

SEQ ID NO: 5567 - DNA, 303 bp, Zea mays
tgtccctcccactcccagtcccatctcgacgacatggccgcagccgcaggccatcaagctctgtgaaggagacgctcccgccggccctcggctccacctcccagccacctcccgtcttcgatggcaccaccaggctgtacatctgctacttctgcccgttcgctcagcgcgcctgggtcaccaggaacttgaagggtttgcaggacaagatggagctggtggccatcgatctgcaggacaaaccggcttggtacaaggacaaggtttacgcacagggcacggtgccttccctggagcacgaca

SEQ ID NO: 5568 - DNA, 304 bp, Zea mays
atcattcttctctgctgcttctaccgccttgtatgtgtatctatactctatatactattatcatgtgaagacaaagatgtcaggatttttccagacaagcttctactttggttacaccttgatgttctgtcttggattgggaatactttgcggtgctgttggatatttgggctccaccctatttgtgaggaggatctacagaaatatcaaatgcgactaaacttggccaaggctgctagcatgtcttgtcaacatatggtgcagagtaataccttgagcttctgattgacttcggaaattacac

SEQ ID NO: 5569 - DNA, 306 bp, Zea mays
cggctcgagcaggatggcggcatctttggtcagactgcatttccatgactgctttgtcaagggctgcgatgcttcggtgctgttggacaacagcagcagcatagttagtgagaaagggtccaacccgaacaggaactccctcagggggtttgaggtgatcgaccagattaaggctgctcttgaggctgcctgcccaggcacagtctcctgtgccgacattgttgcccttgcggctcgtgattccaccgccctggttggtggaccatactgggacgtgccacttggccggagagactcgctcggtgc

SEQ ID NO: 5570 - DNA, 303 bp, Zea mays
cgccaacatcctggccgccggcccttcagcggcggctccatgaacccggcccgctccttcggccccgccgtggcggccggtaacttcgccggcaactgggtgtactgggtcggccccctcgtcggcggtggcctggcggggctcgtctacggcgacgtgttcatcgcctcctaccagccggtcggccagcaggagtacccatgaaagtccggatgagctagcccgatcgatccgtctgtgttgatttcaccatcgtcgtcgtcgtgtcatctggcgcttcgtgctgtgatcatgttttgtccg

SEQ ID NO: 5571 - DNA, 301 bp, Zea mays
ctcttctccagcgtccgacttcccactcgcctccctcaccgcagctctcccggctcggtcccttcccacctcctccctccccccgcacgcgctcgccacctcgccctcccctccacgttgctcgcacccgcgcttatataagcgcacgaggagctcatggcggaagctccggcgagccctggcggcggcggcgggagccacgagagcgggagccccaggggaggcggaggcggtggcagcgtcagggagcaggacaggttcctgcccatcgccaacatcagtcgcatcatgaagaaggcca

SEQ ID NO: 5572 - DNA, 295 bp, Zea mays
cgtctcgcctcacctcacctcacctcacctcgccgactagggttttgtaccgccgtggatctcgccgtccccgccatggacgtctcgcacgcgggatcctccgtcgccggcgaggctccgaccaccggggagcaccggatggggactaccatcgtcggggtctgctacgagggcggcgtcgtcctgggcgccgattccaggaccagcactggaatgtatgtagccaaccgtgcttcagacaagattactcaactgacagacaatgtgtatgtctgtcgctctggatctgctgctg

SEQ ID NO: 5573 - DNA, 225 bp, Zea mays
caagcaccaatcagccagcagtccagcacaatatcatgaacaagcgtcaggtcgccgcggcggtggctgccctcctggcgctgctagccgcatcatcgacggccggcgccgtgacgttcgacgcgacgaacacggcgtccgatacccccggcgggcagcggttcgaccaggccgtcggcctcgactacgccaagcaggtcctggccgacgcgtccacgttcatct

SEQ ID NO: 5574 - DNA, 298 bp, Zea mays
ctgacggggaacaatgtggggagcatcgcgctgcccgcggtgtcgctggtgttccagggcggcgcgtgcctggacgtggacgcgtcggggatcctgtacgtggcggacgtgtcgcaggcgtgcctggcgttcgcgcccaacgctgacgacaccgacgtggccatcgtcgggaacacgcagcagaagacgcacggcgtgctgtacgacattggcaagaagatcgtcgggttcgccccgggagcttgctgatccggccatggtttgtgaaaaactccagatcatctgcatccaccaaagt

SEQ ID NO: 5575 - DNA, 300 bp, Zea mays
gaagctacaatcctaaaaccatctgcttcagccttcagctagccccaagtttagtcggccgatcgatcactgaagtagtaatggcctccgccaacagctggaccctcgagatcgcgtcgccggtgcgctccgcagcgcctgttccgcgccgccgtgatggactggcacaccctggcgcccaaggtcgcctcccacgtcgtcgccagcgtcgcagccgtgcgacggcgacggcggcgttggcagcgtcaggcagttcaacttcacctcagtcatgccgttcagcttcatgaaggagaggct

SEQ ID NO: 5576 - DNA, 297 bp, Zea mays
tgtcggcgatggtggaactggtaaaactacatttgtgaagaggcatctcactggagagtttgagaagaaatatgaaccaaccattggtgtggaagttcatccgttggatttcaccactaactgtggtaagatcaggttctactgctgggataccgcaggcaagagaagtttggtggcctcagggatggatactatatccatggccagtgtgcgatcatcatgtttgatgtaacctcaaggcttacttacaagaatgttcctacgtggcatagggacctgtgcagggtctgtgaaaac

SEQ ID NO: 5577 - DNA, 296 bp, Zea mays
gtcatcgatctcgtttcaaatccatccatcctcgtttcctccgtcccgcagcatctcaaccccatggccaagatcaagatcgggatcaatgggttcggcaggatcggaaggctggtggccagggtggccctgcagagtgacgatgtcgagctcgtcgccgtgaacgaccccttcatcagcaccgactacatgacctacatgttcaagtacgacactgtgcacggacagtggaagcaccatgatgtcaaggtgaaggactccaaaacccttctctttggtgagaaggaggttgctgt

SEQ ID NO: 5578 - DNA, 250 bp, Zea mays
attttgacttgaatgaaggaatacctggggatgatgggcatcagtctgagacaactgcctcacctgttgtatgttcctcagcaatccatttaactgggcttttgccattcacttcgcctactacaagtgggttgccgccagctccaataacagtagctgctccagctaaaggaccctttgttcctcctgaaaacctactaagagcaaagccagagatcgggtggaaaggttcagcagctacgagtgcatt

SEQ ID NO: 5579 - DNA, 294 bp, Zea mays
tctcgagctcagcctcgccctctcctcaaacacaagcctcagatctcagtcacctgcgccgccagcctcttcgtgtggaggggagaagagaggaaatggcggcgaccgagggcgtgctcctggggatgggcaaccccctcctcgacatctccgccgtcgtcgatgacgccttcctgacaaagtatgacatcaagctgaacaatgctattctcgctgaggagaagcacttgcctatgtatgacgagttggctagcaagagcaatgttgaatatattgccggaggagccacccaga

SEQ ID NO: 5580 - DNA, 294 bp, Zea mays
ttggtcttgtgctcgtccgatgagcatcgccctcgctgccgtcctcctgctgtgcggcggcgcgtggctgcagcaggcggcggaggcgcgcccccaccacatggacgacgacagcagcatcgacatggaccgcggcagcacgacttcttctccatcgtggggtactcgccggaggacctggcgcacacgaccggctcgtcaggctgttcgaggagtgggtggccaagtaccgcatagcgtacggcagcttcgaggagaagctgcgccggttcgaggtgttcaaggacaacctgc

SEQ ID NO: 5581 - DNA, 287 bp, Zea mays
tgggaaactccctggcgacactgcttctaccttaaaagcatggtggcaggctcattctaagtggccgtacccaaccgaggaagacaaggctcgactggtgcaggaaacagggctacaactgaagcagatcaataactggtttatcaaccagcgtaactggaactggcacaacaattcggcgtcatcctcgtcggacaaaagcaagagaaaaaggaacactgcaggtgatgggaacgcagaaccagcctggtagggcatggtcggggaacgaatttatgtaaataatg

SEQ ID NO: 5582 - DNA, 303 bp, Zea mays
cctcactcccgttccatttccccatctcccagatccaattcgcgagttctccctcctctgccgccatggcgctctctgtggagaagacctcgtctggacgggagtacaaggtcaaggatctctcgcaggcggacttcggccgcctcgagattgagctggccgaggtcgaaatgcccggcctcatggcgtgccgcgccgagttcggcccgtccaagcccttcgccggcgctaggatctcggggtctctccacatgaccatccagaccgccgtcctcatcgagacgctcaccgcgctcggcgccg

SEQ ID NO: 5583 - DNA, 312 bp, Zea mays
ctcagatctactccaacacctccgcagcggcggcgcccgcgggtggaggagcaggagaggcggcgccatggtcgggaccgggaagagggagcggatagcgatacggaggatcgacaacctggcggccaggcaggtgaccttctccaagaggcggcggggcctgttcaagaaggccgaggagctctccatcctctgcgacgccgaggtcggccttgtcgtcttctccgccaccggcaaactcttccacttcgccagctccagcatgaagcaggtaatcgatcggtacgactctcattccaagactctccagag

SEQ ID NO: 5584 - DNA, 309 bp, Zea mays
  unsure (1)..(309): unsure at all n locations
ttcgattctaatgttccaatattaccaaatgaacccttaatttgggacgaaaaaagtagaagtanatagttctaacatcataaacatacatgttattatctttgaatccaaacaccaagaacccttttgttcatcatctatcaattaacttgatgaaatctatgccagagaactctacatgactggggtgacgatgagtgtgtcaagatattgaagaattgcaagcaagccatatctccacgggatgcaggtgggaaggtaataatcttggacgtggtagttggatataaacagtcaaacataaagcat

SEQ ID NO: 5585 - DNA, 213 bp, Zea mays
gctaagctaagccgagctaagaagcacagcaagtctcaccagactagcggctagcgcgagaatggccaaggacatcgaggccgcggcgcacgagggcaaggactactcggacccgcctccggcgccgctggtggacgcggaggagctgaccaagtggtcgctgtaccgcgcggtgatcgccgagttcgtggccacgctgctcttcctctacat

SEQ ID NO: 5586 - DNA, 303 bp, Zea mays
cgagcccatggcggaccagctcaccgacgaccagatcgccgagttcaaggaggccttcagcctcttcgacaaggacggggatggttgcatcacgaccaaggagctgggcactgtcatgcgctcgctggggcaaaatcctacagaggctgagctccaggacatgatcaacgaggtcgatgctgatggcaacggcaccatcgatttcccagagtttctcaaccttatggctcgcaagatgaaggacaccgactctgaggaagagctcaaggaggccttccgtgtgtttgacaaggaccagaacgg

SEQ ID NO: 5587 - DNA, 300 bp, Zea mays
cggctcgagccctgttcctgtacgacgcgtacacgtccttctcgggccagcctctgtacaacgactgggcaatggcgagcttcaacgtcttcttcacgtcgctgcccgtggtcgccatgggcgtgttcgaccaagacgtgtctgctagattctgtctcaagttcccgatgctgtaccaggaggggcctcaggaccttctgttccagtggcgaaggatcatcgggtggatggtgaacggcgtggccagcgccgtgatcatcttcttcctgtgcacggcgtcgctgcagcaccaggcgttcc

SEQ ID NO: 5588 - DNA, 303 bp, Zea mays
caactacccccagcctcggaaggaaccttccagaagcgcaagactctaaggccgtcaccttcccattcttcctcgccgcgggggtcgcctgagatcacataaacaatggtgaaggctgttgctgtgcttggtagcagcgatggtgtcaagggcaccatctttttcacccaagagggagatggccctaccgctgtcaccggaagtgtctctggcctcaagcctggcctccatgggttccatgtacatgcacttggtgacaccaccaatggatgcatgtcaactggaccacactacaatcctgcg

SEQ ID NO: 5589 - DNA, 250 bp, Zea mays
caggtgcgcagtacaagtggctggaggcggacctggagaaggtggacaggtcggtgacgccatggctgatcgcgggctggcacgcgccctggtacaccacctacaaggctcactacagggaagccgagtgcatgagggtggagatggaggagctcctctacgcctacggtgtcgacgtcgtcttcaccggccacgtgcacgcgtacgagcggtcgaaccgggtgttcaactacacgctggacgcgtgcgg

SEQ ID NO: 5590 - DNA, 309 bp, Zea mays
tctgcagctgaattactgaacaagctaaaaccaccatactggttttcggcgcaccatcactgtaagtttcctgctgttatccagcatggcaagaatggacctacaacgaatttcttgcacttgataagtgcattcctgggcgcaattttttgcaggttatagacattccatccaatccaggaccatatgaaatccagtatgatgaagaatggcttgcaataacacgaaaattcaacagtgttttccctttagcacggacacagtttactatgcgggatgagcagctcgacactcaagaagaccggcaat

SEQ ID NO: 5591 - DNA, 304 bp, Zea mays
tgttcactgccaacggatgggtgcaatcctatggatcacgctgtgtgaagccacccattatctacggtgatgtcagccggccgaaccccatgactgttttctggtccaagatggcacagagcatgacccctcgtcccatgaagggaatgttgactggtccggtcacaatcctcaactggtcattcgtcaggaacgaccagcctaggtttgagacatgctaccaaatagctcttgcaatcaaaaaggaggttgaggatcttgaggctgctggtattcaggtgatccagatcgatgaggcagctct

SEQ ID NO: 5592 - DNA, 301 bp, Zea mays
ggacgacacaggcagagccgccggccctcgcttcttggtggggtctagtttctttctcgcctctgcctgtgcctgctggtggtaagtaataacagcgacacggtacccacgcgcggcggcggcggcgacgacgaagacgacatgaccgtcggcgacgacgcagcggcgccggggcgcgggcagacggtgtgcgtgaccggcgccggcggctacgtcgggtcgtggatcgtcaagctcctgctcgagcggggctacgccgtccgcggcaccgtgcgcaaccctggtaacgtcgtcgtagatc

SEQ ID NO: 5593 - DNA, 333 bp, Zea mays
  unsure (1)..(333): unsure at all n locations
atatgactgagtaccnaagctcggctcgatgtgaagccgccgccgctgcagtgtccatagccaccgcagcagactgagatggggggttacgtcaagacccacaagaccaatgcgtacttcaagcgtttccaggtgaagttcaagagaaggcgcgctggcaagacagactacagggccaggataaggctgattaaccaagacaaaaacaagtacaatacacccaaatacagatttgttgtgcgatttaccaacaaggacatcacagcacaaatcatctctgctagtatagcaggtgatatggttcttgcttctgcttactcgcatgagttgcca

SEQ ID NO: 5594 - DNA, 305 bp, Zea mays
tcggctcgagggctggacaatggtatgccaaagcctgtggtctcttcccaattgttgacaaagacaaggcacaaagtgcgctagagaaggtatattctttcaatgtgatgaagttcaagggtggtacaaggggagccatgaatgggatgtggccagatggcactgtggacatgtctgcaatgcaatctagggagatatggccaggggtgacatatgcactagctgcaagcatgattcaggaaggcatggttgagcagggatttaaaacagctgaaggggtctatcatgctgcctggtcaccagga

SEQ ID NO: 5595 - DNA, 306 bp, Zea mays
ccaacgagcaaaccccccatttgccaccaaccccgacgagcggcgatgaccggcacgtgtctaagctggcggcgccccgtccggcggcaccgccgctccggccggcgtccctccgcaccgccgccctcgccttcgccccctccgcgcgccgggtccgcgtctccgtcgccgggcgagccaggagccccatcattgcgatggcttcggccaaggaaggaaatggtgcaccgaccaagaggactgcgcttcatgatctctacgagctccagggcctgtccccgtggtacgacaacctatgccgccctg

SEQ ID NO: 5596 - DNA, 305 bp, Zea mays
tgaagctgtccaggtaaacattggcaagaagtggaaggatgtcatcgactacaacgacaagatcacgtacactttccatgacgactctaagagagacaagcccagcagaggtgggcggtacaccgtgtaagctggacgtcaagaaggccgttgctttggattggaagtgcgagatcggaggtggggattttcttctgggatcgtcgccgactttcgtttgattcagcttttacacgaggcagttttcgccgctattacaatgttattttcctctcagacagcttatgtggtacaagaaagagacg

SEQ ID NO: 5597 - DNA, 300 bp, Zea mays
  unsure (1)..(300): unsure at all n locations
tcactcgaaggtgattgtanattgcaaatgttcaagtttgataccaatgaaggtcgtgacaccttctggcactcaagtgctcatattcttggagaatctattgagagagcatatggatgcaagctgtgtattgggccttgcaccacaagaggggagggtttctactatgatgcttactacaatgatcagacattgaatgaggagcactttggtatcattgaaaaccaagctaaaaaggctgttgcggaaaagcaaccgtttgaacgcattgaggtcagcagggcagaagctcttgaaatg

SEQ ID NO: 5598 - DNA, 283 bp, Zea mays
tacccgacgcagcagcaggagacgcgccaaggagtgcccgcaaggaggcgactatgagggccaagtggaagaagaagcgcatgaggaggctgaagaggaagcgccgaaagatgaggcagagatccaagtaggctgatggggattgtggatggtggtgtcggcatagttgtgttacgtttcttcgatgcgtgagttcatggagagatgtcacatcctagttcgtcgtcaccgtttgccatgggtccaatggctcgtcttggaaacctgcacttcagtaggccat

SEQ ID NO: 5599 - DNA, 296 bp, Zea mays
tgaacgagttccagaccaacctggtgccctacccgaggatccacttcatgctttcgtcctacgctccagtcatttctgctgagaaggcctaccacgagcagctgtccgtggctgaaatcaccaacagcgccttcgagccatcctccatgatggccaagtgcgacccccgccatggcaagtacatggcatgctgcctcatgtaccgtggtgatgtggttcccaaggacgtgaacgctgctgtggccacaatcaagaccaagcgcaccatccagttcgtggactggtgcacgactggc

SEQ ID NO: 5600 - DNA, 299 bp, Zea mays
tgcagatcctgagagtttacgttcctagctacgagagctacggacgaatgtggccacacatgcacacgaggatcatcgcggctctgatggtttaccagaccaccatgatcggcttcatctccctgaagaagttcgcctacgcgtccgttctcgtgcccctgcttccagccagcataatcttcgcctacgtctgccacatgcgcttctacccggcgttcgccaagactcccctggaggtggtggtgcggcacgacctgaaggagactccgaacatggaggccatctacaccgcgtacata

SEQ ID NO: 5601 - DNA, 299 bp, Zea mays
agctgactcacagaaacatctctcagaatcataagttccaggctgttggtcttggttgggcttttgctgattcagttttgcaccgactggcacctctctggattggggcaagagggcttgaatttacatgggagtacatatttcaaggacttgaagcgaatgctaatcttgtgatgaccctctcccttgctgcattggggtccttgatgtggcttaggaagaacaagcctaggactttggttccaataatttatgcatgtgctctgctcttggcaacaatgccatctatcaccagctac

SEQ ID NO: 5602 - DNA, 114 bp, Zea mays
  unsure (1)..(114): unsure at all n locations
tgctatgagagctacagtganggatcaaaggttgtccagtcactgacttcactcatctctggactgcaaggtgacgctcctgcggattccgcgggaagggcgtatgttggggga

SEQ ID NO: 5603 - DNA, 293 bp, Zea mays
ttttctttttcaacacactctatgatccatacaggaaaggtcgctgactttgtccgtggttacccattcagcctgcgcgagggggttgagtgcatgctctcgtgtggtttgtggcttcataatgctgactacgacccgatgactcatgttgtgaagagaaatcaacggaacacaacatatgtggatgctgtgatgacggttccgcttggtgccatgctgcctgtgagcgggataaatgttgcattcaaccgcgatgtgctggggcctgctatgttcccaggcctgcgtctacg

SEQ ID NO: 5604 - DNA, 238 bp, Zea mays
  unsure (1)..(238): unsure at all n locations
tacgattcncaggtcncgcgagaagatgccgaagcagatctatgagattaaggaattcctcctcaccgcgatgaggaaggatgcccgctcagtgaagatcaagaggagcaaggatgttgtcaagttcaaggtgcgctgctccaagtacttgtacacgctctgcgtcttcgatgctgacaaggcaaacaagttgaagcaatctcttcccccaggtttgaccgtcgaggaggtctgattg

SEQ ID NO: 5605 - DNA, 251 bp, Zea mays
gtcacacggaggcagccatcgtagcctcgcccgactccgcttcccctgttctttgggcatggagctgatcacaaatgtcaccgagtacgagaagctcgcgaaggagaggctgccgaagatggtgtacgactactacgcctccggcgcagaagatcagtggacgctcaaggagaaccgggaggccttctccagaattctgtttaggccacgggtactgatcgacgtctcccgtatcgacatggccacaaaca

SEQ ID NO: 5606 - DNA, 243 bp, Zea mays
cttaacttctcagtgttctactatgagattctgaactcacctgatcgcgcctgcagtcttgcaaagcaggcttttgacgaggccatctcggaactggacaccctgagcgaggagtcctacaaggacagcactttgatcatgcagctccttcgtgataacttgaccctatggacttctgacatctcggaggaccctgctgaagagattagggaggcaccaagcgcgactcgagtgtagggcagt

SEQ ID NO: 5607 - DNA, 302 bp, Zea mays
tggatgcgagaagtgccgactgtggggaaagctccaagttcttggccttggaactgctctgaaaattcttttctccgttgatggagacagccatttgaatcagccgttgcagctgcagcgaaatgaggtcattgcattgttcaatcttctgaacaggctctcagagtctgtcaaatttgtacatgaaaaaggatcatcagtcgaagaagtcatcaacgaacagagcccttcaactgttcaaaagggtgcttccaagacgaatcttaagggcttgttcggttattcccaatacacatggattg

SEQ ID NO: 5608 - DNA, 264 bp, Zea mays
tatacggaggaggctgttgtggctgaggtcccggtgaccgaggtgccagcggaggtcccggcggcccaggtggccgaggcgcccaaggcgaagaaggcgcccaaggagaagaaggcgcctaaggagaagaagccgtccgcggcgaagaagccggcggcgcaccctccctacgctgagatgattgtagaggcgatcgctgccctcaaggagaggaaggggtcgagctcggtggccatcagcaagtacgtcgaggggaagcacggc

SEQ ID NO: 5609 - DNA, 240 bp, Zea mays
ggcggaaggcctacggcacgcgcacgctcttcttcctgacggccgcgggcacgctgaagcccatcgcgatcgagctgtgcctgccgccgatgaccgacgggtgcgcgcgcgccaagcgggtgttcacgccgcccgccgatgccaccagcaactggctgtggcagctcgccaaggcacacgtctgctccaatgacgccggcgtccaccagctcatcaaccactggctgaggacgcacgcgg

SEQ ID NO: 5610 - DNA, 285 bp, Zea mays
gcatggggcaggcagagaaggaattcagagttgaagttgaagccatcggtcatgttcggcacaagaatctggtccgccttctgggatattgcgtggaagggatacataggatgcctgtctacgagtatgttaataatggcaacctggaacaatggcttcatggcgtgaatcaacacggtgtccttagttgggaaaaccgtatgaaaattctccttgggactgcaaaagctctcgcgtaccctcatcgaggcatagaccccaaagttgtgcacagagacatcaagt

SEQ ID NO: 5611 - DNA, 211 bp, Zea mays
attcgtgtgtctggtaaagaccttattcaaaaccatttgacattctgcatatacaatcatacagcacttcttcctgagcaccactggcctattggtttccgctgcaatgggcatctaatgcttaactctgagaaaatgtccaagtccacagggaatttcctaactctggaagatgccataaaaaagtactcttctgatcgcactagatttg

SEQ ID NO: 5612 - DNA, 288 bp, Zea mays
caccgagcagggcctccccgccgacctcgtcaagaggggcgtggcggtggcggacccgtccagcccgtacaaggtgcggctgctgatcgaggactacccgtacgcgagcgacgggctggccatctggcacgccatcgagcagtgggtgggcgagtacctggccatctactaccccgacgacggcgcgctgcggggcgacgaggagctgcaggcgtggtggaaggaggtgcgcgatgtcgggcacggcgaccacaaggacgcgccctggtggcccaagatgcaggccgt

SEQ ID NO: 5613 - DNA, 224 bp, Zea mays
ccagccgatcgagaatacccggaaggccggaacccacctgctgcgcacctgcaagcctcgagtggagctcttccacggccgcggtggagatggcggcgaatctggaggacgtgccgtcactggatctgatgcacgagctgctccgccgcatgaagtgcagctccaagcccgacaagcgcctcatcctcatcggtccacctggctctggaaagggaactcagtct

SEQ ID NO: 5614 - DNA, 324 bp, Zea mays
  unsure (1)..(324): unsure at all n locations
tccccatcgatctgcgctcgcgttctatggttatcatctccccttgcgctggttgctgatccgtgctctgcttatcgaatctcctccttggccgcaggtccggcggcgaagggaaggcaagatgtacaccgcgnagaagaagatccagaaggagaagggccttgagccctccgagttcgaggactccgttgcccaggctttctttgatctggagaacgggaaccaggagctcaagagcgacctcaaggacctgtacatcaacaatgctatccagatggatgttaccgggagcaggaaggctgttgtcatccacgtcccataccg

SEQ ID NO: 5615 - DNA, 320 bp, Zea mays
ctcaaggacgcggtgctggacggcggcatcccgttcaacaaggcgtacgggatgacggcgttcgagtaccacggcacggactcgcgcttcaaccgcgtgttcaacgagggcatgaagaaccactcggtgatcatcaccaagaagctgctggacttctacacgggcttcgagggcgtgtcgacgctggtggacgtgggcggcggcgtgggcgccacgctgcacgccatcacgtcccgccacccgcacatctccggggtcaacttcgacctgccgcacgtcatctccgatgcgccgcgttcgccggcgtgcgcacgtgggcg

SEQ ID NO: 5616 - DNA, 335 bp, Zea mays
agcgtggtcggacggagtcggaatcggctcgatgcccgccgccgcttcgacggcgcgccgaccggctaggacgcgcctccgacccggctagtgtcccgctcggtcgaattccgacggccgctcgctgctgcagcgggcgcttgcagtgcgtcgcgtgggctcggctggaggcaggcggaacctttcctaggtctcggagatggcggcgccgccggctagggcccgggccgactacgactacctcatcaagctgctcctcatcggcgatacggtgttgggaaaagttgtctccttttacggttctcagatggctccttcactactagctttatcac

SEQ ID NO: 5617 - DNA, 316 bp, Zea mays
gtttcgtaagtggtgagggactgagggtctcggagtggattgatttgggattctgttcgaagatttgcggatgggggcaatggcgaccgcggggaaggtgatcaagtgcaaagctgcggtggcatgggaggccggcaagccactgtcgatcgaggaggtggaggtagcgcctccgcaggccatggaggtgcgcgtcaagatcctcttcacctcgctctgccacaccgacgtctacttctgggaggccaaggggcagactcccgtgttccctcggatctttggccatgaggctggaggtatcatagagagtgttgga

SEQ ID NO: 5618 - DNA, 319 bp, Zea mays
tgtctcggcagccacaagagaccacccccttccggcacacgggctcgaccacctgactccatcaccgtgcctgtctgtgttctagggacaagaagagcagagagatccaggagcgagcagatgcggggagaagaggatgagcaccacaacggcgtcgtcgctgaaccccaacgcgccgctcttcatcccggcggcgtaccggcaggtggaggacttctcgcccgagtggtgggagctcgtcaacaccaccgcctggttccgggaccactgcttccggcagcgccagtaccacgaggccgcctgcgacgacgtcgccgcg

SEQ ID NO: 5619 - DNA, 314 bp, Zea mays
  unsure (1)..(314): unsure at all n locations
tgtcgtaagctgcagctagtgtggactggagatccaccactccaccagtccggtccatctgctggacctcgattggtttcttcttacctaggaacatccggggatgtcgactcctgcgaggaacaggctgatgagggatttcaagcggttgatgcaggaccctccggccggcataagtggcgccccgcaggataacaacataatgctgtggaatgctgtcatatttggacctgatgataccccgtgggatggaggtacgtttaagctgactctccagtttaatgaagaatatccanacaaaccaccaactgtgc

SEQ ID NO: 5620 - DNA, 291 bp, Zea mays
tggggcaccaggcgcacacggcacggacgacaccgaggagctgcttgcacccaccggcagctgtggtgccatgccctgggctacgtcaagtccatggcgctcaagtgcgccctggacctgcgcatccccgacaccatcgaccgctgcggcgggagcgccaccctgggcgagctgctcgccgcaagcgagatcccggcgtccaaccacgactacctccgacgggtcatgcgcacgctgacagccatgcgcatcttcgcggtcagccacgacgaccccgccaaggccgacgac

SEQ ID NO: 5621 - DNA, 315 bp, Zea mays
tgattttagccgccgccgctgctcatctcacatccctcgagaagacgcctgctcctcgccgatcgatacgatggccgtcttctccgacctccacaccgccgacggcctcaagtccctcgaggctcacctcgccggcaaaacctatgtgtctggtgactccattactaaggatgacattaaggtcttcgccgcggtgccgtcgaagcctggcgctgagtttcctaatgccgcccgctggtacgagaccgtctctgcggctgtagcctcaagattccctggtaaggctgttggtgtaaatctgcctgctggatcagc

SEQ ID NO: 5622 - DNA, 310 bp, Zea mays
atcacgggcgcggaggcctgcttcgcgcactccaagcagatgctccaggcgctgggcttcccgggcggcgtgatgccgctgcgggggctggaggagtgcggctgggtgcgcgagaccgggttcgtgtggatgcggcagaaggccccctacgagcactacttccgcggcacgggcacgcgggtgcgctacgacgccgaggtcaccgcgtacgtggaggacggccggatgaagcgcatgaccggggtgcgcacaagcaggtcatgctctgggtgcccatcgtcgagatgagcctcgacggagagaagcgcga

SEQ ID NO: 5623 - DNA, 308 bp, Zea mays
cggtgggttggcttctcctccccctccggttcgggttcgggttcgtgaggttctccggggttcgggttcgtgggtgagcggatcgagatggcggcgtcggatgttgagtaccgctgcttcgtcggcggcctcgcctgggccacggacgaccactccctccacaacgccttcagcacctacggcgaggtcctcgagtccaagatcatcctcgatcgggagacgcagaggtcccgcggcttcggcttcgtcaccttctccacggaggaggcgatgcggaacgccatcgagggcatgatacggcaagagct

SEQ ID NO: 5624 - DNA, 309 bp, Zea mays
ctctgctccaatccgccgctccactccaagtcacacggaggcagccatcgtagcctcgcccgactccgcttcccctgttctttgggcatggagctgatcacaaatgtcaccgagtacgagaagctcgcgaaggagaggctgccgaagatggtgtacgactactacgcctccggcgcagaagatcagtggacgctcaaggagaaccgggaggccttctccagaattctgtttaggccacgggtactgatcgacgtctcccgtatcgacatggccacaaacattctgggcttcagcatttccatgcctatc

SEQ ID NO: 5625 - DNA, 308 bp, Zea mays
  unsure (1)..(308): unsure at all n locations
ctcangggcgactcggtggtgctcatgggcaagaacacgctcatcaggcgctgcatcaaggtctacgccgagaagaccggcaaccacacctttgacccgctcatggacctgctcgtcggcaacgttggcctcatcttcaccaagggagacctcaaggaggtgcgcgaggaggtcgccaagtacaaggttggggctcctgctcgtgttggtctggttgctcctgttgatgttgtcgtgccccctggcaacactgggctggatccctcccagacctctttcttccaggtgcttaacatcnccaccaagat

SEQ ID NO: 5626 - DNA, 301 bp, Zea mays
cgcaatccctctccacctctcctcccaccgcagcagcaggcaagcgcgaggcggaggcggagagatggagtcggaccagggcaagctcttcatcggcggcatctcctgggaaacaacggaggagaagctgagcgagcacttctccgcctacggagaggttacgcaggccgccgtcatgcgcgacaagacgacgggccgcccccgaggcttcgggtttgtcgtcttcgccgaccccgccgtcgtcgaccgagcgctgcaggacccccacaccctcgacggccgcacggtcgatgtgaagcgg

SEQ ID NO: 5627 - DNA, 304 bp, Zea mays
  unsure (1)..(304): unsure at all n locations
ctccggcgggcacgtgaacccggccgtgaccttcggcgccttcgtgggcggcaacatcaccctgttccgagggctcctgtactgggtggcgcactgctggggtccaccgtggcgtgcttcctgctccgcttctcgacgggcgggcaggccacgggcaccttcgggctgacgggcgtgtcggtgtgggaggcgctggtgctggagatcctgatgaccttcgggctggtgtacacggtgtacgcgacggcggtggacccgaagaagggcatcctgngcaccatcgccctcattagcatcggcttca

SEQ ID NO: 5628 - DNA, 304 bp, Zea mays
tccagcctgtgctgtcaggtgtcgccgttgggtgcgggtggcagcagttcgtggcctacgtgaacattggctgctactacatagtcggcgtccccctcggcgccctgctcgggttcttcttcaagctcggtgttaagggcatttgggctgggatgatcggagggacctgcatgcagacggctattctagtgtgggtcaccttgagaactgactggaacaaggaggtagaggaagcacagaataggttgcacaagtgggaggctaacaagacgacggagcccttcttgcggggttcacatgacaa

SEQ ID NO: 5629 - DNA, 335 bp, Zea mays
tccgcgagcgctctctttctctatcgactggcgacgactccgccaccgccgccgctctacgcgagacgcccaggtcttcgccaacgacgagcatccgggttagagaggaagaaattgcaaccgaaacaatggcggcagattccggcgctcgcagacaaccaagcttcaccaaggtcgaccagctgcgccctggaacccacggccacaacctcatcctcaaggttgttgactccaagatggtcgtccagagaggccgcgagggagggccccagggaagacagatgaggattgcggagtgcttggttggtgatgaaaccggcatcgatgtcttcact

SEQ ID NO: 5630 - DNA, 333 bp, Zea mays
  unsure (1)..(333): unsure at all n locations
tgcacacgcttccttctctacctcgttagctagcttagcccggccgagggagagaagcagaagcagtagaggcgaccttttttttctgttctctgatcgagctctgaagaccggggatggcgtcctgggcggctctcctggcgctgctgctctcggcgttctcggcggcggcgcagctggacgagaggttctacggccagtcgtgccccagcgtggaggacgtcgtgcggaaggagatggtgcgcgcgctctccgtcgcgccagcctcgccgngccgctcctcaggatgcacttcgacgactgcttcgtcagggcggtgcgacggctcggtgc

SEQ ID NO: 5631 - DNA, 335 bp, Zea mays
tggagaagccgccgtcgcagcaatcacagcagcccggagaacggccaggtccgacaagatgcagatctttgtgaagacgctgacagggaagaccatcaccctcgaggtcgagagcagcgacaccatcgacaatgtcaaggccaagatccaggacaaggaagggatcccgccggaccagcagcggctgatctttgccgggaagcagctggaggatggccgcacccttgcggactataacatccaaaaggagtctacgctccacctcgtgctcaggctccgcggtggcatcattgagccctcgctgcaggcgctcgctcgcaagtacaaccaggaca

SEQ ID NO: 5632 - DNA, 321 bp, Zea mays
cggcgtggctgccggggtcggaggggcagggcgtggcggacgtgctgttcggcgactacgggttcacggggaagctgccgcggacgtggttcaagtcggtggaccagctgcccatgaacgtgggcgacgcgcactacgacccgctcttcccgttcggcttcggactcaccaccaagggcacgaagtgagtgagtgtgaggcgctctgatgggatgtggcctgtgagtgagctgtgtattcgtgggcgggcgtgaggctctttggctttcgaattggttgggggtgacgggcggcgagtcgtgtacgccgcacacattgcgc

SEQ ID NO: 5633 - DNA, 337 bp, Zea mays
cgcccgccaccaggctcctctccaagatctcccaccacggggccggggagggggcgggcgtgccgctgtcctactacaccggcatcctcggcatgccggggctcaccgcgtacgtgggcttccacgagatctgcgcgccgaagaagggcgagaccgtgttcgtgtccgccgcgtccggcgccgtcggccagctggtgggccagttcgccaggctcgccggctgccacgtcgtcggcagcgccgggtcccgggagaaggtggagctgctcaagaccaggttcggcttccacgacgctttaagtataaggaggagcccgacctctgcgccgcgctcaaa

SEQ ID NO: 5634 - DNA, 331 bp, Zea mays
atcttgcaggactttgctcctccccggacatcaaattcactgaagcacagctcaagtgctacatgaaccagttactgtcaggactggagcattgccattcacgacatgtggttcatcgtgatatcaagggtgctaatctccttgtgaataatgaaggggttctaaagatagctgattttggtcttgcaaatttctttgatcccagcaaaaaccatcctctgaccagccgtgttgttactctgtggtaccgaccacctgaactgctactaggttcaactcactatgatgcagctgtagatttgtggagtgttgggtgtgtgtttcctgagat

SEQ ID NO: 5635 - DNA, 333 bp, Zea mays
cgtcgcctggcggccgtctgcagctccgcgcctctgctcggaagttgttggtgaaggtttcttgaagctgagaagatggtgctgaagacagaactctgccgcttcagcgccagaagatttatcctgggaaaggcatccgatttatccgtgctgattctcaggttttcctttttgccaactcaaaatgcaagcgctacttccacaaccgcctgaagcctgcaaagcttacctggacagcaatgtacaggaagcagcacaagaaggatatccatgctgaggctgtcaagaagaggcgccgcgccaacaagaagccatactcgaggtccattgtgg

SEQ ID NO: 5636 - DNA, 327 bp, Zea mays
cagttgttgacctcactgtcagaatcgagaagggggcctcttacgaggaaatcaagaaagctattaaggctgcttctgagggcccactcaagggtattatgggctacgtggaggaggatctggtttccaccgacttcaccggtgacagcaggtcgagcatcttcgacgccaaggccgggattgccctgaacgaccacttcatcaagctcgtctcttggtacgacaacgagtggggctacagcaaccgcgtcgtcgacctgatccgccacatgttcaagacccagtagagagagatatttctgcctccctatcgtgggtcgtcccaat

SEQ ID NO: 5637 - DNA, 229 bp, Zea mays
  unsure (1)..(229): unsure at all n locations
aagatggacttggaagaattctgtgcggcagaatcagcccgtatcatttatntcatcccagctttccaaagcctccagctggtacgggctgattgctttggaaagctgggaagaaatcgctggaacgcttttcagcacttcgaacaggagggcaaccgagttatatctgtggaggagttggcgcaggaactatccctcgccccgactcactactccatcgtgcaagact

SEQ ID NO: 5638 - DNA, 298 bp, Zea mays
tgcaacggctatgcccagtgctggactgccacacctcccacatcgccgtcaagtttgctgagctcattaccaagatcgacaggcgatctggcaaggagctcgagaaggagcccaagttcctgaagaacggtgatgctggtatggtgaagatgattcccaccaagcctatggtggtggagacattctccgcgtatcctcccctgggtaggtttgccgtccgcgacatgaggcagacggttgctgttggagtcatcaagagtgtggagaagaaggacccaaccggcgccaaggtgaccaa

SEQ ID NO: 5639 - DNA, 302 bp, Zea mays
cggtttctcctcaccctccggttcgggttcgggttcgtgaggttctccggggttcgggttcgtgggtgagcggatcgagatggcggcgtcggatgttgagtaccgctgcttcgtcggcggcctcgcctggtccacggacgaccactccctccacaacgccttcagcacctacggcgaggtcctcgagtccaagatcatcctcgatcgggagacgcagaggtcccgctgcttcggcttcgtcaccttctccacggaggaggcgatgctgaacgccatcgagggcatgaacggcaatgtgctgg

SEQ ID NO: 5640 - DNA, 324 bp, Zea mays
tgagagccaatcctaaattcccaatccctcaaaggaaggaggattcttcagcgtctcgcttgccggccccgaatcgcagtcgccgcccggatccgaggaaacaagtcgtcgtcttgctccaccgtccgcccgccgccatgagcttcatcttcggcaagaagaagactcctgctgagctgctgcgggagaataagcggatgctggacaagtccatccgggagattgagagggagaggcagggcctgcaggctcaggagaagaagctcatcaacgagatcaagaaggtggccaagcagggtcagatgggagctgtaaaaattatgg

SEQ ID NO: 5641 - DNA, 319 bp, Zea mays
tagcggcactccagggtccaggcccagcagcctcttcggctcttcgttgggggtgcgtggacaccggaaattgcctcggggattgcgttcctgatctaagcccggcatgaagggctgctcagagcgtttgctgctcctgctgctgctggcatcgtcgttgttactgtccgtcgtggttgccgcgcagacgacttgccctgccgacctcgacagcaaatgcgacggtggcgcgcctgatgactgggagggggaattcttccccgcggtccgaaaatccagtatgagggtcaacaagcaagaacctcttgcttatagtggt

SEQ ID NO: 5642 - DNA, 321 bp, Zea mays
tcgggtacaagcaccagacggacgcgtcggcgtcgggcccgacgcggcgtgcggcggcgtcggcatcctcggcatcgcttgggccttcggcggcatgatcttcatcctcgtctactgcaccgccggcatctcaggtgggcacatcaacccggccgtgaccttcggcctgttcctggccaggaaggtgtccctcgtccgcgcgctgctctacatcatcgcgcagtgcctgggcgccatctgcggcgtgggcctcgtcaagggcttccagagcgcctactacgtgcgctacggcggcggcgccaacgagctcagcgacggcta

SEQ ID NO: 5643 - DNA, 316 bp, Zea mays
gttagtggcaatcaagagatccaaggaagggtccatgcagggtggccttgagttcaagacagaaatagaactcctttccagggttcatcacaataacttggttggactggttggtttctgctttgagaagggcgaaaagatgttagtttacgagttcatacctaatggaacactaagcgaggctttatatggtatgaaaggaatacaattagactggagcaggaggctcaagatagctttggattcagctaaagggctagcatacctccatgaccatgccaatcctcctatcattcacagagatgtgaagtccact

SEQ ID NO: 5644 - DNA, 293 bp, Zea mays
cggattagttgtactgtacattgttcctgcgaagacactgggtcgtccgggtcaatcggcagcttgaaccagccatggcggcgcaccggccgaacgccgcggcgccgctgctcgtcctaggctccctgttcgcggtgtttgcgggagccaaggataacgctgcggtggctgcggtgagtgtggtggccgtcatggcgttcgtgatggccttctccgtcggcttgggccctctggcgtgggtgtacagctccgagatactgccgctccgacttcgcgggctaggtgccgggctc

SEQ ID NO: 5645 - DNA, 317 bp, Zea mays
agcgaagtccgtgaagcacatcttgccaaatctttgtactttataagggtcggtgagaaggaaaaggccctggaacagcttaaagtcactgaaggaaaaactgtagctgttggccaaaagatggatcttgtgttccacactttgcagattggttttttctacatggattttgatctgatatcaaaatccatcgataaggcaaagaacttgtttgaggaaggaggcgattgggagaggaagaacaggttgaaagtatatgaaggcttgtactgcatggcaaccagaaacttcaagaaagctgccagcttatttttaga

SEQ ID NO: 5646 - DNA, 223 bp, Zea mays
gtcatcactttctgatgttaacaagttgatcaaggagatccggtctgatgtttctgaagtagttgcagctgacgagtttgagtacaaggatccagttgatggctctgtgtccaagcaccagggcatccgatacctcttcggagatggttcacgactggtgttccgtctatccggaaccggttctgttggtgccgacatccgtgtctacatcgagcaatacgag

SEQ ID NO: 5647 - DNA, 313 bp, Zea mays
tgacaagatgaaggaggtgatcaggtacatgaacagaaacaaactttggaaggaaataagggagcagatcaagggacacctgaggttgcagtatgagagcagctacaccgaagcatccgtccttcaggatatcccgatttctatccgtgcaaagatttctcaaacgctgtataagccatatatcgaaagcattccactgttcaagggatgttccgcagagttcattcaacagattgtgatcaggttgcaagaggagttcttcctaccaggagaagttatattggagcagggaagtgcagtcgatcagctgtac

SEQ ID NO: 5648 - DNA, 319 bp, Zea mays
  unsure (1)..(319): unsure at all n locations
cacaggctcaccccaccaacagcaagcgaaaatctcccgatcncctctggtctccgcggcgaagatgtcggggcgcggcaacggcgggaagggcctgggcaagggcggcgcgaagccaccggaaggtgctccgcgataacatccaggggatcacgaagccggcgatccggcggctggcgcgcaggggcggcgtgaagcgcatctccgggctcatctacgaggagagccgcggcgtcctcaagatcttcctggagaacgtgatccgcgacgccgtcacttacaccgagcacgcgcgccgcaagaccgtcacagcgatgga

SEQ ID NO: 5649 - DNA, 310 bp, Zea mays
gccggtcacgaataaagagcagcagcgcaagaggtcggtagagcgagaagaaggcaatggcggccgagagcttccttttcacctcggagtccgtgaacgaggggcacccgacaagctgtgcgaccaggtgtcggacgccgtgcttgacgcatgcctcgcgcaggaccccgacagcaaggtcggctgcgagacctgcaccaagaccaacatggtgatggtgttcggcgagatccacgaccaaggcgacgtggactacgagaagtcgtgcgcgacacctgcgcgagatcgggtcacctcgacgagtgggctc

SEQ ID NO: 5650 - DNA, 256 bp, Zea mays
tgtcgtgtcgcgcgtgaagctctccccggccgcgtccggcggcagcggcggcaaggccggctacgccgactccctcatcgaggaggaggaggggctcaacgaccacaacgtcgtcgtcaagtgcgccgagattcacaacgccatctccgaagaggaacatcggttcttttcaccgagtatcaatatgttgggatcttcatggcgatcttcgccggtgtgatcttcctcttccctgggtcgggtgagggagtcagca

SEQ ID NO: 5651 - DNA, 312 bp, Zea mays
tgtgggttggcttctcctccccctccggttcgggttcgggttcgtgaggttctccggggttcgggttcgtgggtgagcggatcgagatggcggcgtcggatgttgagtaccgctgcttcgtcggcggcctcgcctgggccacggacgaccactccctccacaacgccttcagcacctacggcgaggtcctcgagtccaagatcatcctcgatcgggagacgcagaggtcccgcggcttcggcttcgtcaccttctccacggaggaggcgatgcggaacccatcgagggcatgaacggcaaggagctggacgg

SEQ ID NO: 5652 - DNA, 314 bp, Zea mays
tgttcctggttcatgattatattatcctatttcctctgtttttaactagcttggtggtctgaactcgttgctgcaagttgaagcatcttcgtcaataccacatgtgtcgcaagtacccaccatcatcttaggtatggatgtttcacatggtcatccaggacaagatagaccttcggttgcagcggtggttagttctcgtcaatggcctcttatctctagatatagagcatcagtgcacacccaatctgccagactagaaatgatgtcctcgttgtttaagccgcggggtactgatgatgatggcctcatccggg

SEQ ID NO: 5653 - DNA, 312 bp, Zea mays
gtcggcgtcgagcagcggcacgacggcggcgatgacgacgagcctgaagaagaaccggaagaagcgcgggcacgtgtcggcggggcacggccgcatcggcaagcaccggaagcacccgggaggccgcggcaacgcggctgcatgcaccaccaccgcatcctcttcgataagtaccacccgggctacttcggcaaggtgggcatgcgctacttccacaggctccgcaacaagttccactgcccgtcggtcaacgtggagcggctctggtcgatggtgcccgccggcaaggccgcggaggcggcggacgcggac

SEQ ID NO: 5654 - DNA, 312 bp, Zea mays
gtcgtaggcagcgagcgtctctcctctcccacgcatcgcgccaaggaagagagagagatcgccgctccccttctcggcgtcggtggtgcgggtgccctccctcctcgagcgagatctgtctggtcacagatctatctgacaaaatggtgaagatctgctgcatcggtgctggctatgtcggtggcccaaccatggccgtcattgccctcaagtgcccagacattgaggtcgtcgtcgttgacatctccaagccccgcattgaggcctggaacagtgacaccctgccaatctacgagcctggtctcgatgatg

SEQ ID NO: 5655 - DNA, 306 bp, Zea mays
  unsure (1)..(306): unsure at all n locations
agagaatcnccaagcaaacaaacagggtagatggagatgacatgacaggagaggagaggttgggtctgggacaccatggctccgatgaagctgtacggggcggtgatgtcgtggaacgtgacgaggtgcgcaacggcgctggaggaggctggctccgactacgagatcgtgcccatcaacttcgccaccgccgagcacaagagccccgagcacctcgtccgcaacccgtttggtcaggttccagctctgcaggatggtgacttgtacctcttcgaatcacgagcaatctgcaagtacgctgctcgc

SEQ ID NO: 5656 - DNA, 312 bp, Zea mays
tctacttgcaaggacagccgtcttaataacaacagtctttctggtcaaattccgaaaaccttgaccaatatcaacactctccaagttctggatctatcaaacaacaatctctcgggaggggtgccatcaagcggttcgttttctctctttacacctataagttttgctaacaacccaaatctttgcggccctggtactacaaagccttgtcctggggctcctccattttctccaccccctccatacaatcctccagcaccaacttcatcgaaaggcgtgtccagcactggagcagtagctggaggcgttgca

SEQ ID NO: 5657 - DNA, 307 bp, Zea mays
ctcggaccatggcacgacatccactccaagatcgaaggcccagccgcatgggacgtgctctacaacttcgaacagcggtggaggaagcaagggggcggcattgatctcctcgtcaacctcaaagctatggcggacctgatcataccgccgtcgccagtgatgttcccggaagaccaagattcatggaacgtgcagctattccgctccatcgatggcggcgcgtgttttggcttccctagcaccccagaggccgcagctcaatctggccttgtcagtggcaagaataatgtcctagacaggagcatca

SEQ ID NO: 5658 - DNA, 306 bp, Zea mays
tcagcaaagcaagttcttgagcatccctggcttcaaaatgctaagaaagctccaaacgttcctcttggagacattgtaaagtcaaggctgaaacagttttcaaggatgaacagattcaaaagaagagctctaagggttattgctgatcacttgtcggctgaagaggttcaggacataaaggagatgttcaaggtgatggatactgataatgatggtatagtttcttatgaagagttaaagagcgggatcgcaaattttggttctcatcttgcagaatcagaagtgcaaatgcttatcgaagctgtg

SEQ ID NO: 5659 - DNA, 297 bp, Zea mays
ttttgtttggtacaactgaggataacttaggagcagccttgtgcaagaggcttcatgcaattggctggcgggtttctcatgtagcagttgttcgcaatgagattgattctgttgctgaagaagttgaacgttgtaaatctactgatgacatggtgtttatttttggtggactcgggccgctacattcagacgtttctttggctggtgtcgcgaaagcatttggagttcgtctggctcctgatgaagaatttgaagattaccttagtcaactcatgggaaacaattacactggtgacc

SEQ ID NO: 5660 - DNA, 338 bp, Zea mays
aggctcggtgttcggctcgaggacaatgtcactgtaacaccccaccttggagctagtactgtcgaggctcaggaaggcgtcgctatcgagattgcggaagccgtggttggtgcgctgagaggggagctcgcagcaaccgctgtgaatgcgcccatggtcccagctgagatcctgtcagagctggctccatatgtttctctggccgagaagctcgggaggctggcggtgcagctcgtggccggcgagagcggcatcaagggcgtgaaggtggtgtacaccacagcgcgtggccccgacgacctggacactcggctcctccgcgcgatggtgaccaaggg

SEQ ID NO: 5661 - DNA, 338 bp, Zea mays
gggatggagggacgaggcgcggggtgggctcgaggccttgtcgccgaacgggaaaccctgcccgggccttcgttgcagcgctacgagcttcgacgggagcgtcgatctccacctctgaagtggctgcttgtgatctagatctgagagctgcagtggttgacagctgagtgtgaaactgtgaatcgaagatgagcgtggtgggcttcgacctcggcaatgagagctgcatcgtggcggtcgcgcggcagcgcgcatcgacgtggtcctcaacgaggagtccaagcgcgagacacccgccatcgtctgcttcggggacaagcagcggttcatcggcaccg

SEQ ID NO: 5662 - DNA, 314 bp, Zea mays
gcaagagtcgagtcgatcgagatggtgcagttcggcaagtggctgaggaggcagatcgagcggacgctcccggagtggcaggaccagttcctgcgctacaaggagctgaagcggtgcgtcaaggcccgctccggcggctgcccgccgttgcccgcggaggaggccgagttcgtggccgagatcgacgcggagaccgagaagatcaacgccttcttcctcgaccaggaggaggagttcatcatccgccaccgggagctgcagatacacatcgagcgcgcgctgggccgcggcaggccggcgccggcgccggcgct

SEQ ID NO: 5663 - DNA, 313 bp, Zea mays
caagatttatactacaagcggactgtgaagtatgtgggagaacctatgacccacttggagtctattgcttcttcagcagtgcgagctgcactcaaagttaaggcatcagtcatcatttgcttcacctcttctggacgagctgcaaggctcattgctaagtacaggcccagcatgcctgttttgtctgttgtcattcctcgtctaaagacaaaccaactgaggtggagtttcacaggtgtttttgaggcaagacaatcactcatagttagaggcctcttccctatgcttgctgatccacgacacccagctgaat

SEQ ID NO: 5664 - DNA, 313 bp, Zea mays
cacacacacacacacacacagacaagtggtttccaaagccaagtgtgtgtactagcaaccagctagctcgggcggcagcaggcagccatcatgtcggaggagaagcaccaccacttcttcaaccaccacaagaaggacgaggagcagcccgccggcgagtacgggtactccgagaccgaggtggtcaccgccaccggcgagggcgagtacgagaggtacaagaaggaggagaaggagcacaagcacaagcagcacctcggcgaggccggcgccatcggcgccggcgccttcgcactctacgagaagcacgagg

SEQ ID NO: 5665 - DNA, 312 bp, Zea mays
gttttgccaaatggcacagacatctgctacatggttagagaatcttcacaagattgggagcttgtctggtaccaaccatcaaatgagtgtgaatactatgctacatgtggtccaaatgcaaaatgcactgcatcgcaagatggcaaggcaaaatgcacctgcctaaaaggttttcatccgaagttgcaggagcagtggaatgcaggaaattggagtcaaggttgcatcaggagcccacctctgggttgtgagaccaatcagtctggggatggatttcttccaatgggaaacataaagtggcctgatttctca

SEQ ID NO: 5666 - DNA, 312 bp, Zea mays
tggagtgaagtgtgcgattgcagggagaaacctttacatgaggttcagctgcagcacaggggatgccatggggatgaacatggtctccaaaggtgtacagaacgtgctggactacctccaggctgacttccctgatatggatgtcatcagcatatcaggtaacttctgttctgacaagaagtcagctgctgtgaactggatcgatggccgtgggaagtcggtggtttgcgaggcggtaatcaaggaagaagttgtgaaaaaggttctcaagacaaacgtacaggctctcgtagaattgaacgtgatcaagaa

SEQ ID NO: 5667 - DNA, 303 bp, Zea mays
gaaccaggacaaggtcctcatggagagctggtactatctcaaggacgcggtgctggacggcggcatcccgttcaacaaggcgtacgggatgacggcgttcgagtaccacgggacggacccgcgcttcaaccgcgtgttcaacgagggcatgaagaaccactcggtgatcatcaccaagaagctgctggacttctacacgggcttcgagggcgtgtcgacgctggtggacgtgggcggcggcgtgggcgccacgctgcacgccatcacgtcccgccacccgcacatctccggggtcaacttcga

SEQ ID NO: 5668 - DNA, 301 bp, Zea mays
tgcttgaggacgttcgacctgccggagggcgaagaagttccagtctgctgcttactccaactgcgcaaagaagccatcctgatatcccttttggctttctcgttctagtagtttaggatttcttttctgacacttcgattcttaccaatccccctggcctgctgctttcctgacaatcgaccagttccccagtcttgctccctgcagtcctccctcctccatctccagcgttgtgttctgactcacctgcaccaatggctgttctttctgctgctggtgctcccccggcctcagctatcgg

SEQ ID NO: 5669 - DNA, 304 bp, Zea mays
cccaaacgcctccgcctccgcctccctagggttttgctctcggctcgtcggatccagttcgggggatcctccatggcgtcgcgtccgtcgctgaagtcgaagcccaagggcaagggcgggaagaaggccaccgccgacgacgaggacgccaccgcggcggcgaccacggtgcggctcatgaaggagtggaccacgtggacgatgaagaaggcgaaggtggtggcgcactacggcttcatccccctcgtcatcgtcatcggcatgaactccgagcccaagcgctccgtgttccagctcctctccc

SEQ ID NO: 5670 - DNA, 298 bp, Zea mays
atgaacgccgccgaggacgagatcgtgcgcctcacgcgcgaggtcgtgcccggcatgatcgtcaccgggatggaggtcgccgagatcgacggcgccccgaggatgggcccgacgttcggcgccatgatgatctccggccagaaggcggcgcacctggcgctgaaggcactgggcaggcccaacgccgtggacgggaccatccccgaggtgtcgccggcgctgcgcgaggagttcgtgattgcgtccaaggacgacgaggtcgtggacgcctgagcgagcatccacgcgccagcatgca

SEQ ID NO: 5671 - DNA, 299 bp, Zea mays
tccggagaattcctcccttgcgccgccgtcgcatcctcttcgaagttcgaatcgaatcgcgccgcgatcacccacctcatggcggacaaggagcctgtcgtggagcggccagatgcgggtgaggaggaggaggacgcctcagccgccgccgccgcgggggaggaggaggacacgggcgcccaggtggctcccatcgtgcggcttgaggaggtagccgtcaccaccggcgacgaggacgaggacgtcctgctcgacatgaaggcgaactgtaccgattcgacaaagacggtaaccaatgg

SEQ ID NO: 5672 - DNA, 297 bp, Zea mays
agagaatccccaagcaaacaaacagggtagatggagaggagatgagaggagaggagaggttgggtctgggacaccatggctccgatgaagctgtacggggcggtgatgtcgtggaacgtgacgaggtgcgcaacggcgctggaggaggctggctccgactacgagatcgtgcccatcaacttcgccaccgccgagcacaagagccccgagcacctcgtccgcaacccgtttggtcaggttccagctctgcaggatggtgacttgtacctcttcgaatcacgagcaatctgcaagtac

SEQ ID NO: 5673 - DNA, 271 bp, Zea mays
gcgctctgcacgctccgtgaggtcttcgagggcgtccaccggcgtgtcggcttcaacgtggagctcaagttcgatgacgacctcttctacacggaggagaggctacctgcatcctaaaatccgtctcaagttgtcttcgagcacgccaacgacagccatcatcttctccagcttccaacccgatgccgcgcagtcatccgaactgaagacatacctgtgctcttctgacaacgaggacgagtgtagcgaccggtcgaatcgctggagaggc

SEQ ID NO: 5674 - DNA, 299 bp, Zea mays
cagactggcactgtaagaacaaattgtatagattgtctggatcgtaccaatgtgactcagagcatgattggggggaaaattctggaaagccaacttcaacgtataggagttcttagtgctggtgatacaataagcaaacatccagcctttgatacaaactacaaaattttgtgggccaatcatggagatgcaataagcattcagtactctggaactcctgctctgaagggagattttgttcggtacgggaagcgaactactcagggaattctaaacgatttgaggaatgcacttgctag

SEQ ID NO: 5675 - DNA, 294 bp, Zea mays
ggaaagatgcagtacctatttgatgaggatggccgtcgttacctggatgctttcggtggcattgcaacagtttgttgtgggcactgccatccagatgttgttgaagccatagtaaaccaggcaaagcggatccagcactccacagttctatatctcaatcatgcaattgcagattttgccgaggcattggcttccaaaatgcctggtgatctgaaggttgttttcttcacaaattcaggcacggaggcaaatgagcttgcactgatgattgcacggctttacactggttgcaat

SEQ ID NO: 5676 - DNA, 296 bp, Zea mays
gcggaggcgcggctgctcctgctcgtcgcgacgtcgaatttcagcgccgcccgcgcgatccttggtctcttcgcccgtgaggagaggcgcgacaatggctgggaaaggcgggccgaccaacctggagaaggagcagatgtttgggatggcggagaaggagatggagtacagggttgatcttttcaacaggcttacaaagacctgttttgagaagtgcgttgaaaaaaggtataaagaagctgagctcaatatgggtgagaacagttgcattgatcgatgtgtttcagagtattggc

SEQ ID NO: 5677 - DNA, 256 bp, Zea mays
ggcgagcagcgaccatggatacccaagcacgtccggttcctccccgcgtcaagctcggcatccagggattcgaggtgtccaagctggggttcgggtgcatggggctgacgggcgcgtacaactccccgctggacgacgaggccggcatcgccgtcatcgcgcacgctttcagccgcggagtcaccttgttcgacacctccgacgtatacgggcccctcaccaacgaaatcctcctcggcaaggcgctgaagcagct

SEQ ID NO: 5678 - DNA, 295 bp, Zea mays
ggcatcggcggcgactacccgctgtcggcgaccatcatgtccgagtacgccaacaagaagacgcgcggcgcgttcatcgccgcggtgttcgcgatgcagggcttcggcatcatggccggcggcctcgtggccatcgtcgtgtccgcgtcgttcaaggccaggttccccgccccggcctacgccgtcgaccccgccggttccacgccgccgcagccgacttcgtgtggcggatcatcctgatgctgggcgcgatgcccgcggcgctcacctactactggcgcaccaagatgcccga

SEQ ID NO: 5679 - DNA, 297 bp, Zea mays
tggcgatcgagccagccgctgaagagcccatctatgtcaacgcgaagcagtaccacgctattctccggaggagacagctccgtgcaaagctagaggctgaaaacaagctcgtgaaaagccgcaagccgtacctccacgagtctcggcacctgcacgcgatgaagagagctcggggaacaggcgggcggttcctgaacacgaagcagcagccggagtcccccggcagcggcggctcctcggacgcgcaacggtgcccgcgaccgcgagcggcggcctgttcacgaagcatgagcacag

SEQ ID NO: 5680 - DNA, 311 bp, Zea mays
caccccgcgagcggtgacttccctagggtttagtcgcgccgccgccgccgccgaaacagcacatcgctctctcgatctcagccatggcggaggtggagcagccccaggacgcggtgaagctcttcaaccgctggaccttcgacgatgtccaggtgaacgatatctcgctgaacgactacctggctgtgactgcggcgaacacgcgacattcctgccgcactccgcggggcgctactccaagaagcggttccgcaaggcgcagtgcgccatcgtcgagcgcctcaccaactcgctcatgatgcacgggcgca

SEQ ID NO: 5681 - DNA, 316 bp, Zea mays
acttcagcaaggacgagaagctcctcgtatacgactaagctgtccatgggcagcctctccgccctgctgcacgggaaccgcgcctccggccggacgccgctggactgggagacgcggtcggcggtcgcgctggcggcggctcgcggcgtggcgcacatccactccacggggcccacggcgtcgcacggcaacatcaagtcctccaacgtccttctcaccaagaactacgaggcgcgcgtgtcggaccacggcctccccacgctcgtcggcccctccttctcgcccaccagggtgtccggctaccgcgcaccggagg

SEQ ID NO: 5682 - DNA, 313 bp, Zea mays
  unsure (1)..(313): unsure at all n locations
tgcanaagcaaccgtttcaagtttcctccctagtgcacccaggaaatcgccagcacctcccctgttccctctctgtctctggctctctctcctctccgcccctttttatcgcccgatctcacacattttggaaagaggagagagagggagagattagagggagcgccctgcccaagcaaagagaaaccgcggcgcgagaagcgggaggaagggcagacgggcgagcaggatgagagagatcatcagcatccacatcggccaggccgggatccaggtcggcaacgcctgctgggagctctactgcctcgagcac

SEQ ID NO: 5683 - DNA, 315 bp, Zea mays
cggataggtagcaccggagcaggtagaacgctgcacaatccccttcgccgccgccaagatggtgaacgttcctaagaccaagaagacgtactgcaagaacaaagagtgcaagaagcacacactccacaaggtgactcagtataagaagggcaaggatagcctgtctgcccagggaaagcgccgttatgaccgcaagcagtcaggatatggtggtcagaccaagcctgtcttccacaagaaggccaagaccaccaagaagattgttctgaagctgcagtgccagagctgcaagcactactcacagcacgccatcaa

SEQ ID NO: 5684 - DNA, 257 bp, Zea mays
gatatcgccaaaccctagctcccgatctcgatggcgaaccctcgcgtcttcttcgacatgaccgtcggcggcgccccggcgggccggatcgtgatggagctgtacgccaacgaggtgcccaagaccgcggagaacttccgcgcgctgtgcacgggcgagaacggcgtgggcaagtccgggaagccgctccactacaagggctccaccttccaccgcgtcatccccgagttcatgtgccagggcggcgacttcacccg

SEQ ID NO: 5685 - DNA, 271 bp, Zea mays
  unsure (1)..(271): unsure at all n locations
tggtatgtctgggcttgcaagaattatgatggagatgtgcagagcgatttcttagctcaaggttttggctcattgggtttgatgacttcggtactggtgtgccctgatggaaagacgatcgaagctgaagctgcccatggtactgttacccgtcattaccgtgttcaccagaaaggaggtgaaactagtacgaacagtattgcctcaatctttgcgtggacaagaggacttgcacacagggncaagcttgatgacaatgctagactacttg

SEQ ID NO: 5686 - DNA, 249 bp, Zea mays
tgttatttctgtgcagcgtatgtttgattttgacaactatttttactggtggacagaacttctgttcaagagatgataccatcttttgtggtgtgtttgacggccatggaccttatggccatttggttgccaagagagtcagagatctgctgcctctaaagttaggagaaggtttgacgacggaagatggtagagtaacatccactggcaacattaagctcaacacacatgatgtagcttcaccagaac

SEQ ID NO: 5687 - DNA, 238 bp, Zea mays
cactaccccactcccaggcgccgcacaggtacgtcgccggcggcgatgacgacgcgcttcaagaagaaccgcaagacgcgcggccacgtgtccgccgggcacggccgcatcggcaagcacaggaagcatcccggaggtcgcggtaacgccggtggcatgcaccaccaccgcatcctcttcgacaagtaccatcccggctacttcggtaaggtcggcatgcgctacttccacaagctcc

SEQ ID NO: 5688 - DNA, 307 bp, Zea mays
aagaagggtgaaaaggtgggctcgtccgagtctgccctgctcgccaagctgggtatccgtcccttctcgtacggcctccaggtcaccagtgtctacgaggatgggtccgtgttcagccctgaggtgctcgacctttccgaggaggacctgattgagaagtttgccactggtgtatccatggttgcctccctgtcactggcgatctcgtacccgacccttgctgctgtgccccacatgttcatcaatgggtacaagaatgtgcttgctgttgctgtcgagacagactactcgtacccacatgctgaca

SEQ ID NO: 5689 - DNA, 306 bp, Zea mays
tgaaatcttcaaagatcttgctgtgctagtccatgatcaaggagcaatgatagatgacattgattcccatatagagaatgctgttgtagcaacttcgcaggctaaaggtcagctttcaaaagctgccaagactcagaagtcgaactcttcgctgatatgcttgttactggttatcttcggcgtggtcctgctcatagtgataatagtacttgcagcataaaagcttggaaggcagctgaggttccgatgatcgagcttattgcgatgaattccttattattattttttttgctgtgcagccaggaa

SEQ ID NO: 5690 - DNA, 302 bp, Zea mays
tgggttttgctgctctccgaccccgagctccgaatgccgcagcatcaggcgcggcccccctcgcgtgtgaccgagatggcgctgccgaatcaggggaccgttgattaccccagcttcaagctcgtcatcgtcggcgatggtggaactggtaaaactacatttgtgaagaggcatctcactggagagtttgagaagaaatatgaaccaaccattggtgtggaagttcatccgttggatttcaccactaactgtggtaagatcaggttctactgctgggataccgcaggcaagagaatttggtg

SEQ ID NO: 5691 - DNA, 294 bp, Zea mays
cccgcgagcgggcgtagtgactcggaatcggctcgaggcgcgccgcgacacggcttcgggctcggcatgaaccagttcgccgacctcaccaacgacgagttccgcgccggtacctcggcgccaggctccccgccgcccggagaaggggaaccgccgtgggggagaggtaccgccacggcggtggcgccgaggagctgccggagagcgtcgactggagggagaagggcgccgttgcgccgtacaagaaccaggggcagtgcggaagttgctgggctttctctgcagtaagctcag

SEQ ID NO: 5692 - DNA, 270 bp, Zea mays
gcagttctgggtcatcggaggcgtttcggcgcatctgttcgcggtgttccagggcctgctgaaggtgttcgccggcatcgacacgagcttcaccgtgacgtcgaaggccggggacgacgaggagttctcggagctgtacacgttcaagtggaccaccctgctgatacccccgaccacgctcctcctgctgaacttcatcggggtggtggccgggatctcgaacgcgatcaacaacgggtacgagtcgtggggccccctgttcgggaagct

SEQ ID NO: 5693 - DNA, 240 bp, Zea mays
tggcaaagtactactgcaacatctgcaaatttttcgatgacgaaaggagtgtgtaccactgcccgttttgtaatttgtgtcgtcttgggaaaggtcttggtgttgatttctttcattgcatgaaatgcaactgctgtcttggaatgaaattaactgagcacaaatgtcgggaaaaagggctagagacaaattgtccaatatgctgtgacttcctgtttacatcaagtgccgcagtcagag

SEQ ID NO: 5694 - DNA, 299 bp, Zea mays
  unsure (1)..(299): unsure at all n locations
cagaacctcgctaccaacctgttcaagatgcttcttaagtaccggcccgaagacaaggctgccaagaaggagaggcttctgaagagggcccaggctgagaatgaaggaaaaactgttgaatccaagaaaccaattgttgtgaagtatggccttaaccatgtgacttacctcattgagcagaacaaggctcagctcgttgtcatcgctcatgatgtggatccgattgaactggttgtttggcttccagccctgtgcaggaagatggaggtcccatactgcattgttanaggaaaggctcg

SEQ ID NO: 5695 - DNA, 301 bp, Zea mays
ctgttctgagacctgagtggtggcggctgcagctgcccgcgcggcgaagatggctgcgccatggcttcttgcttgcagcttgctgctgctctccctggcgacctttcacggagctgagggcgcgatcggcgtgaactacggcatgatcgccaacaacctgccggcgccggagcaggtcgtctccatgtacaaggccaagaatatcagctacgtgcgtctgttccacccggacacgaccgtgctgaacgcgctccgcggctccggcatcggtgtcatcctgggcacgctgaacgaggacctc

SEQ ID NO: 5696 - DNA, 258 bp, Zea mays
tggcaacgactcgcgcgggccggtcctaggttctcccggagcgggtgggcgggcgggcggttcggcgggatgggcacgccggagttccccaacctgggaaagcactgcagcgtcggcgactgcaaccagatcgacttcctccccttcacctgcgaccgctgcgaccatgtcttttgccttgatcaccgaagttatacatcacaccaatgcccagatgcaaacatgaaagacgtcactgtcctcatctgcccactctgt

SEQ ID NO: 5697 - DNA, 268 bp, Zea mays
ataaggtaaggggcgacgaaaatggctccaacgaccgccaccaaggacgacagtggctacggcgacgagcgccggcgcgagctgcaggcgttcgacgacacgaagctgggggtgacaggtctggtggactccggcgtcaagtccatcccgtccatcttccaccacccgccggaagccctgagcgacataatttctccggcgcctctgccgccgtcgccgccctccggcgccgccatcccggtggtggacctctcggtgacgcggcgcg

SEQ ID NO: 5698 - DNA, 226 bp, Zea mays
ggcatcgcacacaaacgcaacctgcagccatggcacagaagctcgcgccaccgacggcggcggccgtcgtcgtcctgctggcgctcgccttgtcggccgccgcgcagaactgcgggtgcgcgtcgggcctgtgctgcagccggttcgggtactgcgggacgggcgaggactactgcggcgccgggtgccagtcgggcccctgcgacgtgccggagaccaacaacgc

SEQ ID NO: 5699 - DNA, 317 bp, Zea mays
gccgtctcctccgcacgcgaaaaccctagcagctccgtagtccctctcctctggaggtattcgcagtcgaccgtgtcctcggagcacgatgaaggttgttgctgcctacctgcttgctgtcctcgctgggaatgccagcccctccgctgaggatttgactggcattctggagtcagttggctgtgaagttgacaatgaaaggatggaactgctgctgtcccaactgagcggtaaggacatcaccgagctcattgccgcgggcagagagaagtttgcttcagtcccatgtggcggcggcggtgtggctgttgcggcag

SEQ ID NO: 5700 - DNA, 297 bp, Zea mays
accttccctccctccctctccccgcgggccgccagaggccatttcgccctcgattcgaccccgattcgtccgcccgcgaccgggattccctccgccaagcgcggatctgaacgctgcgctccgtgtcgccgctcgaatccgccatgaagggggccaaatccaagggcgccgccaaggccgatgccaagctggcggtgaagagcaagggggcggagaagcccgcccaaggcaggaataggaaggccggcaaggaccccaacaagcctaagagggctccagcgctttcttcgtgttcat

SEQ ID NO: 5701 - DNA, 262 bp, Zea mays
cacaaaaaccctagcacgcaggcgcagcaggcctgcacccaaagcttccggagaattcctcccttgccccgccgtcgcatcctcttcgaagttcgaatcgaatcgcgccgcgatcacccacctcatggcggacaaggagcctgtcgtggagcggcagaagcggtgacgacgagagacgctcagtcgcgcgcgcgtggtagagagacacggcgccagtagtccatctgcgctgagagtagcgcacacccgagagacagactct

SEQ ID NO: 5702 - DNA, 310 bp, Zea mays
agcacatgagaagtcatgctacacagcagttttgaaaggccacattgcactagacattgctgtgtttcctaatgggacgacaggacatgctcttgatattctttcacgagcaccactctggagagagggtcttgactatcggcatggtacaggccatggaattggatcttatttgaatgtccatgaaggtcctcatctaattagcttcagaccttctgctcgaaatgtaccgctgcaagcatcaatgactgtgacagatgagcctggttattatgaagatggggcctttggtataagattggagaatgta

SEQ ID NO: 5703 - DNA, 315 bp, Zea mays
gttcctccgagcccaggagcagccccgcgccaggaggaagtttgttcttttaacaatatgtcgagggaggagaatgtttacatggccaagttggctgagcaggctgaaaggtatgaggagatggttgagtatatggagaaggtggctaagactgtagatgtggaagaactcactgttgaggagcgtaaccttctgtctgttgcatacaagaatgtgattggggctcgccgcgcttcatggcgcattgtttcttccattgaacaaaaggaggagtcccgtaagaacgaagagcatgtgaaccttatcaaggaatat

SEQ ID NO: 5704 - DNA, 311 bp, Zea mays
  unsure (1)..(311): unsure at all n locations
ccnggcagccggagaaccgcgaatctttctccctcctcgtcctcaacgtctccttccgcactacggctgacgatctcttcccgctcttcgatcgctacggcaaggtcttagacatctacatcccgcgcgaccacaggactggggatccgcgagggttcgcgttcgtgaggtacaattacgaggatgaggcgcgggatgccattgacgggcttgatgggatgaggtttgatgggcgtgcgctcatggtgcagtttgccaaatacggacccaatgctgaaaagattcataggggtagaattacagaagaaaat

SEQ ID NO: 5705 - DNA, 309 bp, Zea mays
cagtttacctggtggagatccaggccccagaaaatgcactgggtggcatatacggtgttctgaaccagaagagaggacatgtattcgaggagatgcaaaggcctggtaccccgctctacaacatcaaggctttcctccctgtcatcgagtcctttgggttctcaagccagctgagggctgcaacctctggtcaggcgttcccccagtgtgtgtttgaccactgggacatgatgggctcggatcctttggaggctggctcccaggctgcccagctggtgctggatatccgcaagaggaagggtctgaaag

SEQ ID NO: 5706 - DNA, 314 bp, Zea mays
tggcgcgcctcaccacggaccagctcagcgagcccggctcgcccgagaacatcctctactaccacatgatccccgagtaccagaccgaggagtccatgtacaacgccgtgcgccgcttcggcaaggtgcgctacgacacgctgcgcctgccgcacaaggtcgtggcgcgggaggccgacggctccgtcaagttcggccagggcgagggctccgcctacctcttcgacccggacatctacaccgacgggaggatctccgtgcagggcatcgacgccgtgctgttcgcgccggacgacaccaaggccacgcagaca

SEQ ID NO: 5707 - DNA, 300 bp, Zea mays
gccttctgcgcctccatttcggcctctgtcccttgcaagttcaatctcacctccaaccatgggtaaagagaagtcccacatcaacattgtggttattggccatgtcgactctggcaagtcgaccaccacaggacaccttatctacaagcttggaggcattgacaagcgtgtgatcgagaggctcgagaaggaggctgctgaaatgaacaatcggtccttcaagtacgcgtgggtgctcgacaagctcaaggctgatcgtgagataggtatcaccagtgatatcgctctgtggaagtttga

SEQ ID NO: 5708 - DNA, 312 bp, Zea mays
cacgcaccccaccaacccatacccataccagaggctctctgattttacttctccgcggtagatcggctgagcgagcgagcgaggcacacggagctagctaaacagagcacacgggtagaaaagcaagatgtcggacggcacggcgacctgcatcgacatcatcctcgccatcatcctgccgccgctcggggtcttcttcaagttcggctgcggggttgagttctggatctgccttatcctcaccttcctcggctacctccccggcatcatctacgccgtctgggccatcaccaagtagccggccggagcaga

SEQ ID NO: 5709 - DNA, 310 bp, Zea mays
agctgaagcagttccaaggtgctgtggatgctgctcgcaaggctaacagtgctaaaacatggaaggaggtctgctttgcttgtgttgacgctgaggagttccgtcttgcacaaatatgtggtctcaatattattgttcaggttgatgacttggaagaagtcagtgagtactaccagaacagaggatgcttcagtgaacttattgctctcatggagagtggtcttggacttgaacgtgcacacatgggtatcttcacagaattgggagttctatatgctagataccgctctgagaagcttatggagcacat

SEQ ID NO: 5710 - DNA, 303 bp, Zea mays
gagcaagaaggcaagcaccaatcagccagcagtccagcacaatatcatgaacaagcgtcaggtcgccgcggcggtggctgccctcctggcgctgctagccgcatcatcgacggccggcgccgtgacgttcgacgcgacgaacacggcgtccgatacccccggcgggcagcggttcgaccaggccgtcggcctcgactacgccaagcaggtcctggccgacgcgtccacgttcatctggaacaccttcgaccagcccagccccgccgaccgcaagcccgtcgacgcggtgaccctcgtcgtcga

SEQ ID NO: 5711 - DNA, 303 bp, Zea mays
cgcggcgaacgcgccggggactgccggctggtgcactcgggcgggccgttcggcgagaacatcttctggggctcggcggggcgggcgtggagcgccgccgacgcgctgcggtcgtgggtggacgagaagaggaactaccacctgagcagcaacacctgcgaccccggcaaggtgtgcggccactacacgcaggtggtgtggcgcaggtccacccgcatcggctgcgcgcgcgtcgtctgcgccgacaaccgcggcgtcttcatcgtctgcagctacgaccccccgggcaacgtcaacggccag

SEQ ID NO: 5712 - DNA, 244 bp, Zea mays
  unsure (1)..(244): unsure at all n locations
atacggcgaggatgatctccctctagtatcatttcagtctgtctccanaggatactatggagagtgtggtanaagaggaggttacatggagattactggcttcagtgctccggtaagagagcagatctacaaggtagcttcagtgaacctgtgctccaatatcactggtcagatccttgcgagcgtcgtcatgaatccgacaagggtgnggacgatcatatgctcctacaagcagagaagatgg

SEQ ID NO: 5713 - DNA, 280 bp, Zea mays
  unsure (1)..(280): unsure at all n locations
atcgaacagggcttctaagtttgtcataatgctattttggtcattgggcacttaagtttgcacctcatttggttctgtaatatgtgggcttgtgcatgtgcttggcgtattgcatgcagtgaataatttatcttcgcgttgggttggtgacaatgttgggaacggatttgaattggggtttatgcttgccatctcctcatatctcgaactcagctgctgtttcactgagtaatgtacatttccctggtaatggtacttgtgcactctgctgctttatgng

SEQ ID NO: 5714 - DNA, 300 bp, Zea mays
tagctgaagaaggtgctagaggtgtacgaggcacgcctgaccaagtgcaagtaccttgctggagacttcctcagcctcgccgacctgaaccatgtgtctgtcactctctgcctgttcgctacgccctacgcatctgtgctcgacgcctacccgcatgtgaaggcctggtggtctggtctgatggagaggccgtctgtccagaaggtcgctgccctgatgaagccatctgcttgaaactgttgccctgtcaatcggtgaatggaataagccaagtctgttctgggttgtttgcttgttcag

SEQ ID NO: 5715 - DNA, 281 bp, Zea mays
cgctctgcgccgggcccaacaacaacacccgcttcgcgccagcatgaacaacgtctccttcgtcttcccgcagaccgactccctcctccacgcgcactactacaagatccccggcgtcttcaccaccgacttcccggcatacccgcccgtgcagttcgactacacggggcagaacgtcagccaggccctgtggcagccggtccccgccaccaagctgtacccgctcaggttcggctccgtggtgcagctcgtcctgcaggacaccagcatcgtcacgcccg

SEQ ID NO: 5716 - DNA, 124 bp, Zea mays
ccacgtcggtcaccaagacggtgaacggctcccaccacttcaaaatcgcgggctactctctctccaagggaatcggggtggggaagctcatcgcttccgagtccttcaacgtggggggattcga

SEQ ID NO: 5717 - DNA, 134 bp, Zea mays
aatcggcaaaatccactgggtaatgtgggtgaacttgcattagcttttggtgagctattgagaaaactctgggctcctggaggacgtgcccctgtttcacctagaccattcaaaattaagcgttctcgtgtgtg

SEQ ID NO: 5718 - DNA, 235 bp, Zea mays
tcatgttccagcagctcacgggcatcaacgtcatcatgttctacgccccggtcctcttcaagacgctgggcttcgcggacgacgcctccctcatgtccgccgtcatcacgggcctcgtcaacgtcttcgccaccttcgtgtccatcgtcaccgtcgaccgcctcggccgccgcaagctgttcctgcatggcggcacccagatgctcgcgtgccagatcgtcgtgggcagcctcat

SEQ ID NO: 5719 - DNA, 289 bp, Zea mays
tgttgccatttttgttccctcacccagtccgtctcaccacttcaaaaaccctctcctctctcatccgccttcctggcgattgcggcgacgaggtgacgatagagctgcccccgcaaggaaaacggacaagagaggcggaggctgatagggagaggagacggaggaccaagagcggcgtcgatctaaaagcgttggcggcggccatggccaccgcggaccggacccggactttcatgaaggacgtcaaacgcgtcatcatcaaggtgggcactgcagtcgtcacgagggg

SEQ ID NO: 5720 - DNA, 291 bp, Zea mays
ctactctccaagttctcttctccgtcgaccgctctacacgtctcttgtcgacctggacaccgaggtggaagaaggaagcagtcagcagatggatccatggatcagcagccagccttctctgagcgcagaacgtggcgcagggcagaaggaggacaggcgccaacagcagacgccggtagccgtcgccttgcccaggcacaagctgctcgtcgaggagaacttcctcctgccgcctccaaagaaagaaccagaggtcgcggctctcgagacggagctgcagcggatgggcga

SEQ ID NO: 5721 - DNA, 290 bp, Zea mays
tcaaggtgcacgatctccgggggaagagcaagacggacctgcaggcgcactcaaggagctgaagtctgagctctccctcctccgcgtaccaaggtcaccggcggcgcacccaacaagctctccaagatcaaggtggtgcgcacctctatcgcgcgcgtgctcacagtgatctcgcagaagcagaagtcggcgttgcgggaggcgtacaagaagaagaacctgctccccctcgacctccgccctaagaagacccgtgccatccgccgccgtctgaccaagcaccagctttc

SEQ ID NO: 5722 - DNA, 294 bp, Zea mays
tacggcgaccaacgccgccgtggaggcgatgacgaagatcctggccaaggaggtggcggcgaagggggtgaccgcgaacgtggtcgcgccggggcccgtgcgcaccgagctgttcttggccgggatcgacgaagcgttcctgcggagggtggagcagcagtccatgggccgcatcgccgagacgacggacgtggcaccggtggtggcgttcctggccagcgacgccgcggcttgggttaacggccaggtcatcagggtcaacggcggttttgtctaataagggtccaagtgcgc

SEQ ID NO: 5723 - DNA, 295 bp, Zea mays
attttaaaatttcaaattttaaattttccatacgacctcggatggtaaaaccacaaaatggaaagttttaggttttcaagacttatgaaactttgtagctaacaactttttcatttgaaatcatttgatcatgcaaaactatatttgaaattcaaaatttgagattttcaaacggcctcaaatgaaaaaacaaacaaaatgaaagttgtagatctcaaaaagtaatttaacattgtagttgacaacgtttaaatttgaatcatcttatcatataagaatacatttgaaattttca

SEQ ID NO: 5724 - DNA, 282 bp, Zea mays
aattactctctgcaaggcgcgatagcgcgagagttttgtcaaggtggactccatctttggcccgggaacaaaaatggtctacaagcatttggccacactatactttgtttttgtctttgatagctctgagaacgagcttgccatgctcgacctcgtacaagtgtttgttgaaacattggacagatgcttcaagaatgtatgcgagcttgacatcgtatttaacttcaacaagctgcacaccattttggatgagatgatatcggggggacaggtgatcgaaac

SEQ ID NO: 5725 - DNA, 136 bp, Zea mays
cgcgcggccctactacgccatcacgttcagcgcggcgcggacgtgcgcgcaggcggagcggcagcgtctgaacgtgtcggtgagccccgagtggtgcgtgctgccgatgcagaccatctacggcatcaacggctgg

SEQ ID NO: 5726 - DNA, 117 bp, Zea mays
gcttaatgatgagttttacattggactccggcaaaaacgtgcaactggcgaggagtatcatgagcttatggaagagttcatggctgctgttaagcaaatctacggcgagaaagtcct

SEQ ID NO: 5727 - DNA, 125 bp, Zea mays
cgcattcgttccaactcctgagcactttctcctcgtccccgacaagccaatcgaagccgagatacggccatggactccaccggcaccggagcacggggtaaggggaagaagggagcggccgggcg

SEQ ID NO: 5728 - DNA, 245 bp, Zea mays
gaagcagccgccgttgctgctgccgcgtccacagaatggggggtttcgtgaagactcataagaccaatgcgtatttcaaacgtttccaagtgaaattcaagagaaggcgggctggcaagacagactacagggccaggataaggctgattaaccaagaccaaaacaagtacaacacacccacatacagatttgttgtgcgatttaccaacaaggacatcactgcccaaatcatatctgctagtata

SEQ ID NO: 5729 - DNA, 311 bp, Zea mays
cgctaaaaccgcttccgcaaccacgtataaaaacaccgcacgcgccgccgccgccgtcctattcctcggagacgagaagccgccgtcgcagcaatcacagcatcccggagaacggccaggtccgacaagatgcagatcttcgtgaagacgctgacagggaagaccatcaccctcgaggtcgagagcagcgacaccatcgacaatgtcaaggccaagatccaggacaaggaagggatcccgccggaccagcagcggctgatctttgccgggaagcagctggaggatggccgcacccttgcggactataacat

SEQ ID NO: 5730 - DNA, 307 bp, Zea mays
gtatctccaaggatggacagacccgcgagcatgctctccttgctttcacgcgtggagtgaagcagatgatttgctgttgcaacaagatggatgccaccacacccaagtactccaaggcccgttatgatgagattgtgaaggaagtctcttcctacctgaagaaggttggatacaaccctgacaagatccactttgttcccatctctggtttcgaaggtgacaacatgattgagaggtccaccaaccttgactggtacaagggcgcaaccctacttgaggctttggacttgatcaatgagccgaagag

SEQ ID NO: 5731 - DNA, 307 bp, Zea mays
atgcacatcacatgcactccaccatgcaaatttgagttctgctggctatgtcttggtccatggtcagagcatggagagaggactggtggattttatgcttgtaaccgctatgagtcagcaaggcaagaaggagcgtatgatgaatctgaaaggagaagagaaatggcaaagaactcccttgagagatacacacattattatgaacgatgggcagccaatcagtcgtcgaggcaaaaggcactgggggaccttcaaagcctacagaatgacaagcttgaaaggttaagtgacatacagagtcaacctg

SEQ ID NO: 5732 - DNA, 307 bp, Zea mays
ctcagcaagatccagaaagacatcgccaagaaccaccaggtccgcaagcagtacaccatccaggtcggcgagaacgagctcgtcctcaaggagctggagctgctcagcgatggggccaacgtgtacaagctcatcggacctgtgctggtcaagcaggacctcgcggaggccaaggccaacgtcaagaagcgcatcgagtacatctccgcagagctgaagcggatggatcgggcgctcaaagacttggaggaaaagcataacagcaagaaggaatccatattcaagttgcagcagaggatgcaggctg

SEQ ID NO: 5733 - DNA, 301 bp, Zea mays
cgcctccatttcggcctctgtcccttgcaagttcaatctcacctccaaccatgggtaaagagaagtcccacatcaacattgtggttattggccatgtcgactctggcaagtcgaccaccacaggacaccttatctacgagcttggaggcattgacaagcgtgtgatcgagaggtttgagaaggaggctgctgaaatgaataagcggtccttcaagtacgcgtgggtgctcgacaagctcaaggctgagcgtgagagaggtatcaccattgatattgctctgtggaagtttgagaccacaag

SEQ ID NO: 5734 - DNA, 307 bp, Zea mays
ctcgtcgtcgcctcgctgtctcctccgccgttgcctgcgatctcgatcatggagggcgacagtaccaacctcgacgcggctatagagtcgctcctgaacgtggagaagcagatgaggctggccggcgatgtcgccggcacgcggaaggccgtcatcgacatcgtcgagctctgctacaaggccggcgcgtggaagacgctaaacgaccagatcgttctcctctccaagaggagaggccagcttaagcaggccattactgctatggttcagaaagcaatggactacattgatttgactacagacattg

SEQ ID NO: 5735 - DNA, 308 bp, Zea mays
ccgagaaccgttaccgccgccggataagcgccgctcgctcatgaggacagccatggcgccggagccggaggatgatatcatgaacgagaaggatcaccgcccgctcgacgaggatgacatcgcgctcctcaaaacctatggactggggccgtattcgactagcattaagaaggtcgagaaggagatcaaggaaatggccaagaaaatcaacgagctctgtgggataaaggagtctgatacagggctggctccacctagccagtgggatttggtttcagataagcagatgatgcaagaagaacaaccgt

SEQ ID NO: 5736 - DNA, 311 bp, Zea mays
ctcgtcgtcgcctcgctgtctcctccgccgttgcctgcgatcgcgatcatggagggcgacagtaccaacctcgacgcggctatagagtcgctcctgaacgtggagaagcagatgaggctggccggcgatgtcgccggcacgcggaaggccgtcatcgacatcgtcgagctctgctacaaggccggcgcgtggaagacgctaaacgaccagatcgttctcctctccaagaggagaggccagcttaagcaggcgattactgctatggttcagaaagcaatggactacattgatttgacaccagacattgacac

SEQ ID NO: 5737 - DNA, 303 bp, Zea mays
ccgtgtgccagctgtcggtgcagagcgaccgggacggcgcgtaccactacagcctcggcagggcgctggcgccgctgcgggaggagggcgtcctcgtcctcggctccggcagcgccacgcacaacctgcgcaagatggggccgttcgacgcgcccgtgccgcagtgggccgccgagttcgacgcctggctcaaggactcgctcctcgacggaaggtacgaggacgtgaaccggttcgaggagaaagcgccgcatgggagggtggcgcacccgtggccggaccacttctacccgctgcacgtgg

SEQ ID NO: 5738 - DNA, 298 bp, Zea mays
ataatctacaggcttatgagggcttacataagttcatcttctctacggaaatctgcattgagggctcttgcaaaggcactgacgacagatcaactcttctacctaagagagcagtttacattattaggtccagacaagagtggccatatatcattgcagaatatgaagacggccttgattaaaaattcctcgggtgcaatgaatgattctaggattcttgactttgttaactcaatatgcaatatccaatatggcatgattgattttgaagagttctctgctgcggccattagtgtat

SEQ ID NO: 5739 - DNA, 299 bp, Zea mays
gcgccttcgtctccactccccaccggaggaaggaagcgagaagaccagaaggtgagaagagagagagagagtgtgtgtgatcggtacaaggatcaccgctgtgcctgcgcgtgctgcttcaccgaatcgagtcagatcctgtccgaatccgagctaagggatggcaaccggtagtgaagcctcgaaggcagctgaggctgtggttgactggcataaacacgacagcaagaggatgctccatgcggtttaccgtgttggggatctggaccgcacaatcaagtactacacggaatgctttg

SEQ ID NO: 5740 - DNA, 306 bp, Zea mays
tcgcgtggcatccaaaggcggtcaagattcgagaggccggaggaaccaagcgtagggcctccgaccccacgtcgtcgtccgcgcgcgccgcccgccgccgagggagatgggggccgattactacaaggtcctcggcgtcgaccgcggcgccagtgacgacgacctcaagaaggcctatcggaagctcgccatgcgatggcaccccgacaagaactccaccaataagaaggaggcagaaaccaagttcaaggagatctctgtggcatacgaggtccttagcgatcccaagaaacgtgcgatctatgt

SEQ ID NO: 5741 - DNA, 295 bp, Zea mays
cccaacgccgcccgtcgtgccgtcgcacagccacgggcgctgcccgatcgacgcactaaagctcaaggtgtgcgccaacgtgctggacctcgtcaaggtcggcctacgccagcacgagcaatgttgcccgctgctggaggggctggtggacctcgacgccgcactgtgcctctgcaccgccatcaaggctaacgtcctcggcatccacctcaacgtgccccttagcctcaacctcatcctcaacaattgcggcaagatttgcccaaaagactttacttgccccaactaattgagc

SEQ ID NO: 5742 - DNA, 291 bp, Zea mays
atctgatcttgatgtgaccatggctgacgctgatacaagtcactcactgaacagcacaccaagtgctaatcctgcatactacagagatgtaacgtttgtggagggcttttccaaaacgtctgttgtcaggcatgcatcggatgtcaaagggaattcgataaacgttttgaactgtcatgattctgttatctacatattagcaccactgaagtatgctactgtgtatggttgttctgatgctacggttgttcttggtgctgttggtaaggtagtacaagtggagcattgtga

SEQ ID NO: 5743 - DNA, 292 bp, Zea mays
gaggttgttggcactgataaggagaccaccacccaaggccatgacgaccttggcaagcgttgcgccaagtactacgaggcaggtgcccgctttgccaagttgcgcgctgttctcaagattggccctaatgagccatcacagcttgccatcggcctgaacgctcagggtctggctcgctatgccatcatctgccaggagaatggtctggtgccaattgttgagcctgagatccttgttgatggccctcatgacattgatcgctgcgcttacgtcactgagaccgtccttgctg

SEQ ID NO: 5744 - DNA, 298 bp, Zea mays
accggctgcagcacctgacggacaagagcgacgtgtacagcttcggcgtggtgctcctggagctgctctccgggtgcaaggtgatccagcggttcgagggcagctgcacgcccaagaacgtggtggacgtgaccgtgccgcacatcgaggcggaccgcgtgcaccgggtgctcgacgcgcggctcccgcttccgacgccggcggagatggaggcagtcgcctacgtcgggtacctggcctcggactgcgtgcggcccgcggggcgcgatcggctcatcatgagcgaggtggtcggcgt

SEQ ID NO: 5745 - DNA, 237 bp, Zea mays
tgaacatttagggttccattgaaggttgtggaaaaaacaactggtgctggaacaattctttcaaaggagttgtattctgaagcaaaaaataggttagaggcactcgataagaaggatgctgagcggaggaaaactgctgaacttaagaataacctagagtcatacatatattctatgaaggagaagttggaagaaagcacaggtattttgactgtctcaactgaacaggagagggaa

SEQ ID NO: 5746 - DNA, 296 bp, Zea mays
cactcactgcaccgagctcactggcaatggctaccagcaccaagctcgtggcccttggctttgccgtcctcctgagcatcggcttctccgatgcagcgagggtagttaggcttggtagccatgcgtctgcgggaggtggaggtggcggcgggggaggcggctccgggtcgactgggggtggctttggcggtgggtcaggcggtggcggtggttacggcataggtaagggtggcggggactggtggaacaatttcgtctctagtatagcaggtggtggacgaggaggacaaggcgga

SEQ ID NO: 5747 - DNA, 291 bp, Zea mays
caaatgaccatctggaacactgtttctgctaatgccagccttttcatcttctgcttgtatgcagctgtccggtcttagatgcatttgaaatttctctatgcactgaacactacttatgttattccattattgtaataacaggagcatgccaacatctgctgctcttgatgttgttgcaaagaatttgaaccttaagttctttgaggtgcctactggatggaagtttttttgggaatttgatggatgctggaatgtgctcaatctgtggtgaagaaagctttggcactgggt

SEQ ID NO: 5748 - DNA, 293 bp, Zea mays
  unsure (1)..(293): unsure at all n locations
ganaaggccaggcgctacttgagcagtatgaggcgaaaaaagcctataccatttacgcaaaagttcccaaatgcagatccacttgcactatgtttgttagagcgaatgctcgcttttgagccaaaagacaggccaagtgctgaagaggctcttgctgatccttatttcaagaatatagccagtgtggatagagagccttctgcacaggctgtcacaaagcttgaatttgaattcgagaggcggagagttacaaaggaagacataagggagcttatatatagggacattcttga

SEQ ID NO: 5749 - DNA, 279 bp, Zea mays
actagattcacatccaagatttggagataagaagacgtaccagatgaacccagctaactacagagaagccctcatagaaaccgcatcggacgaggcagaaggagccgacattctgctagtgaaaccgggattgccgtacttggacattatccgactgcttcgggatcattcagccctaccgagtgctgcttaccaggtctcgggcgagtactcgatgatcagagccggaggggccctgggcatggtggacgagcataaggtgatgatggagtcgctcat

SEQ ID NO: 5750 - DNA, 291 bp, Zea mays
tcgcggagcgtccaagacctacccgcagcaggctggcaccgtccgtaagaacggcttcatcgtcatcaagaaccgcccctgcagagttgtggaggtttctacctcaaagactggtaagcatggccatgccaaatgccactttgttgccatagacatattcaacgggaaaaagctcgaagatattgttccttcgtcacacaactgtgatattccgcatgtgaaccgtactgagtaccagctgattgatatatcagaggatggatttgtgagccttcttacttcagatggcaa

SEQ ID NO: 5751 - DNA, 292 bp, Zea mays
aagcgtcggggttttggctcctgttcaaaatccgcagctcgccgttggacaagtgaggaaaggagagagaaagagaaagagagagagagagacggtcagccatggcggcgaaggcaagggtctcgctgacggctgtgctcgccgccgcggcgtgggcgtgcttatctgtcgtggccgcctccgcattcgacgtcccgaccgtggccttcgaggaggggttctcgccgctgttcggcgacggcaacctcgtccgctcctccgacgacaggagcgtccgcctcctgctcgaccg

SEQ ID NO: 5752 - DNA, 290 bp, Zea mays
tatcaccagagtgaattagcagaagaattggctgaaaggaagcatctcttctgtgcacgcccacaaacattgggagagaccatccgggcaatggacctagagacactggttccttatgagccaggggatgccaaaccagtcgtcaccctgatcaacagatttcttggctttccagttgattgacgaatctattcggttgttcttcaatccatgtggattagatggtattgcgtcggtttaattccatagcaagtcaaaatacatcctaaacccactcaatccactccaat

SEQ ID NO: 5753 - DNA, 294 bp, Zea mays
ccatgaacccctcgggcgagctctccagcgcccgcttcagcgagaaggagctgatcagcgccatcgaccgcgaggccgtgttcacgtacgcggaggacgcggccagcggcagcctgccgctgatgcagaagctgcgcgccgtgctggtggaccacgccctcagcagcggcgacgcggagcgggagccctccgtgttctccaagatcaccaggttcgaggaggagctccgcgcggtgctgccccaggaggtggaggccgcccgcgtggcggtcgccgagggcaccgcccccgtgg

SEQ ID NO: 5754 - DNA, 286 bp, Zea mays
gccaatccaggtaattgtgattccagtgccttataaggatgctgacacaactgccataaagggagcctgcgaatcaactgtttacacactcgatcaatctggaattagagcggatcaggacacccgtgaaaattactctccaggttggaagtattcccactgggaaatgaaaggtgttccattgagaattgagattggtccaaaagatctggcaaacaaacaggtgcgtgttgtccgccgggacaacggtgcaaaggttgacatccctgtgaccaatttggttgaa

SEQ ID NO: 5755 - DNA, 283 bp, Zea mays
gtgacttcggccttgcgaggctgtatgaccatggcacggacccgcagacgacacatatggttggcaccatggggtacctggctcctgaactggtgcgcacgggcaaggcctccactgacacggacgtgttcgccttcggcatgttccttctcgaggtcacctgtggcaaaagaccactgatgatgatgatgatgcagagcaccgccgaggggcggcgagaccgtcagtttttcttggtcgattgggttctcgagcactggaagaatgggtcgctcacagaagc

SEQ ID NO: 5756 - DNA, 285 bp, Zea mays
gcttattaggatacaatatgccatcgccaataattgtcgcacctacaggggcacacaaattagccaatcccgaacgcgaggtggccacagcaagagctgccgcagcatgtaacaccataatggtgctttccttctcatcaagctgcaggatcgaggaggttgcctccagttgcgacgctattcgcttttatcagttatatgtgtacaagagaagggatgtttcggcaactttggtacggcgggctgaaagtttaggattcagggcaattgttttgacagttgaca

SEQ ID NO: 5757 - DNA, 282 bp, Zea mays
tgcgacccggcgattcgcgtcgctctttgctggaaggaacgatggagcagaccttcatcatgatcaagcccgtcggcgtccagcggggcctgatcggggacatcatcagtcgcttcgagaagaaagggttctacctcaacgggatgaagttcatgaacgtggagaggtccttcgcgcacagcactacgctgacctttccgacaagcctttcttccccgggttggtggagtacatcatttacggcaccgtggtggcgatggtgtcggaggcgaaggacgtcgt

SEQ ID NO: 5758 - DNA, 286 bp, Zea mays
ttcgtcatgaaggcgtgggcgaagacctaccccgagaacaagcacgtgaagttcctcgccgacggatctggagcgtacaccaaggcgctcgacctcgagctcgatctcacggacaaagggctgggcgtgcgctcgaagaggttcgctctcctggccgacgacctcacggtcaccgtcgcaaacatcgaggaaggcgggcagttcacgatctccggcgctgaggagatcctgaaggcgctttagaagctccgtctcctctagaagccgcagcaacgatcggtctata

SEQ ID NO: 5759 - DNA, 285 bp, Zea mays
caaatccagtaactcgcatcttcctgcgtcatccaagttctagcagcgcacgctcggtttcggcaatgtcggggcgcggcaagggcggcaagggtctgggcaagggcggcgccaagcgccaccgcaaggtcctgcgcgacaacatccagggcatcaccaagccggcgatccggaggttggctaggaggggcggcgtcaagcgcatctccgggctcatctacgaggagacccgcggtgtgctcaagatctttctggagaacgtcattcgtgacgccgtcacctaca

SEQ ID NO: 5760 - DNA, 236 bp, Zea mays
tatcgcccacaagcaggccatcccgttccgcagtagttgtggtggtgttgggcgtactgctcaggctaagtctcgccactcaaatggtcagggacgctggcctgccaagtctgctaaattcattctagaccttctcaagaatgcagagagcaatgctgaggtgaaaggacttgatgtggataccctctatgtgtcgcacattcaagttaatcaggctcagaagcagcgacgcagga

SEQ ID NO: 5761 - DNA, 308 bp, Zea mays
  unsure (1)..(308): unsure at all n locations
caatcccctgtcncgctcagattccccccaaaccctcccccagaaccccagagcggagaagagcgcaagatgttcggcttcgggcaccacggccaccacggccagaacccgccggcgcacggcggcgtgcaccagcccaccttcaagatcttctgcaaggccgacgaggggtactgcctcaccgtccgcgacggcaacgtggtgctggcccccgccaacccgcgcgacgagcaccagcactggtacaaggacatgcgcttcagcacccaggtcaaggacgaggagggcaacctgcgttcgccctcgtc

SEQ ID NO: 5762 - DNA, 300 bp, Zea mays
  unsure (1)..(300): unsure at all n locations
tgcacatgctcggcgtcgcctccatcggcgcagcaagctctcgctcgccgccgggaggctcgcgctccccagctactccgactcagccaaggtcgcctacgtcctccaaggcacgggcacctgcggcatcgtcctcccagaggcgacgaaggagaaggtggtggccgtgaaggagggcgacgcgctggcgctgcccttcggcgtggtgacgtggtggcacaacggccccgccgcgccgaccccgctcacggtgctcttcctcggcgacacatccaagggccacaggccgnggcagttcac

SEQ ID NO: 5763 - DNA, 303 bp, Zea mays
cgcgactcctcagcttcctcctctccttccttccttagctgtcccccttcccgcccccggccccgaccagatggagtgcacgtcggccgccgtcaccatcgtcgcagccgccgccgcctaccaccacgagccggccaggcgcatccgggaggcggacgcaagcccaaggtgtcccggcgattcgtccacgccgacccctctgacctcagcctcgtggtgaaggacgggtaccagtggcgcaagtacgggcagaaggtgaccaaggacaacccgtgctcgcgcgcctacttccggtgctcgctc

SEQ ID NO: 5764 - DNA, 310 bp, Zea mays
cggcgtcggatgttgagtaccgctgcttcgtcggcagcctcgcctggaacacggacgaccactccctccacaacgccttcagcacctacggcgaggtcctcgagtccaagatccatcctcgatcgggagacgcagaggtcccgcggcttcggcttcgtcaccttctccacggaggaggcgatgcggaacgcacatcgagggcatgaacggcaaggagctggacggccgcaacatcaccgtcaacgaggaccagtcccgcagcggccgtggaggcggcggcggtgggtacggtggtggccgtggaggcggc

SEQ ID NO: 5765 - DNA, 289 bp, Zea mays
tattgtgtgatccatacttcaaaggtcttgccagggctgaaagagaaccatcctgtcagccaatcagaaaagtggaatttgactttgagcacaaaagaatgtcaaaggaagagataagagagttgatattccgcgagatactggaatatcacccacaactgctgagtagctacattaatggcacagagaggacaacctttctctacccaagtgctgttgatcaatttaagaagcagttttctcatcttgaagagagtggtggtaacggcccatcagttccaacagacag

SEQ ID NO: 5766 - DNA, 299 bp, Zea mays
cgggcctgaggaaggggaatgcgcgcctcccgccggaggtgaaccgggtgctctacgtgcggaacctgccgttcaacatctcgagcgaggagatgtacgacatcttcggcaagtacggcgcgatccggcagatccgtctgggcaacgccaaggacacgcgcgggaccgcttacgttgtctacgaggacatctacgacgccaagaacgccgtcgaccacctctccggcttcaacgtcgccaaccgctaccttatcgtgctctactaccagcccgccaagatgtccaagaagtcggatatc

SEQ ID NO: 5767 - DNA, 298 bp, Zea mays
gttcgcggtgttcctggtccaccttgccaccatccccattactggcactggcatcaacccagctaggagccttggcgctgccatcatctacaacagggatcacgcctggaacgaccattggatcttctgggtcggccccttcattggcgctgctctggctgccatctaccaccaggtgatcatcagagccatcccgttcaagagcaggtcttaagctgccgtggccgtgccgagacatgccagtccgaagaacgggcgtcttcctgtgatgtcttcttgtctgctcacgcctagtttc

SEQ ID NO: 5768 - DNA, 294 bp, Zea mays
agcacacaagctttctcatggccatagcggacacggtggacatggggcctttggaggctatggtcacggtggttacggccacgggtatggtggccacggcaagttcaagcatggtcacggccaccacggcaagttcaagcacgggcacggcaagttcaagcatggcaagcacgggcacggcatgttcggcggcggcaagttcaagaagtggaagtgatgtgccctccatggttgatcgtagctgaactcaggcttccaggacatgtgttgccagtaataccttttcagcgttac

SEQ ID NO: 5769 - DNA, 298 bp, Zea mays
ggccggccggcttgacaaaacagaacgtgttcgaggcagccatcgagacctcatatctggtgctggagtccgccatggccgagctcatgaaccacaggcgcgtcatgaagaagctgcaagcggaggtacgggcgtacggagcggagaagaagctggacatgatcagggaggacgacctgagcagcctgccgtacctaaaggcgtccatgaaggaagcgctgccgctgcacccaccggggcccctgctgctgccgcactactccaccgccgactgccagatcgacgggtaccacatccc

SEQ ID NO: 5770 - DNA, 297 bp, Zea mays
ccttcaaccatctcaggcggaatggcggcttctggtgagggcgcgtcgctgccgtctccggcgggcggggaggatgcgcaccgccgccgcgtcactatttctacgagccgtcgatcggagactactactacgggcaaggtcacccgatgaagccccaccgcatccgaatggcgcactcgctggtggtccactacggcatccaccgcctcctcgagctctcccgcccctacccggcctctgaggccgacatccgccgcttccactccgacgactacgtcgctttcctcgcgtccgcca

SEQ ID NO: 5771 - DNA, 303 bp, Zea mays
tgcctcctggctccggcaagacccttattgctagagctgtagctaatgagacaggtgctttcttctttttgatcaatggaccagaaatcatgtcaaagctagcaggagaaagtgaaagcaatctcagaaaggcatttgaagaagctgagaaaaatgcaccttccatcatttttattgatgagatagattccatagcacctaagagagagaagacccatggagaagttgaaaggcgtattgtttcacagctcttgactcttatggatgggctcaagtctcgtgcacatgtgattgttatgggtg

SEQ ID NO: 5772 - DNA, 288 bp, Zea mays
gaaggtttcgaggaactcccgggctcgaggagatcgggacgatgatgggagggcgcgctctgctgctgctcctggtctcggcgctgctcgttcagatccgcgcctctgacccgctgctgtacgagccgtttgatgaggacttcgagggtagatggatcgtctccaagaaggatgaataccaaggtgtatggaagcatgccaagagtgatgggcatgaggactatggcctccttgttagtgacaaggcaaggaaatacgccataatcaaggagcttgatgagccagtta

SEQ ID NO: 5773 - DNA, 286 bp, Zea mays
atgaggtccgcgcggtgctgccccaggaggtggaggccgcccgcgtggcggtcgccgagggcaccgcccccgtggcgaaccggatcgcggacagccggtcgttcccgctgtaccgcatcgtgcgcgaggagctcggctgcgtgttcctgaccggcgagaggctcaagtcccccggcgaggagtgcaacaaggtgttcgtccgcatcagccagggcaagctcgtggacaccatgctcgagtgcctcaaggagtgggacggcaagccggtgcacatcaacgtcaagta

SEQ ID NO: 5774 - DNA, 291 bp, Zea mays
ccttcaaccatctcaggcggaatggcggcttctggtgagggcgcgtcgctgccgtctccggcgggcggggaggatgcgcaccgccgccgcgtcactatttctacgagccgtcgatcggagactactactacgggcaaggtcacccgatgaagccccaccgcatccgaatggcgcactcgctggtggtccactacggcctccaccgcctcctcgagctctcccgcccctacccggcctctgaggccgacatccgccgcttccactccgacgactacgtcgctttcctcgcgt

SEQ ID NO: 5775 - DNA, 293 bp, Zea mays
gtgaaatccggagcgtggtgttggctgggcggaggttttatgataaagagggcctcccagcttttccgatgggcaacatcgaccaaactcgcatgtggaaggttggtgaaaaggtgcgctcaacccgtccggaaggtgatcttggcccgctccatgccttcactgctggagtgtacattgcactgatgatggctcagattgagatcctgaggaagaaggggcactcctactctgagatcatcaacgagagcgtgattgagtcggtggactcgctgaacccgttcatgcacgcc

SEQ ID NO: 5776 - DNA, 286 bp, Zea mays
  unsure (1)..(286): unsure at all n locations
ctcncactgccgtctcggcaacctcccctgttccacgcttcgtcctcgcctgccaggctgccatggccgcgacgtcccccttcgactgcgtcctcctagacctcgacgacaccctgtacccgggcgacaccggcatcggcgcggccctgaggcgcaacatcgacgagttcctccagcccaagctcggcgtgtcggccgacgaggccgccgccacgcgcgncgagctcttccgcgcgcacggcagctccctcgacgggctcatcgcgctcggctacgtacctgcacc

SEQ ID NO: 5777 - DNA, 297 bp, Zea mays
tcccgcggcaaccccaccgtcgaggtggacgtgggccttagcgacggcagctacgcgaggggggccgtacccagcggcgcatccactgggatatatgaggccttggagttgagggatggaggatctgattatcttggcaagggtgttcttaaggctgtcagcaatgtaaataacattattggaccagcaagtgttggaaaggaccccactgagcaggttgagattgacaacttcatggtccaacagcttgatggggacctccaatgagtggggctggtgcaaacagaagcttggagc

SEQ ID NO: 5778 - DNA, 299 bp, Zea mays
ggcagaactatgtcaagacatggttcaaccagcccgcccgcaagcagaggcgccgcatcgcacgtcaaaagaaggctgtgaagatattcccacgaccaactgctggccctcttcgtcccattgttcaatgccagactctcaagtacaacatgaagtcaagggctgggagaggctttacccttgaggagttgaaggctgcgggcattccaaaaaggcttgctccaaccattggcatttctgtggatcaccgccgcaagaacaaatcccttgaggggctgcaggcaatgtccagagcttaa

SEQ ID NO: 5779 - DNA, 296 bp, Zea mays
caggacgagactcgcagctagctgacacggccgagaagcagcttgcattgcaggcgtagtacgtacccagcagcagctagcactagcagtccatcggagcgacgatggtgagaaggacggtgctggcggcgctgctggtggccgccgccctcgccggcgggcgcgggcgcactcaaggaggggttctacgactactcctgcccacaggcggagaagatcgtcaaggactacgtgaaggcgcacatcccccacgcgcccgacgtcgcctccaccctgctccgcacccacttccacga

SEQ ID NO: 5780 - DNA, 298 bp, Zea mays
tgttctggtggtgaccaacacgaccgtcgcgccgctttacctggacaaggtgacatgggcactcacccacaacaacctgaatgtatcagtggaaagcgtgatcctgcccgacggtgaaaagtacaaaaatatggacacgctgatgaaggtgtttgacaaggcagtcgagtcccgttttgaccgccggtgcacatttgtagcactgggtggtggtgtcattggggacatgtgtggttttgcagctgctgcattcctccggggcgtcaatttcatacagataccaactactctgatggcc

SEQ ID NO: 5781 - DNA, 296 bp, Zea mays
  unsure (1)..(296): unsure at all n locations
accgattgcctatcgccctcccaacccaagaccgatggcgcccaaggccgagaagaagcccgcggcgaagaagccggcggaggaggaccccgcggcggagaagacgaccgccgggaagaagcccaaggcggagaagcgggtcccgcgggcaagtccgccggcaaggaaggcggcgagggcaagcgtggcaagcagaagggcaagaagagcgtggagacgtacaagatctacatcttcaangtgctgaagcaggtgcatccggacatcggcatctcgtaaaagggccatgtcatcat

SEQ ID NO: 5782 - DNA, 292 bp, Zea mays
ccgcgccgccccgctccctagtggtcctccctcccccaccactgcagctccgtcctcggcggccccaagagttgcggcgaggatgaacgtgaagggcggcaccggattccggtaccccctccgggggccagcgcgctggtcaaggtggccgtgttcggcggcgcgccgtgtacgctgccatgaacagcctctacaacgtcgagggtgggcacgcgccatcgtcttcaaccgcatccaggggatcaaggacaaggtataccccgaaggactcactttatgattccatggtttg

SEQ ID NO: 5783 - DNA, 294 bp, Zea mays
  unsure (1)..(294): unsure at all n locations
tgacccgccgccgccgccgtttcgcgcaccgtaccctagccctcgtcagcgcgcggctcgagctcatccagccatgacgttcaagcggaggaatggcggacgcaacaagcacgggcgcggccacgtcaagtacatccgctgctccaactgcgccaagtgctgccccaaggataaggctatcaagcggttcttggtgaggaacattgttgagcaggctgccgtgagagatgtgcaggaggcctgtgtacatgatggatatgttctacccaaattgtatgcanaggttcatcactg

SEQ ID NO: 5784 - DNA, 289 bp, Zea mays
cggctcgagcttcttctccaccggcaccagtccaccacctcccacctcctgccaccgcgcggccccaaccagccacaccgcagcgcagacatggcgggcaacggcgccatcgtggagagcgacccgctgaactggggcgcggcggcggcggagctggccgggagccacctggacgaggtgaagcgcatggtggcgcaggcccggcagcccgtgcgtcaagatcgagggttccagcctccgcgtcggctcagtggccgccgtcgcctccgccaaggacgcgtccggcgtc

SEQ ID NO: 5785 - DNA, 295 bp, Zea mays
cgcgtcgcggccaacaaccccaccatggtcgccatgtccatgctcaccaaggaggtgcaccgccgcaaccccaacttcaacgccggcagccccaccgagtacaccaactacctcatcatctccgtcggcaccgggtcggccaagcaggcggagaagtacaccgcggagcagtgcgcgaagtggggcctcatccagtggctctacaacggcggcttcacgcctatcatcgacatcttctcgcatgccagttccgacatggttgacatccatgcgtcgatcctctttcaggccctgc

SEQ ID NO: 5786 - DNA, 184 bp, Zea mays
gtccttgtcgccggccccaaactgcgtgtggcaaaggcaggaaaggcatttgtcgatatggtagatgccagtggctatgcctatgccgtgatgccatcggccaagggtcttgtgccagagcatcacccccacttcatcggcacctactggggcgccgtcagcaccgccttctgtgcggagattg

SEQ ID NO: 5787 - DNA, 297 bp, Zea mays
cggctcgagattcaccattcctcctccggatttcgcagtcagcggtggtgaaggtagcgggcgcggaggaagatggggctcgcgttcgggaagctcttcagccggctcttcgccaagaaggagatgcggattcttatggtcggtctcgacgccgccggtaaaaccaccatcctctacaagctcaagctcggcgagatcgtcacaaccatccccaccatcggtttcaatgttgaaactgttgagtacaagaacattagcttcacggtctgggatgtcgggggtcaggacaagatcaga

SEQ ID NO: 5788 - DNA, 270 bp, Zea mays
ctttataactgggtatactgaaatgtcgcaggaccccactacacactgatgtctttggaggtttctatttgacatgtccaaaccatctcaaccgatattggacaagcttttcttcaattggtgctacctctatcctatcacgtcaatattctacaccgtacaacatagcagggctaacatcttcatcaatatacacgtctttgagcattgatcctaaataatgacagcatcgccaagaaggaaaagggagctcattcctaaagatgaagt

SEQ ID NO: 5789 - DNA, 304 bp, Zea mays
  unsure (1)..(304): unsure at all n locations
cgtcgccgacaacgctctctaccgtccgagacnccaagcaccagcgcggcggcgggggcggcggcgaccatggctgtcggaaagaacaagaggatctccaagggaaagaagggtggcaagaaaaagaccgtcgaccctttctctaagaaggattggtatgacatcaaggcaccgtcggtgttcagtgtgcgcaacatcgggaagactctcgtatccaggacacagggtaccaggactgcttctgagggtctgaagcacagagtctttgaggtttgcctagctgatcttcagggcgacgaggatc

SEQ ID NO: 5790 - DNA, 306 bp, Zea mays
  unsure (1)..(306): unsure at all n locations
ctctcccttcgtcnccagcctaaatccccgcaacgatggctcgcacgaagcagacggcgcgcaagtccacgggcggcaaggccccgaggaagcagctggcgaccaaggcggcgcgcaagtcggcccctgcgaccggcggcgtgaagaagccgcaccgcttccgcccgggcaccgtggcgctgcgcgagatccgcaagtaccagaagagcacggagcttctcatccgcaagctgcccttccagcgcctggtccgcgagatcgcgcaggacttcaagaccgacctccgcttccagtcctccgccgtcg

SEQ ID NO: 5791 - DNA, 296 bp, Zea mays
cgtttcttggcctcttcatgtccatcatcgtgacgagcgtgttggagctgcggtggagtggcatcgggatcgaggactggtggcgcaacgagcagttctgggtcatcggaggcgtgtccgcgcacctgttcgccgtgttccagggtatcctcaagatgattgccgggctggacaccaacttcacggtcacggcaaaggccacggacgacactgagttcggggagctgtacctgttcaagtggacgacggtgctgatcccgcccacaagcatcctggtgctgaacctggtgggcgtg

SEQ ID NO: 5792 - DNA, 286 bp, Zea mays
caagaacaacccgctgtttgacatctcgaccgaccacccaccgacatactacgaagacatgcagcgctccgtgttctgcctctgcccgttgggctgggcaccgtggagtcccaggctggtggaggccgtggtcttcggctgcatcccggtgatcatcgcagacgacatcgtccttcccttcgcggacgccatcccgtgggaggagatcggcgtctttgtcgccgaggacgatgtcccgcggctggacagcatcctgacgtccattcccacggacgtcgtgctgagg

SEQ ID NO: 5793 - DNA, 293 bp, Zea mays
tgcgccgccgcctcctccgccacccagcgctcgagctcctcgcgtcctgcgagcgcgcgccgcaacgccaccatgaagttcaacatcgcgaacccttccaccgggtgccaaaagaagctggaaatcgatgacgaccagaagctgcgtgccttttatgaccgaagatatcccaggaggtcagtggtgatgctctgggtgaagagttcaagggttatgtcttcaagatcatgggtggatgtgacaagcaaggcttcccaatgaagcaaggagttttgacttctggtcgtgttcgt

SEQ ID NO: 5794 - DNA, 296 bp, Zea mays
gtgcctgtgcgcgcgatcgacctgaacgtgcatgatgcaggtgttgacgaacgggaggttcaggagcgtgaggcacagggtggtggtgaacagcgagaagtcccgggtgtccatggtcttcttcggcggcccgccgcccggcgagaggctgggcccgctgccgcagctcctgggcgacggcggccggagccggtaccgggacttcacctggagcgagttcaagaccagcgggtgcaggaccaggctcgcggaagaccgcctgtcccgcttcgagaagaagtagctagaggctacgt

SEQ ID NO: 5795 - DNA, 297 bp, Zea mays
tgctggagaagattactggcttctggcaaatcagtggaatagaggctggggcgatgatggatacttcaagatcataaggggcaaaaatgaatgtggcatcgaggagggcgttgttgctggaatgccatccacaaagaatatggttccaaacttcggcggtgccgttggaagagctatagtttaatggttacgtttgcatggcctcaaatgctgttggaattagctaaagtaattttacaatgcaattgttaaagggccacgatggtgtatgtattttgtacactagctcatttcaaa

SEQ ID NO: 5796 - DNA, 298 bp, Zea mays
cacacacacctcgccagcaccacagccatcgccacagtcacagtcagcgagagagagagagcatggacctgctgaaccccgagcagatctccgagttccgggaggcgttcgcgttcttcgacaaggacggcgacgggtgcatcacggtggaggagctggcgacggtgatggggtcgctgcaggggcagcggcccagcgcggaggagctgcgcgagatgatccgcgacgccgacgccgacggcaacggcgccatcgacttcgccgagttcctgggcctcatggcacgcaagaccgcggg

SEQ ID NO: 5797 - DNA, 282 bp, Zea mays
gttcgtgaggttctccggggttcggtttcgtgggtgagcggatcgagatggcggcgtcggatgttgagtaccgctgcttcgtcggcggcctcgcctggacccacggacgaccactccctccacaacgccttcagcacctacggcgaggtcctcgagtccaagattatcctcgatcgggagacgcagaggtcccgcggcttcggcttcgtcaccttctccacggaggaggcgatgcggaacgcatcgagggcatgaacggcaaggagctggacggccgcaaca

SEQ ID NO: 5798 - DNA, 294 bp, Zea mays
cgccaaacacctgcctggcaggaccgacaacgaggtcaagaaccactggaactcgtacctcaagaagagggtcgagggcaaggatggacccagcacgccgccgtccgattcagacgactcgcattgcgccaagcccgggggcggaagcacggcgcgggagacgggagacgaccgcccagcggactactccggctcgtcggagccgcgcgagccgtcgtcgtcgtcgtcgcccgacacgagctgcctgacgggcccgcccaaggtcatgttcgtggactggctcgacatggactg

SEQ ID NO: 5799 - DNA, 297 bp, Zea mays
tggagacatcttcgagaagctgaaatggctcctaaagaacatgagtcctctcaaaaggctgctcctgccaagaagggtgatgccaagacccaggccttgaaggttgccaaggctgtgaagtctggggcagccaagaagaagaccaagaagatccgcacgtctgtgacatttcaccgccccacgaccctgaagaaggctagggaccccaagtacccacgaatcagcactaccggaaggaacaagcttgatcagtaccaaattctcaagtacccccttaccacagaatcagcgatgaag

SEQ ID NO: 5800 - DNA, 299 bp, Zea mays
  unsure (1)..(299): unsure at all n locations
cgcccgtgccgcagtgggccgccgagttcgacacctggctcaaggactcgcttctcaacggaaggtacgaggacgtgaagcggtacgaggagaaggcgccgcacgcgagggcggcgcacccgtggccggaccacttctacccgctgcacgtcgcgctcggcgccgccgcgggacggcgcgaaagcggagcagatccaccagtgctggtccaacggcacgctctcctacgcgtcctacaggttcaccnacaacacctgacgcgctgctcgtggtgtcggtggaataccaccgtcccgccc

SEQ ID NO: 5801 - DNA, 296 bp, Zea mays
tgcattgtggaaaaaggatctccagaaggtaaactcaaaagcagcagagtcgctggctgatcctaatgagtacccaaacttatttgaagactggcagattgctctcaacgtagaagctgctgttgcctctaaaaggagtatctatccatcggccgaggagtacatgattcatgctgaaaggtcaaatgagagtttagtggaagcttttaaaaatatgcatgtacatgaagagatggtaccagatgataatgaagatactgttcacgaggttattgaggatggtggagtagagagtc

SEQ ID NO: 5802 - DNA, 262 bp, Zea mays
caaagaggaagcctagtgggggaatagaatcactccgtgcaattccatggatctttgcttggacacaaacaaggttccatctgcctgtctggcttggatttggtgcagcgataaagcacatcatgcagaaggacatcaggaacatccatatactgagagaaatgtacaatgagtggccattcttcagggtcacccttgatttgcttgagatggttttcgcgaagggagacccgggaatcgcagctgtgtacgacaaattgct

SEQ ID NO: 5803 - DNA, 289 bp, Zea mays
gatgccaatacacaggagaagctttaaggatgtgtacttggtatacgaactcatggatactgatttgcaccagataatcaaatcacctcagggcctttccaatgaccactgccagtattttctttttcagttgctccgaggactcaaatatctccattcagcagaaatactccacagagacctaaaacctggaaacctgctggtgaatgcaaattgtgatctgaagatatgtgattttggtctcgcacgtacaaacagtagcaaaggccagttcatgactgaatacgtc

SEQ ID NO: 5804 - DNA, 281 bp, Zea mays
  unsure (1)..(281): unsure at all n locations
tcgncgcgaagttgcggctcaagtgcaagacgctgacggacaacacgacgatcgtggagatggaccccggcagcttccgcaccttcgacctgagctactaccgcggcgtgctcaagcggcggggcctgttccagtccgacgccgcgctcatcaccgacgccgcctccaaggccgacatcctcagcgtgatcaacgcgccgcccgaggtgttcttccaggtcttcgcgggctccatggtcaagatgggcgccatcgaggtcaagaccggctccgagggcgag

SEQ ID NO: 5805 - DNA, 289 bp, Zea mays
tgcgactgacgagactcctgagctgatgcccctcagccatggttcccatccgtgtgcacacagtcctcatctctacccagcacgacgagacagtcaccaacgacgagattgctgctgacctgaaggagcacgtcatcaagccagtcatccccgagcagtacctcgacgagaagacaatcttccacctcaacccgtctggccgcttcgtcatcggcggacctcacggcgacgctggcctcactggccggaagatcatcatcgacacctacggtggctggggagcccacgg

SEQ ID NO: 5806 - DNA, 286 bp, Zea mays
ctagttctagatcgcgagcggccgccctgtgaaatatgtgcctgaggacaacaaaactgagtcatacttttataaggttgttttaccccttcatcacctgagatcagttactcccacagcaagtcagcaaaaccctgcagacaggtacattcaggtcgtttcagtcgacaaccacgagttctggttcatgggtttcgtgaactatgatagcgctgtaaagaatcttcaggagtctgttcgagttgttcacggggcctagaggttgcccatcacttttcctctatgt

SEQ ID NO: 5807 - DNA, 285 bp, Zea mays
cggctcgaggctctaataccttattctggacagataagtgcgcttaatggatgctccatcagagaccttgctccagaagtggcgtccaaggtgtctaaacgagctctcacctcattgacagtgagtcaggctcttatgaacaggcaatggatagctcatatcaaaacccccctttccttgattggaattcaacaatttcttttcttatgggatactttaggggaagtgcagctttctcaggaggaagaccgccatgtttggaggcacgaggcatcagggctgttc

SEQ ID NO: 5808 - DNA, 283 bp, Zea mays
cggctcgagaccatttaaaacattggctcctggaagttcaggttaggtgttgctgtagaatgagatggttaccatctttacaagctcaggctatatgattccagcagcactgtaacctggggtgcaaatgtgaaggccctgcaagcactttccaggccacaccaattctgcttggttcttgaagatacattcttcctatggtgccacctatataaaagccatttctggttgttatgtttatccttgacatgtcaacagatcagtgttgggttgcagtcatgcg

SEQ ID NO: 5809 - DNA, 282 bp, Zea mays
tgcttacagacattccctatggattcaagtcagatatatggtctcttggatgttgtatgtatgagatggctgctcatcgacctgctttcaaggcttttgatatggctggactgataagtaagataaatcgctcctccattggccctttgcctactttctattcttcatctatgaaaacacttatcaaaagcatgttgaggaagagtcctgaacatcgacctactgcatccgagattataaaaaatccatacctccaaccttatgtgaatcaataccgtccat

SEQ ID NO: 5810 - DNA, 284 bp, Zea mays
caagaaaactagaaaaggctcctcccgaccgcaacgcccctcatctccctcgaccccgacatccccgacccgatggcgcccaaggcggagaagaagccagcggagaagaagccggcggccgaggagaaggcggagaagacgaccgcaggatagaagcccaaggccgagaagcggctgcccgcgtccaagtcctccggcaaggagggcggcgagaagaaggggaagaagaaggccaagaagagcgtggagacctacaagatctacatcttcaaggtgctgaagca

SEQ ID NO: 5811 - DNA, 283 bp, Zea mays
tgtggaagatgcacatgatattgtcaatactatacttttcacaggtatcaatgtgatggcagaaattgacgtgcctggtcatgcagaatcatggggaaatggatacccaaagctctggccttctcccatttgtacagagccattagatgtctctagtgatttcacatttgaagtaatttttggaattttgtctgatatgaggaaaatctttccattcgggctgtttcacttgggtggtgatgaagtatacacagggtgctggaacacaacgcctcacgtgcgg

SEQ ID NO: 5812 - DNA, 284 bp, Zea mays
tgcacgcaatggccaccacggcgaccgaggcgaccaagacgactgcaccggcgcaggagcagcaggccaacggcaacggcaacggcgagcagaagacgcgccactccgaggtcggccacaagagcctgctcaagagcgacgacctctaccagtacatcctggacacgagcgtgtacccgcgggagccggagagcatgaaggagctgcgcgagatcaccgccaagcacccatggaacctgatgaccacctccgccgacgagggccagttcctcaacatgctcatc

SEQ ID NO: 5813 - DNA, 194 bp, Zea mays
tcttcggagagtggttcaacgcggatccagagacaattgtcgcccaggcgcttcagactggagcaggcccaaacgtgtcggacgccttcaccatcaacgggctcccgggccctttgtacaactgctccagcaaagacacgttcaagctgaaggtgctgcccggcaaatggtacctgctccgtctcatcaacgcc

SEQ ID NO: 5814 - DNA, 311 bp, Zea mays
actgaagatcgtgaaggagaacttcgacttcaggcccggcatgatcatcatcaacctcgacctcaagaaaggcggcaacgggcgctacctcaagacggcggcctacgggcactttgggagggacgaccccgacttcacctgggaggtggtgaagcccctcaaggcggagaagccgtcttctgcatgaggcgcctcctctgttttggaagaagcttttggtctggtctggtctggtctggtgtgcctgcgctctatcatgcttttttatggctcctacttgtgattcttgatctgccccttgcttatcattt

SEQ ID NO: 5815 - DNA, 256 bp, Zea mays
ccaagtctgacaagattgttgttgagaagtccactgtccctgtcaagaccgctgaggctattgagaagatcttgacccacaacagcaagggcatcaactaccagatcctttccaacccagagttccttgcggagggtactgccattgaggacctgttcaagcctgacagagtgctcatcggtggccgggagacccctgagggcaggaaggccgtccaggctctcaaggatgtgtacgctcactgggttcccgagga

SEQ ID NO: 5816 - DNA, 311 bp, Zea mays
cttccggaacaagcacatcatgattgatctcgggactggaaacaacaacaagatcaactgggccctgaaggacaagcaagagttcatcgacattgtggagaccgtatacaggggcgcccggaaaggccgtggtctggtgattgctccaaaggactactccaccaagtaccgttactaagaaggcaggcattccccttatgcaatctattggggatgtttacacggacagttagtccgacaggtgatccctaactgtatcttggcataccctagtaattcaagttgctggctggagtgatgcttatccatgt

SEQ ID NO: 5817 - DNA, 309 bp, Zea mays
cgtcgtcgtccatcctgcccatgacgctgaagaacgccatcgagctgggcctgctggaggtgctgcagaaggaggccggctgcggcaaggcggcgctggcgcccgaggaggtggtggcgcggatgcccgcggcgcccagcgaccccgccgccgccgcggccatggtggaccgcatgctccgcctgctcgcctcctacgacgtcgtccggtgccagatggaggacctgggacgccggtacgagcgccgctactccgccgcgcccgtctgcaagtggctcactcccaacgaggacggcgtgtccatggccg

SEQ ID NO: 5818 - DNA, 232 bp, Zea mays
agcgggacgcagcgagcgttccgccagagatcgagaccgtagctagggtttgaggcgccgggctgcggtggacgagatgtcgacgccggcgaggaagcggctgatgcgggacttcaggcgcctgcagcaggacccgcccgccgggatcagcggcgcgccgcacgacaacaacatcatgctctggaacgccgtcatattcgggccggatgatacgccgtgggacggtggcacg

SEQ ID NO: 5819 - DNA, 314 bp, Zea mays
cgagaccagagcaaattccggcgagccggtgcggtgcggcggaggaggccgagggagacgccggcgcgagaaggagcatcaggaggaggcagcggagatggatccggactcggtgaagtcgacgctctctaacctggccttcggcaacgtcatcgccgccgccgcccgcgacctccaaaaggaaatggtggctaaagacaaggctcaagcagcacctgcaagccatgatgaagttgatcttgatgagctgttggatgacccagaacttgagaagttgcacgcagagagaattgctgcccttaagaaagaagttg

SEQ ID NO: 5820 - DNA, 315 bp, Zea mays
aaaagtctagcatacatagaagggattcggaagagtatagaagcacgtacgaaacagttgctgcctttatatacccagattgcaatacggtttgctgaattgcatgatacttccctaagaatggcagctaaaggtgtgattaagaaagttgtagactgggaagaatcacgctcgttcttctataaaaggctacggaggaggatcgcagaagatgttcttgcaaaagaaataaggcagatagtcggtgataaatttacgcaccaattagcaatggagctcatcaaggaatggtaccttgcttctcaggccacaaca

SEQ ID NO: 5821 - DNA, 306 bp, Zea mays
cttcgctcgcaaccttccccagccatggcgaccgcgacgcgcaggctgctccccgcgctcctcaggaccctagctccagccggcgcgcgcggcctctccaccgagaaggctgttggcgcacgccgtcgtcggcagccacaccgctaagtggatgcaggacacgagcaagaagtcgccaatggaactgatcaacgaggtacctccaatcaaggttgatggtcgcattgccgtctgtgaaggggcttctgaaggtgttggacttggccacccaatcgagtacatctgccttgatctggaggcacctaa

SEQ ID NO: 5822 - DNA, 305 bp, Zea mays
gagacctaccctggcgtcaagcgcatcaccatcaagccccagactgaccgctgggtgttccccgagaccaacactggcatcattgtccttgctgagggtcgcctgatgaaccttgggtgtgctactggccatcctagctttgtcatgtcctgctcattcactaaccaggtcattgcccaacttgaactgtggaaggagaagagctctggcaagtatgagaagaaggtgtatgtgctccccaagcaccttgatgagaaggttgctgctctccacttgggcaagcttggtgccaagctgaccaagct

SEQ ID NO: 5823 - DNA, 306 bp, Zea mays
ctcgagccgcgaagagagatcagcgacttaacaacaataatggccaccgccatagttcccacggacgccgagctgctgcaggcgcaggccgacctgtggcgccacagcctctactacctgacatccatggcgctcaagtgcgcggtggagctccacatcccgaccgccatccacaacctaggcgggtctgccacgctgccggacctcgtggccgcgctgtccctgccagcggccaagctcccgttcctcgggcgcgtgatgcggctgctggtcacgtcgggcgtcttcgcgtcgtccgacgacgtg

SEQ ID NO: 5824 - DNA, 302 bp, Zea mays
ggagaaagaaccaatgcttgcagccagaataaccgttgaagattctcttcgtcttcttctggttgttgatgatattgatcggtttttacagtctagccagccacaggacagcagtttccaactgaagcgaaggcgagaggtcctgcttgaaggcttagctacatcactccagcttgttgacccttttggccccaacaaacatggccattcgggtgggttggcccctaaggatgacctaatttttcttcgtattatttctctgcccaaaggacgtaagcttttggcacgctatcttcgacttc

SEQ ID NO: 5825 - DNA, 302 bp, Zea mays
gggcaatgttaacccaattggagtcaggagctgttatgatgagggtaagcgtgtagcagagacgctgatgttcgactatcacaggcagcatggcattgaaatccgaattgccaggattttcaacacctatggaccaaggatgaacattgacgatggccgtgttgttagcaacttcattgctcaggctgtgcgtggcgaaccccttactgtccagaagccaggaacacagactaggagcttctgctatgtcgccgatatggttgatggtcttattagactgatgaatggaaacaacactgggc

SEQ ID NO: 5826 - DNA, 300 bp, Zea mays
ccagtctgggctattggaactggcaaagtcgccaccccagctcaggctcaggaagtgcacgcctccctgagggattgggtaaagatcaatgtcagccctgaggtctctgaatctacaaggatcatctatggaggttcagtaactgctgcgaactgcaaagagctggcagcacagcctgatgtcgatggtttccttgtgggcggtgcttctttgaagcccgagttcatcgacatcatcaacgccgccaccgtgtgaagtccgcttaagatgttccaacccttcaccctgttgcggtgatgt

SEQ ID NO: 5827 - DNA, 303 bp, Zea mays
ccgccgccgccggacgagacaggttgaggcggggcggcaatggccgccggggaccttgaggtgctcaccgcgctcgacaccgcgaagacgcaatggtaccacttcaccgccatcgtggtcgccggcatggggttcttcaccgacgcctacgacctcttctgcatctccctcgtgactaagctcctcggccgcatctactacaccgtggaggggtccgcgacgcccggcaccctcccgccgcacgtgtccgcgtccgtcaacggcgtggccttcgtgggcacgctgtcagggcagctcttcttc

SEQ ID NO: 5828 - DNA, 303 bp, Zea mays
tgcgctctctctctctttctcgtgcggcaactgcgaggcagccgacgcccgacggcagggtgcccaggccttcttcggtcccatcgcgaggccatagttgcatcattcgcctgagacgactgcccaccaccaggactgatctcctcgctaggggcgtagaggtgaagagaagaacttgacaatgagcagcataggcacaggttacgatctgtctgtcaccaccttctccccagatggtcgcgtcttccaggtcgaatatgctaccaaggccgtcgacaacagcgggactgttgttgggatcaa

SEQ ID NO: 5829 - DNA, 300 bp, Zea mays
gagaaacgcgtatacccaggctgcggttgaggaagaggaggagaagaagaagaagatggcttcctccgcatacgcctcatggtccaagcggtggatccgtcccgaggtgtacccgctgttcgtgccgatggccgtggccttgggcatctgctcgtaccagcttgtgcgcaacatcacgggcaaccccgaggtgcgggtgaccaaggagaagagggcggccggcgtcctggacaaccacgacgagggcgagaggtacgctatgcacggcctcaggaagttcgtccgcgggaagaagcccga

SEQ ID NO: 5830 - DNA, 301 bp, Zea mays
cgagaactccatttcgatctcatttgaaatcaacccatcctcgtttcctccgtctagcagcctctcaccctcatggccaagatcaagatcgggatcaatgggtttggcaggatcggaaggctggtggccagggtggccctgcagagcgacgacgtcgagctcgtcgccgtgaacgaccccttcatcagcaccgattacatgacctacatgttcaagtatgacactgtgcacggacagtggaagcaccatgaggtcaaggtgaaggactccaagacccttctctttggtgagaaggaggttg

SEQ ID NO: 5831 - DNA, 303 bp, Zea mays
agcagctgcaacagcagcaaaggccaacatctgcttcagcttcgtcaaggcaatctgaaaaggaaagttcttgtgatgatgtagaaattgatgcaattcttgaggaagaggaggccctcattgcagctcacaggaaggagatcgagaatactatggagatcgtacgggaagaaatgaaccttttggcagaagttgatcaaccaggtagcctgattgacaactacgtgacccaactgagctttctgctgtcacgcaaggctgcaggcttggtcagcctccaagcacgcttggcacggttccagc

SEQ ID NO: 5832 - DNA, 301 bp, Zea mays
ggtgccaggcgaccgccgccgcttccctactcacccttggccggcgacgacgagcgcccactacggcaggatgacgacgctcaggaacctcaagatcaagacgtcgacgtgcaagaggatcgtgaaggagctgcgctcgtacgagaaggaggtggagaaggaggctgccaagaccgccgacatgaaggagaagggcgccgatccctacgacctcaaacagcaggagaatgttttggctgagtcaaggatgatggtcccagactgccacaaacgacttgaaactgcactggctgacttgaaa

SEQ ID NO: 5833 - DNA, 297 bp, Zea mays
gttggcttctcctccccctccggttcgggttcgggttcgtgaggttctccggggttcggtttcgtgggtgagcggatcgagatggcggcgtcggatgttgagtaccgctgcttcgtcggcggcctcgcctgggccacggacgaccactccctccacaacgccttcagcacctacggcgaggtcctcgagtccaagattatcctcgatcgggagacgcagaggtcccgcggcttcggcttcgtcaccttctccacggaggaggcgatgcggaacgccatcgagggcatgaacggcaag

SEQ ID NO: 5834 - DNA, 298 bp, Zea mays
gtcggcaacaggaaactctactcccgttatcaccttctgcctggcactgctactgatgatggaggtggtgaagttaaggagcgtctctggcatagccaaggtcaccggcgtacactgtgcctggccggagcgttggtcatcgccctgtacacggggccgtcgctcagcccagtcaaccgccatcaccgtgcctctggcggcgcccatggcttcaaagctccaacccgtgagaggacatgggttacaggcacgttcctgatgcttctgtccaacgtcacatggtccctgtggacggttc

SEQ ID NO: 5835 - DNA, 308 bp, Zea mays
cccggcgttcgcgctggtgaacaaggcgaccggggaggccatcaagcactcgctggggcagtcccacccggtgcgcctggtgccctacaacccggactttttggacgagtcggtgctgtggacggagagccgcgacgtcggcaacggcttccgctgcgtccgcatggtcaacaacatctacctcaacttcgacgccctccacggcgacaagtggcacggcggcgtccgtgacggcaccgacgtcgtgctctggaagtggtgcgagggcgacaaccagcgctggaagatccagccctactactgaacca

SEQ ID NO: 5836 - DNA, 300 bp, Zea mays
caagaagggacataagaatgaagcattttagggtgtcattcatcgtcacggcgctgtgcctgctgggctcggcatggtggggctacgaacatgccggcgtggccgcgcgctgacggcgatgggtatcgccgcgattctcgcggtcatggaagtctcgttgtcgttcgacaacgcggtggtcaacgcctccgtgctgaagacgtgggacgagttctggaaaaagctgttcctgggcgtcggcatcatcatcgccgtgttcggcatgcgcctgctgttcccgctcgtgatcgtcgcggtggc

SEQ ID NO: 5837 - DNA, 172 bp, Zea mays
ctggtatctccaaggatggacagacccgcgagcatgctctccttgctttcacgcttggagtgaagcagatgatttgctgttgcacaagatggatgcacacacccaagtatccaagccgtatgatgaatgtgaagatctctcctactgagaagtgaacacctgcaatcactgt

SEQ ID NO: 5838 - DNA, 307 bp, Zea mays
cctgccaaacgatcccgagcagtgccaccggtgcggtcgtgcagagggagcggccggggtacagtacaggatgcgggggttgacacgcgctgcgaaacgcgcaggggagatggcgttcaacgccggtggtggcgccgtcaactggttcccgggccacatggccgcggcctcccgcgccatccgcgatcgtctcaagctcgccgacctcgtcatcgaggtccgcgacgcccgcattccattatcctcagcaaatgaagaccttcaaccagtgctctcagcaaagaggcgaattcttgctctaaacaag

SEQ ID NO: 5839 - DNA, 287 bp, Zea mays
cctgacatcgagaccggctgcccgaccccggtccggcgatccctctgcacccctttctttgcgctgccagccccaatctctcgcatccctgtcaaccatggcggcgtcacaggcggaggcgcggtgcgcgcgctgtcccagaaggagcaggacatacagatgatgctcgcggccgacgtccacctcggcaccaagaactgcgatttccagatggagcggtatgtctttaagcgtcgcaccgacggcatctacatcatcaacctgggcaagacatgggataagctcca

SEQ ID NO: 5840 - DNA, 306 bp, Zea mays
  unsure (1)..(306): unsure at all n locations
tctgctctcncccacctcccggtccggcagcagagagcgggggtgcagagagatcgagatccggaggccgcgagtgggagcgccaccaccagcgactgcggcaatggcgggcacggtgacggtcccggggtcgtcgaccccctccacgccgctgctcaaggacgagctcgacatcgtgatcccgacgatccgcaacctcgacttcctggagatgtggcggcccttcttccagccctaccacctcatcatcgtgcaggacggcgacccgaccaagaccatcaaggtgcccgatggcttcgactacga

SEQ ID NO: 5841 - DNA, 302 bp, Zea mays
tgtccatcgcgcctccctccggtctgcgctcccacagcctcacccctgcgcccccgccgattcgcgtcgccctttgttggaaggaacgatggagcagaccttcatcatgatcaagcccgacggcgtccagcggggcctgatcggggacatcatcagtcgcttcgagaagaaagggttctacctcaaggggatgaagttcatgaacgtggagaggtccttcgcgcacagcactacgctgacctttccgacaagcctttcttccccgggttggtggagtacatcatttccggccccgtggtggc

SEQ ID NO: 5842 - DNA, 299 bp, Zea mays
ccaggcaatcgagtaatcgacgaaggccaccaccacctccacaccactttgcctcgagaaggttccaccaagcctctcggctagggtttggggactttgggggcgatcgcaatggagggccgcggcgcggaacaagcacccgaggcggcggcggaggtgaaaaatccgaggtgcttcatggacgtcaccatcggcggcgagatggaggggaggatcgttgtagagctctacgcttccgtggtaccgcggacggcggagaacttccgcgcgctctgcacaggggagaaaggcatcggcgc

SEQ ID NO: 5843 - DNA, 238 bp, Zea mays
gtacttcagggacgagcaccccaagttccccagcggcgggctcatgacgcagcacctggcactcgctcccgctcggctcctgcatcgacgtcaagggcccgctcggccacgtcgagtacaccggtcgcggcggcttcgtgatcgacggcagggaccgctacgcgcgccgcctcgctatggtctgcggtgggagcgggatcacgtccatgtaccaggtcatccaggcggtgctgcgcga

SEQ ID NO: 5844 - DNA, 297 bp, Zea mays
cattgactaccgcgactatcttcgatggttgtctcgtggcaattccagatctcacaactcttcatggattgctttctgccgtctgtctcgtaccagaatcactggatacaagcgtaaggttctcggtgtcccatccgagaagctttcgggtgacgtcccacgtgcccgtatcaccaacatcttcttttcagagattcttggtcccctggtcttggttgcagtcacactcgttccttatctcttcatcaacgctcgtactggtgtaaccaggatggtcaaaaggcgacctacgccctt

SEQ ID NO: 5845 - DNA, 298 bp, Zea mays
  unsure (1)..(298): unsure at all n locations
tcnctgtggctgcggttttgcagcataagatatatagctacacacagctcaatgcttgtcaggatcgatggcagatagggagcatcgaacagtatttgtcacggtggggacgacatgctttgatgctcttgtcatggcggtagattctccagaagtgaagaaggctttattgcaaaaaggttatagtaatcttcttattcagatgggccgaggaacatatgttccattgaaggtctcaggagatgctacccttcaagttgatcatttcacattttcaccaagcatcgctgacaatatg

SEQ ID NO: 5846 - DNA, 294 bp, Zea mays
tgttagtggcaatcaagagatccaaggaagggtccatgcagggtggccttgagttcaagacagatatagaactcctttccagggttcatcacaataacttggttggactggttggtttctgctttgagaagggcgaaaagatgttagtttacgagttcatacctaatggaacactaagcgaggctttatatggtatgaaaggaatacaattagactggagcaggaggctcaagatagctttggattcagctaaagggctagcatacctccatgaccatgccaatcctcctatca

SEQ ID NO: 5847 - DNA, 293 bp, Zea mays
aaatgttcctgataatgagccagttaagccaccggctttagacaacactccttttacatttgttgaagacctgaaaaccttggaggtgctagccacaaagctgaaggatgcaactgagtttgctgtcgatttggaacacaaccattataggtcgtttcagggtttgacatgcttgatgcagatttcaacaagaacagaggactttattgttgacactcttaagcttcgtaaatatcttggtgattatctaagagagtttttcagagatccaaccaagaaaaaggtaatgcatg

SEQ ID NO: 5848 - DNA, 291 bp, Zea mays
aggcagtggcacttcatggaatgcaagctgcgagttgggagtatttatgagtcctgtgaccacctcaagagaggacagtccgccaggatatgggcctcgagaaaaccaggagaatgacaatatgagatgcgagttgagaatgtttacaagtcctacaaccatctccagagaagttggcccaccaggatatgagcttactggaaaaaacaagggcaacggcgcttcatgtactacgaattaccagcagggagcgtttacgagtcctgaagccttcccaagagaagcctgtcc

SEQ ID NO: 5849 - DNA, 292 bp, Zea mays
caatcggcacctcgccgtcctcgtgtgcaatccccagctctcctcgcgcctccctcccaaactccagcggcccccctgaccaagctccggggacggatggacggaggagccggctttccgggcacgcagccggtctcccgctcgccggaggacgtcttccgggactaccgcgcgcgccaggccggcctgatcagggcgctcaccaccgatgtggagaagttctacgtgatgtgcgacccagagaaggagaacttatgtttatatggacttcctaatgagacatgggaaataa

SEQ ID NO: 5850 - DNA, 290 bp, Zea mays
tgcagtggacgatgcttgactggaagcctaggaggcctgacatgctcactgacacgtttgggtttggccggatcatacatgatgggctcatgttcaggcagaacttctccattaggtcctatgagattggggcagataggacggcatctatagagacgctgatgaaccatttgcaggaaacggcactcaatcatgtgaagaccgctgggctgctaggtgatggatttggctccacaccagagatgagtaaacgaaacttgttctgggtggttagccaaatgcaggccatc

SEQ ID NO: 5851 - DNA, 291 bp, Zea mays
cgtcgtgcggcaactgcgcgaccgccgacgcccgacggcaggtgccccaggtcttcgtcgaccccttcgcaaggcctcggttccatccttcgccggaggcaccgcccgtcaacaggacttgatctactactcactagcggtgtagaggcgaagagaagaacttgaccatgagcagcataggcacaggttacgatttgtctgtcacgactttctccccagatggtcgtgtcttccaggtcgagtatgccaccaaggccgtcgacaacagcgggactgttgttgggatcaagt

SEQ ID NO: 5852 - DNA, 171 bp, Zea mays
  unsure (1)..(171): unsure at all n locations
ggtgaagctcgcatttggaagctttcgcgactctttgacngccgcgtcgctcaaggcctatgtggccgagttcattgccacgctgctcttcgtgttcgccggcgccgggtccgccattgcctactcgcaattgacgaaacgcggcgctctggaccccgccggcctggtggc

SEQ ID NO: 5853 - DNA, 323 bp, Zea mays
tggagaacttgtgaaaggtaataaaaacaagtccaccactgagttatgggtagagaaattctataagaaggtaaccaatctaccggagccttttccccatgatcttgttgagaagttagaagaatacctggataaacttgaagggcaactcgtggacttgtcttccttattgtatgaccaccggctggtcgatgcatatcaaaacagtaccgatatcctgcaaagcactatttttacacaacagtatgtggaacgtgttctagctaacgagagagacaagatgaaatgctgtagcattgaatatagtcatcaaagcagtcatc

SEQ ID NO: 5854 - DNA, 353 bp, Zea mays
atcgatggagcccagtaactcggaatcggctcgacgacaacacccggtacgcctggccgccggcatcgtgaccaagaacatcgacgtcgccaacaccgtgtcgcggtccatccgcgccggcgccatctggatcaactgctacttcgcgttcgacccggacgcgccgttcggcgggtacaagatgagcgggttcggcaaggacatgggcatggacgcgctcgacaagtacctgcagaccaagaccgtggtcactccgctgtacaacactccatggctctgaccgaccgacctcatccctgtccgatgaacagttcaacatcacaaacaagaagagacatgtcttgtaagatact

SEQ ID NO: 5855 - DNA, 323 bp, Zea mays
accaacaggagccccttccgtcacttcccctccaacaacagcagcgccgccaccgccgccgccgccgcttgctcgccgggatcgtcgccggaggaaagcgccatggatcggtaccagcgggtggagaagccgccgcccgaggccgccgccatcggcgagaatgagatccgcatcaccactcagggcctcgtccgcaactacgtcacctacgccacctccctcgtccaggaaaaacaggtgaaggaaattgtgttgaaggctatgggacaggctataagcaaggcagtggctattgctgagatcataaagaagaggattcctgg

SEQ ID NO: 5856 - DNA, 323 bp, Zea mays
  unsure (1)..(323): unsure at all n locations
caggcattgtgtggaatatcactgggggaactgacctaactttgtttgaggtgaatgctgcggccgaaattatctacgaccttgtcgatccaaatgctaatctgatatttggtgccgtcatagacccgtcactgagtgggcaggtgagcataaccttgatagctactggcttcaaacggcaggatgaaccagaaggccgcgtgtcgaagggtgggcaacaaagtgagaatggccgacgcncgtcncccgcagagggcagcagcacggtggagatcccagagttcctgcgacgtagangaccttctcgcttcgcacgagtttga

SEQ ID NO: 5857 - DNA, 316 bp, Zea mays
gtgctactgacggttgctctagatccgttcatcctggtggttttgtgaggtcgaaagcggcgagcgaattagaagatgctggacaagctgtgggacgacgtggtggccgggcctcgcccggagacgggcctcgagaagctccgcaaggccaccaccgcccgcccgctcgtcatcaacaaagacgcggacggcggcagctacaagcgggcgcagtcgatgccgtcgaccccgacgacgccggtgacgccgtcgtcgtcgtcgtcgtcgacgagccgcgctgcgccggcaacgtgtggcgcacgtcttccacccgggg

SEQ ID NO: 5858 - DNA, 318 bp, Zea mays
cgcgccgccgccaccgcaagagtatctcaactccgcctcgagaccttcccccctcgctggtctcagccatggtgaaatattcgacggagccgaccaaccccaccaagtccgccaaggccatgggccgtgacctacgtgttcacttcaagaaccacgtgagacagcttttgcccttaggaagttgtcactcaccaaggccaaaagttaccttgaggatgtgatcgctcacaagcaggccatcgcgttccgcaggtattgtggtggtgttgagcgtactgctcacgctaactctcgcgactcaaatgttcgaggacgctg

SEQ ID NO: 5859 - DNA, 308 bp, Zea mays
gtccagaacttgactgctgcaaacatcatgaaatgtgacgatgatacatttgtgagagtagatgtggttctgagacgcatcaagttgaacaatggtgacaaaccattatatatggggaaccttaacctcctgcacagaccattgagaactggaaaatgggcagttacagacgaggagtggcctgaggatatctacccgccatatgcaaacggaccaggctatgtgatttctggtgacatagcaaaattcatcgtgtcacagcatgccaatcagagtttaagactgtttaagatggaagatgtaagcat

SEQ ID NO: 5860 - DNA, 320 bp, Zea mays
tgcatggggcaggcagagaaggaattcagagttgaagttgaagccatcggtcatgttcggcacaagaatctggtccgccttctgggatattgcgtggaagggatacataggatgcttgtctacgagtatgttaataatggcaacctggaacaatggcttcatggcgtgaatcaacacggtgtccttagttgggaaaaccgtatgaaaattctccttggcactgcaaaagctctcgcgtaccttcatgacgacatagacgccaaagttgtgcacagagacatcaagtcaagtaatatcttaatcgacgatgaattcaacag

SEQ ID NO: 5861 - DNA, 310 bp, Zea mays
gctcctgagtcctgtccaccctgccaccgccgacgccgcgccgccgcagcaattgtcaccgtcgctatggcccgtatcaaggtgcacgatctccgggggaagagcaagacggacctgcaggcgcactcaaggagctgaagtctgagctcccctcctccgcgtagcaaggtcaccggcggcgacccaacaagctctccaagatcaaggtggtgcgcacctcgatcggcgcgtgctcacatgatctcgcagaagcagaagtcggcgttgcgggagcctacaataagaagaactgctcccctcgactccgcct

SEQ ID NO: 5862 - DNA, 289 bp, Zea mays
  unsure (1)..(289): unsure at all n locations
gcaccgtcaaaggcaccaggctgagcaacgcctctctctctcnctcttatctccaaggcgaggaccggacggacgaggagggcccttctgcttgttctccgctttgcaagatgtcgtccccgagcaagcgccgcgagatggaccttatgaagctgatgatgagcgactacaangtggagatggtgaacgacgggatgcaggaattcttcgtcgaattcaagggcccggccgaaagtatctaccaaggtggtgtctggaaggttcgggtagaactgcctgatgcataccc

SEQ ID NO: 5863 - DNA, 137 bp, Zea mays
tgggtgttctggaaatctatcaaggacaagcttatattccctttcgtagacctcgacatcaaatattttgacctcgggcttccacaccgtgatgctaccgacgacaaagtcacagtggaggctgcggagggcacact

SEQ ID NO: 5864 - DNA, 308 bp, Zea mays
tgttcggaaggggttacaactacgccaccgcgctggagggcgccctgaaggtcaaggaggtggcgctgatgcacagcgagggcatgctcgctggcgagatgaagcacgggccgctggccctcgtggacgagaacctccccatcattgtcattgcgacccgcgacgcgtgcttcagcaagcagcagtcggtgatccaacagctcctctcgcgcagggggcgcctgatagtgatgtgctctaggggagatgccgcggctgtgtgccctagcggtgggtcgtgcagagtcattgaagttccacaggttgca

SEQ ID NO: 5865 - DNA, 305 bp, Zea mays
catcattctccctattgtcggcaacgcgctgaacatgtcaccgccatcaaggtcgcatacaaaaaccatatggatctcgcgatcggtgttgctgtaggcagttccattcaaattgctctactccttacacccgtcatggttatcctcggatggattatggacaaagacatgtctctttactttacactatttgagactgtctgcctgttcgtttcggcgtttattgtcaactttcttgtccttgatggaagaagcaattatcttgaaggtgctctgctctgtgcggtgtacatcatcattgctgt

SEQ ID NO: 5866 - DNA, 127 bp, Zea mays
gatacttcatcattataaaccctagagtttggtggggattgttggatcttttatgggcttggcgcatttattgaataaactctatggtgtgtaatggtggagaataccaatagtaacacattggaag

SEQ ID NO: 5867 - DNA, 305 bp, Zea mays
ttatgccaccaatatgcaagtggatactctcagtgcttaacaaggctgttggaaaaactgttacttctttagaagcatacaaattgtctgatgcaacatctgctatatactcgtggtggcagtatgagctatgcgatgtatttatagaagctatcaaaccttacttcagcgattctcaagagtttgaatcagcaagagctgcctccagagataccctgtggatttgcctggagacaggtctgcgtctgctccatccgttcatgccctatgtaacagaagagctctggcaacgtcttccacagccc

SEQ ID NO: 5868 - DNA, 307 bp, Zea mays
gtacttcaatcgtttccaggtgaagttcaagagaaggcgcgctggcgagacagactacatggccaggataaggctgattaaccaagacaaaaacaagtacaatacacccaaatacagatttgttgtgcgatttaccaacaaggacatcacagcacaaatcatctctgctagtatagcaggtgatatggttcttgcttctgcttactcgcatgagttgccacgatatggtcttgaagttggtctgaccaactatgcagctgcctactgcactggccttctgttggctcgccgtgtgctcaagacccgt

SEQ ID NO: 5869 - DNA, 250 bp, Zea mays
catccgtttgcctcttctccctcttgccggtcccgaataaagatcagcagcgcaagaggtcggtagagcgagaagaaggcaatggcggccgagagcttccttttcacgtcggagtccgtgaacgaggggcaccccgacaagctgtgcgaccagatgtcggacgccgtgcttgacgcatgcctcgcgcaggaccccgacagcaaggtggcctgcgagacctgcaccaagaccaacatggtgatggtgttcg

SEQ ID NO: 5870 - DNA, 305 bp, Zea mays
tctgaatactctggccattctattcctgttggtggtcttgcttactatgtaactgccccatcaagtttggctgatgtccttgcaaatccattccatgcactgttttatgtggtcttcatgctgtcagcctgtgctctgttctcaaagacatggattgaagtttccggttcatcagcaaaggatgttgctaagcagctcaaggaacaacaaatggtgatgccaggccatcgtgagtcgaacttgcagaaggaacttaaccgatacatccccactgctgctgcatttggtggtgtatgcattggcgc

SEQ ID NO: 5871 - DNA, 300 bp, Zea mays
gcaaaccagcgcaacccttccctgacagcggcggcgacatggtgctcgaggcgacgatgatctgcatagacaactcggagtggatgcggaacggcgactacgccccgtcgcggttccaggcgcaggccgatgccgtcaacctcatatgcggtgccaagacccagtcgaacccggagaacacagtaggcgtgatgacgatggccgggaagggcgtccgcgtgcttgtcactcccaccagcgacctcgggaagattctcgcctgtatgcacgggttggaagttggtgctgaggcaaacttgg

SEQ ID NO: 5872 - DNA, 297 bp, Zea mays
cgatccccaattcctccttcggatctcgcattcagcgcagcaggtgtgaaggaacggggacgcggaggaagatggggctcgcgttcgggaagctcttcagccggctcttcgccaagaaggagatgcggatcctcatggtcggcctcgacgccgccggtaaaaccaccatcctctacaagctcaagctcggcgagatcgtcaccaccatccccaccatcggtttcaatgttgaaactgttgagtacaagaacattagcttcactgtctgggatgtcgggggtcaggacaagatcagac

SEQ ID NO: 5873 - DNA, 299 bp, Zea mays
cgtggagcctgctttgacaatctctaaggttttgctttctatctgctccctgcttactgatcccaacccagacgaccctcttgtccctgagattgctcacatgtacaagacggatcggcctaagtacgaggcgacagccgcagctggacccagaagtacgccatgggatgaaatgttcggcgttactggctaaatgcagacgattgtggtgttgcccatgaaactgttatcggggacgtatgttcttctgttccttgtgcattctccgatccatctctaggatccgagttctagtccaa

SEQ ID NO: 5874 - DNA, 301 bp, Zea mays
  unsure (1)..(301): unsure at all n locations
gtcaggagctgttacgatgagggcaagcgtacagctgaaacgttgaccatggattaccaccgtggtgccaaccttgaggttaggatcgcacgtatcttcaatacatatggccctcgcatgtgcattgacgatggccgtgttgtcagtaactttgttgctcaggcactgaggaaggagcccttgacggtttatggtgatggacagcaaaccaggagtttccaatatgtttctgatctggtangtctatctctggccaacatatattgaanaaaaaaagaaacccttgatttggcttttcctg

SEQ ID NO: 5875 - DNA, 297 bp, Zea mays
tcgttatgcccaagtcatgaagactgtacagggaaaaggcggatcttctctctgattctcaaaggattaaatataccattgagaccttcaccaagggcatccctgatgcacggacttacttgaatactcttcaacagctcagaataaagagtggtcttatagatcatcttggaattgagcctttgatgatggaagctcttgagaagattgagaaggacattaagaaaccacttttgaggagcgacaagaagaacatggccaccctcttggcagagtttgacaagattaacaaaaagc

SEQ ID NO: 5876 - DNA, 298 bp, Zea mays
cgcccagggtccgtaatcacgccgatcatcccaccgaccatcaccctaccacctctgctgcctctccgcgaggccgacgcgctcccgttctccaccgggcgcttcgccgacatcctcgccatgttcgcgccgacgacatccgacgccatgggcgaagagatacggtcgacgctcgacacctgcgagaacacgcgcccgctccctggcgagaaggccgcctgcgccacctccctcgagtctctcgccaggatacccgccgtcctcctcgggacacgcaacgtccgcgctttctccggcg

SEQ ID NO: 5877 - DNA, 298 bp, Zea mays
ctcccagatccaattcgcgagttctccctcctctgccgccatggcgctctctgtggagaagacctcgtctggacgggagtacaaggtcaaggatctctcgcaggcggacttcggccgcctcgagattgagctggccgaggtcgaaatgcccggcctcatggcgtgccgcgccgagttcggcccgtccaagcccttcgccggcgctaggatctcggggtctctccacatgaccatccagaccgccgtcctcatcgagaccctcaccgcgctcggcgccgaggtccgctggtgctcctgc

SEQ ID NO: 5878 - DNA, 294 bp, Zea mays
cgaggacctcggtccaagggatccgactgccacaaggccgctgtgatcggtgacaccattggtgaccccctgaaggacacctccggcccgtccctcaacatcctcatcaagctcatggccgtggagtccctcgtgtttgcccccttctttgccacccagggtggcctgctcttcaagtacctgtaaaagggacaacaccaagcacacagcagaagtatacgatctcccgaccgaccgtggacaatatcgaataactcctgccaaatcgccagttccttttgtgtactgtgcgct

SEQ ID NO: 5879 - DNA, 296 bp, Zea mays
tcgtgccccaaggcgaaggagattgtgcagtccattgtggcacaggctgtggccaaggagaccaggatggcggcatctttagtcagactgcatttccatgactgctttgtcaagggctgcgatgcttcggtgctgttggacaacagcagcagcatagttagtgagaaagggtccaacccgaacaggaactccctcagggggtttgaggtgatcgaccagattaaggctgctcttgaggctgcctgcccaggcacagtctcctgtgccgacattgttgcccttgcggctcgtgattc

SEQ ID NO: 5880 - DNA, 298 bp, Zea mays
cgatgaatttgtcacaaagcatggtgtaaaattgggtcttatgtcttgctttgtcaaggctgctgtttctgcacttcaaaaccagcgaattgtcaatgctgtcattgatggtgatgacatcatatacagagactacgtagacatcagtgttgctgttggcacttccaagggccttgtggttcctgttatccgagatgctgataccatgaactttgctgacattgagaaagggataaacaaccttgcaaagaaagcaactgagggggcgctctcaattgatgacatggccagtggaaca

SEQ ID NO: 5881 - DNA, 288 bp, Zea mays
cgagaagagcggcggcgcgggcggacaaggagcaggcggaggaggagctgtgccaagccacaatgggtatctcacgcgactcgatgcacaagcgccgtgccaccggtggaaagcagaaggcctggaggaagaagcgaaagtatgagcttggtcgccagccggccaacaccaagttgtcaagcaataagacagtgaggagggtccgtgttcgtggaggtaacgtgaagtggagggctcttcgccttgatactggtaactactcatggggaagtgaagctgttacccgca

SEQ ID NO: 5882 - DNA, 287 bp, Zea mays
  unsure (1)..(287): unsure at all n locations
cgngcaccgccccgcatccaccccgaaaccctagtggatcgtcgccatggccgcagccgccctcattcgccgcctccccgctgcccgggcccaggccccggcattcatggcggcgcgaccgatctccgactccacggcagcgttcaccatcgagacatctgtccctttcacctcccacctcgtcgacccaccctcgcgtgatgtcaccaccacccccgctgagctcgtcaccttcttccgcgacatgtccctcatgcgccgcatggagatcgcggccgactccctct

SEQ ID NO: 5883 - DNA, 287 bp, Zea mays
tgtttttgtgcctggagaggatggatacaaggctggaaaagaaaatggatatgactttgggttcctgcacataaaggccattgatgacgctggtcatgacaaggctgtcaagttgaaagtacggggtctagaagctgttgatcgagctattggtcagcttgcgaggcttctttgggaagctgaaaaggccggacactatcagtactttctttgcgtcactggagaccattctactcctgttgaatacggtgatcatagcttcgaacccgtcccgttttctatatgca

SEQ ID NO: 5884 - DNA, 292 bp, Zea mays
aagaaaccgacgtgctttcatggtcaccgaaggacgcaacaggaagaagaagcaggagaaccaaatgaaacttgaggcaaaactgcataatttgcagattgaatggaatggaggctcggatactatggatgaaattcttgctaggatacaacaacgggaagaagcagcagtaaagcgtgagcgaagccatggcgtacgcgttcaaccatcagtggagagcaaggtctgccacaagtctaggaaacttcagctatgaagtcggtaagggtggctggggctggagctggatgga

SEQ ID NO: 5885 - DNA, 289 bp, Zea mays
accacacacagcctccggactgctccggacgcgcgcctcagatctactccaacacctccgcagcggcggcgcccgcgggtggaggagcaggagaggcggcgccctggtcgggaccgggaagagggagcggatagcgatacggaggatcgacaacctggcggccaggcaggtgaccttctccaagaggcggcggggcctgttcaagaaggccgaggagctctccatcctctgccacgccgaggtcggccttgtcgtcttctccgccaccggcaaactcttccacttcgcc

SEQ ID NO: 5886 - DNA, 292 bp, Zea mays
  unsure (1)..(292): unsure at all n locations
ccaaatcaaggtagcgtacaccgctgcagtttctagagccctctctgccactcgtgatcccactagtcacaatgcctgccctcgccaagcccgcctcccgcaccgccaagcccgccgcggctccgaagccgaagcctgccgccgccaagccgaaggtnccaccgctggtgcctcccacccgccttacttcgagatgatcaaggaggctatcacggcgctcaaggagaggaccggctccagctcgcaagcgatcgccaagtatgtgggggacaagcacggcgcgtctctgccg

SEQ ID NO: 5887 - DNA, 293 bp, Zea mays
caactgtgaactggagaagcacattgaagacatgcatgtcctgattaccaccccattccacccagcttatgtcactgcagagaggataaagaaggcgaagaatcttgagcttcttctcacggcaggaatcggctccgatcatattgatcttccagcagctgctgctgcgggcttaactgtggctgaggtcactggaagcaacactgtctctgtggcagaagatgagctcttgcgcattctgattctgctcaggaacttcttgcctgggtaccaacaggtagttcaaggcgaat

SEQ ID NO: 5888 - DNA, 109 bp, Zea mays
cacgcggccgtcaacttcgggcagtaccgtacgccgggtactcccgaaccgccgccgcaccgaaccgtgcggccggacgacatagggactgacgaaccgagagtgtcgt

SEQ ID NO: 5889 - DNA, 293 bp, Zea mays
agcgcctactacgtgcgctacggcggcggcgccaacgagctcagcgacggctactccaagggcaccggccacgccgccgagatcatcggcacgttcgtgctcgtctacaccgtattctccgccaccgaccccaagcgcagtgcccgtgactcccacgttccggtgctagctcctctcccaattgggttcgccgtgttcatgctgcacctggccaccatccccatcaccggcaccggcatcaacccggcgaggagcctcggagtcgcggtcatctacaacaaggacaacgcctg

SEQ ID NO: 5890 - DNA, 294 bp, Zea mays
tgagcaattacggaacacaagcaaggtcgctgccagtgatggtattggcaaggatgatatggcgaactttgcgcttatgggtggtggagcagaccacctgaggggaaacagcgtgaacacgttcagccaggctcacaacatttggaggcctcaaagagggcttcctgagcgtgcagtgtctgttcttcgctcatggctgttcgagcacttcctacatccgtacccaactgatagtgacaagcagatgctggctaaacagacaggcctaactaggaaccaggtgtcacactggtt

SEQ ID NO: 5891 - DNA, 314 bp, Zea mays
cggctcgaggaccatcctccggtccgagaaggtcaaggatgagctcatccttgacggaaacgacgtcgagctcgtatctcgctccgccgccctcatcaaccagaaatgtcatgtgaagaagaaggatatccgaaagtttttggacggtatctatgtgagcgacaagggcgtcatcgaagaggagcagtgagcgacagagtagccgaaatgccaggagatgaatatgaatgtcgtttgagttgcaattttgtgagattggatgtgaacctttttctcattccttagatagttgactgccagtgttcgtggtttca

SEQ ID NO: 5892 - DNA, 311 bp, Zea mays
gagccagcagcatctgtctcttgcttcatcagctaggcgcccggccgcgcggaccaggctccaggagaccaaaaatgaagctctcggtggcagtcctctgcgcgcttctggctgtccaggcggcggtgctcctcgccaccgtgccgacgtcgcaggccagcgagctggaggtcgggtactacagcaagaaatgcaagggcgtggagaacgtggtgaagtggcacgtgatcaaggcgctcaaggccagccgccgcaccggcgccgctctcgtccgccttctcttccatgactgcttcgtcaggggatgcgat

SEQ ID NO: 5893 - DNA, 310 bp, Zea mays
gagaccataacgttctgctacatcaacgacatcgacgggccgagcaagaactactgcgaccggcacgacacgcaatggccgtgccaggcggggaacgggtactacggccgcggcccgatgcagatctcctggaacttcagctacgggcccgcggggcagagcatcggcttcgacgggctgggcgaccccaacgcgatggcgcgcagcagtgacgtcgcgttccgctccgcgctctggtactggatgaacaacgtgcacggggccatcgtctccggccaaggcttcggcgcgacgatccgtggcatcaacg

SEQ ID NO: 5894 - DNA, 261 bp, Zea mays
ctccagagctcatatttggtgccactgagtataccacagcgattgacatttggtctgctggttgcgttcttgctgagcttatgctagggcagcctttgtttccaggtgaaagtggagtggacaactcgtcggatcatcaaggtcctggtatccaaaaggaaggattaatgctgaccggttaccagagtttagtccacgatcaagctcacatggcacaagtattcacaaagatgcgcaaagtgtgatctgctctcggtatca

SEQ ID NO: 5895 - DNA, 304 bp, Zea mays
cacaaatcagccaaaatggagaacgataagggagagattgtcgatctctacgtcgcccgcaaatgcagcgctaccaaccgcatcatcaaggccaatgaccacgcctctgtgcaaatctccatcggcaacgttgacgagaacggccgctacaccggcgagaacggcgtctatgcgctcagcggatttgtgcgcgctcgcgcgcgaggctgacgactcgcttaaccgacttgcgcaacgcgatggatacttgaagaatgtctggagtgctcagcgataaatcctcagatttctcgtcgaggggggt

SEQ ID NO: 5896 - DNA, 300 bp, Zea mays
cggctcgagcggctcgaggaggcttttcatgagtacaaccaaccgaccaccaatctccatgcggcgccttgtcaagtttatggaaggaaaggagaagaacattgctgtcattgttggcacagtcacagatgacaaaaggatccaggaggttccagcaatgaaggttactgccctgaggttcacggagacagcaagggccaggattgtcaatgctggtggcgagtgcctcacatttgaccagcttgctcttcgtgctccacttggcgagaacacggtcctcttgaggggccccaagaatgc

SEQ ID NO: 5897 - DNA, 269 bp, Zea mays
cgccaggttataaccatcacaagaaggctggtgccatgaatgcactggtccgtgtctctgctgtcttatcaaatgctgcatacctattgaacttggactgtgatcactacatcaacaatagcaaggccataaaagaggctatgtgtttcatgatggatcctttggtggggaagaaagtgtgctatgtacagttccctcagaggtttgatggtattgacaaaaatgatcgatacgctaacaggaacgttgtcttttttgacatcaacatg

SEQ ID NO: 5898 - DNA, 301 bp, Zea mays
tgaaatggaacatcacttcttatatttacaagtataatatcatatttgcctgcatcatttgggaggacagttgcgcaggcatttcaagatgggaattatgttggacttctcacaatcatattgtcattcttactattagtccttgggattgtctatgttcaagaagctgagcgcaaaatacccctcaattatgcttctcgttacagcagtcgaactggggaacttcagcgatctgcatatttaccatttaaggtcaacagttctggagtcatgcctatcatattttctacatcttcactgg

SEQ ID NO: 5899 - DNA, 303 bp, Zea mays
gaagactggaagctggacacactgtgtgacctgtatgagaccctggccattacccagagtgtcatctttgtcaacacccgccgcaaggtggactggctcactgacaagatgaggagcagggaccacaccgtttctgccactcatggtgacatggaccagaacactagagacatcatcatgagggagttccggtctggctcctcccgtgtgctcatcaccactgacctgcttgctcgtggtattgatgttcagcaggtgtcgctggtcatcaactatgatcttcgcacccagccagagaactac

SEQ ID NO: 5900 - DNA, 303 bp, Zea mays
ggactccacaaaattctatccccgtttcaacctggaagacacatcaagttttagggaccttgatgaacacagcaaaaatatcctcagaagattgtattataactattattttgttcgccaagaaaatctctggcgccaaaatgccctgaagactttgcctgtcctgctgaactcgtcagatatgttagcatgtggagaggaccttggccttatccctgcttgtgttcaccctgttatgcaagaactggggttgattggattgcgtatccaaagaatgcctagtgaaccaaacttggaatttgg

SEQ ID NO: 5901 - DNA, 299 bp, Zea mays
ataacaccgccgaggaagcagcaagcagcaaggtcgacatgtcgtctccgccgccggtgaagctgatcggcttcttcggcagcccgtacgcgttccgcgcggaggcggcgctgtgcctgaaaggcgtgccgtacgagctgatcctggaggacctgttcggcagcaagagcgagctcctgctccaccacaaccccgtgcacaagaaggtgcccgtgctcctccacggcgacggccgggccatctccgagtccctcgtcatcgccgagtacgtcgacgaggccttcgacgggccgccgctg

SEQ ID NO: 5902 - DNA, 291 bp, Zea mays
tgtttgagctggacgtgctgttggaatctgttagtgttacaattaagcgtgttgaggagttggtggtaagtatggaaggcaactcactgaaacctgatagctctatccacctcgatgaacatttgactagtttgaatatgaggtgcattgagtggctatatggtgaccatggacttgatgttgtggatgttcttcaaaaaaatgctggtgtgacattaccagttattttaaccaggctgaaacaaaagcaggaggagtggtcaatgtgccagtcagattttaataaagttt

SEQ ID NO: 5903 - DNA, 298 bp, Zea mays
cgccaggatggcaggatggtcaacatgtccgtccccatcgtgctctccgtcggggacgcacagcgaagggccatccaggccgacggcgccacgcgcgtaccgctcgttgacgagcgcgaccgccccatcgccgtcctcagcgacattgagatctataagcataataaggaagaaagggtagcacgaacatgggggacaactgcacctggattaccttatgtcgaggatgcgattaccaatgctggtgactggttggttggtggggacttggaggttatagaaccaatcaagtacaatg

SEQ ID NO: 5904 - DNA, 293 bp, Zea mays
cggctcgagcggctcgaggcgaatctgggagcatctttgacggcctcctgccgaatgacataaatgtgtatgcgaccaccgcgacaaatgcagaggagagtagctgggggacgtactgccctggcgagttcccgagcactccaccggagtatgacacttgcttgggatacctgtatagtgttgcttggatggaacacagtgatttccaccatctgcgaactgaatctctcgagcagcaatacaacttggtcaaggataggaccgccgttcaggatacattcagctaaggctcc

SEQ ID NO: 5905 - DNA, 296 bp, Zea mays
ctgaagaagtgaatgatataaagatagctgtagcatcagcaaacaagagtggtacaataagctttcgagagttgaaccaaaagaaataccgcacgcctctaattctaggaattggcctacttgtgttgcaacagctaagtggaataaattgtataatcttttattcaggtagcatcttcaaagctgcagggctcaacaacagtaacctggacacgtgtctcattggagctatctcggttcttgccactggtgtcacaaccacgatcttggacagagctggccggagaatcctcctc

SEQ ID NO: 5906 - DNA, 303 bp, Zea mays
  unsure (1)..(303): unsure at all n locations
ctcnccagcaatccctagcagaagccttccatcctcactcgctcgatggcccgcacgaagcagacggcgaggaagtccaccggcggcaaggcgccgaggaagcagttggcgactaaggcggcccgcaagtctgcccctgcgaccggcggagttaagaagccccaccgcttccgccccggtaccgtcgcgctccgggagatccgcaagtaccagaagagcacagagctgctgatccgcaagctgccgttccagcgcctggtgcgggagatcgcgcaggacttcaagaccgacctacgcttccag

SEQ ID NO: 5907 - DNA, 284 bp, Zea mays
  unsure (1)..(284): unsure at all n locations
cccgtccatcgcccctccctccggtctgcgctcccacagcctcacccctgcgcccccgccgattcgcgtcgccctttgttggaaggaacgatggagcagaccttcatcatgatcaagcccgacggcgtccagcggggcctgatcggggacatcatcagtcgcttcgagaagaaagggttctacctcaaggggatgaagttcatgaacgtggagaggtccttcgcgcacagcactacgctgacctttccgacaagactttcttccccgngttggtggagtacatc

SEQ ID NO: 5908 - DNA, 264 bp, Zea mays
cggtcctttatgcccaaggtttctgatggacgcccttcttatcttgttgttaatgctgatgagagtgagcctggaacttgcaaagatagagaaatcatgcgccatgacccccacaagcttctggaaggatgccttattgctggagttggaatgagggcatcagctgcttacatctacattcgaggtgaatacgtgaatgagcgtctcaacctcgagaaagctcggcaggaagcatatgcagctggacttctcggtaagatgctt

SEQ ID NO: 5909 - DNA, 296 bp, Zea mays
caacaacgtgcgcgacgaggacccgcgcgccgtcgcgcggccttcccgtccttcctcgggaagctgcgcaaggccagggactttctggacaacagctactaccacaacaacctggcaaggatcgtcaccttcaactccgactggcaactgctcacggagaaggaggcgctggggcacgtcaaggagtacgccgagaacggcaccctctgggacgaggacttctccgacgcgctcctcaagctcagccggctgcccatgccgccgcacagcaagggcgagatcaggaagacgtgccg

SEQ ID NO: 5910 - DNA, 300 bp, Zea mays
cggaaaccgagcacccgcacccgcacccgcccggggtggaattgggaactgagaaggaaaaaaaaacacccacacccacacccgctctgccccatccgcgcgcccctcctcctccaccgcccgtcccgccgccgcccggccgtctggtggcgatggcgtaccgggcggacgacgactacgactacctcttcaaggtggtgctcatcggcgactccggcgtcggcaagtcgaacctgctctcgcgcttcacgcgcaacgagttcagcctcgagtccaagtcgaccatcggcgtcgagttcg

SEQ ID NO: 5911 - DNA, 299 bp, Zea mays
cgacgcgcaaccagtgccgcgcccagatctccgcgacagatcagtcgttcgtccagctaactgcactgcacgcaatggccaccacggcgaccgaggcgaccaagacgactgcaccggcgcaggagcagcaggccaacggcaacggcaacggcgagcagaagacgcgccactccgaggtcggccacaagagcctgctcaagagcgacgacctctaccagtacatcctggacacgagcgtgtacccgcgggagccggagagcatgaaggagctgcgcgagatcaccgccaagcacccatgg

SEQ ID NO: 5912 - DNA, 293 bp, Zea mays
  unsure (1)..(293): unsure at all n locations
tgganaccctagccgccatatctcacgatccactcgagcaccaagccgagggaaggtgaggagcgatggcgcgcggcgtggtgtcggcgaagggcggcgcggtcgcgggcaagaagaaggggtcggtttccttcacgatcgactgcaccaagccagtggaggacaagatcatggaggtcgcctcgctcgagaagttcctgcaggagcgcatcaaggtcgccggcggcaaggctggcaacctcggcgactcggtcaccatctctcgcgagaagaccaaggtcaccgtcacctct

SEQ ID NO: 5913 - DNA, 251 bp, Zea mays
catttctgtttgatttaaatgaccagtatgtgttggatgcttatcgcaagggggacaaattaaagtttgcaaatcactcatctaaccccaactgctatgcaaaggtgatgctggtggctggcgaccatcgggttggtatctatgcgaaggagcatattgaggctagtgaggaactcttctatgattatcgttatgggcctgaccaggctccagcttgggctaggagacccgaaggtcaaagaaggacgagc

SEQ ID NO: 5914 - DNA, 284 bp, Zea mays
agataatcgtggcttacgggtcacgaattctattgcttcctaatggcacagacatttatggaagtaaatacaaaggcatatggatctcactgactgttctttcaagggctttgtgtgggaattatgtcaattttggcgtatttgagctctatggtgacagagcacttgctgatgcccttgatatatctctgaagatgaccctctcagttccattatctgatatattggcattcaaaaagctgtcgaaagcgtactttgggtatatggaagttctgttcaacaac

SEQ ID NO: 5915 - DNA, 290 bp, Zea mays
cgtgtactacccgcggcggccggagatgagcccgctccaggccatcagggctgcctgcggcgaagaccactacatgtgccgcttccaggaatttggtgttgctgaagctgaatttgctctatatgacatcaagtgggtgtttaagaagacatttggcatgcgcaagccagctcctcttattctgcccaaggacaagagcttctttgactctcttgattcagatggaacttgtcctccatggctatcagaggaagatatttcttactatgcagaaaaatttgcgaaaacag

SEQ ID NO: 5916 - DNA, 291 bp, Zea mays
cagaaggaaccgttccgggtgcccaccaaggacaacatccggatggcgatgcagtggctggtgcaggggtgcagcagcggcgactccctggtgttccacttctctgggctgggcgcgcaggtcgccgacgcggactgcgacgagcaggacgggtacgacgaggccatctgcccggtggactcgttccagaagggccccatcctggacgacgagatcaacgagaccatcgtccggccgctggtgcccggcgccaagctccacgccgtggtcgacgcgtgccacagtgattcc

SEQ ID NO: 5917 - DNA, 245 bp, Zea mays
ccaaggccctcccaaagtcccaaaggccgccgccgcccgccagcccaccatggccgcgcagtccttcctcctcgccgccactgccgccgccaggtcccccgcggtcttcgccgctccctattcctccgcacgccctttccactcggtccacttcgtcgccggcccgtggggcgccgccgccgcccaggcgctcgtcgtcgcggacgccactaagaaggccgtagccgccctcaagggcgcgtctg

SEQ ID NO: 5918 - DNA, 275 bp, Zea mays
tgtcatttcctatgtggtgccagtatacattgcagagatatctcctcataacatgagaggagcccttggcgctgtgaacccgttgtctgcaacctttggtgtcctgctttcctatgtgcttggcttgtttttcccttggaggcttcttccattaataggaaccctgccctgcttactgttggtggctggtctattcttcattccggagatctcaagatcggctggcgagatgaatatgaatgatgattgcgagacttctctacaagttctgaggg

SEQ ID NO: 5919 - DNA, 265 bp, Zea mays
ggacccgcgcgtcttcgggcgccgaggagtacgtgcccgacaggttcctcggcgaggacggcgcgcactgctcggccacgtcgtctggtccaacggccccgagacggcgtcgcccacgctgcaggacaagcagtgcgctggcaaggacttcgtcgtgctcatcgctcgcctcctcgtcgccgagctcttcctccgctacgactcctttgacgtccaggtcggcgcctccgcgctggggtcgtcggtgaccatcacctcgctcaag

SEQ ID NO: 5920 - DNA, 284 bp, Zea mays
agaagacaaaagctgagaacaaggctgctaagaaagtatccgctattctttcatgggaaaacacaaagaaagcaaacatagaagctgaactgaagaagattgaggaacaactggaaaagaagaaggctgaatatgcagagaagatgaagaacaaggttgcaatgatacacaaggaagccgaagagaagcgagcgatggtggaggcaaaacgcggtgaggaggtcctgaaggccgaggagatggctgccaagtaccgggccaccggccacgctcctaagaagctc

SEQ ID NO: 5921 - DNA, 282 bp, Zea mays
agacatctttccctgccaagaggttgacaagaatccttgatccaaatccgatgacgagaataacaatccctgagatactggaggatgagtggttcaaaaagggctacaagcgcccggagtttgacgagaaatatgacacgccattggatgatgtggatgctgtcttcaatgactcagaagagcaccacgtgacagagaagaaagaagaagaacccgtagctctcaatgcatttgaactgatttcaaggtcagcaggcctaaatcttgggaacctatttgact

SEQ ID NO: 5922 - DNA, 163 bp, Zea mays
ggtcaatcttcttggcctcacgatacttgcggagaaggcgcctcagcacacgcatcctcctcatccacagaaccttggtgggtagcctagcctccctggtacccctacgcttaccatatcctgagtggcgtcccttttgcttggcgtcatgtgcccttcttgc

SEQ ID NO: 5923 - DNA, 319 bp, Zea mays
cctcttcttcttcttcctcctcctcctagcacagctagcgcctgctccccttcgcctgtgatcatgtcttgcagcagcggcaagtgcgactgtggctccagctgctcctgcggcagctcatgcaactgcatgtcccctaacgtggagaccgccgccgccagcagcatcaagaccacggtcctcgccgcgccgaccaccaaggccagcgccggcggcttcgaggcggccaccgagggcggcggctgcgactgcgacacctgcaactgcggcaccagctgcggctgctcctgctgcagctgcaactgagccggtcaggcga

SEQ ID NO: 5924 - DNA, 318 bp, Zea mays
gaagtttcagacattgctatagctgtccgagagggtgctgatgcagttatgctttcaggagaaactgcacatgggaaatttcccttgagagctgttaaggtcatgcacactgttgccctgagaaccgaggcaactattcctggtggggaaacacctgcagaccttggtcaggctttcaagaaccacatgagcgagatgttcgcataccatgcgacaatgatgtcaaatacccttcgaacatcaatagtggttttcactaggacgggatttatggctatactgcttagtcactaccgtccatctggcactatttttgcc

SEQ ID NO: 5925 - DNA, 104 bp, Zea mays
acgacttgtttcattgattcttcaagagatcgagcttcttttgcaccacaaggtcgaggatgtcttgcagctgcggatcaagctgcggctgcggctcaagctgc

SEQ ID NO: 5926 - DNA, 209 bp, Zea mays
gctctcggaggtgcccaagtacaagcgaatcaccccttccatcctctccgagcgtctgaggatcaacggctcccttgctcggagggccatcaaggacttgatggcgcgtggcctcattcggatggtctcggtccactcaagccagcagatctacaccagggcaaccaatacataaggatggggaggaggtctacgatgcattgtctgcc

SEQ ID NO: 5927 - DNA, 314 bp, Zea mays
gttctttgaacagaacacttgaggctacagcaccaaatttaacgccggttcgcagaactgttagagagcaaaagattattgtgcaggctggaaagatgagtgatggatacagatggcgtaagtatggacagagaattgtgaagggaaatccaaaccccaggagttattaccgctgcacgcacggtggatgccctgtccgtaagcatgtggagaaggcgccagatgatgttaacaatattgttgtaacgtatgagggcgaacacaaccacgacgaacctttcagaagcagcagcataccagtttctgtaatcagt

SEQ ID NO: 5928 - DNA, 115 bp, Zea mays
ggcgtacgcggacacagccccgagccgaatcgtcgtccttgcgaggctcgccgatcccccactcccctcccctcgcttcgagatgcagatctttgtgaagaccctcaccggcaag

SEQ ID NO: 5929 - DNA, 268 bp, Zea mays
gaacaagccagtgagaatcctcgtgaagagagatgagctgactcttgagggtatcaagcagttctatgtgaatgtggataaggcagactggcagctggacacactgtgtgacctgtacgagacccttgccatcacccagagtgtcatctttgtcaacacccgccgcaaggtggactggctcactgacaagatgaggagcagggaccacactgtttctgccactcatggtgacatggaccagaacactagagacatcatcatgagggag

SEQ ID NO: 5930 - DNA, 311 bp, Zea mays
gtaagcagcagcaggaaccctagcaccgccgcatccgcagccatgggtatcgacctcgttgccggtgggaggaacaagaagaccaagcgcacagcgccgaagtccgacgatgtttatctcaagctccttgtcaagctctaccgtttcttggtcaggaggaccaagagcaacttcaatgctgtcattctcaagaggctcttcatgagcaaaaccaatcgcccaccaatctccatgcgccgccttgtcaagttcatggaaggaaaggagaagaacattgctgtgattgttggcacagtcacagatgacaagag

SEQ ID NO: 5931 - DNA, 309 bp, Zea mays
atcagataccatgggacgtactgtagtcaagatgtagctatcaaagtactcaagcctgagcgggttagcgttgatatgctacgtgagtttgcacaggaagtttatataatgaaaaaggttcgtcacaaaaatgttgtgcaatttattggtgcatgcacgagacctcctgttttgtgtattattacagaattcatgcatggaggcagtattttgacttcctttacaatagacgaggaaattttcaactcccggatgtgattagaattgcatctgatgtgtccaagggaatgaattacttgcatcagatta

SEQ ID NO: 5932 - DNA, 310 bp, Zea mays
  unsure (1)..(310): unsure at all n locations
cggctcgaggcgtggtgtgctctctgttcncctttacgccgtttcctctcccgactctctcctcgccggcgacgcgcggagtaggtgcaacagaaactgctcgaggcggaggcggacctgcggctgcacagacatgggtgatcacgaggcgcgcggtgatgacttcgagaagaaggcggagaagaagctctcgggctggggcctcttcggctccaagtacgaggacgccgccgacctcttcgacaaggctgcgaactccttcaagctcgccaagaactggagcagagctgcatcagtttacatcaagatt

SEQ ID NO: 5933 - DNA, 313 bp, Zea mays
gacgatgtccaggtgaacgatatctcgctgaacgactacctggctgtgactgcggcgaacacgcgacattcctgccgcactccgcggggcgctactccaagaagcggttccgcaaggcgcagtgcgccatcgtcgagcgcctcaccaactcgctcatgatgcacgggcgcaacgacggcaagaaggtcatggccgtccgcatcatgaagcaaccctggagatcatccacctgctcactgacgccaatcccatccaggtggtcgtggacgccattatcaacagtggaccacgtgaggatgccacccgtattggt

SEQ ID NO: 5934 - DNA, 306 bp, Zea mays
ccttccactacggcgccatcccgacgtccaggacgctggtgctggccagctccgcttccctcgacggcgccgggcgtaggcgctgcgccgtcaacgccgtgtccttcgtcgtgcccgacacgccgctcaagctcgccgacagatacgacatcgccggcgtcatcgactgggccggcctccccgcgcggctcgacggcgccgcggcggtgccagcgcgccgggacgcccgtgatcaggctcggcctgcacgagttcgtggaggtggtgttccagaacacggaggaggagctgcagtcgtggcacctc

SEQ ID NO: 5935 - DNA, 255 bp, Zea mays
  unsure (1)..(255): unsure at all n locations
tgtttccaatgagtgaaggatcagaagtcaagaccggtaactttatgctcgatttcgctttgggtggtgtctccgctgctgtctccaagactgccgtcgcccncatcgacagagttaagctcctcctccaaactcaagatgccaatgccaagctcaccaagaagtacactggtatcgtcgactgcttgaccagagtcgccaagaagaaggtatcagcgctttctggagaggtaactcgctaacgtcatcagatac

SEQ ID NO: 5936 - DNA, 305 bp, Zea mays
gttcggtggatccgggcgctctactccaacttcaccgagttcacggcggaccaggagcgcctcatctccctgggcagccgccggttcgactacgtggagggcttcgtcgtcgccgccgagggcctcatcaacaactggaggtcctccttcttctcgccgcagaacccggtgaagctcagctcgctcaagcaccactccggcgtcctctactgcctcgaggtcaccaagaactacgacgacgccaccgccgggtcggtcgagcaggatgtggatgcgctgttgggcgagctgaacttcatcccagg

SEQ ID NO: 5937 - DNA, 238 bp, Zea mays
cgacgcctctctctctttccccgagctctcgaaaccctaggtgcgtgccgaccggcggcggcggcgagggatggcgatggactcgacgcggtggcaaaccttcgtggagcactactaccggacgttcgacaccaaccgcgcggcgctggtggggctgtatcaggagacctccatgctcaccttcgagggccagaagttccagggctcatccgccattgccggcaagctcggatctctt

SEQ ID NO: 5938 - DNA, 302 bp, Zea mays
gcacgacgcacgcagagccgcagagatccgtcacactgcaagttttgaaaactgaactgtaagatggcatcagcagagctttcccgtgaggaaaatgtgtacatggcgaactcgccgagcaggcagagaggtacgaggaaatggttgagttcatggagaaggtagcgaaaactgttgactcggaggagctcactgtggaggagcgcaacctcctgtctgttgcatacaagaacgtcattggagcccgccgtgcctcattgcgcatcatctcctctatcgagcagaaggatgagggtcgaggc

SEQ ID NO: 5939 - DNA, 312 bp, Zea mays
ctccaggacttcttcaacggcaaggagttgtgcaagagcatcaaccctgacgaggccgtcgcgtacggcgccgctgtccaggccgccatcctcagcggcgagggcaaccagaaggtgcaggacctgctccttctcgatgtcacgccgctctcgctcgggctggagactgcaggcggtgtcatgaccgtgctgatcccgaggaacaccaccatctccaccaagaaggagcaggtgttctccacctactccgacaaccagcccggcgtgctgatccaggtgtacgagggtgagaggacgaggaccaaggacaac

SEQ ID NO: 5940 - DNA, 213 bp, Zea mays
cggctcgagggctgctgctctcaagggctctgaccaccgccgtgggaccaacgttagtgctagattggatgcccagcagaagaagcttaacctccccatccttcccaccactacaatcggttcgttcccacaaaccgttgagctcaggagggtccgccgtgagtacaaggcaaaaaagatctctgaggaggaatacgtcactggcatcaagga

SEQ ID NO: 5941 - DNA, 302 bp, Zea mays
ctcccggctcccccacggtactccagccgctagcctacgactccgccaccgccagtacgccaccaccaccgagcctggactaccgccgccgcccttcgccgatatcttcagcggcgaacagcgcccaccagatcccgcccctgcgatggagtccgtggtgaacccgaaggcatacccgctggctgatgcgcactgacgatgggtatcctcgatatcatccagcaggccgccaactacaaacagcttaagaagggagcgaatgaagcgacgaagaccctgaataagggcatatcggagtttgt

SEQ ID NO: 5942 - DNA, 288 bp, Zea mays
ccctccctccctctgtttacatctaattcttatcgatttagctatagcaggtctcgatcggcggctatgagcggtagccgcagcaagaagtcgtggccggaggtggaggggctgccgtccgaggtggccaagcagaaaattctggccgaccgcccggacgtccaggtggtcgttctgcccgacggctccttcgtcaccactgatttcaacgaaaagcgcgtccgggtcttcgtggacaacgccgacactgtcgccaaagtcccaagatcggctagctagctagttagg

SEQ ID NO: 5943 - DNA, 304 bp, Zea mays
atgacatcttagaaagcgagttctttgacaccaggcaggcattccttagcctttgccaaggaaatcattatcagtacgacacgcttcgccgcgcaaagcattcgtcaattatggtgctataccacctgcacaatccaactgcgccacatttgtcactacgtgcaatgcctgctgccatgatatcgaaactggtcaaagctggcggtgtgagatctgtccagattttgacgtgtgcaacgcttgtttccaaaaaggagcggttactcatcctcacaagttaacgaaccatccatcagctgctgac

SEQ ID NO: 5944 - DNA, 305 bp, Zea mays
cacaaaccgttcagctcaggagggtccgccgtgagtacaaggcaaaaaagatctctgaggaggaatacgtcactgccatcaaggaggaaatcaacaaggtcgttaagctccaagaagagcttgacattgatgtgcttgtgcatggcgagcctgagagaaacgatatggttgagtacttcggtgagcagctctccggttttgcgttcactgccaatggctgggtgcagtcttatgggtcaaggtgcgtcaagcctccgatcatctacggtgacgtgagccgccccaaccccatgaccgttttctgg

SEQ ID NO: 5945 - DNA, 235 bp, Zea mays
cacttggcaaacgcaagtcagtttttttttggagggtccatctctgatggtcggcctcggccggatgggtgatgggtgcagctgggcatgggcagcgcggtggagacgctgtgcgggcaggcgtacggcgcgcacaagcaccgcatgctgggggtgtacctgcagcgctcgacggtgctgctcatggccaccgccgtgccgctgaccgtcgtctacgccttctcggagcgcatcc

SEQ ID NO: 5946 - DNA, 235 bp, Zea mays
  unsure (1)..(235): unsure at all n locations
tcgtttggcacctttattttatgtattcgagaatgaccctgacccaagccactcagcgtcactgnagcagacgcatacttttgctttgtcgaattgttgagtggctttagagacaactattgcaagcatcttgaccatagcagcgtgggtattcgatctacactttcaaaattatcacaactcttgaagcgacatgatgaggaactatggcgtcacatggaggtcaccacaaagg

SEQ ID NO: 5947 - DNA, 309 bp, Zea mays
cgagctcaaaggctccacgaggaacttcaggccggacagcctgctcggggaggggggcttcgggtccgtgttcaaggggtggatggatgagcgcacgctcgcgaccgcccggccgggcgccgggatcatcgtcgccgtcaagaagctcaagctcgacagcttccaagggcaccgggaatggctggcggaggtcaattacctggggcagttatcccaccctaatctcgtgaaactcatcggctactgcttggaggacgagcagcggcttcttgtgtacgagtatatgccgagagggagcctggagcatca

SEQ ID NO: 5948 - DNA, 308 bp, Zea mays
ctgcaaccgctgttttcctcaagaaaactctacatgactggggtgacgatgagtgtgtcaagatattgaagaattgcaagcaagccatatctccacgggatgcaggtgggaaggtaataatcttggatgtggtagttggatataaacagtcaaacataaagcatcaagagacacaagttatgtttgatttgtatatgatggcggttaacggagttgagcgtgacgagcaagagtggaagaagatcttcactgaagctggattcaaagactacaaaattctacccgtcattggtgatgtatcggtcatc

SEQ ID NO: 5949 - DNA, 230 bp, Zea mays
  unsure (1)..(230): unsure at all n locations
gcaggttgtccaatccagtgtgctgcctgacatgttcaagggcacctatgaggctatcacaaaaggcaacccaatgtggaaccagctaactgtcccagaagcatcactctactcatgggattccagatccacttacattcatgagcccccttactttaaggacatgaccatgtcnccacctggcccctctacagtgaaagatgcctactgcttgctgaacttcggggaca

SEQ ID NO: 5950 - DNA, 301 bp, Zea mays
gaagcggaaaagaagatagccctctatgtgatgtgcctggatttgaaaacactagaatgaaactcctgagacatgtttcttttgttgattgcccgggacacgacattctcatggctacaatgcttaatggagctgctatcatggatggagctcttcttttgatcgcagcaaatgaaagttgtccacagccccagacatcagagcatcttgctgctgttgaaatcatgcgtcttcaacatatcatcattctgcagaacaagatcgatcttatccaggaaagcgcacgagtgaatcagcatga

SEQ ID NO: 5951 - DNA, 298 bp, Zea mays
  unsure (1)..(298): unsure at all n locations
cagcaaacaggagcacaaccaattctggtggcgttaccaactggtaacatggagaattggggagagtcagctatggctgatagccctatgactgacacatctacagatccagacactgatgagaggaaccagatgtttgaacaaggacttgttgctgtccccacagcatctgattctagtgacaaatcaagggacaaactagatcagaagacacttcggcgtcttgcccaaaatcgtgaagctgccaggtaaagccgtttacganaanaggcatacatccaaaaccttgagagtagca

SEQ ID NO: 5952 - DNA, 299 bp, Zea mays
ctctcgcctcggcttggcagtcggcactccctctccaccgcgctgcaggggcgacgcaaggccgagcgctcctcgatccagatccaaggtaggagatggctctcacgagaattggcctcgccggcctcgcggtcatgggacagaaccttgccctcaacatcgcggagaaagggttccccatctcggtctacaacaggacaacctccaaggttgatgagaccgtgcagcgtgccaaggtcgaaggaaacctcacagtgtttggtttccacgaccccgcgtccttcgtgagctccatccag

SEQ ID NO: 5953 - DNA, 299 bp, Zea mays
ggcacagagtggtgattcactgagacagcgtctgcaaattcttcttaatcctgtgcaggttttcgagttgagcaaacagcaaggtccagatgttggtttagctttatttcggaaggtaacccatttcagagttcttgtatgtggtggagatggcactgctggttgggttttggatgccattgagaaacagaagtttgaaaccccgcctcctgtagccatccttccagctggtactggtaatgatcttgcgagggttttatgttggggtggtggccttggtgttattgagaagcggggag

SEQ ID NO: 5954 - DNA, 293 bp, Zea mays
aggtggtgctggcgccggcgaaccccaaggacgagtaccagcactggatcaaggacatgcggtggagcacgagcatcaaggacgaggaaggttacccggcgttcgcgctggtgaacaaggcgaccggggaggccatcaagcactcgctggggcagtcccacccggtgcgcctggtgccctacaacccggactttttggacgagtcggtgctgtggacggagagccgcgacgtcggcaacggcttccgctgcgtccgcatggtcaacaacatctacctcaacttcgacgccctc

SEQ ID NO: 5955 - DNA, 303 bp, Zea mays
cttctgagtgggaacttctgaatgatgtgaaggctgtatggcttcgcagcccaaaggaggttaccgatgaagaatactcgaagttttaccattcactagccaaggacttcggtgatgacaagcctatgggttggagccacttcactgccgaaggagatgttgagttcaaagctttgctctttatccccccgaacgctccacatgatctctatgagagttactacaacagtaacaagtcaaacctcaagttgtatgttaggagagttttcatctctgacgaatttgatgatcttcttcccaagt

SEQ ID NO: 5956 - DNA, 302 bp, Zea mays
cgacacaaggtggccagcgagacctgcaccaagaccaacatggtgatggtgttcggcgagatcacgaccaaggcgaccgtggactacgagaagatcgtgcgcgacacctgccgcgagatcgggttcacctccgacgacgtgggcctcgacgccgaccgctgcaaggagctggtgaacatcgagcagcagtcacccgacatcgcgcacggcgtgcacgggcacttcacgaagcggcccgaggagatcggcgcggactaccatcggcacatgttcgagtacgctaccgacgagactcccgagct

SEQ ID NO: 5957 - DNA, 298 bp, Zea mays
gcacaaccggccgcagaccggctgctggactggttcttccaccccgtgctggtgctcaaggagcagatacaggcgctgaggatgaccgaggaggaggtcaggttcctggagaagctgaccgtcttcgccggcaacgtcgcgggcgggtgggagaacggcgccgggatgatggtggtgccccaggaccctgtgaggctggcgcagatccaggccatcagtagaaggctggttgggattgtgaggagcctgtccatgttcccgacgtacaggaggaggtacaggcacgtcgtgaagctgc

SEQ ID NO: 5958 - DNA, 298 bp, Zea mays
gagcgcactgtagcaaaagccttcaccggtcggcaagaacaccaatggctgacgagtcatggagggtgccaacgccagtgcaagaactggctgccactgccaccttggaggagccgccaagccagtacgtgctgcaggagaaggaccggcccggaagcccgctggtcgctgatgacatgccagagcccctccctatcatcaacctcagccggctatcggaagacgctaccgaagctgccaagctcgagtccgcactgcaaagctggggtctcgtcctggttaccaaccatgggataga

SEQ ID NO: 5959 - DNA, 278 bp, Zea mays
  unsure (1)..(278): unsure at all n locations
cctctctctctttccccgagctctcgaaaccctaggtgcgtgccgaccggcggcggcggcgaggtgatggcgatggacccggacgcggtggcgaaagccttcgtggagcactactaccggacgttcgacaccaaccgcgcggcgctggtggggctgtatcaggagacctccatgctcaccttcgagggccagaagttccagggcacatccgccattgccggcaagctcgnatctcttcgcttccaggcctgcgagcgacagatcgtcaccgtcgattg

SEQ ID NO: 5960 - DNA, 307 bp, Zea mays
  unsure (1)..(307): unsure at all n locations
tttaaactacggagctggcattagtgaggtggaaattgatgtgctgacaggagcaacaacaattctaaggagtgaccttgtctacgattgcgggcaaagcttgaaccctgctgtcgacttgggccaggtggaaggcgcattcatccaaggagtaggcttctttacaaacgaggagtacacaacaaactctgaggggttggtcatccacgatggcacatggacgtacaagatcccacagtcgacaccatcccaaagcagttgaacgttgagctgatcaacagcgcccgtgacnagaagcgtgtcctct

SEQ ID NO: 5961 - DNA, 312 bp, Zea mays
ctctccctctctctctcttcgccgtccgaagctccgcaccccaatctaatcgacacctcaccgagatgggccgcaagttcttcgtcggtggcaactggaaatgcaatggaaccacagatcaggtcgagaagattgtcaaaaccctgaatgaaggacaggttcccccttcagatgttgtggaggtcgttgtcagccctccttatgtcttccttcctgtggtcaagagccagctgcgccaagagttccatgttgctgctcagaactgctgggtgaagaagggaggtgctttcactggtgaagtcagtgctgaga

SEQ ID NO: 5962 - DNA, 294 bp, Zea mays
  unsure (1)..(294): unsure at all n locations
aaacacttgcgccgccactgcctcacaggtaaggccgccatggtctccggttcgggcgtgtgcgcgaacatncgtaggtggacgcgcgccaccacatgctgggccgtctctcctcgatcatagccaaggagctgctcaatgggcagaaggtggtcgtcgtccgctgcgaggagatctgcatgtcgggcggcctcgtccgtcagaagatgaagtacctccgcttcctccgcaagcggatgaacaccaagccgtcccacgggcccatccacttccgcgcccccgccaagatcctgt

SEQ ID NO: 5963 - DNA, 152 bp, Zea mays
tagcacgtgttccccgcaacctatcgacccaatctcgtccgacccggcgcgtcgtcccctccagatctccgtcgccctctccaggtagcagaaactgttctgctgcagtctgacaaagtggagggcttaggagcttctgcttcttttatgtc

SEQ ID NO: 5964 - DNA, 179 bp, Zea mays
ggaggacgcggccagcggcagcctgccgctgatgcagaagctgcgcgccgtgctggtggaccacgccctcagcagcggcgacgcggagggagccctacgtgttctccaagatcaccaggttcgaggaggagctccgcgcggtgctgccccaggaggtggaggccgcccgcgtgagcgtc

SEQ ID NO: 5965 - DNA, 314 bp, Zea mays
ggcgaagtcaagaagctctacgaagctaaggtctgggagaagccatgggagaacctcaaggggctgcaggaattcaagcctgttgaagagggtgctagcgcctaaggatgtctccttctccatgtgcgagcctgaagctcaaagcaaagttgcagaataaggagccatgctcccttgtgtaatttcataagactacaaccctattagggcttgtttggttgtgtctgtatcgaagggaattgaaggtgattaattttccttctattctaatagaggggttttaatctcctccaatactcttcaatccacaccta

SEQ ID NO: 5966 - DNA, 309 bp, Zea mays
acgaaaccctcgccagtccccaactcgaacctcagtcaggcagcgtgaggagggagagttcaaggaccgaggcggcgtcgggcgagatgaagcttaacgtcaagaccctcaagggcaccaacttcgagatcgaggcgagccccgatgcgtcggttgctgacgtgaagaggatcattgagaccactcagggtcagagtacctaccgggcggaccagcaaatgcttatataccaagggaaaattctcaaggatgagaccactttggaaagcaacggagttgctgagaacagcttccttgttataatgttgt

SEQ ID NO: 5967 - DNA, 314 bp, Zea mays
gcgcgcgagagaaacgcgtatacccaggctgcggttgaggaagaggaggagaagaagaagaagatggcttcctccgcatacgcctcatggtccaagcggtggatccgtcccgaggtgtacccgctgttcgtgccgatggccgtggccttgggcatctgctcgtaccagcttgtgcgcaacatcacgggcaaccccgaggtgcgggtgaccaaggagaagagggcggccggcgtcctggacaaccacgacgagggcgagaggtacgctatgcacggcctcaggaagttcgtccgcgggaagaagcccgagatcat

SEQ ID NO: 5968 - DNA, 276 bp, Zea mays
ggcttctcctccccctccggttcgagttcgggttcgtgaggttctccggggttcgggttcgtgggtgagcggatcgagatggcggcgtcggatgttgagtaccgctgcttcgtcggcggcctcgcctgggccacggacgaccactccctccacaacgccttcagcacctacggcgaggtcctcgagtccaagatcatcctcgatcgggagacgcagaggtcccgcggcttcggcttcgtcaccttctgcactgaggaggcgatgcagaacgcatcg

SEQ ID NO: 5969 - DNA, 317 bp, Zea mays
ctcctacctgttcaagatggtcctcatcggagacagcggcgtcggcaagtccaatatcctctctcgcttcacgcgcaaccacttctccctcgactccaagtccaccatcggcgtcgagttcgccaccaagtccctgcagatggacggcaaaacaataaaggctcagatctgggacacagctgggcaggaaaggtaccgtgcaattacaagtgcttactaccgtggagccgtgggagcactgcttgtgtacgacatcacaaagaggcagagcttcgacaatgttcacaggtggcttcgtgaactccgcgaccatgctg

SEQ ID NO: 5970 - DNA, 320 bp, Zea mays
cgccgaactgagcagttcgaccaggcagccatccacctccaaccccccttcgcctgcgcaaatcgttaccatcccagcgagaaagatggcgcgcgtctccaatgccaagaagcggcagggcgccaagcccgcctccgcgctcagcagcaccgacaccagcaccgccgcaaagaggaaggccgaggacgaccgccccgtgcgcgtctacgccgacggcatcttcgatctcttccacttcggccacgcccgcgccctcgagcaggccaagatgctgttccccaacacctatcttctcgtcggatgctgcaacgacgagctaa

SEQ ID NO: 5971 - DNA, 312 bp, Zea mays
cgactctgccatatttgaccttggcgtcccgattctgggcatttgctatggctgccaagagctcgcatggcagatcaactcggccaacgtcgcccgcggcgaggcccgcgagtacggccacgccgacgtgatcatccacaaggttgacaaccacgtcgaccgtctgtttgccggcctcggtgagaccatgcacgcctacatgtcccactttgacaagctggtgtcgctccccgagggctttgtcgtcgtcgccagcacctccaactccgagtttgctggtatcgccaacaagaccaagcgcatctttggtgt

SEQ ID NO: 5972 - DNA, 265 bp, Zea mays
gtaaagcttctgcatgagatgggtgtcgatgcctaccggatgtcgattgcctggcctcgacttatcccagatggtcggggagccgtgaatcctgaagggctggagtactacaacaatctcatagatgagctccttagctacggaatacagcctcacgtgacgatataccatttcgatttcccacaggctcttcaggacgagtacagcgggctgatcagtcccagattcatagaggacttcacggcgtacgcagacgtgtgcttca

SEQ ID NO: 5973 - DNA, 292 bp, Zea mays
ggacgatcgagcaagaagcaagcagcagtaacaagaaaccatcatcgatccatgtatccaccaatggcggcgctcggaggacggcggaggagggcgtcgtcagcggccctcctgctagccttgttggcggtggccctggtctccctggccggcccagccacggccgcggggaacaagaccgggcaggtgaccgtgttctggggccggaacaaggccgagggcacgctgcgctatgcctgcgtatcgggcctgtacaccatggtcatcatgtccttcctcgacgtctacggcc

SEQ ID NO: 5974 - DNA, 310 bp, Zea mays
  unsure (1)..(310): unsure at all n locations
cgagacnccaagcaccagcgcggcggcggcggcggcggcgaccatggctgtcgggaagaacaagaggatctccaagggaaagaagggtggcaagaaaaagaccgtcgaccctttctctaagaaggattggtatgacatcaaggcaccgtcggtgttcagtgtgcgcaacatcgggaagactctcgtatccaggacacagggtaccaggattgcttctgagggtctgaagcacagagtctttgaggtttgcctagctgatcttcagggcgacgaggatcaagcttacaggaaaatcaggctccgtgctgaa

SEQ ID NO: 5975 - DNA, 311 bp, Zea mays
caccgaattccctgcgattcctctcccctcgcctcctcgtctccccctaggggatcgccggagaggaatcgcaaagagggccgtctcatccgagttaaggaagccatggagcacaaggaggctgggtgccaggcccccgagggacccatcctctgcatcaataactgtggcttcttcggcagcgcggcgaccatgaacatgtgctccaagtgccacaaggagatgataacgaagcaggatcaggccaagctggctgcctcctctatcgacagcatcgtgaacggcagcgacgccgtcatggagccggttgt

SEQ ID NO: 5976 - DNA, 311 bp, Zea mays
  unsure (1)..(311): unsure at all n locations
tggcggagaatggctataacttattcaccgtgcgcaagaacagtgatgctgccacagatgacgaaagggccaagcttgaggtcgttggggagtaccatctcggagagtttgtgaacagattccgccatggttcactcgtgatgcgccttccagactcagagatagggaagattcctacggtcatctttggcacaataaacggggtcattggcattatcgcctccctcccgcatgaccattacaccttccttgagaagttccagtccactcttgtcaagtacataaagggagttgganacatgagccatgag

SEQ ID NO: 5977 - DNA, 281 bp, Zea mays
cggatgcacacacacacaaccagatctcccccaaatccacccgtcggcacctccgcttcaagatgcagatctttgtgaaaaccctgactggcaagactatcaccctcgaggtggagtcgtctgacaccattgacaacgttaaggccaagatccaggacaaggagggcatccccccagaccagcagcggctcatctttgctggcaaacagcttgaggacgggcgcacgcttgctgactacaacatccagaaggagagcaccctccaccttgtgctccgtctc

SEQ ID NO: 5978 - DNA, 309 bp, Zea mays
  unsure (1)..(309): unsure at all n locations
agcgcctccaccttcctcgccgcctcactccctctgaggtcgcagatccgtccggttagacgaagccgcccgcacccatggcctccggtgagctcgcctgcacctacgccgccctcatcctcagcgacgacggcatcgccatcaccgccgagaagatcgccaccatcgtgaaggcggccaacatcaaggtcgagtcctactggccggcgctcttcgctaagctcctggagaagcgcagtnntgaggatctaatcctctccgtgggatctggtggtggcgctgctccagttgctgcttccgtccagctgg

SEQ ID NO: 5979 - DNA, 261 bp, Zea mays
  unsure (1)..(261): unsure at all n locations
aatggaggctcggatactatggatgaaattcttgctaggatacaacaacgggaagaagcagcagtaaagcgtgacgangccatggcgtacgcgttcaaccatcagtggagagcaaggtctgccacaagtctaggaaacttcagctatgaagtcggtaagggtggctggggctggagctggatggaccgctggatcgcagcacgaccatgggagccgcgatccatggtccaccctgagaacccgaagaaagcacaggcaaag

SEQ ID NO: 5980 - DNA, 173 bp, Zea mays
cctcctgctcctgccctcggtttctgatcagcgaacatgggaacccgcggcgtcgccctgctgctcctcgcggcggtgctgctcctccaggcgctcctcctcgcgtcgtcggatggcctggtgcgggtcgcgctgaagaagctgcccgtcgaccagaacggccgcgtcgccgc

SEQ ID NO: 5981 - DNA, 301 bp, Zea mays
cacaagttcacctgtgtataaagggaagtttctcatggctgctagaagattaaggcgtggtccccatactgagtacattatatctcttgatgcagaggacttatcacaagggagcaattcatacatgggaaaactgagatctgatttctgggggacaaacttcaaaatatatgatagcaagccaccatatgacggcgctaaagcatcaagtagtcgatctagtcgtcgtttcggaagcagaaggattagtccccaagtatcgtctggtaactatgaagttggacaggtttcatacaaatac

SEQ ID NO: 5982 - DNA, 299 bp, Zea mays
ctcccagtctacaaggaggtcattgctgagttgaaggcagctggggcttcatggattcagtttgatgagcccactcttgtcctcgaccttgattctgacaaattggctgcattctctgctgcatacgcagaacttgaatctgtactttctggattgaatgtgcttgttgagacttactttgctgatgttcctgctgagtcctacaagaccctaacatctctgagcagtgtgactgcctatggttttgatcttgtccgtggaacccaaactcttgggcttgtcacgagtgctggtttccc

SEQ ID NO: 5983 - DNA, 297 bp, Zea mays
cctcagctcatcctcgcagatacgtttcagttccggagcgactagcgcgagctgttcagggattatttactgatagagagagtgttcagggattttagcacctgttcatggctgctgcgtgcatcagccatcgctttcgccactccaagctcccggtactggtcctggcgctggcgacggtggtggccgccgcacgggctcagctgtcgccgccgacgttctacgcctcgtcgtgccctgccgcgctcgtcaccatcaacgccgccgtgagggctgccgtgctgctggaccgccgca

SEQ ID NO: 5984 - DNA, 94 bp, Zea mays
cttctcctcgccctcttaccaagtcctcctcgggttagggttccttagggttttgtacaggggcgatggcggcggctgatgtggagtaccgttg

SEQ ID NO: 5985 - DNA, 303 bp, Zea mays
caatcggcacctcgccgtcctcgtgtgcaatccccagctctcctcgcccctccctcccaaactccagcggcccccctgaccaagctccggggacggatggacggaggagccggctttccgggcacgcagccggtctcccgctcgccggaggacgtcttccgggactaccgcgcgcgccaggccggcctgatcagggcgctcaccaccgatgtggagaagttctacgtgatgtgcgacccagagaaggagaacttatgtttatatggacttcctaatgagacatgggaaataaacttgcctgct

SEQ ID NO: 5986 - DNA, 205 bp, Zea mays
tgtgaagccgccgccgctgcagtgtccatagccaccgcagagactgagatggggggttttgtcaatacccacaagaccaatgcgtacttcaagcgtttccaggtgaagttcaagagaaggcgcgctggcaagacagactacagggccaggataaggctgattaaccaagacaaaaacaagtacgatacacccaaatacagatttg

SEQ ID NO: 5987 - DNA, 306 bp, Zea mays
tgggatgccaagatggacaagagcaccgtccatgacgttgtacttgttggtggctccactaggatccccagggtgcagcaactgctccaggacttcttcaacggcaaggagctgtgcaagaacatcaaccccgatgaggctgtcgcctatggtgctgctgtccaggctgccatcctgagcggtgagggcaatgagaaggtgcaggacctgcttctgctggacgtcacccctctgtccctgggtctggagactgctggaggagttatgacagtgctgatcccgaggaacaccaccatccccaccaag

SEQ ID NO: 5988 - DNA, 305 bp, Zea mays
cagcttgccatcgacctgaacgctcagggtctggctcgctatgccatcatctgccaggagaatggtctggtgccaattgttgagcctgagatccttgttgatggccctcatgacattgatcgctgcgcttacgtcactgagaccgtccttgctgcctgctacaaggcgctcaacgagcaccatgtcctcctggagggtaccctcctgaagcccaacatggtgactccaggctccgactccaagaaggtgacccctgaggtgattgctgagtacaccgtccgtaccctccagaggaccgtccctgc

SEQ ID NO: 5989 - DNA, 268 bp, Zea mays
gtctgtctgcatctgcgcaggagaagaaccacgggtcgttcgacttcgtcttcgtggacgccgacaaggacaactacctcaactaccacgagctgctgctgaagctggtgaagctgcgcggcctcatccgctacgacaacgacgctgtgggacggctcaggcgtggtctgagacgaagcgcccatgcgcgagtacatccgcttctacggcgacttcgtgctcgtcctcaacaaggcgctcgccgccgacgaccgttctgagatctgcc

SEQ ID NO: 5990 - DNA, 282 bp, Zea mays
gatttttcctgacgcggtgtctgctcccacttcccctcctctcccccaggtggcggcagcagcggcggggtagcatttgtgctacgagggcttttgcaatggcggcttcggggttcggcggcggcgaggcgttccggctctcggccgcgccgggggccggcttactgaagctgcacaagggcgacatcaccctctggtccgtcgactgcgccaccgacgccatcgttaatgctgctaatgagcgaatgttaggtggcggaggtgttgatggagctatacatc

SEQ ID NO: 5991 - DNA, 279 bp, Zea mays
gtgaccatccccaaggactgcgacaccgtccaaaagtgctacatctacctctctggacaagtgaaggagaagctgggcacgattgacccctactttgtcaagctcggtgacgccatggtcacctggatcgaggcctgggatgagctgaacccgtcgacccctgccgccgcaaatggcaaggccaagtagatgtgccatcacttcggcactggagtgaaaaagaaagtatgattgggtcctgcctaggccccatggtaaagccgcttttttaagagggag

SEQ ID NO: 5992 - DNA, 294 bp, Zea mays
cggctcgagcgacgactgcgctgaagctgaactcgatcctgcgtacagagaatccgtcaagtgcaagatattcctggggttcacttcgaaccttgtgtcttccggtgttcgggagatcatccggtttcttgttcagcatcgcatggtggacgttattgttacgactgctgggggtatagaggaggacctcatcaaatgccttgcgccaacctacagaggcgacttcactctgcccggagcgctgctgcggtccagaggacttaaccggataggaaacctgctggtgcccaatga

SEQ ID NO: 5993 - DNA, 261 bp, Zea mays
gcggcggccaagaccaatcgaccatggctacccgtatccagtttgagaacaactgtgaaattggtgttttctccaagctgacaaatgcttactgtctggtagcgattggagggtcagagaacttctacagtgcctttgaggctgagcttgcagatgccatccctgtggtcaagacctctattggtggcactagaataataggccgactttgtgttggaaacaagaatggacttctattgccacatactacaaccgaccaag

SEQ ID NO: 5994 - DNA, 244 bp, Zea mays
agctcatcggcgccaagaagaccatggagatcggcgtgtacaccggctactccctcctcgccacggcgctcgccctcccggacgacggcacggtccgtcgttgttccctcccttttcccagatctgccaccccacctccctgaaggcgaacagctagcggtcctcccactgataaaccaaggatttctctctccctctctttgttgttcgtcccgccccgcagatcttggccatggacatcaac

SEQ ID NO: 5995 - DNA, 244 bp, Zea mays
gtcctggctggccatggttggtgttctggccggtctcacctttctgatgggtcctgttccgatgctaaagctctacggagtcccatacttggtatttgttgcttggctggatatggtcacatacttgcaccatcatggccacgaagacaagcttccctggtaccgtggaaaggagtggagttatctgcgtggaggactgacgacgctcgaccgggactacggatggatcaacaacatccatcac

SEQ ID NO: 5996 - DNA, 275 bp, Zea mays
cgactccgccgccgctccgcctcagcgcgtcgcccgccgcgacctcatcggtcaccttcagctttcagtcatggcggacgtcgatgtcgaaccggagttgccgccggagctcccaagaagaggacgttccgcaagtacagctaccgcggcgtcgacctagatgcgcttctcgacatgtccacggacgaccttgtccagcttttccccgcgcgcgccaggagaaggttccagaggggtctgaagaggaagcccatggcgctcatcaagaagctgcg

SEQ ID NO: 5997 - DNA, 287 bp, Zea mays
gttctccaccccaccctcaacgccacgctctccgactccccgggcctcgcgctcgtgctcgccgtcctgcccttcatcctgatgatcccattgtatcattatcagcacaagcacccacacaatttcgttttcctgggtctgttcacgttgtgcttgagcttcagcatcggtgtggcttgtgctaacacccaagggaaaatcgttctggaggctttagtgctgacggctggcgtggtggtttctctgactgcgtatgctttctgggcgtcaaagaagggcaaggaatt

SEQ ID NO: 5998 - DNA, 222 bp, Zea mays
agcgtatccgtgtcaggaaggagatcaaagtaaaaatccctccaggagtgagcaaaggcagtactcttcgtgtacgtggggaaggtgatgcaggatcaaaaggtgggcctcctggagatctctttgtttgcctcgatatagaggagccatcagatatcaagagggatggtataaacttgtattcaactgtgtcaataagctatcttgaagctattttgggca

SEQ ID NO: 5999 - DNA, 283 bp, Zea mays
aaatcctgttttttagggaatgtataagtcctgtattgagcaacagtgtttattatcacgagcataacaactctagtatttgtttgcagactgttgcactcgttggagagagtggtagtggcaaatcaacggcaatttcattgctccagaggttctatgacccagatgtaggccatatactactagatggcgtggacatacagaagttccagcttaggtggttaaggcaacaaatgggcttggttagtcaagaaccagctttgtataatgacacaataagggc

SEQ ID NO: 6000 - DNA, 291 bp, Zea mays
gcttcaggccatatacctgcccctatgctggttctgaatgtgctgtggctggtgatattccattccttgttgcacatttgagggatgatcacaaagtcgatatgcacagcggctgcacgttcaaccatagatatgtcaagtccaacccgcgagaggttgaaaacgccacctggatgcttacggtattccattgttttgggcagtacttctgcctgcacttcgaggcattccagctcggaatggctccagtctacatggctttcctccggttcatgggtgatgagaatgatg

SEQ ID NO: 6001 - DNA, 284 bp, Zea mays
cattgagcaacatgcctctgataatgtcaacaaaattttggtgggcaacaaggccgatatggacgaaagcaagagggccgtacctactgcgaaaggagaagcacttgctgatgagtatgggatcaagttttttgaaacgagtgccaagacaaacctgaacgtggagcaagtgttcttctccatcgcacgtgacatcaagcagaggcttgcagagactgattcaaagccagaggacaaggcaatcaaaattaacaagccagaccagggttccgaggcacagctgc

SEQ ID NO: 6002 - DNA, 326 bp, Zea mays
gaggtgggttggcttctcctcgcccaccggttcgtgttcaggttctggttcgtgggcgagagggaagagatggcggcgtcggacgttgagtaccgttgcttcgttggcggcctcgcctgggccaccgacgaccactccctcaacaacgccttcagcacctacggcgaggtcctcgagtcgaagatcatcctggatcgggagacgcagaggtcccgcggcttcggcttcgtcaccttctccacggaggacgcgatgcgcacgccgatcgagggcatgaacggcaagcagctcgacggccgcaacatcaccgttaacgaggccagtcc

SEQ ID NO: 6003 - DNA, 283 bp, Zea mays
taatgatccagcttctgcagacggattcactgtcatattcaacaaagccagagatgagaagaagggtgggaacggacaagacactgagtcaccttccaaggacaccaggactgagagggtggaatcttatgctgcaaagccaagcacgaagaaatggttttgttgtgtgacagccagccctacgcaatcctgaggaagacaactgcatgcgctttggaaatactgtcgctttaattttctatacatactatccataagacaatgtaggggtaccaaggcctct

SEQ ID NO: 6004 - DNA, 278 bp, Zea mays
tgaccaagctccctttttgaagaaagtcctcgacaaatgttccatagtctcatgggggagagggacagacatagacacataaccatggaaggaattacagaggttttggctgcattggagaggattgaacagcaagcagagctgacctatgatcaattgctaatgctggaggctaatctattttttggcgcctttgcctcctatgatcggcatagagacatgcggatggatattgatgatatgtcctatgaggaattattggccctggaggagagaat

SEQ ID NO: 6005 - DNA, 274 bp, Zea mays
gagagatcgcatcttgcctgcccacccagcttccctttcgttcctcctcgccccagcgacgcggcctcccgtagaccgagcaaggcaacccaccactgagaggcacgcagaggagcaggaagccggagaccaagatgtcgtcggtgttcagcggcgatgagacggcccccttcttcggtttcctcggcgccgcgccgccctcgtcttctcatgcatgggcgcacgtacgggaccgcgaagagcggcgtcggcgtggcgtcgatgggtgtgatgc

SEQ ID NO: 6006 - DNA, 198 bp, Zea mays
caaggaccttcggcgcccgttcaggatccacatcttcccgagcgagttcttggttgacctcttcctcttcggaccacctccaaggctcttggtgtagcttgccactctcaccaatcaagttttcatgtctgatctcgacattcagatcccaactgccttcgatcccttcgctgaggccaatgctggggactctggtgc

SEQ ID NO: 6007 - DNA, 286 bp, Zea mays
caggccagctacggcgacagctccttctccgtcggctacctcagcacggacaccgtctccttcggctccaccagctacccgagcttctactacggctgcggccaggacaatgaggggctcttcggccgctcggcggggctcatcggcctcgcgcgcaacaagctctcgctgctctaccagctcgcgcccagcctcggctactccttctcctattgcctcccgacggctgcgtcaacggggtatctctccatcgggccctacaacacggggcactactactcgtaca

SEQ ID NO: 6008 - DNA, 312 bp, Zea mays
gtttggatcttgcggggcgtgacctcaccgaccacctaatgaagatcctcacagagagagggtactccctcactacgagcgctgagcgggagattgtcagggacataaaggagaagcttgcctacgttgcccttgattatgaacaggagctggagactgccaggagcagctcctctgtcgagaagagctacgagatgcctgatggtcaggtcatcaccattgggtcagaaaggtttaggtcccccgaggtgctgttccaaccatcccttgttggcatggaatcgcctggcgtccatgaggccacgtacaact

SEQ ID NO: 6009 - DNA, 315 bp, Zea mays
acgagttggattgggttcaaagttgggcttttggacagctgtggtgtgcacggcagctctgtgacttgtacagaggaagggaggaagaaagcggatccatggcgtcgaagcggatcctcaaggagctcaaggacctgcagaaggatcctcccacctcttgcagcgcaggtgattcagattccgcccgcactgctacttcttttaattttccatgatgggatacgactttctcccgtgcgctcggctattagcggtgcgatgcgattcttagtgcggagttgctagatctgtgcgtatacatgtacaggggacgct

SEQ ID NO: 6010 - DNA, 278 bp, Zea mays
tgtcctccaagaagacgatggagatcaaccccgagaacgccatcatggaggagctccgcaagcgtgccgaggctgacaagaacgacaagtccgttaaggaccttgtcatgctgctgttcgagacggcgctgctcacttctggctttagcctcgacgatcccaacacctttggcagccgcatccaccgcatgctcaagctgggcctgagcatcgacgaggacgaggaggctccggaggctgacaccgacatgccccctctggaggatgacgctggcgag

SEQ ID NO: 6011 - DNA, 319 bp, Zea mays
tgatggtgctgcaatgctaacgtttgaagcattatctgaaacatctgaatttgcaaagaaatgggctccattctgcaaaaggtacaatattgaacctcgtgctccagagtggtacttccaacagaagatagactacttgaaagacaaggtggcagcaaactttgttagggagaggagagcaatgaagagagagtacgaggaattcaaggtcagaatcaatgccttggttgctagagcccagaaagttcctgaagaaggatggacaatgcaagatggaaccccctggcctggaaacaatgttcgtgatcatcctggaatg

SEQ ID NO: 6012 - DNA, 313 bp, Zea mays
cagaaagagaaaaagcctaagacgaagacgataaaggagactacttctgaatgggaacttctgaatgatatgaaggctgtatggcttcgcagcccgatagaggttactgatgaggaatactcgaagttttaccactcactagccaaggacttcggtgatgacaagcctatgggttggagccacttcactgctgaaggagatgttgagttcaaagctttgctcttcattccaccgaagctccgcatgatctctatgagagttactacaacagcaacaagtcaaacctcaagttgaatgttagaagagtgttcat

SEQ ID NO: 6013 - DNA, 309 bp, Zea mays
ctagttctagatcgcgagcagccccccatttttttttaaatttagtaactctgtgttgtaggcttccttatgctgtggtacatgatacattatatttattttctcaatgtgcgtagatgtatacatcgctcccgaggtctacaaaaacgaaccatttgacagaagtgtagatgtatttgcatttggtctcattctttatgagatgattgaaggagctcctgcttttcacccaaagccacaagaggaagcagctaagatgatttgcttagaggggctgagaccaccattcgagaataaaccgagatacta

SEQ ID NO: 6014 - DNA, 314 bp, Zea mays
cgacctgccgcacgtcatctccgacgcgccgccgttccccggcgtgcgccacgtgggcggggacatgttcgcgtccgtgcccgccggcgacgccatcctcatgaagtggatcctccacgactggagcgacgcgcactgcgccacgctgctcaagaactgctacgacgcgctgccggaaaatggcaaggtcatcgtcgtcgagtgcgtgctgccggtcaacacggaggccacccccaaggcgcagggcgtgttccacgtcgacatgatcatgctcgcgcacaactcaggcggcaaggagcggtacgagcgcgatt

SEQ ID NO: 6015 - DNA, 308 bp, Zea mays
cggctcgagatctttaccagggcacctgtgcggttgcggtcaaacattctcctgtatggactacctggatgtggtaaaactcacattgtgagagctgcggctgctgcttgttctttgcgattcatttcagtcaagggtccagagctattgaataagtatattggttcatctgagcaatctgttcgcgacttttttgcaaaggccgttgctgcagcaccttgcctattattctttgatgaatttgactccattgcaccccagcggggaactcatagtgcaggagtttctgatcgtgtagttaatcagtt

SEQ ID NO: 6016 - DNA, 312 bp, Zea mays
cttattttcacgagttcaccacaagagaactagtgaaaatgagtgaaccaaacaagttagtaccacaaggacaagaagaatatgattcaaactgggatgaagtgatcgacaaattcgacgacatgaatctgagagaggagctgttgcgtggcatctacgcatatggtttcgagaagccctctttgattcaacaaagagccatcgttcccttggccagaagatacgacatcatcgcacaagctcaatccggaactggcaagaccgctacttttactattggtatcctcaacaaatcgatgtgactctccttga

SEQ ID NO: 6017 - DNA, 305 bp, Zea mays
ctcagctcaaacatccctactctcctgctcctcttcttcctcctcctctcgctctcaagcgcgtcttcactccggcctagctcggacggatcgacatcgaggggaaagggaataagtgggggcgccacagatggatccatggatcagcagccagccttctctgagccttgacctgcgcgtcggcctgccgccgctcagcctccaccaggcgccggtggccgtcgccttggccaggcccaaggtgctcgtcgaggagaacttcctgctgcctcccaagaaagaaccagaggtggcggccgccgact

SEQ ID NO: 6018 - DNA, 306 bp, Zea mays
  unsure (1)..(306): unsure at all n locations
gttcncagccgcttctttttctgggcgaccaatcctgtctgaagctggttttgatctattgaacagactgctgacttatgaccctgataagcgcatatcagcagacgatgctcttaagcacaaatggttctctgaagttcctctgcctaaatcaaaggacttcatgccaacattccctgctcttaatgaacttgacaggcgttccagaaggtatctgaagagtcctgatcctctggaagagcaacgtttgaaagaactgcaagggaacataggcaaccatgggctttttgggtgaactagaagcac

SEQ ID NO: 6019 - DNA, 196 bp, Zea mays
acttgatcaaggtcactgtggctcttgttgggcttttggtgctgtggagtgcctccaggaccgtttttgcattcacctcaacatgagcattttactttcagtcaatgacctactggcatgctgcggttttatgtgcggcgatgggtgtgatggaggctatcctatagaggcatggcgctactttgttcaaaatggt

SEQ ID NO: 6020 - DNA, 322 bp, Zea mays
ccaacccctgtcgcactgcagccgccggccatggcctgcctcaccgacctcgtcaacctcaacctctcggacaacaccgagaagatcatcgcggagtacatatggatcggtgcatctggcatggatctcaggagcaaagcaaggaccctctccggcccggtgaccgatcccagcaagctgcccaagtggaactacgacgtctccagcacgggccaggcccccggcgaggacagcgaggtcatcctgtacccgggagccatcttcaaggacccattcaggaggggcaacaacatccttgtgatgtgcgattgctacaccccag

SEQ ID NO: 6021 - DNA, 320 bp, Zea mays
cgctgaggtggtcgcggacaggcgtgctacctgccgtgcaccgccgacgggctgccggtcatcggggagataccaggcgtgaaggggtgctatgtggccacgggccacagctgctggggtatcctcaatggtccggccaccggcgcagcgctcgccgagctcatcctcgacggcaagtccaagatcgttgatctggagcctttcagcccggcaaggtttctcaagagaaggagcaggcgtggagtctgaccgtgtgaatgttcagattcaagctcgctactgaataaaacactcttggttctcccttttgcatgactgat

SEQ ID NO: 6022 - DNA, 298 bp, Zea mays
gcagctagcgcgctcctcgagcccagcagagaaaggccggcagcgctaatcgtaatagccatgggctccaccgccggcgacgtggccgcggtggtggacgaggaggcgtgcatgtacgcgatgcagctggcgtcgtcgtccatcctgcccatgacgctgaagaacgccatcgagctgggcctgctggaggtgctgcagaaggaggccggctgcggcaaggcggcgctggcgccctaggaggtggtggcgcggatgcccggtgcgcccagcgaccccgccgccgccgggccatggttga

SEQ ID NO: 6023 - DNA, 293 bp, Zea mays
tgaaggagtcggagggaaccgaaaactcagggtctcgaatttcctaggagcggaggcgatggctgggaagggaggaaaaggattgctcgccgcgaagacgacggcggccaagtcggcggagaaggacaaggggaagaaggcccccatctcacggtcctcccgcgcgggcctccagtttcctgttggacgaatccaccgtcagctgaagcaaaggactcaggcaaatggccgcgttggtgccactgcagccgtctactctgccgccatcctggagtacttgactgccgaggttt

SEQ ID NO: 6024 - DNA, 243 bp, Zea mays
tgatgcgggtctgcaattctcgaaacagggtgttgcaatcactcaagaaaattctctgttggataacactgccagaatagagggatggttagctcggtttcctatgtttgactgggttggtggtaggacttcagaaatgtcagctgttggtttacttccagctgcattgcagggtattgatatcaaggaaatgctagttggtgcagctttaatggatgaggaaacccggaacactgtggttaa

SEQ ID NO: 6025 - DNA, 319 bp, Zea mays
cgataaatttggagctgctatggcaattgtaaagagtgatatcggcggcaatatcacaagactggaaaacaagtatacttcagaaccatcaaagtatgaacacttgtacagcatgattcaggaagaagttcaaaacaagaccgcaaaaggttcctcaagctgcacaaatgggcttctgtggctgacgagggccatggacttccttgttgagttgtttcgtaacctgcttgagcatccagactgggccatgagtcaatcttgcactgattcatacaccaagactttgaagaaatttcatggctggcttgccagttctagt

SEQ ID NO: 6026 - DNA, 244 bp, Zea mays
attcggatgcttgatcccaacactggtaggacactaagaatatatccccttgaaactgtaactagatgcgatgtattagattcctctatttttgccttttggtccaagagttcggtggatgttgaaggaaaaagaataaggctgaaatcaaacagctatacatccagcaccattcttgacactgtcacagctgcgactgtgcagttcaaggagatgggtgaaagcagcatttcaagaagtagag

SEQ ID NO: 6027 - DNA, 240 bp, Zea mays
attcaagaagatttccttcccacatacatcttatgctgtgcaagatggtattacctcttgtttgctagagtggggattggttggtgatttgtttaccctgactttggataatgctagtgtaaacaatagagcaatgaaagatatgcgagatgctttgggcagccagatgtttttcagtggtgaacacctccatgtgaggtgttcttctcatgtgctcaacatcatggttcaagctggact

SEQ ID NO: 6028 - DNA, 257 bp, Zea mays
gtcacaactcacaacccgagccccccaaacccgaagcagcaggagctcccctgaccctgctccgcctccgatcaaggaaaaggaagatgagctactacggccagcagccccccgtcggcgtcccgccgcagcaaggctacccggggaaggacggctacccgccagcggggtacccccggccggctaccccccgccggcgcagggctacccaccgcaggctacccgcagcagggctacccgccgcagtacgcgcagcg

SEQ ID NO: 6029 - DNA, 307 bp, Zea mays
ctgcacttgatggaaatcctcaacctatggaccaaactgaagacaattctatgccctcagcacagcaacaggaagaagcaatcaagaagaagtttggaggactaatgcccaaaaagcccccactcatctcaaaggatcatgagcgggcctactttgattctgctgactgggctctagggaagcaaggtgttgccaaaccaaaaggaccgctggaggcacttaggcccaagcttcagccaacacgccaacaacagcaacaacgtgcaaggcgccctatttacacttcgtcagaaaacgaggacggaga

SEQ ID NO: 6030 - DNA, 308 bp, Zea mays
gtgattactacagataccttgctgagttcaagactggagctgagagaaaggacgccgctgagaacacgatggtggcatacaaggctgcccaggacattgctctggctgagcttgctccaactcaccctattaggcttggactggcacttaacttctcagtgttctactatgagattctgaactcacctgatcgcgcctgcagtcttgcaaagcaggcttttgacgaggccatctcggaactggacaccctgagcgaggactcctacaaggacagcactttgatcatgcagctccttcgtgataacttg

SEQ ID NO: 6031 - DNA, 311 bp, Zea mays
gttgtcggtacggaaagcaaaggccttgctgctgacactattgcctcattaccttgggtgacttaccaggcacaagacaagcaagatggcaacatggaacagtgtgttatttgtcgtgtggaatttgacgagggcgagtcattagttgcactcccttgcaaacatccgtaccattctgagtgcataaaccagtggctgcagctaaacaaggtatgcccgatgtgcagtgctgaagttcccacttctgtgaacaagcaggcatgactactcaacctgaagaagatagcggtggcttggtatttatctgccat

SEQ ID NO: 6032 - DNA, 281 bp, Zea mays
cgcgcgacgcgctccgcttcgcacgcttcgccgtcaggtacggcaagagctacgagagcgcggcggaggtccacaagcggttcaggatcttctccgagagcctccagctggtccgctccaccaaccgcaaaggcctctcctaccgcctcggcatcaaccgcttcgcgacatgagctgggaggagttccgtgcgaccggctcgcgcaccagaactgctccgccacgcttaccggcaaccaccggatgcgcgccgccgccgttgcgctgccggagacgaaaga

SEQ ID NO: 6033 - DNA, 319 bp, Zea mays
cgtgtccgagccacgcaagccgagctcaatccccagaggccagagccagctgctcggcgctccacgcgatggcgcagaaggagaccaatggcagcaacggcgagcacatctccacccgcccgccgccgaccccgtcgcccctccgcttctccaagttcttccaggctaacctgcggatcctggtcactggtggggcgggcttcatcggctcgcacctcgtggacaggctcatggagaacgagaaacacgaggtcattgttgctgataactttttcactggttcaaaagataacctgaagaagtggatcggacacccaag

SEQ ID NO: 6034 - DNA, 231 bp, Zea mays
cggctgccgtttactttaacccgagctggccccaaggtagaaccaaagacgagagttgctggtcagacagagatttatgcattaagaacgagaactggtactgtgctgccaagacgattgctgaagaaactgcagtggagtatggagagaagaacgggctgattgttgtcacggtctgcccttgtatcgttttaggcccactcctgcagcctctgatccatgccagcagcg

SEQ ID NO: 6035 - DNA, 261 bp, Zea mays
tagccttccaagctttggacaagtttaggactgaattgacacgattccctattgctgggtcagctgatgatgcacagaagctgatagatcttgctattggtattaatgaaactctgggtgagagtaagcttgaagaaattgacaagaagctcttgcagcatttcgcaagtggttccagggctgttttgaatcctatgtctgcaatgtttggtggtattgtaggtcaggaggttgttaaagcatgctcaggggaaattccat

SEQ ID NO: 6036 - DNA, 259 bp, Zea mays
gggatgcacgacgccaagagcatcttcaagcgcgcgctggcgaggctgcccatcgtcgtgcccatctggttcctcgccatcatcttccccttcttcgggcccatcaactccgccgtcggcgcgctgctcgtcagcttcaccgtctacatcatcccggccctggcgcacgtcctcacctaccgcacggcgtccgcgcgcatgaacgccgcggagaagccgcccttcttcctgccgagctggacggggatgttcgtcctca

SEQ ID NO: 6037 - DNA, 169 bp, Zea mays
tacgaggtgtatgaagctggttggaaaaccaaatttgaagctgccggcatatggtatgagcaccgccgtatcgatgacatggtagcatacgcacttaagagtgaaggagggtatgtctgggcgtgcaagaattatgatggagatgtgcagagcgatttcgtagctcaag

SEQ ID NO: 6038 - DNA, 274 bp, Zea mays
agtccctccaccgcgcgctcggggacgcgctgttcggccccatgccggtggctgtgaccgaggacgacgacgacgagggggacatgaaggaggcgttccgggtgttcgatgaggacggcgacggcttcatctcggccgccgagctgcaggccgtgctcaagaagctcggcctgcccgaggctcggaacctggccactgtgcaggagatgatctgcaacgtcgaccgcaactgcgacggccgcgtcgacttcggcgagttcaagaacatgatgca

SEQ ID NO: 6039 - DNA, 260 bp, Zea mays
tgatccactcagccagtggtaggacttaccactcaaaatttgcacctccaaagtctccaggagttgatgatgtaactggagagccattgattcaaaggagagatgacaccgctgaggtcttgaagtcaaggcttgaagctttccacagacaaaccgaacctgtgattgattattactccaagaagggcttagtggtgaacctgcctgcagagaaaccaccgaaggaagtgactgctgaggtgcagaaagccctctcgtga

SEQ ID NO: 6040 - DNA, 271 bp, Zea mays
cttttctcgtttagaacctctaaaatttcccccactcgccagtcgcagcagcacctgtagcagccatggacgccagcggagccggtagcaaggggaagaagggggcggccgggcgcaaggcaggcggccccaggaagaagtcggtgacgcggtccgtcaaggccgggctgcagttccccgtcggccggatcgggcgctacctcaagaagggccggtacgcgcagccgtgggcactggcgcccccgtctacttcgcggcggttctggagtac

SEQ ID NO: 6041 - DNA, 243 bp, Zea mays
tcggctcgagcgaacaacgggtattgtgctcgactctggtgatggtgtgagccacaccgtccctatctacgaagggtacacgcttcctcatgctattcttcgattggaccttgctggtcgtgaccttaccgacaacctgatgaagatccttactgagaggggttactccgtcactacgactgccgagcgagaaattgtcagggacctccagggaaaacttgcctaagttgcccttggatatga

SEQ ID NO: 6042 - DNA, 268 bp, Zea mays
cggctcgagcggctcgagcgctcctgtccaccctgccgccgccgccgccgccccgcacgcatcaactgtcaccgtcgctatggcccgtatcaaggtgcacgagctccgggggaagagcaagacggacctgcaggcgcactcaaggagctgaagtctgagctctccctcctccgcgtaccaaggtcaccggcggcgcacccaacaagctctccaagatcaaggtggtgcgcacctctatcgcgcgcgtgctcacagtgatctcgcagaa

SEQ ID NO: 6043 - DNA, 267 bp, Zea mays
cccgcctcggcactcgacggccgccggcacacaccgcgcagtctcgagacaggaaccggaggaacgaggatggaggatgactcgccgctgacgaagacgatgaagggtgcggtgacaggactcgccgcggggaccatctggggcaccgtcgtcgccacctggtacgacgtgccccgtgtggagcgccacgtcgcgctccctggccttatccggacgctcaagatgtgggcaactaagggggcaactttggcaacatccgggggctct

SEQ ID NO: 6044 - DNA, 264 bp, Zea mays
tgggcagcccattggtcgctacgacgacatgtgggccggatggtgtgtgaaggtcatctgcgaccacttgagcctgggagtcaagactggcttgccatacatctggcacagcaaggctagcaaccccttcgttaacttgaagaaggaatacaagggcatcttctggcaggaggacatcatccccttcttccagaacgtgaccattcccaaggattgcgacaccgtccagaagtgctacatctacctctctgaacaggtgaggga

SEQ ID NO: 6045 - DNA, 268 bp, Zea mays
tgttgatggtagccgtgggcgtagacctatagcacataggctgagctttgttgagatggttgttccttatggagatccaagtgaaccacattatcgcaagaatgcatttgatgctggagaagatggacttggaaaaaatgctcattctcttaagaagggatgcgattgcttgggctacataaaatattttgatgcacatttcacaaacttcactggtggtgtggagacaattgagaactgtgtttgtttgcatgaggaggatcatggg

SEQ ID NO: 6046 - DNA, 261 bp, Zea mays
atttcggatttcgggttggcaaggctcctaccacccaacgcgacgcatgtgagcacccgagtagcaggcacattaggatacttggctcctgaatacgcaatccgtggtcaagtgacaaagaaatccgatatctatagttatggtgttcttcttttagaaattgttagtgggagatgcaacaccaacacaagattacctagtgaagatcaattcctccttgagaggacatgggcactctatgaggaagggcgtttagaagac

SEQ ID NO: 6047 - DNA, 161 bp, Zea mays
cacatcctctacaggagttaaagcccaccaaatccattgaagacaatgcagagataaaggcatggcttgctttggggacgaaatcaaagaacaagggtggtgggaagaagaagaaaggcaagacaggagatgcagcagaagcagatcccatggaggaggcg

SEQ ID NO: 6048 - DNA, 264 bp, Zea mays
tgctgaaggtccgaggggcctatacaaggggatgggggcacctctggccaccgtagcggccttcaacgctgtcttgttcagtgtcagggggcagatggaggcgtttctcaggtcagagcctggtgtgccgctgacagtgaagcagcaggttgttgcgggcgccggtgctggaatcgcagtctccgtcttggcttgtccaacagaactgatcaagtgcaggttgcaagcccagagttccttagccgaggcagccaccgcttctgg

SEQ ID NO: 6049 - DNA, 260 bp, Zea mays
ggcggcgccaactcgctcgcgtccggctactcccgcggcgcgggctcggcgccgagatcgtcggcaccttcgtgctcgtgtacaccgtcttctccgccaccgaccccaagcgcaacgcccgcgactcccacgtcccggttctggctcccctccccatcggcttcgcgtgttcatggtccacctggccaccatccccgtcaccggcaccggcatcaacccggccaggagcctgtgcgccgccgtcgtctacaacaaggaca

SEQ ID NO: 6050 - DNA, 164 bp, Zea mays
caaacgcccccactcttgcaatactttggcccattgctaactcgagggaagctcaacgcctttcagtctcttgagctatctcgacttgtcgtcaataagaacaaaaataatcttctgaaaaattggtttgcagaagataagctggagggaagcagtgcagaaga

SEQ ID NO: 6051 - DNA, 166 bp, Zea mays
tggaacctgtggaacagcgttggaccatggtgtcacggccgtcggctacggcacagagaacggcaaggactactggatcgtgaagaactcttggggcagcagctggggcgagtccggctacgtcaggatggagcgcaacatcaaggcgtccagcggcaagtgtggt

SEQ ID NO: 6052 - DNA, 196 bp, Zea mays
  unsure (1)..(196): unsure at all n locations
caagtatccatccttattgagtacagtgttgatccatggactcggaaggagttgtagcagcaaaggtggcagatgagactactanaccggcaatccaagaagacggcgccgagagcaaggccgggatgactgatctgctgatgctgaccgacaagtcgcagctgcaggcgctggcgatgctgctgcggaacaacga

SEQ ID NO: 6053 - DNA, 321 bp, Zea mays
acggttcattatacatcagagaatgttcttgagggcaagaatgctgcaaaaaaggcattgcagcagatgcttggattacagcaaactgatagccctgttgttggaatcatcactcgtctaacagtgcagaagggaatccaccttatcaaacatgcaatgcatcgagctcttgaacgcaatgggcaggtggttttactgggttctgcaccagatcatcgcatacaaggtgactttacaaatttagccagtaagctgcatggtgaataccatggccgggtgaagctatgtttaacctatgacgagccactgtcacatttgata

SEQ ID NO: 6054 - DNA, 318 bp, Zea mays
  unsure (1)..(318): unsure at all n locations
tgccgtcgcctcgcctatccgatctgccacctcctcccgtctcgcacgttccttcccaactccgcagcgtaccntctccgcggcgcgatccagatccaggtttttcagcatgggcctggtgaaggaaggcatcgacatggaggagggaacccttgagatcggcatggagtacaggactgtatctggtgttgctgggcctctggtcatattggataaagtaaagggcccaaagtaccaagaaattgtaaacatccgacttggagatggcaccaatcgccgtggtcaagtcctggaagttgatggcgaaaaagctgttgt

SEQ ID NO: 6055 - DNA, 300 bp, Zea mays
tagggaggctccgcgacgagctggtccacctcccggtggtgctcgccgccggcccactccacaagctctcctcctccaggggcgccgggagcagcttgctcgccccggaccacagctgcatcgagtggctggacgcgcagcgccacgggtcggtgctgtacgtgagcttcgggagcctggcggccatggactcgagcgagctccgggaggtggcatggggtctggcggagtgcggccaccccttcctatgggtcgtccggcccaacatggtacgaggctgcgacgtcgacagcgcgcggc

SEQ ID NO: 6056 - DNA, 313 bp, Zea mays
cgctttgttaacaaagaattccctcatagccgccgccgccgccgccgccgccgctcatctcgccgagaggtgacgggaccgaggaactcgccgagttctaagatagagaatcgcttttcacagcctggggtctgctgcgtagggtggtgttgaaggggagaagtttaagatctgttccacagatcacgcgtgcgcgctcgcgaatcgggggttccacacatagcttcgtcgttttgaatttgatgtactaatggagtctaagggtggcaagaagtctagcagtagtcgttccatgatgtatgaagctcccctt

SEQ ID NO: 6057 - DNA, 314 bp, Zea mays
cacgatcgagcacacaagcacgaagactcgtttaggagaaaccacaaaccaccaagccgtgcaagcatcatggagtacggtcagcaggggcagcgcggccacggcgccacgggccatgtcgaccagtacggcaacccagtcggcggcgtcgagcacggcaccggcggcatgaggcacggcacgggaaccaccggcggcatgggccagctgggtgagcacggcggcgctggcatgggtggcgggcagttccagcctgcgagggaggagcacaagaccggcggcatcctgcatcgctccggcagctccagctccag

SEQ ID NO: 6058 - DNA, 301 bp, Zea mays
aagctatagccatcttcttctctgaattccagtccaagggccggaataccgtcagaaggagtgggagacggggggaaaaaagatggtgaagctcgcatttggaagctttcgcgactctttgagcgccgcgtcgctcaaggcctatgtggccgagttcattgccacgctgctcttcgtgttcgccggcgtcgggtccgccattgcctactcgcaattgacgaagggcggcgctctggaccccgccggcctggtggccatcgccatcgcccatgcgttcgcgctcttcgtcggcgtctccatg

SEQ ID NO: 6059 - DNA, 294 bp, Zea mays
tccgtggttcggcttcgtgggtgagcggatcgagatggcggcgtctgatgttgagtaccgctgcttcgtcggccgcctcgcctgggccacggacgaccactccctccacaacgccttcagcacctacggcgaggtcctcgagtccaagattatcctcgatcgggagacgcagaggtcccgcggcttcggcttcgtcaccttctccacggaggaggcgatgcggaacgccatcgagggcatgataggcaaggatctggacggccgcaacatcaccgtcaacgaggcccagtcccg

SEQ ID NO: 6060 - DNA, 312 bp, Zea mays
agcagaagcaaagcgcagagctagcaagtgaccgaccgagagcaaataggcaaggcaacgcaggcaagatggtgcagcaagccgcgaaggaggtgatcccgctgctgacgccttacaagatggggcagttcgagctctctcaccgggtggtgctggcgccgctgacgaggtgccgctcctacggcaacgtgccgcagccacacgccgccgtgtactactcgcagcgcgccaccaggggtggcctgctcatcgcggaggccacgggggtgtcggccaccgcgcaggggttcccggagtctcctggcatctgga

SEQ ID NO: 6061 - DNA, 303 bp, Zea mays
agaagatggccggactcgacaccttcctcttcacctcggagtccgtgaacgagggacaccctgacaagctctgcgaccaggtctcagatgctgttctggacgcttgccttgctgaggaccctgacagcaaggttgcttgcgagacctgcaccaagaccaacatggtcatggtctttggtgagatcaccaccaaggccaatgtcgactacgagaagattgtcagggagacatgccgcaacattggtttcgtgtcgaacgatgtcgggcttgacgctgaccactgcaaggtgcttgtgaacattg

SEQ ID NO: 6062 - DNA, 304 bp, Zea mays
cggggataagcctggtggactcaaggtggttgactcttttgtgccacttgctgagatgttccaatacgtcagcaccctccggggcatgaccaaggggcgagcgccctacacgatgcagctcgccaagtttgacgtcgtcccacagcacatccagaaccagatctccgtggcaaaaacagatccagctgctgcttagttttggttttccgtagatatatccatacagcaacaggagagcaggttgataggaaggacatcaaggtgtatgtagctctgtagtgtacatctcttaaggcttgttcgg

SEQ ID NO: 6063 - DNA, 302 bp, Zea mays
agctggctcccaggctgctcagctggtgctggatatccgcaagatgaagggtctcaaggaacagatgatcccactttctgagtttgaggacaagctctaaatttgtggttgttggttacactgttacagctgccggttcaatcgtcaattggttttactgtaaatgcagtgtgtgctgctgtgcggacagtctgatgctctattttaatatctgttaagctatctccagcagcttactcatcccacccgttatcttaaactccatgctgatgagacagttggtatatgtggtcttgtaagtg

SEQ ID NO: 6064 - DNA, 305 bp, Zea mays
gcagcagccaattcgctcgagttcagatcgagcgcgcgccaagcaagtcttccggccggccgcgaagagagcaatcaagcaagacaagatggtgaagctcgccttcggcagcgtcggcgactccttcagcgtcacctccatcaaggcctacgtggccgagttcatcgccaccctcctcttcgtcttcgccggcgtcggttccgccatcgcctacgggcaactgacgaatggcggcgcgctggacccggcgggcctggtggcgatcgcgatcgcgcacgcgctggcgctgttcgtgggcgtgtccg

SEQ ID NO: 6065 - DNA, 305 bp, Zea mays
  unsure (1)..(305): unsure at all n locations
cgccatttgacaaggagagggaaaatgatgacctcgtggcttctgggncgccggggcacctccggcttctcctggagttccaccgccgaccaagtcacgcagggcatctccgccgccggcctcaccgccatcgtcactggggcgtccagcggcatcggcgcggagacggcgcgaacgctggcgctgcgcggggcccacgtcatcatggccgtcaggagccttcccgctgcccaggccgtcaaggacgccgtcctcgcccaggcgccgggggccaagctcgacgtcatggagctcgacctctcgtc

SEQ ID NO: 6066 - DNA, 303 bp, Zea mays
cttctggaccttcgaccgcttcaactcgcagctctcctgggatccacagatcagccaggccgccggccgtcgggacccctacgacgacctcatcgcccgccactctggctcgccgccgtcttcctgaacacccgttccgatctttgcccagaaggtctacttgggcatcaataagaaactctttcccctcaaactgattgtggttccatcctcttctgtctggaaaatgttgtcaccaaactaccctatttcctgttccagtttggcatggaagtataagttgtgtacttctattctcaagtt

SEQ ID NO: 6067 - DNA, 234 bp, Zea mays
ctctctcgcatccgcaccctctcgagctctactccatcccctcgatctcgaagcgcacagccagcagtcaggcggccatggacgccagcgcagccggagccggcgggaaggcgaagaagggcgcggccgggcgcaaggccggcgggccgaggaagaagtcggtgacgaggtccgtcaaggccgggctgcagttccccgtcggccgcatcgggcggtacctgaagaacggccggt

SEQ ID NO: 6068 - DNA, 297 bp, Zea mays
cattcgttccaactcctgagcactttctcctcgtccccgacaagccaatcgaagccgagatacggccatggactccaccggcaccggagcagggggtaatgggaagaagggagcggccgggcgcaaggtcggcgggccaaggaagaagtcggtgtcgaggtccgtgaaggccgggctccagttccccgtcggccgcatcgggcgctacttgaagaagggccgctacgcgcagctcgtcggcaccggcgcccgcgtctacctcgccgctgtcctcgaatacctcgccgctgaggttct

SEQ ID NO: 6069 - DNA, 291 bp, Zea mays
cacgccctcagcagcggcgacgcggacggcagccctccgtgttctccaagatcaccaggttcgaggaggagctccgcgcggtgctgccccaggaggtggaggccgcccgcctggcggtcgccgagggcaccgcccccgtggcgaaccggatcgcggacagccggtcgttcccgctgtaccgcttcgtgcgcgaggagctcggctgcgtgttcctgaccggcgagaggctcaagtctcccggcgaggagtgcaacaaggtgttcgtcggcatcagccagggcaagctcgtcg

SEQ ID NO: 6070 - DNA, 288 bp, Zea mays
cgcgttcctcctgaagttcgggtggcgctggtcgtttgccgtccccagccttatcatggcgctcgttgggttgatggtgtatgttttcctgccggttagtcctgaggccatggagattgacagtgacggcggtgagcttaactgcgagaaggacgctgtgaaggagcctctcttggaaccaggccaagaagtgaaacatagtgcagtggggttcttagaggcatggaggattcctggggtcgcgccgtttgctctgtgcctcttcttctccaaactggtcgcgtatac

SEQ ID NO: 6071 - DNA, 289 bp, Zea mays
ccgcgctccccctcagtcctcagttcctcacctagcggtacgctgcgcgcgggagacgtagatggcggcttcggaggcggcagccgcggcggcaacaccggtgacgccgacagaggggacggtgatcgcgatccacagcctggaggagtggagcatccagatcgaggaggccaacagcgccaagaagctggtggtgattgacttcactgcaacatggtgtcctccgtgccgcgccatggctccaatttttgctgatatggccaagaagtccccaaatgttgttttcctg

SEQ ID NO: 6072 - DNA, 289 bp, Zea mays
cccgcgctcccgtttccgccgatccgagcgcgcagatcgcggaagcccagcggctcagagtccatggggagggagctcgcggcggctgaggaaggcgttcaccaccgtcgcggatttcattgaggaagagatggggctctcctttgggaagctgttcagccgcctcttcgccaagaaggagatgaggattctcatggtcgggctcgatgccgccggtaagaccaccatcctctataagctcaagctcggcgagatcgtcaccaccatccccaccattggattcaatgtt

SEQ ID NO: 6073 - DNA, 289 bp, Zea mays
cgtgtcttcatcatggacaactgtgaggagctgatcccagagtggctgagctttgtcaagggtattgttgactctgaggatcttcccctcaacatctctcgtgagactctccagcagaacaagatcctcaaggtcatccgcaagaatcttgtcaagaagtgcgttgagctgttttttgagattgcggagaacaaggaggactacaacaagttctatgaggccttctccaagaacctcaagcttggcatccacgaggactccacgaacaggaccaagattgctgagctcc

SEQ ID NO: 6074 - DNA, 289 bp, Zea mays
cagccgatcctgagcacggccaactccgtgctgtccatcctggccgccgactaccccgtggagcgcaacacgtgctacctctccgacgactccgggatgctgctcacctacgacgccatggcggaggccgccaagttcgccaccgtctgggtgcccttctgccgcaagcacggcatcgagccgcgcggcccagagagctacttcgacctcaagtcccacccttacatgggccgctcccaggaggacttcgtcaacgaccgccgccgcgtgcgcaaggactacgacgagt

SEQ ID NO: 6075 - DNA, 288 bp, Zea mays
ctggcgctgtgggtcgcggccatggcggcgctgttcgcgtggcggttcgtgcagtaccggcggtcggcggcgttccgggtgatggggtactgcctccccacggccaagggcgccgccgagacgctcaagctcaacatggcgctcgtgctcctccccgtgtgccgcaacacgctgacgtggctccgctccacctgggcacgcttcttcgtccccttcgacgacagcatcgccttccacaagatcatcgcgacggcgatcgcgctgggcatctgcctgcacgccgggaac

SEQ ID NO: 6076 - DNA, 283 bp, Zea mays
attggcgggagcattctagcatctcttgggtcgttccagcagatgtggttctccaaagcagagtatgaagagcatggggtttcctatattcagagaaagtgcccttgaagcaggggaaggaatatgtacaaccaatattatgctttacgagccttattgttgccaaagggttccttgtgtacaacagcctggtgccttgccatgttggccaatgaatactcgagactcttttcaagtgacgtttgttgtcttcatggctagttaattttaggtgatgtaaggt

SEQ ID NO: 6077 - DNA, 281 bp, Zea mays
gccggctgcgcgccgacgaggtcccggggatcgtcgacgacttcaggcgcgccgcgcgcaacgcgaccgaggccgggttcgacggcgtggagatccacggagcgcacgggttcctcctggagcagttcatgaaggacggcgccaacgaccgcgccgacgagtacggcggcagcgtcgagaaccggtgccgcttcgtggtcgaggtcgtggacgctctcgtccgtgaaatcggcgcgagcgggttggcatcaggctctccacgttcgcggactacttgaact

SEQ ID NO: 6078 - DNA, 248 bp, Zea mays
ggccggagaacgtgacggcggacgacttcttctccaacgcgctatcgagcccgggcagcacgggcaacgcgctggggtcggcggtgacgcggacggacgtgctgacgctgccggggctcaacacgctgggcgtgtcggtgtcgctcatcgactacgcgccgtggggcgtgaacccgccgcacgtgcacccgcgcgccatcgaggtcatcttcgtcctccagggctcgctcgacgtctgcttcgtcgat

SEQ ID NO: 6079 - DNA, 273 bp, Zea mays
cgcaaaggccgtcgagcccaggaagaagggcaacgtcaagtatgcctccatatgtgccatcctggcctccatggcctctgtcatccttggctatgacattggggtgatgagtggagcggccatgtacatcaagaaggacctgaatatcacggacgtgcagctggagatcctgatcgggatcctcagtctctactcgctgttcggatccttcgctggcgcgcggacgtccgacaggatcgggcgccgcttgaccgtcgtgttcgccgctgtcat

SEQ ID NO: 6080 - DNA, 272 bp, Zea mays
aaatgttcctgataatgagccagttaagccaccggctttagacaacactccttttacatttgttgaagacctgaaaaccttggaggtgctagccacaaagctgaaggatgcaactgagtttgctgtcgatttggaacacaaccattataggtcgtttcagggtttgacatgcttgatgcagatttcaacaagaacagaggactttattgttgacactcttaagcttcgtaaatatcttggtgattatctaagagagtttttcagagatccaa

SEQ ID NO: 6081 - DNA, 270 bp, Zea mays
cgacgacggaaacagtagtgctgccagtagagctctcagaactcgggaaaaaaatgtcagaggccgccgtgcgtgtgatcggcctatggcgagcccgttcgtgatccgcgtcctgatcgccctgaagctgaagggcgtcgagttcgagttcgtggaggaggtggtgggcaggaagagcgagctgctgctgaggtcgaacccggtgcacaagaagatccccgtcctgctccaccacggcaagcccatctccgagtctctgatcatcgtcca

SEQ ID NO: 6082 - DNA, 271 bp, Zea mays
ccgcaggccggcgccggcgccggcgctgcacgaggccgaggtcgccgccatccgcacggagatcgtcaacttccacggcgtcatggtgctgctcctcaactacagcagcatcaactacataggcctggccaagatcctcaagaagtacgacaagcgcaccggcgcgatgctgcggcttgccgtgatggagtcggtgctgcagcagcccttcttcaagacggagacggtgtcgcatctggtgcgggagtgcgagtccttgatggaggccgtg

SEQ ID NO: 6083 - DNA, 270 bp, Zea mays
gcaaagcttgtggttatggttctcaagtactcagtggagataacaccaaataaagccagtatactttccaagatcctatctgttacagtgaggtccattcagaaagatgctgaggaaaagaaagcttcatttaatcctcgaccatacttccgattgtttataaattggctctatgatcttactactaccgatggtcaccatgatagttctaattttcaggttttgactgcatttgcaaatgcattccacatgctacaacccttgagagtt

SEQ ID NO: 6084 - DNA, 335 bp, Zea mays
  unsure (1)..(335): unsure at all n locations
tgcggcggcgaagatagcgccgtcgatgctctcgtcggactttgccaacctcgcttcggaggctgagcgcatggtccgcctaggcgccgactggctacatatggacatcatggatgggcacttcgttcctaacctgactattggggctccggtgatccagagcttgaggaaacataccaaagcatatttggactgccatcttatggtcacaaagccttcagattacgtagaaccatttggacaggctggcgcttctggattcacattccatatagaagttgctagagacaactggcaagatctcatccanagcattagatcaaagggtatgcggc

SEQ ID NO: 6085 - DNA, 334 bp, Zea mays
tgttcctcctctgcaccccccatcctcggacatcctcgcctgcagcagaccctcctctggtgcgcgtgcgccaccggcgagatgtcgaagaaaatcgtggtgaagctgcacctgcaggacaacaaggacaagcagaaggccatgaaggctgtctcggcgctcaccggcatcgacgagatatccgcggacatggcgtcgcacaagatgacggtggtcggcatggtggaccccgtgagcgtggtgagcaagctgcgcaaggcgtcgtggtcggcgaccatcgagtccgtcggcccggccaaggagccggagaagaaggacggggaggcagccaaga

SEQ ID NO: 6086 - DNA, 328 bp, Zea mays
  unsure (1)..(328): unsure at all n locations
ctgacatcgagaccggctgcccgaccccggtccggcgatccctctgcacccctttctttgcgctgccagccccaatctctcgcatccctgtcaaccatggcggcgtcacaggcggaggcgcggtgcgcgcgctgtcccagaaggagcaggacatacagatgatgctcgcggccgacgtccacctcggcaccaagaactgcgatttccagatggagcggtatgtctttaagcgtcgcaccgacggcatctacatcatcaacctgggcaagacatgggataagctcagctcgcggcganggttattgttgccattgagaagnacaagaca

SEQ ID NO: 6087 - DNA, 327 bp, Zea mays
  unsure (1)..(327): unsure at all n locations
gaagtttgcagctggcaccgaggcgattgccaagaagctagctgagcttacaaccacgaagggtgtcactaccatcatcggcggtggcgactctgtcgctgctgtcgagaaggctgggctggccgacaagatgagccacatttcgaccggcggcggtgcgagcttggaactcttggaaggcaagactctacctggtgtccttgccctcgatgacgcctagatnnnnnnnnnnnnnnnnnnnncaggttctgccagctttgcgtgtcatcttgtttcggaccttggtgtagcatgcaaggctaagtttatcctccacacatggatttc

SEQ ID NO: 6088 - DNA, 331 bp, Zea mays
cccggtcgccttcatcgtgcggaccgaagttctcaagtcaccgaggatgagatcaagcaattcgtcgccaaggaggtggttttctacaagaagatccacaaggtcttcttcaccgaatccatccccaagaacccgtcgggcaagatcctgaggaaggacttgagagccaggctcgccgccggtgttcactgaggcccgtatgcagcttcttctcggacggccaccacgctgctgcgaaaaaaaaggcgatgtaatggcggtaacactactattcatgaactggcaacagaagggacacgtattcctgtggaacacatgttgccagaaagag

SEQ ID NO: 6089 - DNA, 332 bp, Zea mays
  unsure (1)..(332): unsure at all n locations
ctggaatgagtcacagaatccgtgagagaactgatgctcttgatgctgctggcaacaccactgccgctattggaaagggatttgccattggttcagctgctcttgtgtctctggcgctttttggtgccttcgtcagcagagctggagtgaaggttgtcgatgtcctctcccccaaggttttcattggtttgattgttggagccatgcttccctattggttctctgccatgaccatgaagagtgttggaagtgccgccctaaagatggtggaggaggtccgcagacagttcaacaccattcctgngttgatggagggaactgccaagcctgac

SEQ ID NO: 6090 - DNA, 325 bp, Zea mays
ccggcgcctctgcgccaccgccaaggacgttttcctctcccagcccaacctcctggagctcgaggcccccattaagatatgcggggatgtccatggccagtattcagacctccttcgattatttgagtatggtggctatccaccagatgcaaattatctgttcctgggtgactatgttgatcgggggaaacagagcatagaaacaatatgccttctcttggcgtacaagataaagtacccagaaaacttctttcttctcaggggaaaccatgaatgtgcctcgatcaaccggatatatgggttttttgatgagtgtaagaggaga

SEQ ID NO: 6091 - DNA, 327 bp, Zea mays
  unsure (1)..(327): unsure at all n locations
tctaacatttagttgggcgccaaattgcatccaggcgaaagcttgaacatcagctatttgagcccatttctgaaggcgttaggctccaattacagcaacggtgcaaatttcgccattgctggcgctcaacgcaaccgcgagatgttccatttgcgttgcacatacaagtgcaggagttcttgtacttcagagatagatccttggaactcatcgatcaaggtctaagtggtccaattgatgcacaaggattccaaaacgctctatatatgatagacatagggcagaacgatgtatacgctcttctgtcanacttgcgctatgatcaag

SEQ ID NO: 6092 - DNA, 319 bp, Zea mays
atcatttcggaagccatacagggggttggtggaatagtggaactggcaccaggatacttgcccgtggcatacagtatggtaaggaaagccggtgggctctgcatcgccgacgaagttcaggcaggagtcgcgagaactggaagccacttctggggattcgaagggcatggtgtcatcccggacatagtcaccatggccaagggtatcgggaatggcatacccataggagctgtagtaacgacgccagagatcgctcaggtgttgacacgcagaagctacttcaatacctttggtggtaacctgtcacactgcagcgggc

SEQ ID NO: 6093 - DNA, 321 bp, Zea mays
  unsure (1)..(321): unsure at all n locations
ganagtgcttattcagtttgaggattttgccaaccataatgcttttgatcttcttgcaagatatggcaccactcaccttgtattcaatgatgatattcagggaacagcttctgtggttcttgctgggcttattgcagcacaaacattacttggtggttcattggcagatcacacttaccttttccttggtgctggagaggctgggacaggtatcgctgaacttatagctcttgagatctcacgtcagacgaaagctcctatagaggagtgccgcaagaaaatctggcttgttgattcaaaggtcaattttatgaagagggc

SEQ ID NO: 6094 - DNA, 313 bp, Zea mays
ccgctcgagtgacgctgaagaacgccatcgagctgggcctgctggaggtgctgcagaaggaggccggcggcggcaaggcggcgctggcgcccgaggaggtggtggcgcggatgcccgcggcgcccagcgaccccgccgccgccgcggccatggtggaccgcatgctccgcctgctcgcctcctacgacgtcgtccggtgccagatggaggaccgggacggccggtacgagcgccgctactccgccgcgcccgtctgcagatggctcatggtcaacgtagacggcgtgtccatggccgcgctcgcgctcatgaa

SEQ ID NO: 6095 - DNA, 320 bp, Zea mays
agcggtcgctgggcacaaggaccttctggagggcgacccgtacctgaagcagaggctgcgcatccgtgactcgtacaccacggcgctgaacgtttgccaggcctacacgctgaagcgcatcagggaccctggcttccaggtgaagccgcggccccacctgtcgaaggacatcatggacatgggcaagccggcgtcggagctcgtgaagctgaacaccaccagcgagtacgccccggggctggaggacaccctcatcctgaccatgaacggcatcgctgccggtatgcagaacacgggatgaacccagtgtgcctgtcttc

SEQ ID NO: 6096 - DNA, 321 bp, Zea mays
  unsure (1)..(321): unsure at all n locations
gtctcgtgccactttctcagtcncctctagccgccgcctaccgctcgcgctctcctcgcgttcgggaaggtcgtttcgccatggcctcggagacggagacgttcgccttccaggcggagatcaaccagctgctctcgctcatcatcaacaccttctactccaacaaggagatcttcctcagggagctcatctccaactcctccgatgccttggacaagatcaggtttgagagtttgacggacaagaccaagctggatgcacagccagagctgttcatccacattgtccacgacaaggccaacaacacgctgacaatcatcg

SEQ ID NO: 6097 - DNA, 317 bp, Zea mays
agcttgtatacgcactctgtcgcacagcgtcgcccgtcgccgctgagatcctaggaagaaatggagctctctcgcaagctcttcacggccgtcctcctcgtcatgctgctgctgctgtccgcagaggtcgggccggtggcggtggcggaggcgcggacgtgccagtcgcagagccacaggttccggggcgcctgcctccgccggtccaactgcgccaacgtctgcaggaccgaggggttccccgacggcaggtgccgcggcttccgccgccgctgcttctgcaccacgcactgccactgattcgctcgcccagcggc

SEQ ID NO: 6098 - DNA, 317 bp, Zea mays
cagaaacacctggaattgttacctgaaaagttgcagttgatctgtttcttttctcagtatttattgtattcagttatactgaatctccgagtgcaaccgtttaacctcctcagtatatttaatttcagacaatgctagctaaagctgtggctactgagtgcaaaacaacttttttcaatatttctgcctcgtcgattgtaagcaagtggcgcggtgactcggagaaactagtgaaagtgttattcgaacttgcaaggcatcatgcaccatctactattttccttgatgagattgatgctatcattagtcaacgtggt

SEQ ID NO: 6099 - DNA, 305 bp, Zea mays
agggcctcctgtatcctctcacttccctcagtcctcgtccgtctgctccctcctctctctacctagctctagctagccttcctgtagcgcggcagagatggctgcccctgcctccaccacggcggcggcggcggcagcgctgctgctgctgctcctcctgtcgctcgccgcggcggcggacatgtcgatcgtgtcctacggggagcgcacagcgaggaggcgcggcggatgtacgcggagtggatggcggcgcacggccggacctacaacgccgtcggcgaggatgagcggcggtaccaggtgtt

SEQ ID NO: 6100 - DNA, 316 bp, Zea mays
  unsure (1)..(316): unsure at all n locations
cgtttgcctcttctccctcttgccggtcncgaataaagagcagcagcgcaagaggtcggtagagcgagaagaaggcaatggcggccgagagcttccttttcacctcggagtccgtgaacgaggggcaccccgacaagctgtgcgaccaggtgtcggacgccgtgcttgacgcatgcctcgcgcaggaccccgacagcaaggtggcctgcgagacctgcaccaagaccaacatggtgatggtgttcggcgagatcacgaccaaggcgaccgtggactacgagaagatcgtgcgcgacacctgccgcgagatcgggtt

SEQ ID NO: 6101 - DNA, 305 bp, Zea mays
gtgaatacaagcttttagctgatcttgctgcatctatggatgaaggggatgttgccaaattcactgatgcaatcaaagaatttgatagcatgacacgtctggatccttggaaaaccaccctgctgctcagggcgaagaacgagctgaagataaaggaggacgatgaggacgaccttacataagtattgtagtaaaaagagatggtacgatatgttttggtttgtggctccattgcattggaggcatcgtgttccttacaaacgagcatgatgaaattaatcgctggtctggttgtacagaacgtc

SEQ ID NO: 6102 - DNA, 295 bp, Zea mays
  unsure (1)..(295): unsure at all n locations
ctccaggatgtgtacaagattggtggtattggaactgtgccagttggtcgtgtggagactggtgtcatcaagcctggtatggttgtcacctttggtccaactggcctgactactgaggtgaagtctgttgagatgcaccatgaggctcttcaggaggcacttcctggtgacaatgttggcttcaacgtgaagaacgtcgctgtgaaggatatcaagcgtggttatgtggcctccaactccaaggatgaccctgccaatgaggctgccagcttcacctcncaggtcatcatcatga

SEQ ID NO: 6103 - DNA, 314 bp, Zea mays
cgaaaatgcgacatttacagctttggtgtgttgctgttggtccttatatctggacgacgcccactccaaatgacaacctcaccaatgtcagagtttgagaaagcgagcctcatttcgtgggcaaggcatcttgctcaagttggccgcttgcttgatcttgtagaccctgcactgcaggatgttgaccgagaccaagcgctgctatgcattactgttgcactcctttgcattcagaggtcaccagctcgccgctcatcaagtgcagatgtgcttgatatgcttgctggtgatggtgagccacgcctcttccgata

SEQ ID NO: 6104 - DNA, 301 bp, Zea mays
  unsure (1)..(301): unsure at all n locations
gtgagggtggatacggtgtagtttatcgcgggcagctaatcaatggctcccctgttgctgtcaaaaagcttctcaataacctaggtcaagctgagaaggaatttagagtagaagttgaggctattggtcatgttcgacacaagaacttggtccggcttcttggttattgcgtggagggtacccaaaggatgcttgtctatgagtatgtgaacaatgganacctagaacaatggcttcatggagctatgagtcaacatggctctcttacatggggagcccgcataaagattcttcttgggac

SEQ ID NO: 6105 - DNA, 305 bp, Zea mays
gtgttcttgtggcgtacgcggacacagccccgatccgaatcgtcgtccttgcgagcctcgccgatcccccactcccctcccctcgcttcaagatgcagatctttgtgaagaccctcaccggcaagactatcaccctcgaggtggagtcttctgacaccattgacaatgtcaaggctaagatccaggacaaggagggcatccctcctgaccagcagcggcttatcttcgccggcaagcagcttgaggacggacgcacacttgctgactacaacatccagaaggagtcaaacctcgacttggtgctg

SEQ ID NO: 6106 - DNA, 306 bp, Zea mays
cagtgactgagtttgtagaagcttgcaagaaggcaacaggagcttctatcaaggtcgaatatcttgcacgtagacccggagattatgccgaagtatacagcgacccgtcgaaaatccacatggaactcaactggacagcccagtacactgatcttggccaaagcctcgcccaggcgtggaaatggcagaaagcgcacccgaacggatatggaccagcctgattcagagttcaaagattgagagagactcgtcacgcagatccaaagggtccatgtgcagtcatgtagccttcagacagttggttct

SEQ ID NO: 6107 - DNA, 301 bp, Zea mays
cacacagaagcggcggcggcggacaaaagcaggcgaaggcgagggtgcgagggaaggtgcaccagccatggtgcacgtcaacttctaccgcaactatggtaagacgttcaagaaaccaaggcgtccttatgagaaggagcgtcttgatgctgaactgaagctggtcggtgagtatgggctgaggtgcaagcgtgagctttggagggtccagtatgcactgagcaggatccgtaatgctgcaaggcacttgctcacccttgacgagaagaacccccgtcgtatctttgagggtgaggcgctt

SEQ ID NO: 6108 - DNA, 302 bp, Zea mays
aagaaacataatgtacctgttccagtttcaaagaaatcaatatacagccgagaccgagacttgtggcaccttagccatgagggtgacatcctggaggacccagcaaatgagccaaaggaagatatgtatatgatgtcgattgctccagaaaatgcgccctcgaaacctgagtatttggagattggtatcattgctggtgttcctgtttcaatcaatggccgagacctctcaccagcatccctcctcgcggagctcaatgaaatcggtggaaagcatgggattgggcgtatcgacatggtgga

SEQ ID NO: 6109 - DNA, 304 bp, Zea mays
gcggggatcagctccaagaagagggcagagcaccaaggaccttcggcgcccgttcaggatccacatcttcccgagcgagttcttggttgacctcttcatcttcggaccacctccaaggctcatggtgtagcttgacactctgacccatgaagtgttcatgtctgatctcgacattcagatcccaactgccttcgatgccctcgctgaggccaatgctggggactctggtgcggcacagggtcaaaggactacgtacacgtacgcatccagcagcgtaatggtcgcaagaggcctgacaacgtcc

SEQ ID NO: 6110 - DNA, 305 bp, Zea mays
gcagccaataaggtaaggggtgacgaaaatggctccaacgaccgccaccaaggacgacagtggctacggcgacgagcgccggcgcgagctgcaggcgttcgacgacacgaagctgggggtgaaaggtctggtggactccggcgtcaagtccatcccgtccatcttccaccacccgccggaagccctgagcgacataatttctccggcgcctctgccgtcgtcgccaccctccggcgccgccatcccggtggtggacctctcggtgacgcggcgcgaggacctagtcgagcaggtgaggcacgcgg

SEQ ID NO: 6111 - DNA, 304 bp, Zea mays
agcgaagggaacatcatacagctcaccatccatgctttctgtccggtgctcggaccgacaaagcgcttggctacaaaagttggaccgtggggtgggagcggcgggtctccggtggacatcacggcagagcctcagcgtctgaagagcatcaccgttgctactggcatcgccgtgacctcgatcgccttctcctacgtcgactccgccggccaaacccaatctgctggtcgctggggcggttccggtggagaaactgagccggtgatccagctcggcgactccgaggtgctcacggagctgtccg

SEQ ID NO: 6112 - DNA, 303 bp, Zea mays
caaatgaccatctggaacactgtttctgctaatgccagccttttcatcttctgcttgtatgcagctgtccggtcttagatgcatttgaaatttctctatgcactgaacactacttatgttattccattattgtaataacaggagcatgccaacatctgctgctcttgatgttgttgcaaagaatttgaaccttaagttctttgaggtgcctactggatggaagtttttttgggaatttgatggatgctggaatgtgctcaatctgtggtgaagaaagctttggcactgggtctgaccacattc

SEQ ID NO: 6113 - DNA, 310 bp, Zea mays
tgttgagaaggacaatgagggcgcggagaatgaagaagaagaaaaggaacctgaggataaggagatgactttggaggaatatgaaaaggtactggaggaaaaacgaaaagctttactctcccttaaggctgaggagagaaaagttgaaattgacaaggagctacaggccatgcaacaactgtcagttaaaaaggatggcgatgaagtgtttatcaagctgggctctgacaaggacttgaaaaagaaagaaagtgctgaaagagaagaacggggcaagaagtccctgagcatcaacgagttcttgaagcca

SEQ ID NO: 6114 - DNA, 298 bp, Zea mays
atcaacccggccgtgaccttcggcctgttcctggccaggaaggtgtccctcgtccgcgcgctgctctacatcgtggcgcagtgcctgggcgccatctgcggcgtgggcctcgtcaagggcttccagagcgcctactacgtgcgctacggcggcggcgccaacgagctcagcgacggctactccaagggcaccggcctcgccgccgagatcatcggcacgttcgtgctcgtctacaccgtattctccgccaccgaccccaagcgcagtgcccgtgactcccacgttccggtgctagctc

SEQ ID NO: 6115 - DNA, 177 bp, Zea mays
cacgctccaggcgcttcaccgcgccgccaccgccaccgcgaggatgccgttcaagaggttcgtggagatcgggcgcgtggccctggtgaactacgggaaggactatggccgtctcgtcgtcatcgtagatgtggctgggccagaacacggcgcttgttgatgccccggatatggtca

SEQ ID NO: 6116 - DNA, 288 bp, Zea mays
ctcctatccactgcggcctggacgcgtgcgagagacttgaccaagcagcagcagcagggatggcgcctctgaagctgtacgggatgccgctgtcccccaacgtggtgcgcgtggccaccgtgctcaacgagaagggcctcgacttcgagatcgtccccgtcgacctcaccaccggcgcccacaagcagcccgacttcctcgccctcaaccctttcggccagatcccggctctcgtcgacggagacgaatcctcttcgagtcccgtgcgatcaaccggtacatcgccag

SEQ ID NO: 6117 - DNA, 297 bp, Zea mays
cgtcaccatggatgatgcgttccgcgtcctccaggacggcgcggtcgtcgtcgccggcgacgcatcgccgctgtgggcccctccgctgatgtcctcgccgccttcccctgcgccgtgcataccctcgacctgggtggccgcattgtccttccagtgctcgtaaacacacacgtgcacacatcgcagcagctggcgcgagggatcgccgacgacgttgatctgatgacgtggctgcacgggaggatctggccctatgagtcacacatgacggaggaagactcctatgcctccaccctc

SEQ ID NO: 6118 - DNA, 298 bp, Zea mays
cggctcgagagcgaagcaggttgctgcacaggaagctgagcgtgctaagttcattgtcgagaaagctgaacaagataagagaagtgcaattatcagggctcagggagaggctaagagtgcggagctgattggtcaagccatagcgaacaaccctgccttccttgccctgaggcagattgaagctgcaagggagatctcccacaccatttcggcctcagccaacaaggtgttcctggactccaacgacctgctgctcaacctccagcagctgaatgtatcgagcaagcagaagaaatga

SEQ ID NO: 6119 - DNA, 286 bp, Zea mays
gttctagatcgcgagcagcccgatggctcttacaaggtcaagtttggcgttctcttcaacgacgatcggtgtgcaaatatctttgaagcactagttggcaccttgagggccgccaagaagaggaagatcttgacctacgaaggcgagctgcttctgcaaggtgtccatgacaacgtggagataaccctgttgcccccacctgcagttgctgccgcttgaagcgaagagcaacaccaagttctcgattccatacaactcgtatgcttgtattctgccgtgcctatat

SEQ ID NO: 6120 - DNA, 286 bp, Zea mays
gcctgctcgcctccgccgccggagcgagctccccatcttcatccgtcaaccatggcgacccagatcagcaagaagaagaagttcgtcagcgacggtgttttctacgccgagctcaatgagatgctgacgcgggagctggcggaggatggctactctggcgtggaggtgcgcgtcacgccgatgcgcacggagatcatcatccgcgccacgcgcacgcagaacgtgctcggcgagaagggctcgcagatcagggagcttacctccgtcgtccagaagatgttcaact

SEQ ID NO: 6121 - DNA, 284 bp, Zea mays
tacagctgcaaccgtggtggctactgtaatttcatgcatgtgaagcaaattggcagggatctcaggaggaagctgtatgggcgttctgcttccaggaggtaccatgggagaagccgaagccgaagcccgccaccacaaaggaggggccaccgtgaccgtgatgactaccaccaccgtgaccgtgatgactaccgtggtggcggcggtggtggaaggggaagaggtagcaggtatgacaggtacgatgacggagcaggcagaggtggcaggcatggcaggtatga

SEQ ID NO: 6122 - DNA, 288 bp, Zea mays
ctcggcgccgaggtcgtgggcacgttcgtgctcgtgtacaccgtcgtctccgccaccgacgccaagcgcaccgccagggactcccacgtccccgcgctggccccgctgcccatcggcttcgccgtattcctggtgcacctcgccaccatccccatcaccggcaccggcatcaaccccgccaggagcctcggcgccgccatcatctacgacaacccgcacgggtggcacggccactggatcttctgggtgggcccgttcgccggagcggcgcttgcggcggtgtaccac

SEQ ID NO: 6123 - DNA, 287 bp, Zea mays
tgggaggtcgatggaaagtgggtcacccaaggtcctgttgatgtggacattggtgccaatccatccgtcgagggtggtgacgacgaaagcgttgatgacacagctgtgaaggtggttgatattgttgacacattccgtctacaggagcaacctccttttgacaagaaatcatttgtgtcttacatcgcaaaatacatcaagaatctcactgctgtgttggagccagagatagcggatgagttcaaaaagggtgtcgagggtgcaacaagtttctccttagcaagctg

SEQ ID NO: 6124 - DNA, 283 bp, Zea mays
gcgctcgaacgaactccacacgaaattatccgcgtaaagttggggagcagcgaacccgtagcgcgcgccccggatccctccacggggggcaatggcctcgtcggcgttcctgcccgagctgggcacgcaggtggtggtgcccgtcgcggccgtggtaggcatcgcgttcgcggtgctgcagtgggtgctggtctccaaggtgaagctctcccccgagccgcgccgcggagacggctccgccgggaagagcggcgccggcgccggcgccagcgagtacctcatc

SEQ ID NO: 6125 - DNA, 288 bp, Zea mays
  unsure (1)..(288): unsure at all n locations
ccgaatggacagccgcctcgccatcgccgcgctcctcctgctcgcctccgcctcctccgctgccgctgccgcggacggcgggaaggtggccgtggcgctgtactacgagtcgctgtgcccctactcggcgcgcttcgtggtgaaccacctcgccaaggtcttcgcggacggcctccgcgangtcgtggacctcacgctcgtcccctacggcaacgcccggatccaccccggcggagagatctcgtgccagcatggtccgtacgagtgtctgctcaacaccgtggaagc

SEQ ID NO: 6126 - DNA, 308 bp, Zea mays
actagttctagatcgcgatctacatttcttctctctctgctcctccgcctccgcctgatccatccaagacagggatcgccatgtcggactcggaggagcaccacttcgaatcgaaggccgacgctggggcgtccaagacctacccgcagcaggctggcaccgtccgtaagaacggcttcatcgtcatcaagaaccgtccctgcaaggttgtggaggtttctacctccaagactggtaagcatggccacgccaaatgccactttgtcgccatagacatattcaatgggaaaaagcttgaagatattgtt

SEQ ID NO: 6127 - DNA, 307 bp, Zea mays
caggcctgccagccagccgcctttcgaaaccgagcaccagggagcagacgcggtctctggaacccaggttccagcgagcaaaccatctaaccaggcgctgagaattctgtgcggaggaggcggatggcaatggtggcggccgcggaggggagcgggcgcagggacgccgaggcggagctcaacctgccgccaaggttccggttccacccaaccgatgaggagctcgtggtgtactatctctgcaggaaggtagcgcggcagcaggtgcccgtgcccatcatcgcggaagtggatctttacaagttcg

SEQ ID NO: 6128 - DNA, 304 bp, Zea mays
gacaaatttatgagctttattgctggccataagccagagaaatgtaaacttattgtttcttcacataattatgaatatactccatcatgtgaggaaattacaaatcttgtcgctagtatacaagcagttggagctgatatagtgaaagttgcaacaaccgccaacgacattgtcgatgtatcacggatgttccaagtgatggtacactgccaagtgcctatgattggactcgtaatgagtgacaaaggtttaatgtcaagagtgttagcgcccaagtttggtggatatcttacatttgggatac

SEQ ID NO: 6129 - DNA, 309 bp, Zea mays
gtacaatatgtgaacaggtaccctcagactaaaatcggcattgcagcagaccggaataatatgaagcttgatacagagccgaagtgttgagcaggaaagcttcggcgtaacagcagagagtggaaccgacttaaagatgaaaaggctattcagacctcaatagattactatagagttattgtcagatgtaaagggcatgaatgtaattttgtaagggctgtgtcgcgtgtctataaataggtgaacagtatccccgtactgttcacgctgacttggcattcgctttttgcgtcacgcttgtacaatcat

SEQ ID NO: 6130 - DNA, 310 bp, Zea mays
gcgagacccgaccccgccgtcgcgatgaggccggcgctgctcaagtccacggccgagctcctccgccgcagccgcggctacgcctcctcggccaacccggagcggaaggtggccatcctgggcgctgcgggcggcatcgggcagccgctctccctcctcatgaagctgaacccgctcgtctcctccctctccctctatgatatcgccgggacccccggcgtcgcggccgacgtctcccacatcaactcgcccgccctggtgaaggggttcatgggggacgaccagctcggggaggcgctcgagggctccg

SEQ ID NO: 6131 - DNA, 301 bp, Zea mays
agaaatagagcctgctctcaagagacaacttataatatccactgttgtgatgaccattggcattgcgctcatgttggcttggtcttccatacaccttcaccatttataactttggagcccagaagacagtgcaaagctggcaattgttcttatgtgtggcggttggtctctgggctggcttagtcattggttttattactgagtactacacaagcaatgcctacagccctgtataagatgttgctgattcctgcagaactggagctgccactaatgtcattttagggcttgctctgggtta

SEQ ID NO: 6132 - DNA, 304 bp, Zea mays
ccggagctcgggttcactaaagaagtgattcctaagcatgtgtctgttaaggaggctgttcttccattcgagaaattccaagggtgcgacattcttcttggaccagagatgcgacactggagaggtgatgggcatcgactatgagttctccggtgcctttgcaaaagcacagattgccgctgggcagaagctccccttaagtggcactgtgttccttagcctgaacgatttgacgaaacgacatcttgctgagattgggagtggattccgggagcttggcttcagcatcattgccacatctgga

SEQ ID NO: 6133 - DNA, 307 bp, Zea mays
agtcggatctgagacgagacgagtcccctcgcgtcacccaaccggaacgaacaagttaccatctcatcccaaccccgcctcgaccggatatcgtcggactcggatccgcccgaccaccccgcgccgccgcagatcaaagaagatggcagctctcgacaccttcctcttcacctcggagtctgtgaacgagggacaccctgacaagctctgcgaccaggtctcagatgccgttcttgacgcttgccatgctgaggaccctgacagcaacgttgcttgtgagacctgcaccaagaccaacatggtcatg

SEQ ID NO: 6134 - DNA, 275 bp, Zea mays
cgcacaaggtcctgttcatctccgacaacacactgctcgaaaacccatggactgccggaatggtccacttcaacgccgcagtcgagaaggcatggcaggtcaagttcgccaaggccatggttaagatgggcaaggtccaggtgctcaccggcgacgatggagagatcagggagaagtgcttcgccgtcaacccacactactagtcgtcaagtttagctaattaccccgcgaattatgtttgtttatacgttccatacatcgacattatgtagagt

SEQ ID NO: 6135 - DNA, 293 bp, Zea mays
ggcgacgccgctggccaacgccggcacgtgacggccggggtggcagagggcgcgtccgtgatccaggccgcgttggaccggatggacgacgggtactgccggtcagcgctggactacctggagctgcagccggacctgtcggcgctggtccgcggggcgcacacgttccggtgccccaacctggggctcaccagctgggtgcgcctgcccatccacgacgcggacttcgggtgggggcggcccgtgttcatgggcaccggcggcatcgcctacgaggggctcgcgttcgtgct

SEQ ID NO: 6136 - DNA, 300 bp, Zea mays
cctacctctccagcgtcctcccgtctccgtcgtctcgtctccgctcctcacatcgccatccatgggcaatatcaagatgcggaatcaacggtttctgaaggatcggcaggctcgtggccagggtcgccctgcatagcgaggatgtcgagctcgtcggcgtcaacgaccccttcatcgccacggattacgtgacgtacatgttcaagtacgacaccgtgcacgcgccaatggtagcacagcgacatcgccctcaaggactccaagacgcttctcttcggcgataagccggtcaccgtcttt

SEQ ID NO: 6137 - DNA, 305 bp, Zea mays
cgatcatcgacatcttctcccacgccagctccgacatggtcgacatccatgctgccgtgctcttccaggccctccactgtgagaagaactaccttcgcattcaggtacagtgtatgtacaggatacatgaaaacatctaacatggacatactaaagcaaaaaacaaaaatgttcttcatataaaacggatgacgaccattgatggctgctattatattggacgcctgtgtgtgtaggatgatactctgattgggaacacatcatcagtggacatcgcgaccaaggagaacatggagtctctgatc

SEQ ID NO: 6138 - DNA, 309 bp, Zea mays
ctcggcaccaagctcgccgtgctattccccgccgtgccgctcgccatcgccgcccagtgcgcgcacttcggccaggtgtgggtgttttcgctcagcctactcggcctcatccccctcgccgagcgtgtcagcttcctcaccgagcagatcgcgatatacaccggccccaccgtgggcggcctcctcaacgcgacgtgcggcaacgccacggagctcatcatcgcgctcttcgcgctcatggagggccagatcgaggtcgtcaagtgctccctcctcggctccgtcctctccaacctgctgctcgtgctc

SEQ ID NO: 6139 - DNA, 307 bp, Zea mays
  unsure (1)..(307): unsure at all n locations
tcncaacaccacctcgcctgcgatcttcgtagcctccgtcgcgtcgagcatcgatcatgtcggcctactgcggaaagtacaaggatgagctcatcaagaatgctgcctacattggcacccccggcaagggtatccttgctgctgatgagtccactggcaccattggcaagcgcctttccagcatcaatgtcgagaacgttgaggagaaccgccgtgccctccgtgagctcctattctgctgccctggtgctctccagtacatcagcggtgtgatcctcttcgaggagaccctgtaccagaagaccaa

SEQ ID NO: 6140 - DNA, 309 bp, Zea mays
agactatggagcaccaagctgaatgctaatcttgtctgttacaaaggacacaactacccggtttgggatgtccaattcagtccagttggccattactttgctagtgcttcgcacgacaggactgctagaatttggtcaatggataagatccagcctttgcgaataatggctgggcatctttctgatgttgattgtgtccagtggcatgtaaactgtaactacattgccactggctctagcgacaaaactgtaaggctatgggatgttcagacgggtgaatgcatacggatgtttattggtcataggagt

SEQ ID NO: 6141 - DNA, 310 bp, Zea mays
cacgagcaaccgataatccgccggcgctgagatgttggtttatcaagacctcctatctggcgacgagctcctgtcggattcattcacctacaaggagctcgagaacggcgtcctgtgggaggtcgagggaaagtgggtcacccaaggtcctgttgatgtagacattggtgccaatccatccgccgagggtggtgaggatgaaagcgttgatgacacagccgtgaaggtggttgatattgttgacacattccgtctacaggagcaacctccttttgacaagagatcatttgtctcttacataaaaaaatac

SEQ ID NO: 6142 - DNA, 300 bp, Zea mays
cctccccggagattcctgctcctcccgactcccaagggttatcctattcactctgcctgctgccaaggccaactaggatatcaactaggaggagttgaggaggaatggctgttggcggaactcaaccggtcctcaggaagtacctaggtgccctcaaggacacaacgactgtgagcctggcaaaagtgaacagtgattataaggaattggatattgcaattgtcaaggccacaaaccatgttgagcgtccatcaaaggagaagtacataagagagattttccattccatttctgctgcta

SEQ ID NO: 6143 - DNA, 292 bp, Zea mays
caaggatgtcaatgctgcagtcgcaaccatcaagaccaagagaactgtccagtttgtggactggtgccccaccggattcaagtgtggcatcaactaccagccaccgtctgttgtccctggaggcgacctggcaaaggtccagcgtgccgtgtgtatgatcagcaacaacactgccgttgctgaggtgttctcgcgcatcgatcacaagttcgaccttatgtacgccaagcgggcgttcgttcactggtacgtcggtgagggtatggaagagggtgagttctccgaggcccgt

SEQ ID NO: 6144 - DNA, 301 bp, Zea mays
gacgcggcacgcgacgcggagggcgagcagcagcggcggcgcggcgacatcgcgaggccagggccagaagcaacagccgaggaggggcagcagaggcgaccgccgagagtcccggccaccatggacaccttcttcctatcgcacggctcgcccacgctctccatcgacgacagtatcccggcgcggcacttcttcaagtcatgggtgccggcgaaggtcgcgggcgaccagcccccgcgcgccatcctcgtcgtctcgggacactgggagacggccacgccggcggtcaacgtcatccgcg

SEQ ID NO: 6145 - DNA, 297 bp, Zea mays
ctcgatcgggagacgcagaggtctcgcggcttcggcttcgtcaccttctccacggatgaggcgatgcggaacgccatcgatggcatgaacggcaatgagctggacggccgcaacatcaccgtcaacgaggcccagtcccgctgcggccgtggaggcggcggctgtgggtacggtggtggccgtggatgctgcggctacggcggtggcgggcgccgtgatggcggtggctgctacggcggtggcggctgctacggtggcggcggctactacggtggtggttgcggctgctacggcggt

SEQ ID NO: 6146 - DNA, 309 bp, Zea mays
agcgtgcgtggctgtgcaggaggcctacctggtgacgtcaaggaagtacagcccggtgcccaggaaccagctgctgagcccgctgatcgtgcacgacggccgcctcgtgcagcgcccgacgccgctcgtcgcgctcgtcaccttcctctggatgccgttcggcttcgcgctggcgctcatgcgcgtgtacatcaacctgccgctgcccgagcgcatcgtctactacacctacaagctcatgggcatcaggctcgtcgtcaagggcaccccgccgccgccgcccaagaagggccacccgggcgtcctctt

SEQ ID NO: 6147 - DNA, 303 bp, Zea mays
agctcatcaacgccacctactacgtgcgcgtgccgccatgcctcctcctcctccgcacgtcgtcggcctcgtcgccgccgcccaccctcgccgtcgcgccgctcaagctcgtcctgcgcaccatcgtcatcatgttcacaacgctcgtcgccatgctggtgcccttcttcaacgccgtgctgggcctcatcggcgcgctcggcttctggccgctctccgtctacttccccgtcagcatgcacatggcaaggctcaacatccgacgcggagagatccgctggtggatgctgcaggccatgagct

SEQ ID NO: 6148 - DNA, 303 bp, Zea mays
ctccgggctccgggcgcctgcgccctggatttcgaaccgagagagaaagctgctgcccaccgtttcccaagtcccatcgccgcccaagaaccggagccacgccgcagatccgccaaaatcacacctcctagcccgtcctccgtcccaatctcttctcgggccagggaggcggcgggacttggtgcctgcatccgagccctagacatggatcaacctgaggaaaaccctgaattcccaagctgtgatgcctactttgaagctatccagtccaagaagaagttgccactgactttgcaagaatca

SEQ ID NO: 6149 - DNA, 305 bp, Zea mays
  unsure (1)..(305): unsure at all n locations
tcgaagcctagagcggacagtccttggtcaagtttgtcggtccacagcttcatgacaccaacgccttggaagctctggcggatccaggccttcgtggcctatatccaccgaaagcattgtcccgtttcgccgatgtcctctcccgctgcgtccagtcggatccagaactccggccatccatgtcagaggtggtgcagttgcttctccagtgcgtccagcgcacaaccagcaacaggatgctgggtgggcaccgcaccgtctcgcagcgaagancgattctgattggtgatgctctgtttctgcct

SEQ ID NO: 6150 - DNA, 293 bp, Zea mays
ggctgtcgagaggcacggggccgagatgctcgtcgtcggcagccatggctacggagccattaaaagggctgttcttggaagtgtgagcgactactgtgcccatcacgcgcactgcaccgtgatgatagtaaagaagcccaagcagcacaagcactgatcaatgccgactgatcactacgtgtactgcaaataatatgtactactgcaaagttatgtgtgcgtccgtccgtttgtgaataattgggtcatcaaccatcacatcttcggttgcttctacaagtatccgatccaat

SEQ ID NO: 6151 - DNA, 297 bp, Zea mays
cacgcggatcgaattaggctctccgagtctccggttccctcctctcggcggcggctcaggtccctctccatctccggcgtggcgcttggcgtctgacctcaacaagcaagaaagcaaatggcaggcggcagggttgcgcatgccaccctcaagggcccgagtgtggtgaaggagatcttcattggactgaccctgggtctgatcgcgggaggcatgtggaagatgcaccactggaacgagcagaggaagactaggtccttctatgacatgcttgacaagggccagatcagcgttgtc

SEQ ID NO: 6152 - DNA, 301 bp, Zea mays
cccgtcagcccctctcgtttttcatccgccttcgcctccaaccgcgtgcgctccacgcctcctccaggaaagcgagagcttctgcataagaacaacaaatcaaaagcgtgatcagctcggtgccaacaaaacctcaacaaccaagtttcatgtctagatctcgacgtccagcttccatctgcctttgatccgtttgctgaggcaaatgctgaggactctggtgctggtcctggaacgaaggattatgtgcatgtgcgcatccagcagcgcaacggcagaaagagtctgactacagtccagg

SEQ ID NO: 6153 - DNA, 299 bp, Zea mays
cagagtcatgaacctgagtttgactacctaaaaagtttggaaatagaagagaagattaacaagatcaagtggtgccaaacaaccaacaatgcactctttctcttgtctacaaatgacaaaacaatcaagtattggaaggttcaagagaaaaaggtgaaacgggtttcagtgatgaatttggacacctcccaaagttcagacaatggttcaacttcaagtccgggtaccagtagttgcagagctcttcttccaaatggtggatgcacaggaaaaatgtacagtccaaacaacaatatgtc

SEQ ID NO: 6154 - DNA, 299 bp, Zea mays
ccgtgggctccgcgctcgcggccaccgtcatgtacgacgccaacgtcctggccgtcctctccgaggtcctgtccgccgtcttctgcgaggtcatgaacggcaagcccgagtacaccgaccatctcacccacaagctcaagcaccacccggggtccatcgaggccgcggccatcatggagcacatccttgagggcagctccttcatgaagcacgccaagaaggtcaacgagctggacccgctgctcaagcccaagcaggacaggtacgcgctccgcacgtcgccgcagtggctcggcccc

SEQ ID NO: 6155 - DNA, 282 bp, Zea mays
tatggccagaaccttactgttcagaatttcttcaacgcatcagttcctgtttctgtgcaagcaaccttcccttataaattcgttgtgagcaagttcttgcagcctggagcttatgatctggttggttacatagtgtatgagatcgaccagcacccttaccagaatgtattctacaatggcactattgaggtcgttgaggctggaggcttactcagtgttgagtctgtgttcctcatcacccttggaatcgctcttcttggtctctttggattatgggcatat

SEQ ID NO: 6156 - DNA, 376 bp, Zea mays
  unsure (1)..(376): unsure at all n locations
gtatcgcgtccgcctcagcacgccgcaagagaggtaagttcaggagacatcttcgagaagctgaaatggctcctaaagctgctcctgccaagaagggtgatgccaagacccaggccttgaaggttgccaaggctgtgaagtctggggcagccaagaagaagaccaagaagatccgcacgtctgtgacatttcaccgccccacgaccctgaagaaggctagggaccccaagtacccacgaatcagcactaccggaaggaacaagcttgatcagtaccaaattctcaagtacgcccttaccacagaatcagcgatgaagaagattgaagataacaacactctggtcttcattgntgacctcaaggcagacaagaagaa

SEQ ID NO: 6157 - DNA, 385 bp, Zea mays
cgcatcagcaagctcagcgccccaggcctactgccaccgcgccgaacgccatggccgagccggcagagcaccgtccagcggaggaggaggacgccgcggcggccgtcgaggatgaggacaccggcgctcaggtcgcgcccatcgtgaagctggaggaagtcgccgttaccaccggagaggaggacgaggacgcgctcctggagatgaaggcgaactgctaccggttcgacaaggaggggaaccagtggacagagcgcggcacatgcactgtgaagctgctcaagcacaaagacaccgctcaagtccgcctcgtcatgcgtcatgcgaagacgcttaagatctgcgccaaccatctcgtggtggctacgactaagatgctagagca

SEQ ID NO: 6158 - DNA, 375 bp, Zea mays
ggacaccacccagatccacacacacatgtgctactccaacttcaacgacatcatccactcgatcatcgacatggacgcggacgtgatcaccattgagaactcgcggtccgacgagaagctgctctccgtgttccgcgtaggcgtcaagtacggcgcgggcatcggccccggtgtctacgacatccactcccccaggatcccgtcggctgacgagatcgccgaccgcatcgacaagatgctggcggtgctggagcacaacatcctctgggtgaaccccgactgcggcctcaagacccgcaagtacacggacgtcaagctcgcgctgagcaacatggtctccgccgctaagctcatccgcacccagctcgccagcgc

SEQ ID NO: 6159 - DNA, 368 bp, Zea mays
  unsure (1)..(368): unsure at all n locations
acttgtagctcttcgaatcacgagcaatctgcaagtacgctgctcgcataaacaagccagagctgttgagggaaggagacctcgaggangcagcaatggtggatgtttggatcgatgtggaggctaaccagtacaccgctgcactgaatcccatcctcttccaggtcctcatcagtcctatgcttgggggaacaccgaccagaaagttgtggatgagaaccttgagaagctgaagaaggtgctagaggtgtacgatgcacgcctgatcaagtgcaagtaccttgctggagacttcctcagcctcgccgacctgaaccatgtgtctgtcactctctgcctgttcgctacgcgctacgcatctgtgctcg

SEQ ID NO: 6160 - DNA, 369 bp, Zea mays
  unsure (1)..(369): unsure at all n locations
tattgataagcatcagattgactatgttgctcatgatgcgctgccttatgctgatactagcggaacagcaaatgatgtctatgaatttgttanaaagattggagaattcaaggaaacaaataggacagacgggggttctacttcagatctcataatgangatcttgaaggactataaccagtatgtcatgaggaatttagcacggggctactcgatgaaagatcttggtgtgagctatgtcaaggagaaacaattgcaagttaatatgaagatcgataaactgcgggagactgtgaangcacatcccaganagttgcanacagtggcaaagactgctgggtctgatcatgnagaatggcttgctaatgc

SEQ ID NO: 6161 - DNA, 376 bp, Zea mays
  unsure (1)..(376): unsure at all n locations
ggcccaaggcggcaaggccagttcaacaagctcaacgacgtgacctccttcgacttcatcggcgaggcctacttcggcgtgcgcccctcggcgaccgagctcggcaagggcgggccgagcaaggcggccaagtggctcatctggcagctccacccgctggtcacgctcggcctccccatggtcctggaggagccgctgctccacacgttccacctcccgcctttcctcgtcaagggcgactacacggcgctgtacaagtacttctccacggtggcgaacaggcgctggacaccgccgatggcctgngcctgtcgcgcgatgtaggctgctacaacctcctcttcgcgacaacttcaacagctacggcggctcaagg

SEQ ID NO: 6162 - DNA, 378 bp, Zea mays
  unsure (1)..(378): unsure at all n locations
gtggtggagcgtagnaggtcgtgatcggctcatgtcgagcgaattgcgctcacgtctcgagaagatgcctgcagagcgcatcaangtcgcatgcgcgaaggctggcaacctcggcgactccgtcaccatctctcgcgagaagaccaaggtcaccgtcacctctgacggacgcttctccaagaggtacctgaagtacttgaccaagaagtacttgaagaagcacaacgtgcgggattggctacgcgtggttgctgccaacaaggaccgaaacgtctatgagctccgctacttcaacattgctgagaacgagggcgangaagaagattagattgcactacgcttatattntagtattgaactcagtgcgatttgatacct

SEQ ID NO: 6163 - DNA, 343 bp, Zea mays
  unsure (1)..(343): unsure at all n locations
cattactgctggatgagaccagatgacatcgactacataagcgcagtcaccgagtgtcactcttgctcagatctagcgtctgaaatggctgcatgcctggctgcagcttccatagtgttcaaggacagcaatacctactccgacaagctcgtcaaaggcgcaaaagccctgtacaagttcggaaggctgcagcgcgggcgatacagccccaatgggtctgaccaggcaatcttctacaattccaccagctactgngatgagtttgtgtggggtggtgcgtggatgtactttgccacatggaacaattcatacctcacggtcgcgacagctccangaatggcga

SEQ ID NO: 6164 - DNA, 337 bp, Zea mays
  unsure (1)..(337): unsure at all n locations
ctttatgcaagctcanacctaaaattcaagagtgggctcaatggcattcaggtggaactgcaggctactgatgcaagtgagatcagccttgatgagatcaaggatcgggctcgctaggcatcatgatcatgcatcatggactcggcctactactgtggatttgtatgccattatagacttggtgctgtgatagactgcttgatgatttgcgggtatgttgctgtgtaaaaaaggtccatggctccagaagacatgaacgtcggatcatcatgaatcttgtatctgcattatgatgatatggcagtgtgcgcgtcactatactcaatagtatcgtagt

SEQ ID NO: 6165 - DNA, 324 bp, Zea mays
agaaagcgctggaccagatacccgcgtccaccatgaacttcacccaactcctccagtccttccagaacaagagcctcaacctcgccgacctcgtctggctctcatgggctcacacgatcggcatctcccaatgcaactccttcagcgagcgcctgtacaacttcacggggcgcggcgggcccgacgacgcggacacgtcgctggacccgctgtacgccgcgaagttgcggctcaagtgcaagacgctgacggacaacacgacgatcgtggagatggatcccggcagcttccgcaccttcgacctgagctactacggcggcgtgc

SEQ ID NO: 6166 - DNA, 188 bp, Zea mays
  unsure (1)..(188): unsure at all n locations
tcaaatntggaatagatgaggatcacgtttgtggcagtgcacattgtgttttagcaccttactggggtgggaagctggggaaacacaaactgatagcgtttcaagcatcgcctcggagtggaatactatacctggagttagaagctacaggcaggagagtgcgaattcagggagaagcggtcagtgtg

SEQ ID NO: 6167 - DNA, 286 bp, Zea mays
gcgccaacgtgctaggcctcgtcaaggtcggcctgccccagcacgagcgatgctgcacactgcaggacgggctcgtggaactcgatgtcgcactgtgcctctgcaccgacatcaaggacagcgtcctcggcatcgagctccatatggcacttagcctacatctgatcctcaacgactgcggcaagatttgcgacgatgacttcagctagcccaactaattgagctgaatatgcagatagaaccagcatccgacgtatgtaccccttaatatacgatctcgcgcatc

SEQ ID NO: 6168 - DNA, 273 bp, Zea mays
  unsure (1)..(273): unsure at all n locations
atggttctagatcagttcncanaatggtatccaatcaaccgtgagacatatctcgacaggcttgcattgaggtatgatagagagggagatgcatcacagctggctcacattgatgtctttgtcagtacagtggatccattgaacgaacctccactgatcacagccaacactgtgttgtccattcttgctgtggattaccctgttgacaaagtgtcatgctatngttctgatgatggctcagctatgctgacttntgagtctctctctgaaact

SEQ ID NO: 6169 - DNA, 182 bp, Zea mays
  unsure (1)..(182): unsure at all n locations
tgtctgtgcgaagcgaccattccttcttcgctccttcgccgccgctatggttaagtactcgcaggagccgngcaacactaccagatcggccaaggccatgggaacggacctgatggtccacttcaagaacacaagggagacagcttttgcgcttcgcaagctgcctttggacaaggctaagc

SEQ ID NO: 6170 - DNA, 180 bp, Zea mays
atgctatagcatcttcttctctgaattccagtccaagggccggaataccgtcagaaggagttggagacgatgggaaaaagatggtgaagctcgcatttggaagctttcgcgactctttgagcgccgcgtcgctcaatgcctatgtggccgagttcattgccacgctgctcttcgtgttcg

SEQ ID NO: 6171 - DNA, 324 bp, Zea mays
  unsure (1)..(324): unsure at all n locations
tgctgtgtgggactctgagcagaatgctacatctagttctggtgataatcttgcttctttataccgtccacctttttctttgatgttcaacggaccctttgacaaggcaaagttagaggcttcttccctggacaaatggctattaatcaatttgcagtcgacagcggaatttagctctcacatgcttaatcgagacacttggggaaatgatgcggtggctcagttgattcggtcagattttatcttctggcaggtttattatgacaccagtgagcggacgaangtatgcacgtactaacatttggtgtccatgcctgctattct

SEQ ID NO: 6172 - DNA, 285 bp, Zea mays
agctcccatatccgctcccctacctctccagcatcctcccgtctccgtcgtctcgtctccgctcctcacctcgccagccatgggcaagatcaagatcggaatcaacggtgagtctgtacccccaacacaaactcgttcttcctgctcggttcgttgggtctggactctggagtgatctgagtggggtccctgggcgctgcgtgctcaggtttcggaaggatcggcaggctcgtggccagggtcgccctgcagagcgaggatgtcgagctcgtcgccgtcaacgac

SEQ ID NO: 6173 - DNA, 286 bp, Zea mays
ctgggatgagtttgtgtggggtggtgcgtggatgtactttgccacagggaacaattcatacctcacggtcgccacagccccaggaatggcgaacatgctggagcctactggtttggaagtccaaactatggagtatttacctgggatgacaaacttccaggagctcaggttcttctcagcaggttgcgactcttcctaagtccagggtacccttacgaagaaatactgaggacattccacaaccaaaccgacaatgttatgtgctcatatctgcctctattcaatt

SEQ ID NO: 6174 - DNA, 283 bp, Zea mays
aagatattaggaatatatcaggttaagcagattagacatggcaaagaggtaaagatcgacttgatggtgatggaaaatcttctctttggccacaatatttcacgaatttatgatctcaaaggtgttactttttcgcgacgcgtcactgactcaaatgatcatgatactgtttacctggaccaaaattatgttgaggacatgggtttttctccaatctatattggtggaagaacaaagcatcttttgcagcgtgcaatatggaatgacacgtctttcctcactt

SEQ ID NO: 6175 - DNA, 285 bp, Zea mays
ggggcgcgggaagtccgtggtgtgcgaggccgtgatcggggaggaagtggtgaagaaggtcctgaagaccgacgtgcagtcgctggtcgagctgaacacgatcaagaacctcgccggctcggccgtcgccggcgcgctcggggggttcaacgcccacgcgagcaacatcgtgacggccatcttcatcgccaccggccaggaccccgcgcagaacgtggagagctcccactgcatcacgatgctggagcccgtcaacgcagggagagatctccacatttccgtcac

SEQ ID NO: 6176 - DNA, 287 bp, Zea mays
atcttgtgaccctccctcagccgcgtcgcgtcccatcctacgatccaaaggtctctctgctcgcagccatggcgaagaactacccgaccgtgagcgccgagtacagcgaggctgtcgagaaggccaggcgcaagctaccgagccctcatcgccgagaagagctgcgccccgctcatgctccgcctcgcgtggcactccgcggggacgttcgacgtgtcgtcgaggaccggcggtccattcggcacgatgaagcatcagtcggaattggctcacggcgctaacgcggg

SEQ ID NO: 6177 - DNA, 284 bp, Zea mays
gcaatggcgttcacgcggcggcgtccgtgcggcatcctcctcctctccctgctggcggcatccggctcgctgtcgctggccgccaccggcccggacgacgtggccgtcttctggggccggaacaaggacgagggcacgctgcgcgaggcctgcgacacgggcacctacaccaccgtcatcatctccttcctccgcagcttcggccacggcgccgcctactactcgctcgacctctcgggccacccgctcgcaggcgtcggcgccgacgtcaagcactgccaggc

SEQ ID NO: 6178 - DNA, 275 bp, Zea mays
ccccgatcttgcgaacaacagacagtaaacgcccccagctcgtctgttcttgtcaactttattgttgttcttcaattaccagcaaatatggcggcaggcgcgcaggttatcgccaactctggccacgatgacatgattcacgatgcggtcctcgactactacggccggaggttagcaacctgctcctcggaccgcaccatcaagatctttgaggtggagggcgagacgcagcggctctcggaaacactcaagggacacgaacgcgccgtctggtg

SEQ ID NO: 6179 - DNA, 286 bp, Zea mays
cggctcgaggcttgatggaagaaagatagtggttcctcgctatgaagatggaaattttgttggcccaaccattctggctgatgttaaaagtgacatggagtgttacaaggaggaaatatttggtccagtgcttctcttaatgaaggcggagagcctagatgatgccatccaaattataaacagaaacaagtatggcaatggtgcttccatatttacaacatctggcgtctctgccaggaaatttcaaacagacattgaagctggccaggtgggcatcaacgtgccg

SEQ ID NO: 6180 - DNA, 277 bp, Zea mays
ctcgcgaacttctccaccgtattccagcaaagaccttggaccagtactatagcagagatgcttcccactgaatcactgatcgttgatcagtgttccaatattttggcaagtgcagctttgaataaattgaacagattggcctcgtggccattttcctgtatttatctgtagtcaggtccaattcttttctgttggtgagcgcaagttattcatagatgactcggtcatgggaatatttgtaatattatgtcatgtatcgttaaatttcagttgtttt

SEQ ID NO: 6181 - DNA, 279 bp, Zea mays
  unsure (1)..(279): unsure at all n locations
aacgattttctatacaaggatttctggctaactcatgcgcaggatgagggggtgttgtcctcgaaaaggggcggtggtttcttcgtcgctttttcccgggatcagccgcaaaaggtctacgtgcaacacaagataaaggaacagagttcaagactgtggaacttattactgtccgatgcagtgatctacattgcaggctcttcgacgaaaatgcctgccgatgttacagctgcgctagaggaggttatttgtanagaaggtggtgtcaagcaagcggat

SEQ ID NO: 6182 - DNA, 274 bp, Zea mays
ctccctagtcgctccccaaatcggatctccaggccggcagaagttgagcggactgactggtcactgtagttcgatcgaatccgagtagggctgatacagttcgattcggcgggaggcatggcgtccgaaaagcacttcaagtacgtcatcctcggcggcggcgtcgcggcggggtacgcggcgcgggagttcgccaagcagggagttaagcctggggagcttgcaatcatctccaaggatgctgtggctccttacgagcgtcctgccctaagca

SEQ ID NO: 6183 - DNA, 276 bp, Zea mays
cgcccacaagagctcgcaggagaggtcgaaaccctagcttttgcggcggcggagagaagatgatctacgacgtgaactcccccctcttccgttccttcctcagccagaagggcggcgccgacaagaggaaaatggaggagcataaaccaaaggagcagaggcccaaggctaacgagaacaagcctgtgatgaacgaatgaatatctccagaagctttgttcaatgtgcaaccaagtccgatgtccgtctgctctggtcagcttaaaaccaacgctt

SEQ ID NO: 6184 - DNA, 273 bp, Zea mays
aatggtctgaccagtgacaccaaacaagttaccctcacacagacagcaacacatgatgatgttctattatctagagaagaaagagcctttcgaatgtggatcaacagccttggggttgaatcatatgtgaacaatgtcttcgaagatgttcgcaacggatgggtacttcttgaagtgcttgacaaggtgtctcatggatctgtcaattggaagctggcatcaaaacctccaattaaattgccatttagaaaactggagaattgcaatcaagtt

SEQ ID NO: 6185 - DNA, 272 bp, Zea mays
tgatcctttggctcttcgtcttctagagcgtttgcttgcatttgatcctaaagaccggcctagtgcagaagaggctctagccgatccatactttgcatcccttgctaatgtggaacgtgagccatcaagacacccgatttctaaacttgagtttgaatttgaaagaaagaagctggccaaagatgatgttagagaactgatctatcgagagattttggagtatcatccacagatgctggaggagtacatgaaaggcggagaacagattagct

SEQ ID NO: 6186 - DNA, 262 bp, Zea mays
cttgtcagctgaagaggttgaggacataaaggatatgttcaaggtgatggatactgataatgatggcatagttctcttaatgaacgagttaagagagctgggattgcaaaatcttggttctcatcttgcagaatcagaagtgcaaatgcttattgaagctgtggatacaaatggtagaggagcactagattatggtgaatttttggccgtctcacttcatttacaaaggatggcaaacgatgagcaccttcggcgggccttc

SEQ ID NO: 6187 - DNA, 251 bp, Zea mays
cgcccgtctcgatcccacaggatccgagagacctcacaagccgccacgccaggtccccatcccatcgcggcgcctgctcccacccccgccctgctcccgcccggtagtagtagcagagcctcgccgccgctgccgagaatagatggggttcgtgtccttcgtcgggcgggtgctcttcgtcgccgctttcctcctctccgcctaccaggagtttaatgaatttggcgctgatggtgggccagcagctaagg

SEQ ID NO: 6188 - DNA, 262 bp, Zea mays
  unsure (1)..(262): unsure at all n locations
acagaaaaggttttgatgtgaaagttatcgatgttaacaggacatgcaaagtcacaaagggaggccaaatatgcaaaatctcacagcgctattnggccactggaaattacaatggtgttgttggcttcgctaaggctaaaggcccaacagccaagattgcaatacagagagcgtatgagaaatgcttccagaatctccactacatggagcgatacgaggatcacacaatcgctcatgctatccaggccaaatatgagaaaac

SEQ ID NO: 6189 - DNA, 252 bp, Zea mays
gggtccacttcgctcgcaacttcccagccatggcgaccgcgaccgaggctgctccccgcgctcccaagaccctagctccagccggcgcgcgcggcctctccaccgagaaggctgttggtgcagccgccgtcgtcggcagccacactgctaagtggatgcaggacacgagcaagaagtcgccaatggaactgatcaacgaggtacctccgatcaaggttgatggtcgcattgctgtctgtgaaggggcttctg

SEQ ID NO: 6190 - DNA, 258 bp, Zea mays
cacatgcgagcgggcgcacagcgcgcggttgactctcctcgtgcaatgagcgccgccgcacgccgcgccaccggctcggggtcgcgcttcttctcctgctggtcctcggtggcgccgacgcgaaggcgcacagctacgaggacgcgctgcggaagagcctgctctacttcgaggcgcacgctcgggccggctcccgcacagccagcgcgtcacctggcgccaccactccggcctcaccgacggcctcgagcaaggggt

SEQ ID NO: 6191 - DNA, 259 bp, Zea mays
aggctcgagaacaataacattatccaccacacacaaaaatggctgttggaaagaataagaaattaggtaaaagaagaagggaggttctcgtaaagtagctgatgcatttgctaagaaagaatggtatgatatcaaagctccttcagcatttcctattcgtcaagttggtaaaacagttgtgactaaaactcagggaactaaaaatgctaaagattcattattgggcagagtatttgaatcaagtttaggtgatttaaaa

SEQ ID NO: 6192 - DNA, 264 bp, Zea mays
ctgcgccgtccttcacctccgccgccgaatccgagactctgatctcgggttcaccgcagcgcacagatgcactccccgagctcccgatcccgattccgcgctactcgctctacgtacgcttcagtgcatggcaggatatggcacccgaggtgttctcagttatgatgctaagcactatgattctaaaatgcaggagctgctgagcactggtgagactgaggagttcttcacttcatatgatgaagtttttgaaagttttgatga

SEQ ID NO: 6193 - DNA, 254 bp, Zea mays
ggaacgaccagccgaggtttgagacttgctaccagatcgctcttgcgatcaagaaggaagtcgaggatcttagaggctggtggtattcaggttatccaaatcgacgaggctgcactgagagaagggctgccgctccgcaaggctgagcatgcattctacttggactgggctgtccactccttcagaattaccaactgcgagatccaggacaccacccagatccacacccacatgtgctactccaacttcaacga

SEQ ID NO: 6194 - DNA, 251 bp, Zea mays
gtgtcttcatcatggacaactgtgaggagctgatcccagagtggtgagcttgtcaagggtattgttgactctgaggatcttcccctcaacatctctcgtgagactctccagcagaacaagatcctcaaggtcatccgcaagaatcttgtcaagaagtgcgttgagctgttttttgagattgcggagaacaaggaggactacaacaagttctatgaggccttctccaagaacctcaagcttggcatccacga

SEQ ID NO: 6195 - DNA, 251 bp, Zea mays
caaacgttggggatgaaggtggttttgcacctaacattcaggaaaacaaagaaggcttgaactattgaaggcagccatagaaaaggctggctacactggaaaggtggtcattggaatggatgttgctgcttctgagttcttcggtgagaaagacaagacttatgatcttaatttcaaggaggagaacaacgatggctcaaacaaaatttcaggcgacagctgaaagacctgtacaagtcctttgtttctga

SEQ ID NO: 6196 - DNA, 247 bp, Zea mays
acgccgtctacgcgtccagataagggattgaatactccgaatcataagcagaatggcgtctgtggcctgcgactcaatcattgaagtgtgtggtgactggtgatggtgctgtcggcaagacatgtctccttatatcatacaccaccaatgctttccctggcgaatacattccgaccgtctttgacaactactcggccagtgtcatggtcgacggccgaccgatcagccttggcctctgggatacagc

SEQ ID NO: 6197 - DNA, 248 bp, Zea mays
aagcagaccacacaaaattaacaacacaaacaggatcgatcgagcaacgtacaatggcagctactggccccatccattgtagttcccacagacgccgagctgctgcaggcacaggccgatctatggcgaaacagcctgtgctacctcaaatccatggctctcaagtgcgctactgagctcggcatacccactgccatctacagcctaggcggtgctgcctcgcttcccgacctgatcgcctcactgtc

SEQ ID NO: 6198 - DNA, 244 bp, Zea mays
gcaagggaggacgccgccgccacagggcggcgcagcgagtcgggcgacgggagactggagctggtggaccgagaggctgcgtgcggcgcacaaccgcctggccccggtgtcagatggtcagaagcccatcgtgaaggtgaagctcgccgacctgatggccgccacgcaggacttcagcagcagccacatcgtggtcgccgggagctcgcgggcggggacggcctaccgcgccgtgctacgggac

SEQ ID NO: 6199 - DNA, 248 bp, Zea mays
aacaacattgaaatcggaattattcgagctgaccgtgagttcaaagttctaagcccatcagatgatgcaaggatttgcttggaagaggtggagtaagttgtctgttgatgatttactgtttcaaacaagaatagcagcatcacttatgagcagccagcctgaagcttgtcttggttttatcactctgtaaactgatttgctccagcgacatgtcttggttttatcactctgtaaactgatttgctcca

SEQ ID NO: 6200 - DNA, 249 bp, Zea mays
cgacgcgcaaccagtgccgcacccagaccagatctccgcgacatatcagtcgttcgtccagcctaactgcactgcactgcactgcacgcaatggccaccacggcgaccgaggcggccaaggctgcaccggcgcaggagcagcaggccaacggcaacggcaacggcgagcagaagacgcgccactccgaggtcggccacaagagcctgctcaagagcgacgacctgtaccagtacatcctggacacgagc

SEQ ID NO: 6201 - DNA, 247 bp, Zea mays
atcatcaacctcgacctcaagaaaggcggcaacgggcgctacctcaagacggcggcctacgggcactttgggagggacgaccccgacttcacctgggaggtggtgaagcccctcaaggcggagaagccgtcttctgcatgaggcgcctcctctgtttcggaagaagcttttggtctggtctgcctgcgctctatcatgcttttttatggctcctacgtgttgtgattcttgatctgccccttgctta

SEQ ID NO: 6202 - DNA, 265 bp, Zea mays
accgactgagcgacgaactcggaatcggtcagataacctccttgtttaaagttctcaatggctgaactgggggaaagtcaatcagtgattactgcaagagtcctggaaaaccatcagaagagtttgcaacatacattaagcagaggggttatgatctccatgatgtggaggcttatggacagatgctcaagaatgctggtttcagtcatgtcattgctgaagaccgaactgaccagttcctcagtgttttacagaaggagctaga

SEQ ID NO: 6203 - DNA, 244 bp, Zea mays
agctcatctgtcagcgccacaggtgaccggaaaaccacggccggcgttcctgcttctctaccacggtccgaattgctgaccggatcaacccgagaccttgcaggattatcgatctgattgcggcatgatccgcttcatcctgctgcagaaccggcaggggaagactcgactggccaagtattacgtcccgctcgaggactcggaaaagcacaaggttgaatacgaggtacaccggctcgtggtc

SEQ ID NO: 6204 - DNA, 300 bp, Zea mays
tgtggaggagcttgcctctatgctgaccaaagggacaccaaggggaaagaaagacgcggtgatggcgttgttcaacctctcaacacacccagaaagctcaggacggatgcttgagtcatctgcggttctagctttaattgagtcactgaggaatgacaccgtgtcggaggaagctgctggtgctctggctctgctgatgaagcagcctaccatcgtgcatctcgttgggagctctgaaacagtgatcactagcctcgtcgggctaatgaggcggggaactccaaagtgcaaggagaacgc

SEQ ID NO: 6205 - DNA, 251 bp, Zea mays
cacacattggacttgcactggtgcttgctcataattactagttcatcagcaaacaacaaacaatggcaccgaggctagcgtgcctcctagctctggccatggcagccatcgtcgtggcgccgtgcacggcccagaactcgccgcaggactacgtggacccgcacaacgcggcgcgcgccgacgtgggcgtcgggccggtgtcctgggacgacaccgtcgccgcgtacgccagagctacgcgcgcagcgcca

SEQ ID NO: 6206 - DNA, 302 bp, Zea mays
cgaacaactgagaagagctgcgcctgcgcctgcgcctgcgggaaagggagaacatggtggggaagaagaggggtgttatctccccgctggaccatctcgctgggctgctggaggtgcgcgtggtgaggggagtggacctcgccatccgcgacctccgatccagcgacccctacgtcgtccttcgcatcggcaaggcgcagaaagtgaagacgcgagtggtcaagaagagcatcaatccggaatggaacgaaaaactcaccctctctattgaagaccctgccgttcctattagactggaagta

SEQ ID NO: 6207 - DNA, 301 bp, Zea mays
agctaagctaagccgagctaagaagcacagcaagtctcaccagactagcggctagcgcgagaatggccaaggacatcgaggccgcggcgcacgagggcaaggactactcggacccgcctccggcgccgctggtggacgcggaggagctgaccaagtggtcgctgtaccgcgcggtgatcgccgagttcgtggccacgctgctcttcctctacatcacggtggccacggtgatcgggtacaagcaccagacggacgccgcggcgtcgggccccgacgcggcgtgcgggggcgtcggcgtgct

SEQ ID NO: 6208 - DNA, 301 bp, Zea mays
gaaatttcgcgaatctgcaaaagtagatgccaggcactgggagcagataaatgagcggcggtataatcttgatttggttcgtgatgtgatgtctacagagctaagagcaattcgtcaagacaaatacggttggatattgcacggagaaagtgagtggcaaagccagctccaagaacttgtccatgagagaggtatttttcctatgcggcaaccatccacagaacctgagtggcagctgtgtggtgttgaaggaccatatagaatgaggaagaaacttgagcactccaaatttaagatagat

SEQ ID NO: 6209 - DNA, 303 bp, Zea mays
gtgcgcgggcggcgagaccgtggcggcccgggatgtggccgcgctcgccatggcgcaggtggactacgtgctcggcaccaaccccacgggcgtcactaccttcgtcggctacggccccaactaccccagccgggtgcaccaccgcgccgcgtccatcgtgccgtacaagcacagcaaggagttcatcggctgcacgcagggcttcgaccactggttcggccgccggagctccaaccccaacgtgctcgtcggcgccatcgtcggcgggccggaccggcgggacaggttcacggacaaccggga

SEQ ID NO: 6210 - DNA, 300 bp, Zea mays
cacaattaggtcacatacacacttcacggctgcctccctaggtagcagcttctacaatggaggcatccaacaagctcgcagtcttgctcctgtggctggtcatggcagctgccactgccgtgcacccttcctactctgagaattcgcctcaagactacctcactccccaaaacagcgcccgtgccgccgtcggtgttggcccggtgacctggagcacgaagctgcagcagttcgcagagaagtacgccgcacagagggccggcgactgccgtctccagcactcgggcgggtcctacgggg

SEQ ID NO: 6211 - DNA, 291 bp, Zea mays
gtgatatcgagatggttctaccaatcacggttggaggttacacagattcctttggtcctgtgcaccatgcaaggaactgcggattcatcttccgagggccgcagactccagttaatccaaattggtttaatcttccaataggatacaatggacgagcatcatctatagttgtgtctggaaccgatgtaattaggcccagaggacaaggacatccaacaggaaactccgctccttattttggtccctctcagaagcttgattttgagcttgagatggctgccattgttggtc

SEQ ID NO: 6212 - DNA, 302 bp, Zea mays
gacgcacagctgcagaaggaggatcagagcgggcgcggcggccacgtccacgtggaggtcgagctgagcagccgcttcgaggagctcaccgccgacgtcatctcgcacaccgcgttcgggagcagctacaacgaggggaagcgagtcttcctggcacagagggagctgcagcacatcgccttctcaaccattttcaacgtccagatcccagctctcaagtacctcccgaccgagaagaatctcaggacacggaagctggacaggcaggtgagggccatgctcatggacatcatcgaggcccg

SEQ ID NO: 6213 - DNA, 299 bp, Zea mays
tctccatctccctgctcctccgcctccttcttgatccagccaagccagggatcgccatgtcggactcggaggagcaccacttcgaatcgaaggccgacgccggagcgtccaagacctacccgcagcaggctggcaccgtccgtaagaacggcttcatcgtcatcaagaaccgcccctgcatagtatatgtgtgcgcagttttgggatcggctgtattccattgattagtgttgacccgtgtcgttgtgctgtgaactggtgatatcgagatgcagttgtctttggtcatactgtgatag

SEQ ID NO: 6214 - DNA, 293 bp, Zea mays
ctgatgatggttcagctatgctgacttttgagtctctctcagaaaccgcagaatttgctagaaagtgggttcccttttgtaagaagcacaatattgaaccaagagctccagaattttactttgctcaccaaatagattacctgaaggacaagattcaaccttcatttgttaaggaaagacgcgcaatgaagacggagtatgaagaattcgaagtaagaatcgatgcccttgttgccaaagcacagaaagtgcctgaagaggggtggaccatggctgatggaactgcatggcct

SEQ ID NO: 6215 - DNA, 299 bp, Zea mays
cggcggcttaaaccctagttctcactcccatcgccgcttcagctccgccgctgcagatggagttctggggtctcgaggtcaagcctggttccactgttaagtgtgagcctggatatggctttgtgctgcacctttcccaggctgctcttggggacactcgaagaagagtcataatgccttgatgtatgtcaaaattgatgatcagaaacttgccattggaaccctctctgttgacaagaacccacacatacaatttgatctgattttcgataaagagtttgagctgtcgcacacatcaa

SEQ ID NO: 6216 - DNA, 295 bp, Zea mays
aaccccaagaagatgagctacgtggttgggttcggcagcaagtacccacggcacgtgcaccaccgtggcgcgtccacgccgcacaacggcgtcaagtactcgtgcaccggcggctacaagtggcgcgacacaagaaagcggaccccaacctgctggggggcgccatggtcggcgggcccgacaagaacgacggcttcaaggactcgcgcaacaccttcgggcagaacgagccgacgctggtaggcaacgccggcctcgtcgcggccctggtggctctcaccagcagcggcagggg

SEQ ID NO: 6217 - DNA, 292 bp, Zea mays
gtttctccattgctgcgatgtacggcattgcagttgccgctcttggtatgctgagcacaatcgcaactggtcttgctattgatgcttatggtcccatcagtgacaatgctggtggtattgctgagatggctggaatgagccacagaatccgtgagagaactgatgctcttgatgctgctggcaacacaactgctgctattggaaaggggtttgccattggttcagctgctcttgtgtccctggcgctttttggtgcctttgtcagcagagctggagtgaaggtcgtcgacgt

SEQ ID NO: 6218 - DNA, 299 bp, Zea mays
  unsure (1)..(299): unsure at all n locations
ccgcctatctcgccagcaccgccgcatcaccgaaggttcgcaaagatggcggtgccgctgctgacgcagaagatcgtgaagaagagggtcaagcagttcaagaggccccatcttgaccgctacaagtgccttaagccaagctggcgcaggcccaagggtattgactcccgcgtcaggcgtaagttcaagggatgcaccttgatgcccaacatcggatatggctccgacaagaagaccaggcactaccttcccaacaagttcanaaagtttgttgttcacaatgtctccgagctggagct

SEQ ID NO: 6219 - DNA, 294 bp, Zea mays
caacaagcaagaccgcttctgcttgtgacccgaaacctttcttcgaacgcaaaaagaaccccacccgacgtaccgcgagccggcgatggcgacggtggcgatggacatctcgaagccgacgccggcagcgtccggtgacgaggcagcggcggcggcgaacgggaggagcggcggcgggggcgaggggctgcggcagtactacctgcagcacatccatgacctgcagctccagatccggcagaagacccataacctcaaccgcctcgaggcccagcgcaacgacctcaactcccg

SEQ ID NO: 6220 - DNA, 290 bp, Zea mays
tgagaggagaatagcatcaggagacctagtagatggcgatactttcaggttgatacaattcaacaattacaagggctctatgaggagttgattgagaatggagaagactgccagctggatagatataagtcatctgagaaatcaggacggagtcgatggctatggtcccgcctcattactcagccttctagctttgctccagttaagggcctttacctctatggtggtgttggtacagggaagacgatgcttatggacttgttctatgaacagctgccatctaattggag

SEQ ID NO: 6221 - DNA, 292 bp, Zea mays
tggctcgcgcaggcgggcgacacaacgaggctaaatccctatcgcgaggaggcgtgtgaggccagcggctttgcgatgacagcaccagcggacaaggggaagaaggccaagactgatgccgacggcggcgaggagaacgaacagatcgacggcgtcctcgtcctctccatcgagaagctccaggagatacaggacgagctcgagaaggtaaatgaggaagcaagtgacaaggttatggaggtggagcagaaatacagtgagatccgcagacctgtctatctcaagaggggtg

SEQ ID NO: 6222 - DNA, 292 bp, Zea mays
aaaccaccgccgagcccaaccgcacaagcgcgcgaggcaggagagagagagagagagagagaggcggggagcaaaacaatggaggggaaagaggaggacgtgcgcctgggcgccaacaagttctcggagcgccagcccatcgggacggcggcgcagggcgccgctgacgacaaggactacaaggagcccccgccggcgccgctgttcgagcccggggagctcaagtcctggtccttctaccgcgcgggcatcgccgagttcgtcgccaccttcctcttcctctacatcacca

SEQ ID NO: 6223 - DNA, 290 bp, Zea mays
cgtcgccgcggccgacttcgccggcaactgggtctactgggtcggcccgctcatcggcggcggactcgctggcctcgtctacggcgacgtcttcatcggcggctcctaccagcaggtcgccgaccaggactacgcctaagtagtgctccgttcgtctggattcagctcatccaacgcaggcggccgtttcgatcggcgtcgtcatttgctttgctcttcatttcatcacgttatgtaacgtgccaatgatgtgtgtcgtcctggtctgttccattccgtccttgtattca

SEQ ID NO: 6224 - DNA, 214 bp, Zea mays
cttggaggacataagcttgtcactgttcaacatattcgtccgccagcactgggccacatacggtcgccactactacacacgctaccgccacgagaacgctgatgcacgggctgctaaggaccttacgcgcaaacctagtaaccgtgcagtcatcactttctgatgctaacaagctggtcaaggagatccggtctgatgtcttctgaagtacctg

SEQ ID NO: 6225 - DNA, 236 bp, Zea mays
cttatattctcgaccatccagttagtgatagtaaatatggtcacagtgttgggttttctggtgtgcctcccaccacattggtccgaaccttacatagggggaagagcttcaagattggttcactgcagatgttcatggagaacaatggaagcactgaagatatgggtcctcgatcttttcctgtcaaggaggttcacaaaatagcagtactagatattaggttagctaatgctgat

SEQ ID NO: 6226 - DNA, 244 bp, Zea mays
agaacctacaggaagcagggaccttctctgcagggttgcgattcggctaccgaacaaccggaggatccaaagaaacttccttcacacagatcctatcaagctcttgtggtcattctgcgctcctcaggtcgaggacggggagaggacggctttccacttcgtccaggcaattcctggggcatcccagaaactggagttgggaagcgacctaacattcaaggaagccgggctggccaactcgatg

SEQ ID NO: 6227 - DNA, 276 bp, Zea mays
gtgaaatgaagggatctgactggttccagatgaacttccccaaggcagaagtgctcatcctcaacttcgcctcaagcctgtactacctcccgccgttcatcgcgtcgatgcagaacctgaaagccctggtgctgatcaactacggcaccagcagcgcggcccttgacaacctatccgccttcaccacgctgaacggcctgaggagtctctggctggagaagatcaggctcccgccgctgccgaagaccaccatcccgctgaagaacctgcacaaga

SEQ ID NO: 6228 - DNA, 196 bp, Zea mays
cggctcgagcgacctgctccctccccaccaccgagcccatggcggaccagctcaccgacgaccagatcgccgagttcaaggaggccttcagcctcttcgacaaggacggggatggttgcatcacgaccaaggagctgggcactgtcatgcgctcgctggggcaaaatcctacagaggctgagctccaggacatgat

SEQ ID NO: 6229 - DNA, 225 bp, Zea mays
attgttggaatgatgggttcaggcaaaactacagttgggaagatattatccgaagtgttaggttattcgttcttcgacagtgataagttggtagagaaggctgttggtatttcatctgttgctgagatctttcagctccatagcgaaacattcttcagagataatgaggagttacatgaagaaagggctgaccgtatggttagatgtcccactggatgcacttgc

SEQ ID NO: 6230 - DNA, 276 bp, Zea mays
ccgcgcactactacaagtgcacgtaccacagctgctccatgaagaagaaggtggagcggtccctggccgacgggcgcgtcacgcagatcgtgtacaagggcgcgcacaaccaccccaagccgctgtccacgcgccgcaactcctccggcggcgtggcggcggcggaggagcaggccgccaacaacagcagcctctctggctgcggcggcccggagcactccggcggcgccaccgccgagaaatcgtccgtcacgttcggcgacgacgaggcggaga

SEQ ID NO: 6231 - DNA, 280 bp, Zea mays
tgtgagagcgcccccaagtttctcaagaacggtgacgccggcttcgtcaagatgatccccacgaagcccatggtggtggagactttctccgagtatcctccactggggcgcttcgcggttcgcgacatgaggcagacggttgcagtcggcgtgataaagagcgtggagaagaaggacccaacgggagccaaggtgaccaaggcggctgccaagaagaaatgatgatgattctgcatgtaatccatggttcctggtttctttgctggtcggagtattttgt

SEQ ID NO: 6232 - DNA, 224 bp, Zea mays
cggctcgagggccgtttcaagaaccagaaattgtacggccatactgtcactattgctgtgacacggcagagccttccttctggtgaaagcaaggatgatagtgccgtgcctgatagagcacagttcaatagagacgatttccctgttcagtatgatgctgcaaagttctttgtcattaaatcgtacagtgaggatgacatccacaagagtgtaaaatacaattg

SEQ ID NO: 6233 - DNA, 272 bp, Zea mays
tggtgaggataaatgctttggttgccaaggctcaaaagacacctgatgaaggctggatcatgcaagacggtacaccatggcctgggaacaatcctcgtgaccaccctggcatgatccaggttttcctgggtgagactggtgcacgggactttgatggaaatgaacttcctcggttagtgtatgtgtcaagagagaaaagaccaggctaccaacaccacaagaaggcaggggctatgaatgctctggtccgagtgtctgctgttctgacaaat

SEQ ID NO: 6234 - DNA, 267 bp, Zea mays
tgctgatcgtgagattcagcggacgttgatggagctccttaaccaattagatggatttgatgagctaggaaaggtaaaaatgatcatggccacaaatcgacctgatgttctggacccggcgctcctgcgtcctggacgtttagataggaagattgaaattccgctacccaacgagcaatcaagaatggaagttctaaaaatccatgcagccggtatcgccaagcatggggagattgattatgaagcagtcgtgaaactagctgaagg

SEQ ID NO: 6235 - DNA, 202 bp, Zea mays
tgctcattcaggaggagagcgtgagattcaaagaactatgttggagctgctgaatcagctagatggttttgactcgcgtggagatgttaaagttattctagcaacaaaccgcattgaaagtcttgatcctgctttgcttcggccaggccgtatagaccggaagattgaattccctctcccagatattaaaactagaagacgc

SEQ ID NO: 6236 - DNA, 234 bp, Zea mays
gcagctcctctgccagcgcttcgccttccccagcgacggcatcatcatgctcactgacgaccagaaggacccgttccgggtgcccaccaaggacaacatccggatggcgatgcagtggctggtgcaggggtgcagcagcggcgactccctggtgttccacttctctgggctgggcgcgcaggtcgccgacgcggactgcgacgagcaggacgggtacgacgaggccatctgccc

SEQ ID NO: 6237 - DNA, 274 bp, Zea mays
cctcttcctaccattagcagtagccacagccagaacaccagcagacagcagcatcagcagggaggaacacgatgagcggcgccggtccggatctgcagctgccaccggggttccggttccacccgacggacgaggagctggtgatgcactacctctgccgccgctgcgccggcctgcccatcgccgtccccatcatcgccgagatcgacctctacaagttcgacccatggcagctcccaaggatggcgctgtacagcgagaaggagtggtactt

SEQ ID NO: 6238 - DNA, 273 bp, Zea mays
tcttgtctgcccacgcctagtttctctgtcgattcctattcgtcgtctcttcagggctggtgctcactgctgcgccgttctgttaaccgaaacaagaactctgtgtattcctgtaccgagctgtgcatgtttttttctttccatcgtggagaatttaagttattatccgtttgctgcaaggtttgccgtctcattttatgcgttgggatgttggcaagaaagggcagatgtcatgtgagaatttaagttaagtgagatcgattcagggttttc

SEQ ID NO: 6239 - DNA, 267 bp, Zea mays
gaacttatgtttatatggacttcctaatgagacatgggaaataaacttgcctgctgaagaggtccctcctgaactgccagagccagctcttggaattaattttgctcgtgatgggatggatgaaaaagattggctatcacttgttgcagtgcatagtgattcttggctaatgtctgttgcattttattttggagcaaggtttggattcgataaagaatccaggaaacgtctcttcaccatgatcaataaccttcccagcatatatga

SEQ ID NO: 6240 - DNA, 261 bp, Zea mays
acctccctccctctgtttacatctaattcttatcgatttagctatagcaggtctcgatcggcggctatgagcggtagccgcagcaagaagtcgtggccggaggtggaggggctgccgtccgaggtggccaagcagaaaattctggccgaccgcccggacgtccaggtggtcgttctgcccgacggctccttcgtcaccactgatttcaacgacaagcgcgtccgggtcttcgtcgacaacgccgacaacgtcgccaaagtc

SEQ ID NO: 6241 - DNA, 260 bp, Zea mays
accaagtctcctgatgttagggcagtaattgcaccccacgctggttattcatactcgggccgatgtgcagcttatgcttttggcaacatcgatccaactaacatttctcgggtgtttctgcttggcccttctcatcactactacactccaaaatgtgctttaaccagggcttctgtctactgtaccccaatcggggatttgccagtagaccaggaagtcattgaggaactcagtgctactggaaagtttgaatttatgga

SEQ ID NO: 6242 - DNA, 261 bp, Zea mays
ctcctcccaccagtgagatcgatcgagcttccacctcctgtcatcctcctcctcttcctcctcttgcaggtcgcagctgagcagcaacaaggccggaaaggatgtcgtggcagacctacgtcgacgagcacctcatgtgcgaggtcgagggccaccaccacctcacctccgccgccatcatcggccacgacggcaccgtctgggcccagagcgccgcattcccgctgttcaagcctgaggagatggccaacgtcatgaagg

SEQ ID NO: 6243 - DNA, 210 bp, Zea mays
gcatcctcccgtctccgtcgtctcgtctccgctcctcacctcgccagccatgggcaagatcaagatcggaatcaacggtttcggaaggatcggcaggctcgtggccagggtcgccctgcagagcgaggatgtcgagctcgtcgccgtcaacgaccccttcatcaccacggattacatgacgtacatgttcaagtacgacacggtgaaggg

SEQ ID NO: 6244 - DNA, 263 bp, Zea mays
gcggcggctatgggcggacatggccacccttactcgccggcggactgcagctgccggggttcgtgccgcagcggctgtcgcaggcccagatcgtcgcgcctttcgcgggcacgccgtgttggccgtgctcggcgcctggctcgtctccgggagatgcggcggcggcggcagactatccaggaccgaccgcttgctcatgggctggtggctcttcaccgcgttgacccacctcgtcttcgagccacccttcctcttcaccccgg

SEQ ID NO: 6245 - DNA, 286 bp, Zea mays
gtgtcattcacacacataattaaaagcgcagaacctgcattcagtgttttggtgtcaaggttcttccttggggagacgtttccaattccagtatatctttctcttcttccaatcattggtggttgtgctctagctgctgtcacagagctgaactttaatatggttggatttatgggtgccatgatatccaaccttgcatttgttttccgcaacatcttctcgaagagcggcatgaaggggaagtccgtcagtggcatgaattactacgcttgcctgtcaattatgt

SEQ ID NO: 6246 - DNA, 290 bp, Zea mays
ccgtcgcatcccatcccactaccacccatctcgtcgtccgccgattcgatccggttcttccaacccaggggcagtgatggcgacgaagaggagcgtgggcaccctcggcgaggcggatctgaacgggaagaaggtgttcgtgcgcgccgacctcaacgtcccgctcgacgatgcccagaagatcaccgacgacacccgcatccgcgcctccgtccccaccatcaagttcctcctcgagaagggcgccaaggtcatcctcgccagccacctgggtcgtccaaaaggtgtca

SEQ ID NO: 6247 - DNA, 288 bp, Zea mays
atggaaatagaaccaaggtttccattgtttggtgggtggcaaacaaccttcactgttggttatggtttaccacttgaagactttgttttctattctgatggacagagatttctcaatatcacatttggttctccattggaggaaattctcattgaaaagcttatcgtaaaggttgttctacctgaagggtcaaaggatatcgaagtttcagctccctttccaacacagcagcagcaagaggttaagtattcacaccttgacattgtcggaagacgagttgttgtcttg

SEQ ID NO: 6248 - DNA, 294 bp, Zea mays
gtcatatctagctatagtagctcccttgagaagcatttgagggaggagccatgtctgaggagaagcaccaccaccacctgtttcaccaccgcaagccagaggaggagggcgcctccggcgaggtcgactacgagaagaaggagaagcaccacaagcacatggagaagctcggcgagctcggcgccatcgccgccggcgcgtacgccctgcacgagaagcacaaggccaagaaggacccagagaacgagcacgggcaccgggtcaaggaggaggtggccgccgtcgccgccgtgg

SEQ ID NO: 6249 - DNA, 290 bp, Zea mays
catcaaacaagtgccagcgccctctcgcagtcgccgcaatggagagcaccttcatcatgatcaagcctgacggcgtccagaggggcctcattggtgagatcatcagccgttttgagaagaagggcttctacctcaaggccttgaagcttgtgaacgtggagaggtcgtttgctgagaagcactacgccgatctcgcctccaagcccttcttccagggcctcgtggactacatcatctctggccctgtggtggccatggtctgggagggcaagagcgtcgtcacaactggc

SEQ ID NO: 6250 - DNA, 289 bp, Zea mays
aaaatcctgccgtccgagagctcgatttacaggaagtacgccaacgacgacccggtgctgactgacccggataccgtgaacgctaagggatggcaggtaaccaagcaggtttatctggacggccagaacgtgcgcctggacatggcacggttccgccgccggttgcgccaggcgtatgaccactgggcgcacgccaccgtgcgggattgggcgtggaacagaggatataccactgaagcgtgggtgtcacatagtgatttttttttcattttttcacggtggaggatat

SEQ ID NO: 6251 - DNA, 292 bp, Zea mays
cggctcgagggccgctggactcggccgttctgtctcgcatgaagcagttctcggctatgaataagctgaagaagatggctcttagggtgatcgccgagaacctgtcggaggacgagatcgccgggctgagggagatgttcaagatgatcgacgcggacaacagcgggcagatcacgttcgaggagctcaaggttgggctggagaaggtgggcgccaacctgcaggagtcggagatctacgcgctcatgcaagccgcggacgtggacaacaacggcacgatcgactacggcga

SEQ ID NO: 6252 - DNA, 284 bp, Zea mays
atacaaacaaaatgatgaatcatgcattcaatcgctttcttcctaatgatgtgggatggagagatctgtttgaaatggttatagtctctgcaaggaagccagaatttttccagctttcacatccattgtatgaggttgtaacagatgatggactgatgcgtccctgttttaaagtaaattcaggtggcttatattctggtggtagtgctcagatggttgagaaatcactagacattcatggggatgagatattatatgttggggaccatatttacacagatgta

SEQ ID NO: 6253 - DNA, 284 bp, Zea mays
gagccttgctcggtaccgcggcgtcacagcggctgccaagaaacacgggctaagcatccgggggtacgtgtcatgtgtgattgcatgccccgttggaggcgcaaccgatccggcgaaggtggcgtacgtagctaaggagctgtataccatgggctgctcggagatctcgctcggcgacacgactggtgtcgggacaccaggtagcgtggttgctatgcttcaagctgtcatgtcgtttgtcccggtggacaagattgccgttcatttccacgatacgtatgggg

SEQ ID NO: 6254 - DNA, 280 bp, Zea mays
gggatgcgcttgcagcctacatactgatgcaaagaatcttcccaaaagcttctcctgcttatctcgttcgtggtggtgtttgccacgagggtcttgcaatttctgagcttggaatatatggagcttatctgcgtaacaaagataaagtggtgatcaatgagcaatgtggttacttgatgcgaacgaaggtttcttcatcagacgaaggtggcgtactgcagggtttgctgttttggatagcctatacttgactggcaagtgagataacaaaaggagcggc

SEQ ID NO: 6255 - DNA, 283 bp, Zea mays
ctgagcgccaccgagctccgcctcggcctgcccgggaccagcagaagcatcagcgacgacgactggcagaagaacccgtcgccctccgtcggggccaagcgcgctctggacgacggcaccaagagcgaggcctcggggaccagcccggccgccagagacctcgacttcgaccacgaccacgacaccgccgcgcctcccaaggcgcaagtggtcgggtggccgccggtgagggcgtacaggaagaacaccttccaggcggcggcggccaagaaggtcgagcaga

SEQ ID NO: 6256 - DNA, 285 bp, Zea mays
ccctcagcaaaccctaaccgctcgtcgccatgaaggacacctcgttcaaggccaccggcgccaagcgcaagaaggtcggctggcgcaagcgcgggctcacccccttcttcgcgtttttggctgagtttaggccgcagtacctggagaagcaccctgagctcaagggcgtaaaggaggtgagcaaggcggctggggagaagtggcgctctatgtcggatgaggagaaggcgaagtatggcagtagcaagaagcaggatggcaaagcaagcaagaaggagaacacta

SEQ ID NO: 6257 - DNA, 280 bp, Zea mays
ggtctctcgggaaagtattgaatacacctgaggtttcacgtgtttatattggatcattcaatgacaaaccagtaaatgaatcagctgttggtccacttggaaaggaactatttgagagagagcaagatgatcttctttctgatctcaaagatatccccaagaaagcctgtgaccgccggatcaatgaatttgttaaacgtgctagagctgccaagatccatgcttatataataggtcacctaaagaaggagatgcttacaatgatgggcaaagcaaaagc

SEQ ID NO: 6258 - DNA, 275 bp, Zea mays
caccggtgatctcttctgcgaaggccttccacgagcagctgtctgtggcggagatcaccagcagcgcgttcgagccggcttccatgatggtcaagtgcgacccacggcacggcaagtacatggcttgctgcctgatgtaccgcggcgacgtggtgcccaaggacgtgaacgccgcggtggccaccatcaagacgaagcgcaccatccagttcgtggactggtgcccgacggggttcaagtgcggcatcaactagcaggcgcaaacagtggtgccg

SEQ ID NO: 6259 - DNA, 282 bp, Zea mays
tgcgacctcagcgagggcaagctcatcgaccccatgctcgactgcctcaaggagtgggacggcaagcccctgcccatctgctgaggagtgaggaggaggacgccaccggtgccaagaggcaagacccgcaagaggaggagatgacaccgtacgcgcgcgaggaagaaataaagaagggagtatttcggtatctctcaagcaggcttcatatcgtttgcgatctgaagatcattatatgttgttcctctgtactcatcttttttgtttggagcttgtagcagt

SEQ ID NO: 6260 - DNA, 280 bp, Zea mays
tctagaagcgcccctctccctctctctctctctcttcgccgtccgaagctccgcaccccaatctaatcgacacctcgccgagatgggccgcaagttcttcgtcggtggcaactggaaatgcaatggaaccacagatcaggtcgagaagattgtcaaaaccctgaatgaaggacaggttcccccttcagatgttgtggaggtcgttgtcagccctccttatgtcttccttcctgtggtcaagagccagctgcgccaagagttccatgttgcggctcagaac

SEQ ID NO: 6261 - DNA, 275 bp, Zea mays
agcatttgcccgagtggtaatgctatatgtggatatggaggtcaatggtgtacctttgaaggcttttgttgacagcggacgcaatcgactatcatatcaaaaagttgcgctgaacgttgcgggttgctgaggcttcttgatcagcggttccgacggattgctgttggagtcggtcaatcagagatactaggaagaatacatgtagccccaatatagattgggaatatattctatccttgttctttcaccgtattggatgctcctaatatggaatt

SEQ ID NO: 6262 - DNA, 279 bp, Zea mays
cggctcgagccgtcgtctgctccgggctgctgttctgcgcctccacaaggctttggcctcatcgttgtaagttttaagcttcacctccagccatgggtaaggagaagtcccacatcaacattgtggttattggccatgtcgactctggcaagtcaaccaccaccggccacctgatctacaagcttggaggcattgacaagcgtgtgattgagaggttcgagaaggaagccgctgaaatgaacaaacggtccttcaagtacgcttgggtgcttgacaagc

SEQ ID NO: 6263 - DNA, 280 bp, Zea mays
agccctctttcttctcagccatgtcggaggacgaagcgaacgctgctgctgcgccggcagagggaaagaactggcggcggaaggggaagcacgacaagcccaagccgtgggacgaggacgccaacatcgaccgctggaagatcgacaagttcgaccctgcctggaacgagggcggcatgctcgaagtcagctccttctccacgctctttccccagtaccgagagaagtacctacaggaggcgtggccggtcgtgaagggcgcattgaatgagtacgggat

SEQ ID NO: 6264 - DNA, 277 bp, Zea mays
tggaatctggaagcctcaggagatccccaaccctgagtactttgagcttgacaagcctgactttgatccaattgctgctattgggattgagatctggacaatgcaggatggcatcctgtttgacaatatcttgattgctgacgatgagaaggttgccacctccattctggagaagacctggaagcccaagtatgatgttgagaaggaaaaggagaaggctgaggaggaggctgctgctggtgcagatggtctttctgaattccagaagaagattttt

SEQ ID NO: 6265 - DNA, 217 bp, Zea mays
cgcaccaagaccgtgaagaagacctccaggcaggtgatcgagaagtactactcccgcatgaccctcgacttccacaccaacaagaaggtgctggaagaggtctcgatcctcccctcgaagcgcctccgcaacaaggttgccggcttcaccacccacctgatgcgccgcatccagcggggccccgtccgtggcatctcgctcaagctgcaggaggagg

SEQ ID NO: 6266 - DNA, 292 bp, Zea mays
gggagaatggcatcttcgattacaaggttcttcctcttcagggctcacaggagatttatgaccaagccaccggctccagctactgctataacccgcagacgagaaagctcgtttcttacgatacccctcacgctgccagagtcaaggctgattacgtcaagcagtggggtcttggcggcggcatgtggtgggagagcagcggtgacaaggagggccaagacagcttgattggaatcgttgtcaatgagtttggcggcccgcaagcgctccagaggaaggataactgcatcga

SEQ ID NO: 6267 - DNA, 289 bp, Zea mays
ctggagagtacttggtgaagaatggcatccgcacctttgcttgcagtgagacagtgaaatttggccatgtcacatttttctggaacggcaaccgctcgggatactttgatgaaactaaggaagagtatgtagaagttcctagtgacagtggtattacattcaatgttgcacccaagatgaaggcgcttcaaattgctgagaaagctagggacgctctcctaagtggaaagtttgaccaggtacgtgtcaacctgccaaatggtgacatggttggtcacactggggatat

SEQ ID NO: 6268 - DNA, 289 bp, Zea mays
aaaaaaactgtttgttagcgtgacgtgcgtgaggagtctggagtcggacggaatcgaaaaggcgaaaactcagtgtctcgagtttcctcggagcggaggcgatggctgggaagggagggaaaggcttgctcgccgcgaagactacggcggccaagtccgccgagaaggacaaggggaagaaggccccaatctcacgctcctcccgcgccggcctccagttccctgttgggcgtatccaccgtcagctgaagcaaaggactcaggcaaatggtcgcgttggtgccaccgc

SEQ ID NO: 6269 - DNA, 289 bp, Zea mays
aacctcctctgctctcccccacctcccggtccggcagcagagagcgggggtgcagagagatcgagatccggaggccgcgagtgggagcgccaccaccagcgtctgcggcaatggcgggcacggtgacggtcccggggtcgtcgaccccctccacgccgctgctcaaggacgagctcgacatcgtgatcccgacgatccgcaacctcgacttcctggagatgtggcggcccttcttccagccctaccacctcatcatcgtgcaggacggcgacccgaccaagaccatcaa

SEQ ID NO: 6270 - DNA, 288 bp, Zea mays
ggcaaacaaaacccacaaatcctgcgtttgattcaggaaaatcaagctgagtttgtccgcttggtgaacgaaactccggagggtggtcctggaggaaacatattaggtcaactggcagctgctatgccgcaatcggtgacagttaccccagaggaacgagaggccatccagcggcttgagggaatgggcttcaaccgtgagcttgtgctagaagttttctttgcatgcaacaaggacgaagagcttgcagccaactacctccttgatcatggccacgagtttgacgag

SEQ ID NO: 6271 - DNA, 288 bp, Zea mays
cttcctacccatcatatctccatccgcggttccgcccagctgctccacatctcaattctcaccacacacacgcacacacactatcgtccagcaagctcgctgttgcttgccacccaccgcctcagctcgatcgcaacgcgcttggcatggcgtccgaggtgtggctatcgccggcgtctcgcctcccatccctctccaacgcaccacctcgcttacgctccaagcctgccaccacaaccgcctctttgctctctccctgtccccgccctgcccgcgcactgcctgtgc

SEQ ID NO: 6272 - DNA, 283 bp, Zea mays
cgtggtgctgcaatcattaaagcgagaaagttctccagtgctctctcggctgctagctctgcttgtgaccacattcgtgattgggctcttggaacacctgagggtacatttgtttccatgggtgtgtactctgatggttcatacggtgttccttctggactcatttattcattcccagtaacatgcagtggtggtgaatggaaaatcgttcaaggcctcccgattgatgagttctcaaggaagaagatggatgccactgcccaagagctgacggaagagaaga

SEQ ID NO: 6273 - DNA, 284 bp, Zea mays
  unsure (1)..(284): unsure at all n locations
ttgcatactccaaatctttggatgagttccctcagaatggagcaacaattgtccactggataaaaaagttcccattcttttgcagtgaccgtgaatacatctttggaggacgcatatgggaatctgggaagacttactattgtgttacaaagggtgttccatatccatcattgcccaagaaagaaaaaccaaggcgtgtggagttgtacttctcaagttggcgtattagagctgttcaatcgcctanacatgtgggtcagcaatctgcgtgcgaagtaactttg

SEQ ID NO: 6274 - DNA, 276 bp, Zea mays
aggagctccaaggccgggctccagttcccagtgggaaggatcgccaggttcctcaaggccggcaagtacgccgagagggtcggcgccggcgcccccgtctacctcgctgccgtgctcgagtatcttgctgctgaggttctcgagcttgccgggaacgcggctcgggacaacaagaagacccgcatcgtcccgcgccacatccagctcgccgtccgcaacgacgaggagctctcccgcttgctgggcacggtgaccatcgccagcggtggtgtcatg

SEQ ID NO: 6275 - DNA, 285 bp, Zea mays
atcaatggaaagcaagttgaaattaagagaaccataccaaaaggttcggtgcaatctagctctaaggatttcaagactaaaaagatatttgttggtgggcttccgtcaacactaacagaagacgaattcaagagtttctttgcaagatatgggactgtggtggaccaccagattatgtttgatcatgaaaccaaacgttcccgaggctttggatttatagtttttgcttctgagcaagttgtagatgatttgttagcaaatggaaatatggttgaccttgctggt

SEQ ID NO: 6276 - DNA, 282 bp, Zea mays
tttttctgcaatactaaagaagctggatttgcaatacactttcctcaccactgaggaccattgccagctcattgcaaaatgcccgaacttactagttctcgcggtgaggaatgtgattggagatagaggattaggagttgttgcggatacgtgcaagaagctccaaaggttcagaatagagcgaggagatgatgaaggaggtgtgcaagaagagcagggaggggtctctcaagtgggcttgacggctatagccgtagttgccgtgagctggaatatatagct

SEQ ID NO: 6277 - DNA, 281 bp, Zea mays
gcaagagcatagtggacttcacgtgcagccacataaagctattgttggtgccaatgcgttcgctcatgaaagtggaattcatcaggatgggatgcttaaatataaaggaacatacgaaattatatcgcctgatgatattggtctaacacgtgcaaatgaatttggtattgttcttgggaaactcagcggaaggcatgctgtgagatctaagctagtagagcttggatatgaaatcggtgacaaggaatttgaggacttctttaaacgctacaaagaggttg

SEQ ID NO: 6278 - DNA, 278 bp, Zea mays
gttgggcgcagagaatccccaagcaaacaaacagggtagagggagaggagaggagaggagaggagaggttgggtctgggacaccatggctccgatgaagctgtacggggcggtgatgtcgtggaacgtgacgaggtgcgcaacggcgctggaggaggctggctccgactacgagatcgtgcccatcaacttcgccaccgccgagcacaagagccccgagcacctcgtccgcaacgcgtttggtcaggttccagctctgcaggatggtgacttgtacct

SEQ ID NO: 6279 - DNA, 278 bp, Zea mays
caactcggagtcggagattcccctcccagccgtcgaaagtcgaaaccctagccccgcctcaccgccggcggtggtggcagcctcagcaccggcacacagcccgccgtacctctcctcgtacgctcccttccggtgtgccgtcgccccctcgaccggtccatcgttcgtcggctcggtagccgccggatcggatcgggatcggccggcgccatgtccaaggccagggtctacaccgacgtcaacgtgctgcgccccaaggagtactgggactacgaggc

SEQ ID NO: 6280 - DNA, 278 bp, Zea mays
ctagcaccgccgcatccgcagccatgggtatcgacctcgttgccggtgggaggaacaagaagaccaagcgcacagcgccgaagtccgacgatgtttatctcaagctccttgtcaagctctaccgtttcttggtcaggaggaccaagagcaacttcaatgctgtcattctcaagaggctcttcatgagcaaaaccaatcgcccaccaatctccatgcgccgccttgtcaagttcatggaaggaaaggagaagaacattgctgtggatgttggcacagtc

SEQ ID NO: 6281 - DNA, 290 bp, Zea mays
  unsure (1)..(290): unsure at all n locations
gagcggtggggcacgcgcggccaagttatcctgttcgctaccgtgatgtttaccctagtccagagggtttatcttcgttcgtctcgtttgttgttgcccatctgtgtttttgattgcaaggtcgctctgtgtcagttgttagtgctgtgttcatcctcggctccagcagacgcatgcatcaaccagcatggactgtggatcgatggatgctgttactcctgtcaggatttgttctaagttaatcctaaggacaaaatggtgcttcttggtgctgcanaaanaaanaaaaa

SEQ ID NO: 6282 - DNA, 322 bp, Zea mays
cacgcaccccaccaacccatacccataccagaggctctctgattttacttctccgcggtagatcggctgagcgagcgagcgaggcacacggagctagctaaacagagcacacgggtagaaaagcaagatgtcggacggcacggcgacctgcatcgacatcatcctcgccatcatcctgccgccgctcggggtcttcttcaagttcggctgcggggttgagttctggatctgccttatcctcaccttcctcggctacctccccggcatcatctacgccgtctgggccatcaccaagtagccggccggagcagatgaaccacgg

SEQ ID NO: 6283 - DNA, 320 bp, Zea mays
tgttatcaaatcacttggattggacatcgagaatataaacaagtgtgttggagaccctgaagccgatgaggaaaatgaaattctaaaggcagaacaagatgcccaaattggccatggtaaaaggggagatgtcacaatactaccaacccttgtcatcaacaacaagcaatatagaggtaagctggacaaagttgctgtcctgaaagcgatctgttcaggatttgaggagacaactgaacctgctatttgtttgagccgagagattcaaacaaatgagtgtttggagaacaatgggggttgctggctggacaaagctaata

SEQ ID NO: 6284 - DNA, 315 bp, Zea mays
  unsure (1)..(315): unsure at all n locations
agntgcttcgacgaaaacagagagctcggtgacggtggcttcggcaccgtctacaaagggtacctcaaggacgggcgcgtggtggcggtgaaacggctgtacaacaacagctaccggcgcgtggagcagttccagaacgaggcggccatcctgtcggggctacgctaccccaacctcgtcatgttctacggctgcacgtccagctagagccgcgatctgctgctggtgtacgagttcgtggccaacggcacggtcgccgactacctgcacgggcagcgggccgccgatcgctccctctcgtggccgctccgcctc

SEQ ID NO: 6285 - DNA, 317 bp, Zea mays
caaaatcctttacctgcatcaccgtacaaattttacgttctagttgaaacaacaggaagtgatgaatcatctgacaagacaaaactggaagcttttttgttgcgttcaatggaagatggtttagtagctgatggagttatcgcacaggatatcagccaagcatcaaacttttggaggatccgtgaggcacaggtggatcatcaatcaaatgataagcaagaccatgacctcgcaaagcagtttctacacagaaggaccattcacgggaaaaaaccggcaatatccaaactgaccagatgagcaacttgatgcagaca

SEQ ID NO: 6286 - DNA, 319 bp, Zea mays
  unsure (1)..(319): unsure at all n locations
ctctatctctttcgccgagctcctcgaaaccctaggagcgtgcttgaccggcggcggcgaggtgatggcgatggaccctgacgcggtacgaaggccttcgtggagcattactaccgaacgttcgacaccaaccgcgcggcgctggttgggctgtaccaggagacctccatgctcaccttcgagggccagaagttccagggcccctccgccattgccggcaagctcggatctctccctttccaggcctgcgagcatcagatcgtcaccgtagactgccagccatcgggtcgccagngangcatgctcgtcttcgtctccg

SEQ ID NO: 6287 - DNA, 313 bp, Zea mays
cgaagaccaccagtggtggtggagatctgtcctgtgcggaggctcgacaggcatattcatattcttctactgcatctactactaccacgcgcggtcggacatgtcggggttcatgcagacgtccttcttcttcggctacatgacctgcgtgtgctacggcttcttcctcatgctgggaacggtcggcttccgcgcgtcgctcttcttcgtgcgccacatctaccgctccatcaagtgcgagtaagcgccggacgtgcgcacgctgtctggcatgctcatggctgttgttccgggtggcttgggatccaattgc

SEQ ID NO: 6288 - DNA, 292 bp, Zea mays
  unsure (1)..(292): unsure at all n locations
ganacagcaagcttacccagattctcagcgactcgctcggcgatggttcgaaagttgtaatggtggtgcacgtcagcctatccgaggacgacgtcggcgagacggtctgctcgctgaacctggcgaaacgagccagatcgatcgagtccaacagagaaatcccacaggatctgaaaacgctgaagcagaagaggctcgcggagctggacagggagatccgcgccgccgaggaagagctgaagcgtctcgacgaggagataaggagagcggaggagaaggagatctcactcga

SEQ ID NO: 6289 - DNA, 308 bp, Zea mays
agtttgcttcctttgagaccatcgttgagcttatctacaagcatgctgtgcctgttccgaagtctgagtgcaccaagactacccagttgggtattagctttgctggtggttacattgccggtgtcttctgtgctattgtttctcacccggctgacaaccttgtgtctttcctgaacaatgccaagggagctacagtgggagatgctgttaagaagcttggtctctggggtctcttcactagaggacttcctcttcgtatcgtcatgattggtacccttactggtgctcagtggggaatttacgatgca

SEQ ID NO: 6290 - DNA, 304 bp, Zea mays
acctcaagtacctactggtcccatattaccttgcagaaatgaccgaaaagatagcacaggaggatcggatcccggttcttaagacgtcacaggaccatctgaaggagttcattgctctatgtgaagtactagagcttatcccagaggatgagctagaattgtctaggcagaagcagccagatactatgacaaacagaagagcgcagaaggttgcccggttcaaacgtcaaaaggctgcagaaacgaagctccaagagatcagagagagaaaagaaaggcgtggacgctcattgagagcagctgc

SEQ ID NO: 6291 - DNA, 304 bp, Zea mays
tcttgaagctgcttgactcccacctagtgccttcttctactgctgctgaatcaaaggtcttctacctcaagatgaagggtgactatcacaggtatcttgcggaatttaagactggtgctgagaggaaggaatctgctgagagcacaatggtggcctataaggctgctcaggacattgctctggctgagctggcacctacccatccgataaggctgggacttgctcttaatttttcagtgttctattatgagattctgaactccccagacaaagcttgcaacctggcaaagcaggcgtttgatga

SEQ ID NO: 6292 - DNA, 304 bp, Zea mays
tgcacaccggggacattggttatgtggacgatgacgacgagatcttcatcgttgacaggctgaaggagataatcaaatacaagggcttccaagtacctcctgcggagcttgaagcccttctcatcacacatcctgaaatcaaggatgccgctgttgtctcgatgaaagatgaagtcgccggcgaagtcccggtggcattcattatacgcagtgaaggctctgagatcagtgagaacgagatcaagcagtttgttgcaaaggaggtcgtgttctacaagaggatcaacagagttttcttcacgga

SEQ ID NO: 6293 - DNA, 302 bp, Zea mays
ggacagactagcagctttgaaggctaaggacaagaagcatggggcagaatctgcaactcctgaacccaactctgaggttctcttcctgtgcagctacgaaggatgtgggaagacattttttgatgcaggggctcttaggaagcatgctcacgtccatggggagaggcaatatatctgtcactatgagaactgtggcaagaaattcttagatagttctaagttgaagagacattttcttattcatacaggagaaaagaattttgtgtgcccacatgaaggttgtgggaaggctttttcgttgg

SEQ ID NO: 6294 - DNA, 303 bp, Zea mays
ctagtcgacccggtgcaaaggaacactgtcggcgtgccggcagggggctgggtcgccatcaggttcttcgcggataatcccggtgtttggttcatgcattgccatctggaggtgcacacaagctgggggttgaagatggcatgggtggtcaacgatggcccgttgcctgagcagaagctgatgccgccgccggccgatcttcccaagtgctgaagatccaccgcgcgttgacattgtccaacattatatatgattcgtttctattgcataaacatatcaatggagatacacattgtcgtcgta

SEQ ID NO: 6295 - DNA, 250 bp, Zea mays
acgggacaggcagccacggccctgaagctgctgagggagaagaaggaccagtttgaccttgtgatcagcgacgtccacatgccggacatggacggcttcaagctcctcgagcttgtgggcctcgagatggacctcccggtcattatgctgtctgccaatggggagacacagacagtcatgaaggggattacccatggagcatgtgactaactgctgaagcccatgcgtattgagcagctgaggactatat

SEQ ID NO: 6296 - DNA, 276 bp, Zea mays
gcaccgcacacctcactgccgctcccttctcgtctcgtctcctctcctctcctcggcggatccggcaccgacccaccgcccctctgctcgttccttccgccggaatcgctgctcctctctgtgtgctgtcgatttgtgcggcgactgttagtttggttcggtcccatccttctgttgatcaatggctgacggtgaggatatccagccacttgtgtgtgacaatggcactggaatggtcaaggctggctttgctggcgatgatgcgcccagagcagt

SEQ ID NO: 6297 - DNA, 135 bp, Zea mays
ggctgtcggagtcatcaagagtgtggagaagaaggatccaactggagccaaggtgaccaaggctgccgcaaagaagaaatgatgtgtctggctggttctatgtttccacgagggttccctcatggaaacatagaa

SEQ ID NO: 6298 - DNA, 271 bp, Zea mays
  unsure (1)..(271): unsure at all n locations
gggttttgctgctctccgaccccgagctccgaaagccgcagcatcaggcgcggcccccctcgcgtgtgaccgagatggcgctgccgaatcaggggaccgttgattaccccagcttcaagctcgtcatcgtcggcaatggtggaactggtaaaactacatttataaagaggcatctcactggagnatttgcaaagnaatatgaaccaaccattggtgtggaagtacatccgttggatttaaccactaactgtagtaagatacggttctactg

SEQ ID NO: 6299 - DNA, 252 bp, Zea mays
ggcgaccatgagcggcgtgacgtgctgcctgcggttcccgggccagctgaactcggacctccgcaagctggcggtgaacctgatcccgttcccgcggctgcacttcttcatggtggggttcgcgccgctgacgtcgcgcgggtcgcagcagtaccgcgcgctgacggtgccggagctgacgcagcagatgtgggatgccaagaacatgatgtgcgcggcggacccgcggcacgggcggtacctgacggcgtc

SEQ ID NO: 6300 - DNA, 255 bp, Zea mays
ctccctccctcctctctttctctcctctaacaagaacttagtcccggcagttcagatcctaagttgctgaccttgctgctgattgttggagatagatttgctgcttctaagttggaaataccatgagtccaccgagtgtgatggggcagtttggggacacgacctacaccaaggtttttgttgggggactcgcgtgggaaacccagaaggagactatgaggaagtatttcgagcagtttggagagatcctggagg

SEQ ID NO: 6301 - DNA, 258 bp, Zea mays
agtttttgtgcctggagaggatggatacaaggctggaaaagaaaatggatatgactttgggttcctgcacataaaggccattgatgacgctggtcatgacaaggctgtcaagttgaaagtacggggtctagaagctgttgatcgagctattggtcagcttgcgaggcttctttgggaagctgaaaaggccggacactatcagtactttctttgcgtcactggagaccattctactcctgttgaatacggtgatcatag

SEQ ID NO: 6302 - DNA, 312 bp, Zea mays
caagtctcgagcgccttcgctggcaccagggagaagtgtgtcggatgcagcaagacagtctatccaattgagagggttactgtgaacaacaccatgtaccacaagtgctgcttcaagtgctgccatggaggatgcaccatcagcccttctaactacatcgcgcacgaggggaagctctactgcaagcaccaccacgtccagctgatcaaggagaaagggaacttcagccagctcgagaatgaccacgagaagacatcgcaggctgggtcgctggaggacgacgaagaagaagagtattaattaatcgctgag

SEQ ID NO: 6303 - DNA, 311 bp, Zea mays
cgagaagaatctcaagacacggaagctggacaggcaggtgagggccatgctcatggacatcatcgaggcccgtctcgccagcaatgacaccgccggcggttacgggaacgacctgctcgggctcatgctggaggcgtgcgcgtcgccaccggagcaccatggcgagacggcgccgacgacgctgagcatggacgagatcgtcgacgagtgcaagaccttcttcttcgccggccacgacaccacgtcgcacctgctcacctgagcctccttcctgctgagcacgcacccggagtggcagcacaggctccggg

SEQ ID NO: 6304 - DNA, 300 bp, Zea mays
  unsure (1)..(300): unsure at all n locations
cggacaaggagcgggcggaggaggagctgtgccaagccacaatgggtatctcacgcgactcgatgcacaagcgccgtgccaccggtggaaagcagaaggcctggaggaagaagcgaaagtatgagcttggtcgccagccggccaacaccaagttgtcaagcaataagacagtgaggagggtccgtgttcgtggaggtaacgtgaagtggagggctcttcgccttgatactggtaactactcatggggaagtgaagctgttacccgcaagacncgtatcctcgacgtggtctacaatgcat

SEQ ID NO: 6305 - DNA, 308 bp, Zea mays
tgcaggttgtccaatccagtgtgctgcctgacatgttcaagggcacctatgaggctatcacaaaaggcaacccaatgtggaaccagctaactgtcccagaagcatcactctactcatgggattccaaatccacttacattcatgagcccccttactttaaggacatgaccatgtccccacctggcccctctacagtgaaagatgcctactgcttgctgaacttcggggacagcattactacagatcacatttcacctgcaggaagcatacacaaagacagtcctgctgccaagtatttgatggagcgt

SEQ ID NO: 6306 - DNA, 305 bp, Zea mays
  unsure (1)..(305): unsure at all n locations
ccgccgtcgcggtgggggaggcggctccgggtcgactgggggtggctttggcggtgggtctggcggtggcggtggttacggcataggtaagggtggcggggactggtggaacaatttcgtctctagtatagcaggtggtggaggaggaggacaaggcggaggcggtggcaccaatggtgggtccgggtccggcggtgggtccggttatggttctggcagcagctcgactgcagcctctggccccagcagtggcaactacgccgacgctngaggcacaggcgccggtggaggcatgggcggtggtg

SEQ ID NO: 6307 - DNA, 303 bp, Zea mays
gcattaagaaggtcgagaaggagatcaaggaaatggccaagaaaatcaacgacctctgtgggataaaggagtctgatacagggctggctccacctagccagtgggatttggtttcagataagcagatgatgcaagaagaacaaccgttacaagtagcaagatgtacaaagattataagccctaatacggatgatgccagatatgttataaatgtagaacgaattgcacagtttgtggttggattgggagataaggtctctccaactgatatcgaggaacggatgaggggtggtgttgatcgca

SEQ ID NO: 6308 - DNA, 312 bp, Zea mays
cggcaagggcggcaaggggctgggcaagggtggcgccaagcggcaccgcaacgtcgtccgcgacaacatccaagggatcacgaagccggcgatccggaggcttgcgaggaggggcggcgtgaagcgcatctccgggctcatctacgaggagacccgcggcgtgctcaagatcttcctcgagaacgtcatccgcgacgccgtcacctacactgagcacgcccgtcgaaaaaccgtcaccgccatggacgtcgtctacgccctcaagcgccagggtcgcaccctgtacgggttcggcggctaagcgcgccctgt

SEQ ID NO: 6309 - DNA, 108 bp, Zea mays
gacgacttgtttcattgattcttgaagagatcgagcttcttttgcaccacaaggtcgaggatgtcttgcaactgcggatcaagctgcggctgcggctcaagctgcaag

SEQ ID NO: 6310 - DNA, 306 bp, Zea mays
gaggaacaactggaaaagaagaaggctgaatatgcagagaagatgaagaacaaggttgcaatgatacacaaggaagccgaagagaagcgagcgatggtggaggcaaaacgcggtgaggaggtcctgaaggccgaggagatggctgccaagtaccgggccaccggccacgctcctaagaagctcatcggttgcttcggagcctaagaaaccttccaagtcagaccgagcagaaagtgagaaacgtcagccagtgattgcttggtcctctcgctctatcaagtgtgtagtgtgtcttcgaaagtttgt

SEQ ID NO: 6311 - DNA, 261 bp, Zea mays
ccagaacttcagcaaagagtcaagaatttctgtaatactcgttctccagagcattggctgaaaaatcaacatccaaaaagagctgagctccagaaagctcttggcagccatctttcatggaaggaccgctatccacccttcttcgatgacattgctgcacgtctgcttcctgttattccactgattatttataggcttattgagaatgatgcaactgacattgcagacagagttcttgcattctattcttccttgcttgcc

SEQ ID NO: 6312 - DNA, 310 bp, Zea mays
gtttattatgacaccagtgaccgggaggaaggtatgcacctactaccatttggtgtccatgcctgctattctcctaattgaccccgtcactgggcaaaaaatgcatgcttggaatggaatggttcacccagatcgtttacttgaggatttactaccttacctggataaaggtccgaagagcaccatgcagctcaacctcaaaagcgcccaaggaaagttgatccggaagcttctacgggcaagcaaggcaaaatagctgtagaggatgaagatgaagagctagcacgggcagtagcagcttctctagagg

SEQ ID NO: 6313 - DNA, 205 bp, Zea mays
ccccgaaactgcaaacttttggtttcagtgaaggagaactgcaggcggcagggccacggcgaggcgctgctggcgggcgcagtggagcggtgccggcggcggaaggtccagcggctctccctccacgtcgaccccacgaggacggctgccgtggcgctgtaccgcaaggccgggttccaggtcgacaccaccgtcgagggctact

SEQ ID NO: 6314 - DNA, 260 bp, Zea mays
gttgcatttttgctgaactgcttacactgaaacctctattccaaggtgtggaagcaaaaaatcctccgaacccattccagcttgatcaactcgacaagatttttaaggtcttaggccaccctacagttgaaaagtggcctacccttgccaatcttccatggtggcaaaacgaccaccaacacattcaaggacataagtatgagaacccaggtttccataacattgttcatttaccaccaaagagtcctgcatttgatctt

SEQ ID NO: 6315 - DNA, 298 bp, Zea mays
agcgatcagaaatattatcaggtacctttgtgcatcgcggatgaagaatctaccttctccagagatggaaggagttgatactcttctgatgtatctttatagagcacttcatcttgttgatgacatggagaagctcgcatcatctcagaatagctgtattgtggatgaactggaatcccttttggatgactctggacatttgcggacacttgctttcttgtatggcagcaaaggaatgtgctccaaagccctttctatatggcgtgtactggcaaggaattatagtgcaggtttgtgg

SEQ ID NO: 6316 - DNA, 301 bp, Zea mays
ccataatgcttttgatcttcttgcaagatatggcaccactcaccttgtattcaatgatgatattcagggaacagcttctgtggttcttgctgggcttattacagcacaaacattacttggtggttcattggcagatcacacttaccttttccttggtgctggagaggttattttctctgtgattcttttataggcatttattttcaaggtagtctttatatgctgatttctacggtattgttatctaataaaataccggacgtaatgtgctgatctacccctctttatttcaagcgtgtca

SEQ ID NO: 6317 - DNA, 304 bp, Zea mays
ttggaattctcactgagattggaaattgcaattgatgtggctcatgctattacatatcttcatacctattcagatcatccagtcatccacagagacatcaaatcctcaaacattcttctaatgaacaattgtcgagccaaggttgctgactttggattcgccaaactggctccaactgattctagtcatatatctactcaagtcaaaggaacagcaggctatctcgatccagaatatctcagaacataccagctcaatgagaagagtgatgtctactcctttggagtccttctggtggagttgg

SEQ ID NO: 6318 - DNA, 301 bp, Zea mays
ggaagcgagtggctataggcacagctcgtggactggagtatttgcacgagcactgcaatcctaagattatacatcgtgacgtcaaggctgccaatgtcttgcttgatgaaggttttgaaccggtggttggggatttcggcctggccaagctggtggacgtgcagaagacgtccgtgactacccaggtccgtggaaccatgggtcacatcgcccccgaatacctgtccactgggaagtcctccgagagaaccgatgtttttggctatggcataatgcttcttgagctagtcactggtcagcg

SEQ ID NO: 6319 - DNA, 261 bp, Zea mays
  unsure (1)..(261): unsure at all n locations
gaggcttgtataactcgactcncagaggtcagtgacttaaaggaggttgccggcggtgcgttgaagaaatggcccgagaggctcactgcagtgccacccagaattgccagtggcagcatcgagggggtcacggaagagatgtttgtggaagatactgagttatggaagaagagagttgggcactacaagtccgtgattgcgcaacttggtcagaaaggccggtaccgcaacctactcgatatgaatgcaaagtttggcggc

SEQ ID NO: 6320 - DNA, 296 bp, Zea mays
tatccatcgcttccaagacctcaaaatgcatcagcaggctgcgaggtctgccctcgaaatacagcttctcagagagcacaagcctcccctcgctcctccgggcctcgtccgcaagtacctggaccatcgcgtccttctcctcccggatccacgggcggctcggatcacaccactgcctcggggtaccatggagggcgaacggaggctcttgtcgccggcgcgcacgacgtgctcgcgtatcctcccgatcaccgcgcggtcggccacgtacgctccggcgcggttgaggccggcgt

SEQ ID NO: 6321 - DNA, 249 bp, Zea mays
gtcctccagtactggaaggagagcgtgaggaggcctgacagggtgttgttccttcgttacgaggaggtgctgattgagcccgaggcgcacgtcagaaagctggccaatttcatgggctgtggattctccgaggaggaggaggagcgcggggtggtgagcaccatcgtggagctgtgtagcctgggcaagctgagggacatggaggtcaacagaaatggaagcactaggcttgggtacaagaacgaaagc

SEQ ID NO: 6322 - DNA, 296 bp, Zea mays
tcttcaccaagttctccggtgggctcttggttctgtcgagatcttcttcagtcggcactgcccgctgtggtacggttacggtggcggccgtctgaaatggctccagaggctctcctacatcaacaccatcgtgtacccgttcacttctcttcctctcgttgcctactgttgcctgcctgccatttgcctgctcacaggaaagttcattatacctacgctgtccaacgctgcaacgatatggtttcttggcctcttcatgtccatcatcgtgacgagcgtgttggagctgcggtgga

SEQ ID NO: 6323 - DNA, 296 bp, Zea mays
ggagtattggtctgtgataatcgccactgttgttttcgcatttgttggcgcggtgacaatttactatacagtcaatcagttgaacaagaacatcagcttgagcctgataagggctatcaaggccagggccaagaggtacaagaaatcgaaggacaaggtgcccgctgcatcccacatctggaggaaagaagttgtctcccgcagcaaaggcctgaaatgctgcgtgtgcttgaagtccgtttcacctcctcagtactctggggggaccatccatcagtgcgatatctgcggggccg

SEQ ID NO: 6324 - DNA, 296 bp, Zea mays
atttatgttacatacaacgatgacttttttgactggccatttttagacaagagggctgcacaccatggaataaaaatgaatgaggagattggtttccaatgtgacaataaccagggcgagtgtcgggctaaattttcttgccatcttgactgttttgcttgggtgaagcgagacagttaccttccacaaggaagccaaggtctaaagcacacctgcaggctgttacaaaagccaagctacgttacgatcctctggaggttaatccagaagatatggttcgctttgcaatggagcag

SEQ ID NO: 6325 - DNA, 299 bp, Zea mays
cggctcgagtcctgatgatattgttgaaattcgagctgaatatgatcctttgaagacttctaaactgaagggtgttcttcactggattgctgagccagcacctggtgtagagccattgaaggtggaagtaagattattcgagaaattgttcatgtcagagaatcctgctgaattggaagattggcttggcgatcttaacccacactcgaaagaggtgataaaggatgcttatgctgtaccatcacttgccactgcggttctgggtgacaagttccagtttgagcggcttggttacttcg

SEQ ID NO: 6326 - DNA, 249 bp, Zea mays
ccagaaggacccgttccgggtgcccaccaaggacaacatccggatggcgatgcagtggctggtgcaggggtgcagcagcggcgactccctggtgttccacttctctgggctgggcgcgaggtcgccgacgcggactgcgacgagcagacggtacgacgagcatctgcccgtggatcgttcaaaggccatctgagacgagtcacgagacacgccgcgtgtgcggcaatcagcgtgtcaggtgcaatatcg

SEQ ID NO: 6327 - DNA, 311 bp, Zea mays
cgcaatcgagatcaggaacttcctcggcgagaagaaggtcaggaaggtggacatgcttgatggcgtgaccatcctccggtccgagaaggtcaaggatgagctcatccttgacggaaacgacgtcgagctcgtatctcgctccgccgccctcatcaaccagaaatgccatgtgaagaagaaggatatccgaaagtttttggacggtatctatgtgagcgacaagggcgtcatcgaagaggagcagtgagcgacagagtagccgaaatgccaggagatgaatatgaatgtcgtttgagttgcaattttgtgag

SEQ ID NO: 6328 - DNA, 310 bp, Zea mays
cggctcgagcaacactgccgttgctgaggtgttctcgcgcatcgatcacaagttcgaccttatgtacgccaagcgggcgttcgttcactggtacgtcggtgagggtatggaagagggtgagttctccgaggcccgtgaggacttggctgctcttgagaaggactatgaggaagtcggcgcagagggtgcagatgacgagggtgacgagggcgatgactattgagtagccggttaataattagttcgctggtgcttaatggttgagttattttgagtatactctgtatgggtccactccattgcgtgctgc

SEQ ID NO: 6329 - DNA, 309 bp, Zea mays
attgcagcaacgcccagccgataacgatcgctatgtcaggaactgtcgcaatgggaggtcaccaaaggagaccacgtggtggttccatgacgacactgtgtgatgggtgtttccggctgttgtcctgcccgcattttagttgccagactacatgggagatgatctaggcatatttcaagcgacccatttgaccagaaactaacacgctcttctggtttgtaaatgagtgtgcatcagcgtcacgtctctgtacttgttgatccttacaccgtctatagtatgtagaataatgtttgtatctttgtcaat

SEQ ID NO: 6330 - DNA, 288 bp, Zea mays
cgcagatccgagctaaccaccatcgacgagcgccaccgccagcagccgagccggagcgaccttttcttttttcttttacacagcggcggctggagggactgatgtgtgggcccatcctggcttcggccgagttatcttatctatctatagtatcgtgttaccgttcgcttctgtcaccgtgttagtgtccgttctacctttggattaggtgttggtaccctgttgttcgctttggttgctcgcgctatgaaacgagacgagagaagaatgagcaaggtttttgttcgc

SEQ ID NO: 6331 - DNA, 306 bp, Zea mays
cggcgaccgagggcgtgctcctggggatgggcaaccccctcctcgacatctccgccgtcgtcgatgacgccttcctgacaaagtatgacatcaagctgaacaatgctattctcgctgaggagaagcacttgcctatgtatgacgagttggctagcaagagcaatgttgaatatattgccggaggagccacccagaactctatcagggttgcccaatggatgcttcaaactcctggtgcaacaagttacatgggatgcattggaaaggacaagtttggtgaggaaatgaagaaaaacgctcaagctg

SEQ ID NO: 6332 - DNA, 299 bp, Zea mays
  unsure (1)..(299): unsure at all n locations
gtcactcccggagacgcgtacgccgcgattgacctcccgatcatcggcctgctcttcgggacaatggtcgtcagcatcttccttgagagggctgacatgtttaagtacctcgggaacctgctctcgtggaagagcagaggcagcaaggacctgctcttccgagtctgcatcgtgtccgcgtttgccagcgcgcttttcaccaatgacacatgctgtgttgtcctcaccgagttcatcctcaaggttgctaggcanaacaacctgccaccacagcctttccttctggcccttgccactag

SEQ ID NO: 6333 - DNA, 301 bp, Zea mays
gcggcttcttcaagctcaaccccaaggagggcctcgccatcgtcaacggcacctccgtgggctccgcgctcgggccaccgtcatgtacgacgccaacgtcctggccgtcctctccgaggtcctgtccgccgtcttctgcgaggtcatgaacggcaagcccgagtacaccgaccatctcacccacaagctcaagcaccacccggggtccatcgaggccgcggccatcatggagcacatccttgagggcagctccttcatgaagcacgccaagaaggtcaacgagctggacccgctgctcaag

SEQ ID NO: 6334 - DNA, 305 bp, Zea mays
accggcgcccgctactacggcggcaacgacgtcatcgacgagatcgagaacctctgccggtcacgcgcgctcgctgccttccaccttgacgccgcgtcctggggcgtcaacgtgcagccctactcgggctcccccgccaacttcgccgcctacaccgcgctgctcaacccgcacgaccggatcatggggctcgaccttccctccggcggacacctcactcacgggtactacacggccggcggtaagaagatctccgcgcactcgatctactttgcagagctgccgtacaaggtgagcgccgcaac

SEQ ID NO: 6335 - DNA, 295 bp, Zea mays
gttgtgtttatccaaggacacgctgaggtcgccgccgccggagagcgagacgatgaaaaaggcgacgagagcgagcatcgctatcaccaccctcttctacctctgctgcgggtgctttggctacgcgtcgttcggcgacggcaccccgggcaacctcctcaccggcttcggcttctacgagccctactggctcatcgacctcgccaacctcgccatcgttctccacctcctcggcggctaccaggtgtacacgcagccggtgttcgcgttcgcggaccgcaagttcggcggcggg

SEQ ID NO: 6336 - DNA, 304 bp, Zea mays
ctcgttgccggagccggagccgacggggcggggcggatcgacaccgccgccgagtacatgcccacctacgaggacaaggacggcgactggatgctcgtcggagagtccccttcaagatgttcgtggactcgtgcaagaggatccgcctcatgaagagctccgaggccgtcaacctatctccgaggacatcatcccggcagtgattgttgttggtgtggacgccatatgccctacgcggcttatctctccgaattagttcacagagtgtgtgctggaagaggcttggctgctcaggtcctccatg

SEQ ID NO: 6337 - DNA, 305 bp, Zea mays
cggcaaccccgcacgaaaacaaaaagggcgaaacgaggccaccagctcaccgccgagcggaagcggcgccgagcaaccaacccctctcctcgtccgccgccgtctccccggaccatgtccatggccgcctcctcccggctgctctgggcgtcccgcgccgccgcctacctcaagatctccaccttccccagggccttctccaccgtgctgaaggatctgaagtatgctgacactcatgaatgggtgaaagttgagggtgattcagcaaccgtggggattactgaccatgcccaggatcatttggg

SEQ ID NO: 6338 - DNA, 298 bp, Zea mays
gctgagttgaaggcagctggggcttcatggattcagtttgatgagcccactcttgtcctcgaccttgattctgacaaattggctgcattctctgctgcatacgcagaacttgaatctgtactttctggattgaatgtgcttgttgagacttactttgctgatgttcctgctgagtcctacaagaccctaacatctctgagcagtgtgactgcctatggttttgatcttgtccgtggaacccaaactcttgggcttgtcacgagtgctggtttccctgctggaaagtactctttgctgg

SEQ ID NO: 6339 - DNA, 302 bp, Zea mays
gtggtgacaaacctatagctgatggaagtcttcttgatttcttgcgtcaagtatcaacttttgggcttgcccttgtgaagctcgacatcaggcaggaatctgatcgacacactgatgtccttgattcgataacgacacatcttggaattggctcctatgctgaatggtctgaggagaaacgccaggattggctgttgtctgaactgaggggcaaacgtccattgtttggttcagatcttcctcagactgaagagactgctgatgttttaggcacatttcatgtccttgcagagctcctgcag

SEQ ID NO: 6340 - DNA, 289 bp, Zea mays
  unsure (1)..(289): unsure at all n locations
atggactaagcccatctgcattggaaggcatgccttcggtgatcaataccgagctaccgatgcagttctgaaggggcctgggaagctgaagctagtttttgagggaaaagaagaacagattgatctggaggtattcaacttcactggtgctggaggagttgccttgtctatgtacaacaccgacgagtcaatccgagcttttgctgaggcttctatgacaactgcttatgagaagagatgggcactctaccttagcagcaanaacacaatcctgaaaaaatatgatggc

SEQ ID NO: 6341 - DNA, 299 bp, Zea mays
  unsure (1)..(299): unsure at all n locations
ggcaaaaataatgcaaagtctggatccgtagaattccagcagcaacgaacagcagagagatgatcggggagattgagaacagatcagcttatgttttagctattaaatcagacgtagaaaatcaaggcaacttcgtgaacttcctcgcaagtgaagttcaaaacgcagcatacaaaaagatagctgacgttgaagagtttgtgaagtggcttgatggggaattgtcataccttgtggatgaaagagcagtgctanaacaattccccaactggcccgagaagacagcagatgccttgaga

SEQ ID NO: 6342 - DNA, 293 bp, Zea mays
gccgccgtcttctgcggttctgccgtttactcttccactttggcctcctctcttgcaagtttaagcttcgcctccagccatgggtaaggagaagtctcacatcaacattgtggttattggccacgtcgactctggcaagtcgacaaccaccggccacctgatctacaagcttggaggcattgacaagcgtgtgatcgagaggtttgagaaggaggccgctgaaatgaacaagcgatccttcaagtatgcttgggtgcttgacaagctcaaggctgagcgtgagaggggtatca

SEQ ID NO: 6343 - DNA, 295 bp, Zea mays
cgctcgcctcccacttgcgggcgtctcgctgaactggttgcgccgtaccagctgcgctccgtctccacagaaactgcttccaagtctctagctctctgcgggtgcatctgcggttgtatttgtaaagatgggttgctgctttatgttcggaaagaaagctaagcaggccgttgaaggcgatgaagatctacatagcgtcaaggtgttttcttacaacgacttgaggaaggctacacaagattttagtgacgcaaacaagattggcgagggcggtttcggttctgtcttccgggga

SEQ ID NO: 6344 - DNA, 291 bp, Zea mays
  unsure (1)..(291): unsure at all n locations
ctcttctcnctcttgccggtcncgaataaagagcagcagcgccagaggtcggtagagcgagaagaaggcaatggcggccgagagcttccttttcacctcggagtccgtgaacgaggggcaccccgacaagctgtgcgaccaggtgtcggacgccgtgcttgacgcatgcctcgcgcaggaccccgacagcaaggtggcctgcgagatctgcaccaagaccaacatggtgatggtgttcggcgagatcacgancaaggcgatcgtggactacgagaagatcgtgcgcgacac

SEQ ID NO: 6345 - DNA, 273 bp, Zea mays
caaggagaaggagctcggtgggtctattttgacatagtattttccttgtataatgagtcgttcacattgcttatcgagacagactgtttcatttagcaatgtgaaggactcattatacaaggaaaatactatgtcaaaatagagccacaaggagaaggagctcggtggcgtcggacatttggagaggaaatatactcccctctgcttcttgctgtcacagagcacgatgcaggcaactgggcgaattcacatgttgcaaaattctctgcgatg

SEQ ID NO: 6346 - DNA, 238 bp, Zea mays
gcaatctgcaagtacgctgctcgcaaaaacaagccagagctgttgagggaaggaaacctcgaggaggcagcaatggtggatgtttggatcgaggtggaggctaaccagtacaccgctgcactgaatcccatcctcttccaggtcctcatcagtccgatgcttgggggaaccaccgaccagaaagttgtggatgagaaccttgagaagctgaagaaggtgctagaggtgtacgaggcac

SEQ ID NO: 6347 - DNA, 297 bp, Zea mays
gctggtggcgctgctgctgggcctcaacatgtcgtggagcgccatcaccgccgccctggcgctcatcgtgctggacttcaaggacgcccgcccctgcctggagaaggtgtcgtacccgctgctgctcttcttctgcggcatgttcatcaccgtggacggcttcaacaagacgggcatccccagcgcgttctgggacttcatggagccgtacgcgcggatcgacacgcccacggggacggccgtgctcgcgctcgtcatcctcctgctctccaacgtcgcgtccaacgtgccgacggt

SEQ ID NO: 6348 - DNA, 270 bp, Zea mays
tcagaacccaagtgctgctcaagcttattaaaccgtatacacgaatcaggattccattcatttcgcaggaactcaatttcccggagaaggatgtggagcagctgttggtatcgctcatcctggacaaccgaatccaaggccacatagatcaggtcaacaagttgctagagcgtggagagaggtccaaggggatgaggaagtacaatgccatcgacaagtggaatactcagctgaagtccatttaccaaacattgtccaacagagtttgat

SEQ ID NO: 6349 - DNA, 108 bp, Zea mays
aggatcgtcgccaaggccgtccaagaggaccccacggccaacgcgccgctgctcaggctccacttccacgactgcttcgtccggggctgcgacggctccgtgctcgtc

SEQ ID NO: 6350 - DNA, 106 bp, Zea mays
aggctcgagtggaaccagaccaagcggcaaaggtcactggaatgcttttggagatggatcagactgaggtcctccagctgcctgagtcccctgatgcactcgagtc

SEQ ID NO: 6351 - DNA, 298 bp, Zea mays
aggaggagccatgtctgaggagaagcaccaccaccacctgtttcaccaccgcaagccagaggaggagggcgcctccggcgaggtcgactacgagaagaaggagaagcaccacaagcacatggagaagctcggcgagctcggcgccatcgccgccggcgcgtacgccctgcacgagaagcacaaggccaagaaggacccagagaacgagcacgggcaccgggtcaaggaggaggtggccgccgtcgccgccgtgggctccgccggcttcgctttccacgagcaccacgagaagaaggac

SEQ ID NO: 6352 - DNA, 222 bp, Zea mays
tgtccaacagcctcctcaccttccgcttcgtgtccgccgcggacgaggcctactacagctacggcgtggtagacagcgccgccgtgctcacgcgcttcgtcctcgactcgtcggggcagatccagcgcctcatgtggatcgacatgacccgctcctggagcctcttctggtcctacccgctcgacgagtgcgactgctaccgcgcctgcgggccctacggcg

SEQ ID NO: 6353 - DNA, 290 bp, Zea mays
caacaccacctcgcctgcgatcttcgtagcctccgtcgcgtcgagcatcgatcatgtcggcctactgcggaaagtacaaggatgagctcatcaagaatgctgcctacattggcacccccggcaagggtatccttgctgctgatgagtccactggcaccattggcaagcgcctttccagcatcaatgtcgagaacgttgaggagaaccgccgtgccctccgtgagctcctattctgctgccctggtgctctccagtacatcagcggtgtgatccatcttcgagagacctgt

SEQ ID NO: 6354 - DNA, 296 bp, Zea mays
cccgcaaccgcacagagaaacgggaggaggctctctacccagcgcaccacgagcacccctccccccggatcgggacccctgctctgcgcaatccacccatggcggaggaatcaggccgccccttgccaaagtttggcgattgggatgttaatgatccagcttccgcagacggattcactgtcatattcaacaaagccagagacgagaacaagggtgggaacggacaagacactgagtcaccttccaaggacaccaggactgagagggtggaatcttatgctgcaaagccaagcacg

SEQ ID NO: 6355 - DNA, 294 bp, Zea mays
tgggaggtggtgatgcacatttcattgttgatgagagcagcgagcagagttggaccctgaggtccttatccgaatcaactgtagcatgtgttactagtgattatgccatgcaaaatgtcatcctgctgattggtctccgtctcatagcaccaggtggcatgcagatacgccagatgcataggtgggttttgaggtgccatgcttgctataaggtgacccaagaggttggcaaaatattttgtccgaagtgtggtaatggtgggaccttacggaaggtttcggtaacagttggtg

SEQ ID NO: 6356 - DNA, 253 bp, Zea mays
  unsure (1)..(253): unsure at all n locations
gcggcatggttcgacatggagcacgcgaggtggcaggaggagcacggcaaggtgatgcgccacctgcgggcggcgctggaggcggagtacgccgcgacggcgacgacgccgccgagcgctgcttcctctggatcggcggcttccgcccttcagagctcatcaagatagcggcccggcacgcggagcccctgacggagcagcaggcgatgagcgtctgctgtgtgcagcagtgggcgagggacgcggangcggc

SEQ ID NO: 6357 - DNA, 280 bp, Zea mays
ctctccctctctctctcttcgccgtccgaagctccgcaccccaatctaatcgacacctcaccgagatgggccgcaagttcttcgtcggtggcaactggaaatgcaatggaaccacagatcaggtcgagaagattgtcaaaaccctgaatgaaggacaggttcccccttcagatgttgtggaggtcgttgtcagccctccttatgtcttccttcctgtggtcaagagccagctgcgccaagagttccatgttgctgctcagaactgctgggtgaagaaggg

SEQ ID NO: 6358 - DNA, 283 bp, Zea mays
ttctgtcatctcattgatgggtggcctgcttccctttggcagtatcttcattgagatgtacttcgtgttcacatcattctggaactataaggtgtattatgtctacggtttcatgttgctggtcttcgtcatccttctaatagtcaccatctgcgtcaccattgtgggtacttatttcttgctgaacgccgagaactatcactggcaatggacgtcgttttcctctgcggcgtcaaccgctttgtatgtgtatctgtactccatctactactaccatgtgaag

SEQ ID NO: 6359 - DNA, 287 bp, Zea mays
gtgctgcccttgagtatggtctaccaccaacaggtggttggggcttgggaattgatcgcctcacgatgttgcttacagattctcagaacattaaggaagttcttctatttccggctatgaagcctcaagagtagctatccgcatagccaaaagcaacaaaatggcctcagccaaaggccacaaaaggttcaaagcaaacataggcgctggagggtatatcttagctcttggatctgtattgaacgatacatccttttgcccctgtgctcgggagctttccatttttt

SEQ ID NO: 6360 - DNA, 283 bp, Zea mays
  unsure (1)..(283): unsure at all n locations
gccctcaagtatctgaanaagggtgggccaggaaaaggcccgtccactggtggactaatcattaacataagtgcaacactgcattacagtgcttcttggtaccaaatccatgtctctgctgctaaggctggggttgatagcatcacaagatcactggctctggagtggggaacagattatgacattagagtcaacgggattgcacctggaccaattcaagacaccccggggctgaggaagcttgcacctgaagaaatgagcaaggggcttcgagaaatgatgc

SEQ ID NO: 6361 - DNA, 284 bp, Zea mays
gtgacttcggccttgcgaggctgtatgaccatggcacggacccgcagacgacacatatggttggcaccatggggtacctggctcctgaactggtgcgcacgggcaaggcctccactgacacggacgtgttcgccttcggcatgttccttctcgaggtcacctgtggcaaaagaccactgatgatgatgatgatgcagagcaccgccgaggggcggcgagaccgtcagtttttcttggtcgattgggttctcgagcactggaagaatgggtcgctcacagaagca

SEQ ID NO: 6362 - DNA, 249 bp, Zea mays
cgacctcttcgtgcggtgcttcaagcggtacccggacctggcgtacccgggcgggaagccatgtcggtgcacgccacgctgtgggacggcagctactgggccacgcagcaggggaaggtgaaggtggactggtccgccgcgcccttcgccgtctcctaccgcggctactccgccgacgcctgcgtgcccgacggcgacggccgctcgctctcctgccccgccggcaccgaccgctggatgagtccgcag

SEQ ID NO: 6363 - DNA, 304 bp, Zea mays
  unsure (1)..(304): unsure at all n locations
aggcgtacgtccagcgccaggccacggggctcttcaccgccgagttcttccgcgacttcgccgactccatggtcaagatgtccaccatcgacgtgctcaccggccagcagcagggcgagatcagaaagaaatgcaacctcgtcaactgacaaataatacgtacattaattgctgctggttttgacgatgcctttcacttacgttcatccacttaattcatgcatccatgttggttgggttcattcaattattatattcgttgcttacctttacttttgcttggttaatcttaattanatcgtgt

SEQ ID NO: 6364 - DNA, 303 bp, Zea mays
gactcctacggccccatctacaacgaccgggagcgcgcccagatcttcgtctcggacgccggcgtcgtggccgtggcgttcgggctgtacaagctggcggcggcgttctgggtctggtgggtggtgcgcgtgtacgccgtgccgctgctgatcgtgaacgcgtggctggtgctcatcacctacctgcagcacacccacccgtcgctcccccactacgactcgagcgagtgggactggctgcgcggcgcgctggccaccatggaccgcgactacggcatcctcaaccgcgtgttccacaacatc

SEQ ID NO: 6365 - DNA, 303 bp, Zea mays
cagctcacaatcttctatggcgggaaggtgctggtatttgacgatttccccgccgacaaggcaaaggatctgatgcagctggccagcaagggcagcccagtggtacagaacgttgctttgcctcaaccctctgcagcagctgctgtcactactgacaaggccgtgctggacccggtcatcagcttggccgctgctaagaagcctgctcgcacaaatgcttctgatatgcctattatgaggaaggcttctcttcaccgcttccttgagaagagaaaagatcgcctcaatgcaaagacaccatat

SEQ ID NO: 6366 - DNA, 293 bp, Zea mays
tacaaggccaccatcggcgcggatttcctcaccaaggaggtccagatcgacgaccgcctcttcacactgcagatatgggatacggcaggacaggagcggtttcaaagtcttggtgtggcattttataggggagctgactgctgtgttcttgtatatgatgtcaacgtatccaagtcatttgaaaagctcaacaactggcgtgaggaattcctaattcaagccagcccatcagacccagagaatttcccatttgttgtgcttggtaacaagatcgatgttgatggtggtaacag

SEQ ID NO: 6367 - DNA, 299 bp, Zea mays
  unsure (1)..(299): unsure at all n locations
ccttcctcccccctgatccatcccattcggccaccagcgacacgantgggctcacgctacgaggtggaggtcaccgtgggctccgccgggacctcaagaacgtcaactggcgcaacggcgaactcaagccgtacgccgtcgtctggatcgactccggtgccaagtgctccacccgcgtcgacctcgacaacggcgagaacccgacgtgggacgagaagctcctcgtcccgctcccgcccacctcccgcctcgacgacgccgtcctctacatcgacgtcgtccacgccaacgccgccgag

SEQ ID NO: 6368 - DNA, 296 bp, Zea mays
cagcgcccctcctcgccggcgggcttgctgggtctcgcgatcttcctcctcctcggctgtgccttctggggcggcggcggcgggaactaggtaatgggagggaacggaagggaaggggaggtttgaggtagagcggaccgccagcgggatgccgtcgcacgcggatctggaccaccagatctcgcagctgcgggattgcaagttcctgccggacgtggaggtcaagacgctatgcgagaaggcaaaggcgatcctcatggaggagtggaatgtacagcccgtgcgctgccccgtca

SEQ ID NO: 6369 - DNA, 285 bp, Zea mays
gtttggagaaactccccggctcgaggagatcgtgacattgagaggacgatgggagggcgcgcgctcctcctcctcctggtctcggcgttggtctttcagatccacgcctccgacccgctgctgtacgagccgttcgatgaggactttgaggggagatgggtcgtctccaagaaggatgaataccaaggtgtgtggaagcatgccaagagtgatggtcatgaggactatggcctccttgttagtgagaaggcaaggaaatacgccataatcaaggagcttgatgag

SEQ ID NO: 6370 - DNA, 292 bp, Zea mays
aatggctgctacaaagcttcaggccctttggaaccacccagctggccccaaaaccattcatttctgggcgccaacattcaaatggggcatcagcattgccaacatagccgactttgctaaaccacctgaaaagatatcttaccctcagcaagttgctgttgcatgcactggactcatttggtcaaggtacagcttggttatcacaccgagaaactggaaccttttcagtgttaacgttgcaatggcgggtacaggcctgtatcagctttcacggaagatcaggcaagattac

SEQ ID NO: 6371 - DNA, 288 bp, Zea mays
atcacaacgaacacaagctctcgatctcaccgacaccgaggaagaagagatcaatggcgtccgagcagggagtcgtgatcgcgtgccacagcaaggctgagtttgacgcccacatgaccaaggcccaggaagccggcaagctggtggtcatcgacttcactgccgcctggtgcggtccatgccgcgccatcgccccactgttcgtcgaacacgccaagaagttcactcaggtcgtcttcctgaaggtggacgtggacgaatgaaggaagtcaccgcggcctacgaggt

SEQ ID NO: 6372 - DNA, 239 bp, Zea mays
gctctcacctgtttcgctgctcgcccgatctcgcgctgccggcaggatctgagatcgagcgaactaagctttttcatcgagatggtgcttgtactgcatgctaacagtggtaacaaaaatgcattcaaaacactaattgccgcagaatacagcggtgtcaaggttgagttggtgaaggactttcaaatgggtgtctccaacaaaactccagagttcctcaagatgaaccctattgggaa

SEQ ID NO: 6373 - DNA, 238 bp, Zea mays
aggagggcattcccccagaccagcagcggctcatctttgctggaaagcagcttgaggacgggcgcacgcgtgccgactacaacatccagaaggagagcaccctccacttggtgctgcgcctcaggggaggcatgcagatcttcgtgaagaccctgaccggcaagactatcaccctcgaggtggagtcttcagacaccatcgacaatgtcaaggccaagatccaggacaaggagggcat

SEQ ID NO: 6374 - DNA, 242 bp, Zea mays
cagaaacctctggaaaaagatgctggagagaagaccatagcctggttcgacaagctgaagaatgcgaatgggtcattgccaacttccaagatccgtctcaacatgcagcgtgttacgcaaaataatgctgctgtattccgtacacgagatacacttgaagaaggatgtgacctcattagcaaaacatcggatagtttccatgatgtgaagctcagtgaccagagtctcatttggaactctga

SEQ ID NO: 6375 - DNA, 280 bp, Zea mays
cctgatcgtcctgttcctcacagcagcagccatggcggccgagccggagaagcaggcggcccccgcggcacaggagacggccgtgcacatcgtgtacgttgaccgccccgaggacgccgaccctgaggagttccacatccgcaccctcacccccgtcctcggcagcgaacagaaggccagggacgcatgctctaccactacaagaacgccgccagcggcttctccgcgaactcaccccccagcaggtcaaggatctcaaggagcaaccaggtgttctcca

SEQ ID NO: 6376 - DNA, 282 bp, Zea mays
cccacccacccactcgcttcagccgcctccgccgcgcgtacaagcaggtggagacaggatgccggctggccacggcctgcgctcgcggacgcgcgacctcttcgcgcgccccttccgcaagaagggctacatcccgctcaccacctacctccgcacctacaagatcggcgattacgtcgatgtcaaggtgaacggcgccgtccacaaggggatgccgcacaagttctaccacggccgcaccggtcgcgtctggaacgtcaccaagcgcgccatcggcgtcga

SEQ ID NO: 6377 - DNA, 275 bp, Zea mays
gaacaagtgtcgtctccatgagctttcaaacaagcgaaggatctctattgctggtgcttccaaactgttggctaacatcctttattcatatcgtgggatgggactgtcgattggtacaatgatcgctggatgggatgagaagggtcctggcttgtactatgttgacagtgagggtgcgcggctcgtggggaacaggttctctgttggctctggttcactgtatgcttatggtatcttggatgatggttaccgcttcagcatgtcagttgaggaag

SEQ ID NO: 6378 - DNA, 282 bp, Zea mays
agttcgaggactccgttgcccaggctttctttgatctggagaacgggaaccaggagctcaagagcgacctcaaggacctgtacatcaacaatgctatccagatggatgttaccgggagcaggaaggctgttgtcatccacgtcccataccgcctgcgcaaggccttcaggaagatccatgtcagactcgtcagggagctggagaagaaattcagcggcaaggatgtggtaattgttgctacaaggaggattgtgaggccacccaagaagggttcagctgttc

SEQ ID NO: 6379 - DNA, 279 bp, Zea mays
acgaggtgacgttcctgaaccagctccccgcagaggcgacgtgcgcggcggggaagagccccgttgatgtagccaactacgttcagcggatactcgctgccacgctcgggttcgagtgcaccaccctcacaaggaaggacaaatacacggtgctcgccggcaacgacggcgtcctgaacgccaagccggcggcggccgggaagccggcttggcagagccgcgtgaaggaagtcctcgggttcctgctccactaacaattacaccttgcccagatctgga

SEQ ID NO: 6380 - DNA, 274 bp, Zea mays
gtttttagcacgttaccttcggcttcttgtccctggcagcgagttgacccggatagtatgcatggctatttttcgccatttgaggttcttgtttgggggtttgccatcagactctagtgcagcagaaactacagttgctcttgcgaagactgtttcatcttgtgtgcatcacatggaacttggtgctcttagtgcctgccttgctgctgttgtttgttcgtctgaacagccacctctgcgccctcttggtagctctgctggtgatggggcttct

SEQ ID NO: 6381 - DNA, 248 bp, Zea mays
gaggcaatggtgcggacacactagcacactggccaacctcagcagagataatgacggtggaagatgcctttctacaggtcttgcaatacttggataaaatatggggaacaatatcttcttcagaaaaaaaagaactggagaaactggcatttataccagttgcaaatggtactcgattggtcccagtgaagtcactttttgctcgtctgacaattaacatgtcaccttttgcttttgagcttccaagt

SEQ ID NO: 6382 - DNA, 278 bp, Zea mays
ctcgtgtgacagtcaactgatctatgcaagctttatggatgccactgttggcatatttaatgcatcgagtttgagacttcaatgtcggattcttccagcttcgtatctccccccaaatatcagtccgagtgttcatcctgttgtggttgcggcacacccttcggaagcgagtcagtttgctctagggctgactgatggtggtgtttttgtgttggaacctttggaatcagatagaaaatggggaaatcctccaccggtagaaaatgggtctgctagca

SEQ ID NO: 6383 - DNA, 277 bp, Zea mays
ctgcgcgcaaagctccccgggaggccaaccagagactgcctcttctctgaccccgcaaggacggcaaaaggttagattcgcagctctctacgatggctggtctgttcttgttcactaagagccgtctgctagctgaatcccgtttgatgctcttttcacagcgttctcaagatatggaacctgaacgaacactccggcgtcgttggcgccttcaactgccaaggcgccggctggtgccgggtagccaagaagaacctcatccacgaccagcagcccg

SEQ ID NO: 6384 - DNA, 233 bp, Zea mays
gtcagcactgcaggcgggcatgcggtgctcaaagtgctggagaaggagaagctccaggagaatgcgtttgttgtgggctcctatctaaaggaacagcttaacaatctgaaagacaagcatgagatcatcggtgacgttaggggcaaaggcttccttcttggagttgagctggtgacagaccgtgagaagaaaaccccagccaaagctgagatctcacgtgtcatgaaccatat

SEQ ID NO: 6385 - DNA, 269 bp, Zea mays
ggatgatttagtgaaggacaagatcgagtcgcagaaggaagagagagccaaggagaaggaggagagagaccttgtggctcagcagaacatgtatgcgcactgcttcctctcgctttgccggcgccgccaatgcctggcatgggtggtcctccacctccgatgggtggaatgggcatgcctcccatgggcgggatgggtatgccgccgatgggccctggtccgatgccagcattcggaatgggaggctactgagtggtggttttgcaggg

SEQ ID NO: 6386 - DNA, 229 bp, Zea mays
cttcaccactccactcgccgcagccgccgggcgccgccgaggggatcggagcaagatgttcttccacatcgtgctggagcggaacatgcagctgcacccacgacacttcgggccgcacctccgcgacaagctcgtttccaagctcatcaaggacgtcgagggcacctgcagcgggcggcacgggttcgttgtggcgatcacgggtgtggacgacatcggcaaggggctc

SEQ ID NO: 6387 - DNA, 272 bp, Zea mays
gcacatgtggctaataataaaattcttgcaccgagctgcagacctcacactggtaccatctgttgctatcggcagggatcttcaagctgctcgtgttacagcagccaataagatacgcctttggaacaagggtgttgactcagaaagcttccatcctcgtttccgcaacatggaaatgcgttcaaggctaacgaatggtgaaccagaaaagccacttgtattttatgttggacgcttaggagttgagaaaagcttggattttcttaagagag

SEQ ID NO: 6388 - DNA, 275 bp, Zea mays
gggcatgctggcacagttccaatgagattgcgccgtgatccgatggttgcagctgcagagcttgttgtgactctggaacgcctctgtaaagagcccaacagtttgctgacctacgacgaggagtgcagctgcttcactgaggagtccctggccggcctggtgtgcaccgtcggcgagctgaacacgtggccaagcgcgagcaacgtgattccgggccaggtaaacttcacggtggacatccgcgcgatggacgaccaagtaagggagacgatcgt

SEQ ID NO: 6389 - DNA, 298 bp, Zea mays
gcgggcgctgccgccgcagccgaccgtgaaggtgtactgccgcgccaaccccaactacgccatgagcgtccgcgacgggaaggtggtgctggcgccggcgaaccccaaggacgagtaccagcactggatcaaggacatgcggtggagcacgagcatcaaggacgaggaaggttacccggcgttcgcgctggtgaacaaggcgaccggggaggccatcaagcactcgctggggcagtcccacccggtgcgcctggtgccctacaacccggactttttggacgagtcggtgctgtggacg

SEQ ID NO: 6390 - DNA, 293 bp, Zea mays
gccgccgccggacgagacaggttgaggcggggcggcaatggccgccggggaccttgaggtgctcaccgcgctcgacaccgcgaagacgcaatggtaccacttcaccgccatcgtggtcgccggcatggggttcttcaccgacgcctacgacctcttctgcatctccctcgtgactaagctcctcggccgcatctactacactcgtggatgttgtccgtgacgcccggcaccctcccgccgcacgtgtccgcgtccgtcaacggcgtggccttcgtgggcacgctgtcagtgca

SEQ ID NO: 6391 - DNA, 294 bp, Zea mays
ggagttttgccctggtggtgacctgcatgttcttaggcagaaacaacctaccaaaaccttttcggaagcagctgcaaggttttatgtcgctgaagtcctcttagccttggagtatctccatatgttgggggtcatttaccgtgatctgaagccagagaacatacttgttcgagaagatgggcacatcatgctctcagactttgatctgtctctgaggtgctcagtgagcccaatgcttgtgagaatatcatcccgtagcagagatgagcccagcaggccttctggtccttgtgc

SEQ ID NO: 6392 - DNA, 296 bp, Zea mays
  unsure (1)..(296): unsure at all n locations
gtctacaaggaggtcattgctgagttgaangctcggggggtgctgctaagaagggaaagaagagggaatcccttcttagcagcatcctcccagtctacgaggaggtcattgctgagttgaaggcagctggggcttcatggattcagtttgatgagcccactcttgtccgcgaccttgattctgacaaattggctgcattctctgctgcatacgcagaacttgaatctgtactttctggattgaatgtgcttgttgagacttactttgctgatgttcctgctgagtcctacaagacc

SEQ ID NO: 6393 - DNA, 294 bp, Zea mays
ctgctcctccgcctccgcctgagccatccaagacagggcgccccatgtcggactcggaggagcaccacttcgaatcgaaggccgacgctggggcgtccaagacctacccgcagcaggctggcaccgtccgtgagagcggcttcatcgtcatcaagaaccgtccctgcagagttgtggaggtttctacctccaagactggtaagcatggccacgccaaatgccactttgtcgccatagacatattcaatgggaaagagcttgaagatattgttccttcatcacacaactgtgaca

SEQ ID NO: 6394 - DNA, 299 bp, Zea mays
accgttttcgtgctcacacacccaaaccttagtcgcgatcaggccccaaggactcgagatgaagtcgaaggcacggtccaccgccggcgactccaggctctcggtgaggaagaccaaggctgagaaggacccaaacaagcccaagaggcctccgagcgcgttcttcgtcttcatggaggagttcaggaaggactacaaggagaagcaccccaatgtgaagcaagtctccctgattggcaaggctggtggtgacaagtggaagtccctgtctgatgccgagaaggctccctacgtgtcta

SEQ ID NO: 6395 - DNA, 284 bp, Zea mays
cggctcgaggccatcgccaacatcggcaagctcatgttcgcgcagttctccgagctcgtcaacgagttctacaacaacgggctcacctccaacctggccggcagccgcaaccccagcctggactacggcttcaagggcaccgagatcgccatggcctcctactgctccgagctccagtacctgggcaaccccatcaccaaccacgtgcagagcgcggagcagcacaaccaggacgtgaactccctgggcctcgtctcggccaggaagaccgccgaggcgatcga

SEQ ID NO: 6396 - DNA, 289 bp, Zea mays
cggctcgaggttgttctaaacccccaaaccctccgtcctaacctctgcgccaccggcgacaccaccgccggagccgcagccatgaacgccttcaggttcctcggggacatgacccacctcttctcggtcctcgtcctcctcctcaagatctacgccaacaagtcctgctcaggggtgtcgaggaagacgcaggagctgtacatgttggtgttcgtggcgaggtacctggacctcttcacggattatgtctcgctctacaactcggtgatgaaggtggtgttcatcacca

SEQ ID NO: 6397 - DNA, 238 bp, Zea mays
gatgaatgtgaggatccatacatgcgtatggtttatgcttctacatgggctgtttcggtatacttcgcgtatcagcgcacatggaagccttttaatccgatccttggagagacttatgagatggttaaccaccagggcattacatttcttgccgagcaggtaagccatcatcccccaatgggtgctgctcactgtgagaatgagcattttacttatgatatcacgtctaaggtgaaga

SEQ ID NO: 6398 - DNA, 293 bp, Zea mays
  unsure (1)..(293): unsure at all n locations
ggtccgcgtggggcgcacccggatggtctccaacgagcccgtgaaccctcgctggtacgagtccttccacatctactgcgcgcacatggccgccgacgtagtattcaccgtcaagatcgacaaccccatcggggcctcgctcatcgggagggcttacctgcctgtcgangacatcctgggcggagacgagatcgacaagtggcttgagatatgcgatgagaagcgcgagcctattggggacagcaagatccacgtgaagcttcagtacttcgacgtcggcatagaccgcaact

SEQ ID NO: 6399 - DNA, 284 bp, Zea mays
gcaacatcaccctgttccgggggctcctgtactgggtggcgcactgctggggtccaccgtggcgtgcttcctgctccgcttctcgacgggcgggcaggacacgggcaccttcgggctgacgggcgtgtcggtgtgggaggcgctggtgctggagatcgtgatgaccttcgggctggtgtacacggtgtacgccacggcggtggacccgaagaagggcagcctgggcaccatcgcccccatcgccatcggcttcatcgtgggggccaacatcctggtgggcggcg

SEQ ID NO: 6400 - DNA, 290 bp, Zea mays
caccggtggggcgaacacagcaggatggtgctggttgcgctgtatcagattgtgagggagagcttccagctctacgccgatatctgcgaggtgctggcggtgctgctggacaggttctttgacatggagtatgctgaatgcgtgaacgcttttgaggcttatgctagtgctgcaaagcagatcgatgagctctgtgcattctatgcatggtgtaaagataccggagttgcaaggtcatctgagtaccccagagtgcagcgggtcaccgataagttgctggagacgctgga

SEQ ID NO: 6401 - DNA, 280 bp, Zea mays
  unsure (1)..(280): unsure at all n locations
agctgctattctcctaattgaccccgtcactgggcaaaaaatgcatgcttggaatggaatggttcacccagatcgtttacttgaggatttactaccttacctggataaaggtccgaagagcaccatgcagctcaacctcaaaagcgcccaaggaaagttgatccggaagcttctacgggcaagcaaggcaaaatagctgtagaggatgaagatgaagagctagcacgggcagtagcagcttctctagaggagagtanagaagtcattgaagcatcagacg

SEQ ID NO: 6402 - DNA, 282 bp, Zea mays
ggcaaaaataatgcaaagtctggatccgtagaattccagcagcaacgaacagcagagagatgatcggggagattgagaacagatcagcttatgttttagctattaaatcagacgtagaaaatcaaggcaacttcgtgaacttcctcgcaagtgaagttcaaaacgcagcatacaaaaagatagctgacgttgaagagtttgtgaagtggcttgatggggaattgtcataccttgtggatgaaagagcagtgctaaaacaattccccaactggcccgagaaga

SEQ ID NO: 6403 - DNA, 283 bp, Zea mays
gcgatacttctgaaatagtagtccttttcgtagaacatgccctcgatccgttgatggtgccttaaaatacgtacctgaatagctccaaaaaaaccacacacacacacacactgaacagttcacaggcattcctaatcacttctcgcgtgtgtacgtgcaggggctcacacgatcggcatctcccaatgcaactccttcagcgagcgcctgtacaacttcacggggcgcggcgggcccgacgacgcggacccgtcgctggacccgctgtacgccgcgaagttgc

SEQ ID NO: 6404 - DNA, 243 bp, Zea mays
aagacgtttgtcctcacggacgagggctcagttgttgcgtttggatggatgggttttgggagtctagggtttcttgaccgaggaacatcagacaaagtaatgaggccccgcgttcttgagagcctgcaggatcactacgtctcccaaataagcaccggactgtatcacactgtcgcagtgacaaataagggcattgtattcgggttcggggacaacgagcgagcacaacttgggcaggagtac

SEQ ID NO: 6405 - DNA, 287 bp, Zea mays
gaccgaagctctatgtgggttccaatttgttcttacacacctggacaacaggcagcttctgatcaaatcaaaccccggcgaagttgttaaacctgaccaattcaaggcgataaatgacgaggggatgcctatttaccagaggcccttcatgaaggggaagctctacattcatttcacggtggagttccccgactcgctggcaccagagcagtgcaaggctctcgagtcggtacttccgccaaagccttcgtccaagctgacagacatggagatagatgaatgcgagg

SEQ ID NO: 6406 - DNA, 285 bp, Zea mays
gagtagtggtaggaaaagctcgtcgccgagtcgccgtacgggggctcggctcgggtgagcgagcggcggccggcgggtactgaggcctgacggcgaggcgatgggccgcctccgtgacgggcgagcattcctccaccgcgcgcttgtcctctcgtcgctgctccttctcgcctccgggaaatcttcttcgaggaacggttcgatgatgggtgggatagccgctgggtgaaatctgattggaagaagagccaaggacaagctggaaccttccgacacacagcggga

SEQ ID NO: 6407 - DNA, 289 bp, Zea mays
aaggagcataagcacaaggagcgcctcggcgaggtgggcgccctcgcgggcggcgcctttgctctgtacgaggggcaccgtgcgaagaaggacccggcgaacgcgcagaggcacaagatcgaggccggcgtggcaacggcggcggcgctgggcgccggcggctacgcgtaccacgagcaccgcgagcagaaggaggcccactacgagagcaggcagcaggagcacagggtgccgcacgggcacgggcacgggcacggctactcctactactgcgactgaaacgactgat

SEQ ID NO: 6408 - DNA, 287 bp, Zea mays
cccgagcgagttcttggttggcctcttcctcttcggaccacctccaaggctcttggtgtagcttgccactctcaccaatcaagttttcatgtctgatctcgacattcagatcccaactgccttcgatcccttcgctgaggccaatgctggggactctggtgcagcagcagggtcaaaggactacgttcacgtgcgcatccagcagcgtaatggtcgcaagagcctgaccaccgtccagggattgaagaaggagttcagctacagcaagatcctcaaagatctcaaga

SEQ ID NO: 6409 - DNA, 316 bp, Zea mays
  unsure (1)..(316): unsure at all n locations
cctagatgttctccatcggacgctgggtaaattggtgctgaaaaatgctgagcagggtgcggcaactacatgctatttggcactccacccgcatgtgaagggcgtgtccgggaagtacttctgcgactgtaacctgtacgagccaagcgcgaacgccaaggacatggagttggccaagaggctctgggacttcggcgtcgagctcatcacctagctcatgcttcttgttgttagcgacttgttttcagacatggatgtaatgtanatcgcttgacagatggtagattctgtatgcccctcgagagctcctgtgtgg

SEQ ID NO: 6410 - DNA, 307 bp, Zea mays
cggctggaacccgaacgcatcaagccggaagaaatcggtgctcttcacttgattccgaagagctctcgctgaagattgtcagcaagattgaagctggggagcggtttactgtttatgttgtggtgccaatgtggcctgagggtgttccagaaagcgcttctgttcaggcaatccttgactggcaaaggagaacgatggagatgatgtacactgacatcgcacaagctctcgaagccaacgggattgaagcaaaccccaaggactatctcactttcttctgcttaggtaaccgtgcagtaaagcagga

SEQ ID NO: 6411 - DNA, 308 bp, Zea mays
  unsure (1)..(308): unsure at all n locations
gacacatcaacccagctgtgactttcgggctgttcttagccaggaagctgtccctgactagggccctcttctacatcatcatgcaatgcctgggtgccatctgtggagctggagtggtgaagggcttccagcagggactttacatgggcaacggtggtggcgccaatgttgtcgcacctggctacaccaagggtgatggccttggcgctgagattgttggcaccttcatcctagtctacaccgtcttctcagccaccgatgccaagaggaatgccagggactcncatgttcctatccttgccccactg

SEQ ID NO: 6412 - DNA, 310 bp, Zea mays
tttttcatatcctcactcgccgccgccgccgctcgtccctcgccccatcgcgatggcccggatcaaggtgcacgagctgcgggggaagagcaaggcggatctgcaagcgcagcttaaggagtttaagtcggagctctccctgctacgcgtaccaaggtcaccggcggggctcccaacaagctctccaagatcaaggttgtgcgcacctccatcgcgcgcgtgctgaccgtcatctcgcagaagcagaagtcggcgctgcgtgaggcgtacaagaagaagaagctgctcccgctcgacctccgccccaaga

SEQ ID NO: 6413 - DNA, 309 bp, Zea mays
cgactctccacgcaacctctaacctcttattacttcttgcctacccctcaataccgccaagatgggtttggtggtttcgaaattgctcgaccgactatggggtaagaaggagatgcgtattctgatggtcggtctcgatgctgccggaaagaccaccattctttataagttgaagctcggtgaaatcgtcaccacgattcctacgatcggattcaacgttgagactgtcgaatacaagaacatccaatttaccgtgtgggatgtcggtggtcagacaagatccgtcctttgtggcgacactattccaga

SEQ ID NO: 6414 - DNA, 305 bp, Zea mays
acgggggcggttccatcggcctcatggggctggtctcgcatgcagttcatgacggagggcgccatgtgattggggtcatcccgagatccttgatgcccagagaggtcactggcgagcctgttggggaagtaagggccgtctccggcatgcacgagaggaaggccgagatggcccgcttcgccgatgccttcatagcgttacctggtggctatggaactctggaagagctgctggaggtcatcacctgggcgcaactagggatccataagaagccggtcgggcttctgaacgtggacgggttctac

SEQ ID NO: 6415 - DNA, 296 bp, Zea mays
ctttttgccattcacagttttaggccatcaccgttcttcatatctggacgaatagatgctgctctggacaatttaaatgtggccaaggttgccgggtttatcagatcaaaatcatgtgaacgtgttggtgatgaacaaggcagcgatggcgagagtggttttcagagcatagttatatctctgaaggacagtttctatgacaaggccgaggcacttgttggtgtttatagggactcagaacgaagttgctcgaggactctcaccttcgacctgagacagtatagggaatcgtgaag

SEQ ID NO: 6416 - DNA, 296 bp, Zea mays
acaggccttgctatctcattacttggtgctatggtgatgccgcacaatctttttctgcactcagcattagtattgtcaagaaaagtgccacggtctgttcatgggattaaggaggcctgcagattctatacgattgacagtgcatttgcccttacagttgcttttctcatcaacatatctatcatatctgtcagtggttctgtctgtggttcaggtaatttaaacccagaagatcaagcaaattgcagtgatctggacctaaataaggcttcatttttgttaaagaatgtccttgg

SEQ ID NO: 6417 - DNA, 301 bp, Zea mays
  unsure (1)..(301): unsure at all n locations
cttttaaccactggatggagtgcctttgtcaacaagaagaagcctgtctcaggggacgccgtactatttttgaggggtgataatggggagctaagacttggagtgcgccgtgcagctcagcttaaaaatggatctgcttttccagctctttataaccagtgcttaaatcttggttcactacctaatgttgcacatgctgtggccaccanaagtgtgttccacatctactacaaccccagatgtaagccaatctgaattcagtatcacattttcgaagtttatcaagagcttcagtcaacca

SEQ ID NO: 6418 - DNA, 291 bp, Zea mays
gcaaagcaacaaagccagagccctacttgctggcgtgccaaaccttgatatggttgagagtgtcgatgatgagaagattgctaaccgtcttgatcgagtggtagctgacttggggagaaaacctcttaaggttttggtccaagtcaacactagtggagaagaatcgaaatttggagtagatccctcaggatgcatggaactagcaaagcatgtcaaactgaactgcccgaaccttgtgttctctggtctgatgacaattgggatgcttgattactcctcaacccctgagaa

SEQ ID NO: 6419 - DNA, 292 bp, Zea mays
cgactggtggatgaccaagtacggccacatcgttgagcagctctccgactacccgcccatcgatttcaccaacgaccgccgcacgcactgcttccccgaggccgtggttgggcttcgcatccacgacgagcttgctatcgacgccgcgcggatgccagccaaccagacgatccaggatttccgtctgatgctcgatgacgctcaccgtggtcgcatccagacgatcatcgaggaggagaagaaggaagctgctgctgcgaggagacaggaacatcgcggaagcaagaggagc

SEQ ID NO: 6420 - DNA, 290 bp, Zea mays
tgcgaacccacccgcgtatggacatacacatgtggcagaagcactaaaagtaccaattcatatattctttaccatgccatggacgcctactaatgaatttcctcaccctctttctcgcgtgaagcagcctgctggatatcgactttcttatcaaattgtggactccatgatttggcttggaataagggatatgataaatgagttcagaaagaaaaagctgaagctgcgtccagtaacatatctaagtggttctcagggttctggcaatgacattccgcatggatacattt

SEQ ID NO: 6421 - DNA, 290 bp, Zea mays
gtgcctgtgcgcgcgatcgacctgaacgtgcatgatgcaggtgttgacgaacgggaggttcaggagcgtgaggcacagggtggtggtgaacagcgagaactcccgggtgtccatggtcttcttcggcggcccgccgcccggcgagaggctgggcccgctgccgcagctcctgggcgacggcggccggagccggtaccgggacttcacctggagcgagttcaagaccagcgggtgcaggaccaggctcgcggaagaccgcctgtcccgcttcgagaagaagtagctagagg

SEQ ID NO: 6422 - DNA, 285 bp, Zea mays
tgcagttgtcactatcaacttccgggctgatcgcatggttatgcttgctaaagcactagagtatgcagattttaacaattttgaccgtgtacgtgtccccaaaattcgatatgctgggatgcttcagtatgatggtgagttgaagcttccaagtcgctaccttgtttccccaccagagatagatagaacatctggggagtacttggtgaagaatggcatccgcacctttgcttgcagtgagacagtgaaatttggccatgtcactttttctggatggtaacgctc

SEQ ID NO: 6423 - DNA, 294 bp, Zea mays
gtggcctactggagcagctgagcaggatagaggagactgcgtgtgcagctaacttgggagacatggagttcaagaaacagtgggaaaaggtctttgtggattcttatgctagagtggatgacgaggttgggggaaacacgatgaggggaggtggtgaagaagcaggcacaagtgatgctgctatgacactcgtgccagaacctgtggcacctgagacggtgggttcgacggcggtcgtcgctgtcatctgctcctcacatatcattgtctccaactgtggagattcacgggcag

SEQ ID NO: 6424 - DNA, 300 bp, Zea mays
tggacagactagcagctttgaaggctaaggacaagaagcatggggcagaatctgcaactcctgaacccaactctgaggttctcttcctgtgcagctacgaaggatgtgggaagacattttttgatgcaggggctcttaggaagcatgctcacgtccatggggagaggcaatatatctgtcactatgagaactgtggcaagaaattcttagatagttctaagttgaagagacattttcttattcatacaggagaaaagaattttgtgtgcccacatgaaggttgtgggaaggtttttcgtt

SEQ ID NO: 6425 - DNA, 315 bp, Zea mays
  unsure (1)..(315): unsure at all n locations
gcacagtccattattgccgtctcccttttgcgtgacacagaaagagagcgagaagagcagtcgccatgtctggcatcatccacaagatcgaggagaagctccacatggggggcgaccacaagaataaggaggaggagcaccacaagaaggccgaggagcaccacaagaaggaggagggggagcaccacaagaaggacggcggggagcacaaggaaggcatcgtggagaagatcaaggacaagatcaccggcgagcacggcgacaagtccggcgaccacaaggaaaagaaggaccagatnaagaagaagcacggcg

SEQ ID NO: 6426 - DNA, 285 bp, Zea mays
caaaagccaatgcatctgttatatatgttccaccaccatttgctgccgccgctataatggagtcaatggaggctgagctcgaccttgttgtctgcattacggaaggaattccccagcatgacatggtgaaagtgaaggctgcactaaatagacaatctaaaactcgattgattgggccaaattgccctggtatcattaagcctggtgagtgtaaaattggaatcatgccaggttacatccacaagcctgggcgtattgggattgtatctcgttctggtacctgac

SEQ ID NO: 6427 - DNA, 290 bp, Zea mays
gagaaccggaacatcaagactcttacaggtcaccagcataactttgagaagaacctactgaagtgtagctggtcgccagataaccgcaaggtcactgctgggagcgcagaccgcatggtctacatctgggacacaacatcaaggcgcatcctgtacaagcttcccgggcacaatggttctgtcaatgagactgctttccatcccacagagccgatcattggatcttgcggcagcgacaagcagatctatcttggggaactttaagtgactatcagttccttttcagctag

SEQ ID NO: 6428 - DNA, 278 bp, Zea mays
cgccgctcctctcacaacccagtcgctcaaaaccctagagctctcgcctgctcgcctccgccgccggagcgagctccccatcttcatccgtcaaccatggcgacccagatcagcaagaagaagaagttcgtcagcgacggtgttttctacgccgagctcaatgagatgctgacgcgggagctggcggaggatggctactctggcgtggaggtgcgcgtcacgccgatgcgcacggagatcatcatccgcgcaacgcgcacgcagaacgtgctcggcga

SEQ ID NO: 6429 - DNA, 129 bp, Zea mays
caacaaaagcgcttgcccacgccacgacgctcaccaacaaccaacgcgcacgcactgatcagcaccgcttgctgcatgctcagctgcacctctggcaccaccacatccgcttcgccaactccatcgcgc

SEQ ID NO: 6430 - DNA, 282 bp, Zea mays
cttcacgcctctacaagatgttgaaaggttcagagtggaagaacgatcaccctgcaaacggctttcctgtttccaggggttgcatttgttattttcttcatcttgaatgctcttatatggggggagaagtcatctggtgctgtccctttcaccacaatgtttgcactggtcctcctctggtttggcatctcggtacccctcgtctttgttgggagttatcttgggttcaagaaacctgccatggaacctccagtcaagacaagcaagattccacggcagatc

SEQ ID NO: 6431 - DNA, 263 bp, Zea mays
cgtgcttctgtttggcgccttggccacacgggaagagcttctaactgataggcttcttactgctacggtggcttggcctgctcctgcagtgatttacattggtattattctgtccaccttaggtgcagcactgcagagtttgactggggctccaaggttgcttgcagcaattgcgaatgatgacattcttcctgttcttaattacttcaaagtttctgagggatctgagccacatgcggccactttattcacagctttcatct

SEQ ID NO: 6432 - DNA, 291 bp, Zea mays
cccgcgctctcctctcccgacgacagctacacctcacaaccgtgagctcgcgaaggaacgctgttcgcaattccggcgccggcaccatgagtaagctgcagagtgattctctgagggacgcgattgcctcaattaccaatgattcccgtgagaagcagcgcaaatttgttgaaaccattgagctacaaattggactgaagaactatgaccctcaaaaggacaagcgcttcagcggttctgttaagctgcctcacatccctcgccctaagatgaaggtttgcatgcttggtg

SEQ ID NO: 6433 - DNA, 278 bp, Zea mays
cgacgggcatcacactggtccttagatcgaggaattcgtggatctacctatatcctgaaggcctaaaggctctgcttatgatcatgaagaacagatacggaaacccacccatctacatcactgagaacgggatgagtgacgttgaccatcgcgatctacccatggaagttgccttagatgaccacagaagagtacattacctccagcgccacatcgcaactcttaaggacgtcagatacttaggagcgaatgtgcacggctacatcgcatggactcta

SEQ ID NO: 6434 - DNA, 282 bp, Zea mays
cgccgttctttgcctccaaggttcggctcggcaagactggagtggaggaagtgcttggtctgggtgagctcaacgacttcgagaagaaggggctggaaagcctcaaggtcgagctcaagtcttccattgacaagggtatcaagttcgcccacgggaactaggcaactcgcccggcttctaacagttgatatcccttgcacttctctcatttgactgcctttcttcgcccgccccgttatggttggcgcaacgaggctttgcggtccataataaaacacagcg

SEQ ID NO: 6435 - DNA, 278 bp, Zea mays
  unsure (1)..(278): unsure at all n locations
cagatccaagacgagggaagagcaccaaggaccttcggcgcccgttcaggatccacatcttccctagcgagttcttggttggcctcttcctcttcggaccacctccaaggctcttggtgtagcttgccactctcaccaatcaagttttcatgtctgatctcgacattcagatcccaactgccttcgatcccttcgctgaggccaatgctggggactctggtgcagcagcagggtcaaaggactacgttcacgtgcgcantcagcagcgtaatggtcgc

SEQ ID NO: 6436 - DNA, 279 bp, Zea mays
catccgtcttaataacaacagtctttctggtcaaattccgacaaccttgaccaatatcaacactctccaagttctggctctatcaaacaacaatctctcgggaggggtgccatcaagcggttcgttttctctctttacacctataagttctgctaacaacccaaatctttgcggccctggtactacaaagccttgtcctggggctcctccattttctccaccccctccatacaatcccccagcaccaacttcatcaaaagccgaggaggatcccgaagt

SEQ ID NO: 6437 - DNA, 276 bp, Zea mays
cagcacatgatccttggcatgacttgaatgcttacaacatacatgacacaagtagatggaaagatcttaatcccaagttctgtgttcagatttacagggattttgctgcaacaggtgacaagtcatttggcaaggatgtctggcctgcagtctgtactgctatggaatacatggaacaattcgatcatgatggtgatggtatgattgacaatgatggatttcctgatcaaacttacgatgcttggacagttcaaggagtaagtgcatattgtggtt

SEQ ID NO: 6438 - DNA, 277 bp, Zea mays
cgacaccgtgcacggccaatggaagcacagcgacatcgccctcaaggactccaagacgcttctcttcggcgagaacccggtcaccgtctttggcatcaggaaccccgaggagatcccgtggggtgaggctggtgctgagtatgtcgtggagtccaccggtgtcttcactgacaaggacaaggctgctgcacatctgacgggtggtgccaagacggttgttatctctgctccaagcaaagatgcgcccatgtttgttgttggtgtcaatgaggacaag

SEQ ID NO: 6439 - DNA, 276 bp, Zea mays
cttccgtccgctgcattcctgctctcttgctctcctcgctctcagaccacagttgccgccgccgccgccctaagccagggtgctgaggctttcgttggcctcttcgccggcagcgagcacccaccagcagttctgtagaaatggctgatggtgaggacatccagcctcttgtctgcgacaatggcaccggaatggtcaaggctggttttgccggcgatgatgcaccaagggctgtattccctagcatcgttgggcgtcctcgtcacaccggtgtca

SEQ ID NO: 6440 - DNA, 264 bp, Zea mays
cagccacgtccctcgccttcgccgccgaatccgagactccgatctcgggttcaccgcagcgcacagagcagccccgactcccggcccgattcgcgctctcctctccgtcgcttcagtcatggcaggaatggcacctgacggttctcagttcgatgctaagcactatgattctaagatgcaggagctgctgagcactggtgagactgaggagttcttcacttcatatgatgaagttttgagagtttgatgaatgggctccaagag

SEQ ID NO: 6441 - DNA, 242 bp, Zea mays
ctcgacttcgggtccatttaaatctttcatcttcacttcttctttcttcttgagttgttgttggtttttgaaccaaaggacccttcctaaacctttctcttttattacttttcaataatacataatggctgatgatgaatttgaatccgttggatcaggagcatccacctgcttcccaatgcaatgctctgccatcaagaagaatggatatgctgtgttgaagaacagacctgcaaagtcgt

SEQ ID NO: 6442 - DNA, 262 bp, Zea mays
cttctccctcactcccgttccatttccccatctcccagacccaattcgcgagtcctccctcctctgccgccatggcgctctctgtggagaacacctcgtctggacgggagtacaaggtcaaggatctctcgcacgcgcgacttcggccgcctcgagattgagctggccgacgtcgaaatgcacggcctcatggcgtgccgcgccgagttcggcccgtccaagcgcttcgccggcgctaggatctcggggtctctcgacatga

SEQ ID NO: 6443 - DNA, 233 bp, Zea mays
tctaagaggagacaggttccatgtgaactgcacttgcacatgggtaagccgatcctaagggacggtggaaccccggcagatagcgcgatcacgcgcgtcacccgacagagaatcgggttaagatttcccgagccgggacgttgcgccgtgctgcacggccgcatcccggtgtccatcatctggtacggccgcttcacgccggcgcagaaggccgtggtcaccgacttcctcgg

SEQ ID NO: 6444 - DNA, 273 bp, Zea mays
cgcacgcagtagtgcagcagcactgacgcactacttcctgcactcactgtgctagctgctcaaaccgtagtagtaacagtccatcaccatcaccatcaccaccaatggctcccaaggttgcgctcttccttgccctaagcctcctgttcgctgccaccgcgcatggctgcgaaccctactgttccggcccagtcgtcccaacaccaccagtcgtgccgactccgtcgtcgcatagccacgggcgctgcccgatcgacgcgctcaagctcaagg

SEQ ID NO: 6445 - DNA, 269 bp, Zea mays
agtgcttctccgccgtcgaggccgcgtcccagtgcgaagagactccgactcacatggccagccgctgggtccggcccgacgtgtacccgctgttcgccgcgacgggcgtggccgtcggcatctgccggtttcagctcttccggaacatcactggcaacccggaagtcagggtaaacaaggcagggagggcagctggtgtgcttgacaaccatgaggaggggagacgttacgccatgcatggcctaagaacctttgtgcacgacaagact

SEQ ID NO: 6446 - DNA, 271 bp, Zea mays
cgagacacgcgtatacccaggcggcggttgacgcagaggaggagaacacgaagaagatggcttcctccgcatacgcctcatggtccaagccgtggatccgtcccgaggtgtacccgctgttcgtgccgatggccgtggccttgggcatctgctcgtaccagcttgtgcgcaacatcacgggcaaccccgacgtgcgggtgaccaaggagaagagggcggccggcgtcctggacaaccacgacgagggcgagacgtacgctatgcacggcct

SEQ ID NO: 6447 - DNA, 274 bp, Zea mays
cagtctctcttccaccttccaccacaagccccgccgcagccggtgcctgctccttcccgatccccgaggcaaagctgcgactccgcaaccgccgccatggcgttcgagaagatcaaggtctccaacccaatcgtcgagatggacggtgatgagatgaccagggtattctggcagtctatcaaggacaagcttatcctcccatttctggacctggacatcaagtactatgatttggggatactgcaccgtgaagcaactgatgacaaggtcacag

SEQ ID NO: 6448 - DNA, 290 bp, Zea mays
  unsure (1)..(290): unsure at all n locations
cgcccatccccgcctangtcagnccggccttcggctcgacggacaccgcgcttgtcgttgcattgcagggcagctagccggctatagcatccgccatggcgcgcgcgcgggacggcctgccggtgctcagcgcgctggacgccgcgaagaccagtggtaccacttcacggccatcatcgtcgccggcatgggcttcttcacggacgcctacgacctcttctgcatctccctcgtcaccaagctgctggggcgcatctactacacggacaccagccaggacaacccgggct

SEQ ID NO: 6449 - DNA, 304 bp, Zea mays
  unsure (1)..(304): unsure at all n locations
agccaaaccagttgtcagcccgcttgaacncgttggagttaaccctaaagttggtggcatagaggttgattccttgttcagaactagtgtacctggcatctttgccattggagatgtagcagcgttccccctgaagatgtacaatagaattgctcgagtggaacatgtggatcatgctcggcagtctgcgcaccactgtgtagagacgctcctaacatcccagacaaaagcgtatgactaacttccatacttctactcgagggtttttgagtacgacggaagttcgaggacagtctggtggcag

SEQ ID NO: 6450 - DNA, 301 bp, Zea mays
  unsure (1)..(301): unsure at all n locations
caacaaggtcgcgcactacttcaacctcaggctcaaggcgactgtcgcgagcgcccggcagacgcaccctgacgccgcgttcacctacgtcgacgtctaacncgccaagtacaagctcatcagccaggccaataagctcggcttcgacgaccctctgctgacatgctgcgggtacggcggcggccggtacaacttagacctgagcgtcggctgcggcgggaagaagcaggtgaacgggcactcggtggtggtggggaagtcgtgcgacaaagcctccaagagggtgcactgggacggcgtg

SEQ ID NO: 6451 - DNA, 311 bp, Zea mays
cagcaagacatccggggacgtgtcggagctccagatcggcgtcaagtacaagccggaatcatgcagcattcaagctcacaaaggtgacaaggttaaagttcactaccgtggaaaacttactgatggaacggtttttgattcaagctatgacagacgtgacccgattgaatttgaattgggcactggacaagtgatcaaaggatgggatcagggtctcctgggaatgtgcgttggtgaaaagcggaagttgaagatcccatcaaagcttggctatgggcctcaacgctcgccacctactattcctggtggag

SEQ ID NO: 6452 - DNA, 349 bp, Zea mays
accccatgacgcctacgtcagtccggccttcggctcgagctcacgagtgatttccgcggcggcggcggaagtcagacgcgatggggcactccaacgtgtggcactcgcaccccaagacctacgggcccggctcccgcgtctgccgggtctgtgcgaaccctcatggactgatcaggaagtacgggctgatgtgctgcaggcagtgcttccgcagcaacgccaaggacattggcttcatcaagtaccgctgaagtcagctgggcgggctatctgactgccatctcttggacagtgtagtagaggcgatgccacaattttcattactgtcatttagatgttcccttcagaa

SEQ ID NO: 6453 - DNA, 347 bp, Zea mays
gcccatgccgcctagcacgtcggcactcggctcgacgacggacggcacagcggctgccacggcgggctcatggacgccgctttcgatttcatcataaagcacgggggcatcgataccgaagatgactacccttacagagccgtggacgggaagtgcgacatgaacaggaaaaatgccagggttgtgagcatcgatggctttgaagacgtgcctgacaacgacgagaagtcgctgcagaaggcggttgctcaccagccagttagcgttgccattgacgccggagcggtgagttccagctctacaaatcgggtgtcttcagcggaagctgcaccacgacacttgaccat

SEQ ID NO: 6454 - DNA, 311 bp, Zea mays
cggcgagtcgtagttggcgagttggagcagagatcgccatggacgcatcggcggaggtggaccacctcgccgccgagaggtcggccgcgcgcttcgatgtcgaggcgatgaaggttgcctgggctggctcgcgacacgccgtcgaagtcggcgaccgcatggcccgactcgtcgcgtccgaccctgtcttccgcacggataacaggaccatgctctccaggaaggacttgtttaaggacactctaagaacggcagcccatgcatggcagcgtattgtggaactacgtctcacagaggaggaagcaggtatg

SEQ ID NO: 6455 - DNA, 287 bp, Zea mays
cccgctcgagcgcaaccgcaagccagcgaagctagagcctgcctgaccagagctagctgagctacagccaacagcagctggtctgactgacatggcgaaggacatcgaggcatcggggcccgacgcgggcgagttctcggccaaggactacaccgaccctccgccggcgccgctggtcgacgcggaggagctcacccagtggtccctgtaccgcgcggtcatcgccgagttcatcgccacgctgctcttcctctacatcaccgtgggcaccgtgatcgggtacaagc

SEQ ID NO: 6456 - DNA, 299 bp, Zea mays
cggctcgacggaagatgacctggagactgaaggggaggcagacagacaggcttggctagctaccatctcattggctctctgccaggcatttgatcttctcgacatgctaaagacggaagaagaaatgcttcaagctgtaaaggacaggcaggcaaaggatgggaatgcatttgctcgtgaaatgctcgatgaacgaacgaacaaggccgacacatggcaccataatgctgccaaccgtgtggcatattccaaaccagctgatcctatcacttgtgcaacatttgctcaagatgtcattg

SEQ ID NO: 6457 - DNA, 302 bp, Zea mays
acagagcaaggcgcagttggctctggtgacggaggagatccgtgtgtcgtccttattcaatcaccccaaccttctgccgcttcttgatcatgccataatagccgtgaagagtcaacagggagattggagccatgaagcatacctacttttccctgttcatctggatggtactttgtttgacaacgctaacatcatgctgtccagaagggaattctattccacagctgatgttctgcaaatattccagcagatgtgtgaacggctgacacacatgcacagctttgatcctccatacgctcata

SEQ ID NO: 6458 - DNA, 304 bp, Zea mays
cttgccgggaccaaggctgatttgttagatacgaggcaggtgtcagcagatgaagcaaaggcgtatgctcaagagaatggtctcttcttcatggaaacttctgccaaaacagctaccaatgtgaacgacgtgttctatgagattgcgaagaaactgcttcaagggcagcaggttcagaacccacaaggcgggatggttctcaaccagagaccacctgagaggatggtgagctcttcttcctgctgtgcgtgaagcgcaagatggaagtgtggatcacatgttccatggcctggactccaggagt

SEQ ID NO: 6459 - DNA, 254 bp, Zea mays
cgctcgtcaacgagttctacaacaacgggctcacctccaacctggccggcagccgcaaccccagcctggactacggcttcaagggcaccgagatcgccatggcctcctactgctccgagctccagtacctgggcaaccccatcaccaaccacgtgcagagcgcggagcagcacaaccaggacgtgaactccctgggcctcgtctcggccaggaagaccgccgaggcgatcgacatcctgaagctcatgtcgtcc

SEQ ID NO: 6460 - DNA, 297 bp, Zea mays
gcagcgttcccggtaaaatcgagcgccgccggaaaggcctccttgacatcgtcgaccccatcattctggagcatcaggagaagagagcggccggtggcatagacgaagatgaggacttgcttgacgtgctcttgagactccagaaagacatggactcccagtaccctctcaccaccgacaacatcaaatccgtcctcatcgacatgtttggagcaagcagcgagacgtcggcgacgacgctgaagtggacaatggccgagctgatgcggaacccggcggtgatgcggaaggcgcaag

SEQ ID NO: 6461 - DNA, 295 bp, Zea mays
cgcgcggcggtgccagcctgctccggctctcttcccggcggaccttctcggtctccgcggcggccgggttcgacaaccagaaccgcgagtatgtgatcgtcgggggagggaacgctgcgggttacgccgccaggacgttcgtggagcatggcatggctgacggccgcctttgcatcgtctccaaggagccagttccaccatacgagcggccagccttgaccaaaggctatctttttcctccggacaagaaaccggctcgcctaactggtttccatacatgcgttggatctggtgg

SEQ ID NO: 6462 - DNA, 296 bp, Zea mays
cgctgctcgtatgatcgccgatgtctccaagtctgacaagatcgttgtcgagaagtccaccgtccctgtcaagaccgctgaggctattgagaagatcttgacccacaacagcaagggcatcaactaccagatcctttccaacccggagttccttgcagagggcactgctattgaggacctgttcaagcctgacagagtgctcatcggtggccgggagacccccgagggcaggaaagccgtccaggttctcaaggatgtgtatgctcactgggttcccgaggacaggatcctcacca

SEQ ID NO: 6463 - DNA, 302 bp, Zea mays
acttcgatgactgtcattaggcctgctgacatggatgctctacaaaatgcgttggacaacaataatgtatctcttttcttcacggagactcccacaaatccatttctcagatgcattgatattgaacatgtatcaaatatgtgccatagcaagggagcgttgctttgtatcgacagtacttttgcctcccctatcaatcagaaggcactgactttaggcgctgacctagttattcattctgcaacaaagtacattgctggacacaacgatgttattggaggatgcgtcagtggcagagatga

SEQ ID NO: 6464 - DNA, 306 bp, Zea mays
cgacaacgctggtgccatgatgagtgtagatgatacattgatgtgctcgttccaaatattgaagcctgcacagaagatgatgggtggttcaactaataacaaatctggcttcaagtcattcaggggatggtgacaacggcctgatggtgggcacgctgcgttcgacagggggtacatcttacagcggctgcaactaacaggcatatgcattttcgcggaaacctgcttgggccttggaaaggcaaagcagatgtagaactgtgcatcttccatgttggattaacacttgatgtaatgtattgttat

SEQ ID NO: 6465 - DNA, 308 bp, Zea mays
ggaactcttgcaccaactggtctttttgttggaggtacgaagtacatggtgatccaaggtgaacctggagttgtcatccgaggaaagaagggcactggaggcattactatcaagaaaactggcatgtccttgattatcggtatctatgatgagccaatgactccagggcaatgcaatatggtggtggagaggctcggcgattacctgatcgaacagggcttctaagtttgtcataatgctattttggtcattgggcacttaagtttgcacctcatttggttctgtaatatgtgggcttgtgcatgtgc

SEQ ID NO: 6466 - DNA, 306 bp, Zea mays
aaaatactgtccttcacatgaaatggatggtactccgaggtgctgtagttgtgaaagaatggagccaagggaatcaaaatatgtattactggatgatggtcgtaagctctgcctggagtgccttgattcggcagtgatggatacaaacgactgccagcctttgtatcttgaaattcaggaattttacgaaggactgaatatgaaagtggaacagcaggttcctctgcttctggtcgagcgacaagctttgaatgaagccatggaaggagagaaggctggtcaccaccatcttcctgaaacaagagg

SEQ ID NO: 6467 - DNA, 310 bp, Zea mays
ggtaaacatgcaaacatcgcgcctattcgtgcttactactactcgaaggatgagaagcttgttgtttatgagtatattggtagaggcagcttctcagctctgttgcatggtatcaagggcgtgtgtgagaagaccccattagattggaacacaaggatgaagattatactcggaacagcacgcggcctcgagcacatccattcagaaggcggctccaggctcgcacacggcaacatcaagtcaaccaacgttctgctcgacggagaccacaacccttacgtctcagactacgggctgagctcgttgacga

SEQ ID NO: 6468 - DNA, 311 bp, Zea mays
caacctgtgcgccatccatgctaagcgtgtgaccatcatgccaaaggacattcagctggcaaggaggatccgcggcgagagggcctaatcgccacctcaaacatcgtgacaaaaacatgaagtcctggggttattgttaatctggtgccattgtaaggacatatgagtagggtttgttttgtggatcgcaagtttctcttctgctactgttgctgctacctttgctggtgttattgctagggtcgaatacttaagttaactatgcgctgacagtctggactagcagtgttatgtgcgctgctggaccttgc

SEQ ID NO: 6469 - DNA, 276 bp, Zea mays
  unsure (1)..(276): unsure at all n locations
caccaccgcacgatgtcggcagcggcgcgagtgctgccgaagcggtgaccttcgtgacgggcaacgccaagaagctggaggaggtccgcgccatcctcgggtcttccgtcccattccagtcgctcaagctcgacctgcctgaactgcataggcgagcagagtacatatcccnagagaaagcacgaatcgctgcatctcaggtgaatgggctgtactggtgtagacactgcctatgttttaatcgctcaaaggcctacagacctacataaatgtttc

SEQ ID NO: 6470 - DNA, 304 bp, Zea mays
gcgagcggcacggcggcggcgatcggagaagatggtgcgcaaggcgaaggttgagttcgacgagcagccgccggataacttcgacccgaagaacccgtatgccgacccggtggcgatgctcgagtaccgggaacacctggtgcgagagaagtggatccagatcgagaccgccaagatcatccgggagcgcctccgctggtgctaccgcatcgagggcatcaaccaccaccagaagtgccgccacctcgtcgaccaatacctagaggctacccgcggcgtgggttggggcaaggatgcccgcccg

SEQ ID NO: 6471 - DNA, 302 bp, Zea mays
ccggtctcgcagttcctccccgtcgtcttccaccgcaaatcgccgaagcaagcaggcgagctcgggaccagatccactgcgggcagctggagcggaagggccatggggacgccgccgcctttccaggagtccggccactgcgacgtctgccgctgcaccttcaacaccttccgccgccgtcatcactgccgcagctgcggacggacgctctgtcacgagcattcttcgtactacatggctctcccgcagtatgggatatatacagacgtcagagtctgctacggttgctttcacaatcctcc

SEQ ID NO: 6472 - DNA, 297 bp, Zea mays
tatcactgtttgcatgcactgtgggacaaaaaccaagcaaagccaaattctacctggacgatacatttgaagtggtcgctatgctgagcgcacttgcagatgccactggagctgaactggaatctgattcggctgatgaattggccgcatctatctcatcacttgatattggtgacgaacaatcagaatccagtgatacaccaattggagggtcttagtcagttttctcttgaatttcagaatataatgattatttcaatagtcaattctacagaggggaacttctcaatctgctgc

SEQ ID NO: 6473 - DNA, 287 bp, Zea mays
  unsure (1)..(287): unsure at all n locations
ggcgtgggcgaagacctaccccgagaacaagcacgtgaagttcctcgccgacggatctggagcgtacaccaaggcgctcgacctcgagctcgatctcacggacaaagggctgggcgtgcgctcgaagaggttcgctctcctggccgacgacctcacggtcaccgtcgcaaacatcgaggaaggcgggcagttcacgatctccggcgctgaggagatcctgaaggcgctttagaagctccgtctcctctagaagccgcagcaacgatcggtctatagnnttgactcgc

SEQ ID NO: 6474 - DNA, 314 bp, Zea mays
  unsure (1)..(314): unsure at all n locations
ggagtacgtgtgcgtcgctcgcttccacgccgccgtgccggacaccgcgcgcgtggcccgcgcgctagtatggcgctgacgggcgccgtgttccagcgcccgccgctcatctccgcggtgaagcggcagctcagggtgcggaccatctacgagagcaagctcctggagcacgaccctgagcgccacctcgcggtgttctggatctcctgcgaggcaggcacttatgtccgnactctgtgtgtgcaccttgggctgctccttggcgtcggcgcgcatatgcaggagctgcgccgtgtccggtcagggatcctcgg

SEQ ID NO: 6475 - DNA, 291 bp, Zea mays
attggttctatactccggtatacaccacgtgtgatctcacaccgtggggtcatcccttgcccttcaagtcaccacggataatgcggacgcgattcagttcatttccaaccggtggccatactggaacaggacagagggagcagaccacttctttgtcgtgccacatgactttggcgcatgcttccactaccaggaagagaaggccatcgagcggggcgtccttccgttgcttcgccgtgctacactggtccagacttttgggcagaaggatcatgtctgcctgaaggaagg

SEQ ID NO: 6476 - DNA, 285 bp, Zea mays
  unsure (1)..(285): unsure at all n locations
atgcgggatagcgatggaaaatccaggtgttttggatttgtcaattttgaaaatgcagatgctgctgctcaggctgttcaagagttgaatggcaagatattcaatgataaggaactgtatgttggaagagcacagaagaagtctgaaagagagatggagttgaaggagaaatttgaaaagaatgttcaagaggtagctgagaagttccaaaacacaaacttgtatttgaagaacttagaggagaacattgatgatgagnaattgcgtgaactctttgctgagtat

SEQ ID NO: 6477 - DNA, 292 bp, Zea mays
ggcagaagccctacaaccacgccggctgcaaggcctccaagtcgtcccggcccttctgctcgcgcaagaaccctgacgcggcatggtacgacaagatggaggcctgcataacgccgctgccggagatctccaaggccagcgacgtcgccggcggcgcggtgaagagatggccgcagcggctcacggccgtgccgcccagtgtctcacgcggcactgtcaggggcgtcacggccaggtcgttcgcgcaggacacggagctgtggcggaggagggtccggcactacaagtcggt

SEQ ID NO: 6478 - DNA, 291 bp, Zea mays
ggccgtccttgaagagcgagcagcaatggcgcaggagatcgagcacacccacctccccatccgcggcctcaacctccacgtcgcacaagtaggcacaggtgaactgggcacggtggtgttcctgcacggcttcccggagatatggtactcgtggcgccaccagatgcgggccgtggccgcggcggggtaccgcgccatcgcgccggactgccgcgggtacggcctgtcggagcagccgccggagcacgaggaggtctctcctgacgacctcatcgccgacgtgctgggcat

SEQ ID NO: 6479 - DNA, 291 bp, Zea mays
  unsure (1)..(291): unsure at all n locations
tcncgctctcctgctactctgctccgtgatctggtctggtgagatcggggatcggaccgtcgactcggcgagacatggcggactggggccccgtggtggtgggcgtggtgctgttcgtgctgctctcgccgggcctgctctgcgagctgccgggcacccaccgccacgtcgacttcggcggcttccacaccaacggcaaggccatcttcgtccacaccctcgtcttcttcgccgccttcaccatcctcacgctcgcgctccacatccacatctacaccggctagctagcta

SEQ ID NO: 6480 - DNA, 287 bp, Zea mays
gttggcttctcctcgccctccggttcgggttcgggttcgtgaggttctccggggttcgggttcgtgggtgagcggatcgagatggcggcgtcggatgttgagtaccgctgcttcgtcggcggcctcgcctgggccacggacgaccactccctccacaacgccttcagcacctacggcgaggtcctcgagtccaagatcatcctcgatcgggagacgcagaggtcccgcggcttcggcttcgtcaccttctccacggaggaggcgatgcggaacccatcgagggcatg

SEQ ID NO: 6481 - DNA, 173 bp, Zea mays
ctcgatctgtcttctctcagggtggaataagcgtgacaatggaggctccacccgtggcgctgttcgacaccctcaaggcagccaaaccgttcttcttgttggctggtcccaacgtgattgaatcggaggagcacgtcctgaagatggccaaacacatcaaagcaattacgacc

SEQ ID NO: 6482 - DNA, 268 bp, Zea mays
catttccacgcctccaaagcaccagacatccgtccatgacgacgtcgtccagcgaggtcacggtgtgctcgcacctgttcacggtgagaggctacacccacacaaggggcatcggcgtcggcaggtccatcgagtcgcaggcgttcgacgcggccggccaccgctggtccgtcgtgttctacccggacggcgacgaccaggacgcgaggggccacatctctatcttcgtcaggctcatcggcagcggcggcgccggagacgtcacggt

SEQ ID NO: 6483 - DNA, 163 bp, Zea mays
cttctcctccccctccggttcgggttcgggttcgtgaggttctccggggttcggtttcgtgggtgagcggatcgagatggcggcgtcggatgttgagtagcggtgcttcgtcggcggcctcgcctggggccacgacgaccagtccctccacaacgccttcagc

SEQ ID NO: 6484 - DNA, 185 bp, Zea mays
ccgcatcctcgggcccaaggcctcctgcatatccttcaatgactccgcctgccgctgcttcggctacatggtctccaagaagaagtacatctacaccatcgacgacgactgcatcgttgccaaggacccatcaggcaaggatatccatgctcctgagcagcacatccagaacctcctcagcccgt

SEQ ID NO: 6485 - DNA, 263 bp, Zea mays
gtggaaaaccgctgaggaggttgctgcattggttcgatctcttcctgtagaagagcagccaaagcaaattattgtgacaaggaagggcatgttggatcccttggaggtccatctacttgacttccctaacattgttattaagggcagcgagctgcagcttcctttccaggcttgcttgaagattgagaagtttggtgatcttatactgaaggcaactgaaccacagatgggtctttataatatatatgatgattggttgaaaa

SEQ ID NO: 6486 - DNA, 270 bp, Zea mays
cacgactggagcgacgcgcactgcgccacgctgctcaagaactgctacgacgcgctgccggaaaatggcaaggtcatcgtcgtcgagtgcgtgctgccggtcaacacggaggccacccccaaggcgcagggcgtcttccacgtcgacatgatcatgctcgcgcacaaccccggcggcaaggagcggtacgagcgcgagttccgcgagctcgcaaagggcgccggcttctccgggttcaaggccacctacatctacgccaacgcctgggcc

SEQ ID NO: 6487 - DNA, 266 bp, Zea mays
attgatcggaaatcaatacacctactctgcagggaactggaagaagagaggaatgcctcagccattgctgcaagtcaagctctggctatgatcaccaagttgcaggatgagaaggccgcaatgcagatggaagcttcgcattaccaaaggatgatggaagagcaagctgaatatgacagtgaagcggtaggcaagctaacgagttactcactgaaagagaacagctaattgaagaactggaagttgagctcgaaaactataggaga

SEQ ID NO: 6488 - DNA, 264 bp, Zea mays
gctcgccgtacgagcggcgccggggtctgagtccgcgtccttctgtttccggtccacggcgctcctgcacgtcgctagcgccactagggacctcaagaagcgtgtgccctgggtgctcggtgtcgaggcggaccccagcggcggcccacgggtgcaggaggcggccatgaagctgtaccacagccgtaacgcgtgtgagggcgaggaggcaggcaaggtggacctgctccaggccttccaggcggtggaggtggccgtgagagc

SEQ ID NO: 6489 - DNA, 265 bp, Zea mays
tgtggaaaactcaagggctacaagaagatcctggtactctacaccaactacgggaagcagcggaagccggagaagacaaactgggtgatgcatcagtaccacctagggtccgatgaggaggagaaggacggcgagctcgtcgtctccaaggtgttctaccagacgcagccgaggcagtgcggcagcggttcggcgacggctaaggacgccatcccgctcgctgccaacgcagcgactgaccaccaccaccaccaccaccatgacg

SEQ ID NO: 6490 - DNA, 257 bp, Zea mays
ccccagccaggctgctctcaacgacgagggtgtcgacctgcccagatgggtgcagtcagttaatcgctcggagtggggttcactagtgtttgatatggagctcatgagacatcagactggtgaggagcccatggctcagctcgtgctgcttgctatggactgcacagcacaagtcccagaggcccggccgtcaatggcgcatgttgtcatgcggatagaggagatcaagaagtcaagcgtgaccccgaacattgaac

SEQ ID NO: 6491 - DNA, 262 bp, Zea mays
ggcattgacaagcgtgtaatagagaggtttgagaaggaggctgctgagatgaacaagcggtccttcaagtatgcttgggtgctcgacaagctcaaggctgagcgtgagacgggtatcaccattgatattgctctgtggaagtttgagaccaccaagtattactgcaccgtcattgatgcccctggacaccgtgacttcatcaagaacatgatcactggtacctcccaggctgactgtgctgtccttatcattgactccacca

SEQ ID NO: 6492 - DNA, 303 bp, Zea mays
cgacgcacgcacgcgcagctcaacgctcaactccggtccagagagctcgagctcgaactccgcgacgattcaccgagccggcgcccagtgacccttccagaagcttccagaaggtcaccgccatggccgcgcccttcttttccactcctttccagccctacgtctaccagagccagcaaggatctgtgacggcgtttcagatatccggtggagatgtgcaggtcctgcaggtgatgctgaagtctcaggagaagctgactgcaaaaccaggtgcaatgtgctacatgtctgggaatatgcaga

SEQ ID NO: 6493 - DNA, 257 bp, Zea mays
tgggtgggatgccctcacgacaagaggaggaggcagcaattaagaaaaagtatggaggaatattgcccagaaagactccacttatatctaaggatcatgaacgtgcttactttgattctgctgattgggctctaggaaagcaaggtggtgttcccaacaagcctaaaggtcctcttgaggcactccgacccaagcttcagcctacgcaacagaatgcccgcgcccgccgaacttcatatgcgtctgcggacagtgac

SEQ ID NO: 6494 - DNA, 254 bp, Zea mays
ccgggccgggatcgccgagttcgtggccaccttcctgttcctgtacatcagcatcctgactgtgatgggcgtgacaagtcgtccagcaagtgcgccaccgtgggcatccagggcatcgcgtggtccttcggcggcatgatcttcgcgctggtgtactgcacggcgggcatctccggcggccacatcaacccggccgtcaccttcggcctcttcctggcgcggaagctgtcgctcacgcgcgcgctcttctacat

SEQ ID NO: 6495 - DNA, 257 bp, Zea mays
aacgaactaaaacccgcgatctgaagcgactagtcgaaggcggcggcggcggcgatggggagcgacctcggagacggagaagaagaagaccccggtggcgctgatgcccatcgcgaacctctcgctggaaagaagctctgcaagcggaccctcaagctcgtgcgacgagcctctgaggccaagtgcctcaagcgcggagtcaaagaggtagtcaagagcattcgccgcgggaacaaagggttgtgtgtgattgctgg

SEQ ID NO: 6496 - DNA, 253 bp, Zea mays
cagagcacttgtgctacatctggtgaagggttgtatgaggggcttgactggctttccagcaacatctccagcaagtcttgaagcttttcggcagggctcctagcgagaggatgtctgaacaacttatggctgctttttttttacatattattactaagacacaagctacagcagatatagtacttgtgaaaaaaagaaacttctgagctcttttgagggattgatactagattggattgtgtttttgtttttg

SEQ ID NO: 6497 - DNA, 284 bp, Zea mays
cgcgatctcaacttcatcgaccacacgagtaacatctcctggaaagcgtttgcgagggcgatgccggtgatcatagacccggcgctgtacatgaagaaaaagggcgatctgttctgggtgccggagaggcggagcttgcccacggcattcaagctgttcactggtgcgtctactgctctctcactctccacccgtgattgttaacctgacattgacagagcacactcatttattcagtgctagcacccaactacagtactacccatcgcacggtagcagtgcct

SEQ ID NO: 6498 - DNA, 287 bp, Zea mays
agctcgctttcaaggaggatcaccatatatttatcccttgtatggtttaggagaactgccacagggttttgcaagacttagcgctgtttatggtgggacctacatgttgagtaagccagagtgcaaggtcgaatttgatgatgaaggcaaagtttgtggtgttacctcagaaggggagactgcaaaatgcaaaaaggttgtctgtgatccttcctacctacctgacaatgttaaaaaaattggaaaagtttttcgggcaattgctatcatgagccatcccatcccaa

SEQ ID NO: 6499 - DNA, 280 bp, Zea mays
ctccaagtgcgccaccgtcggcatccagtgcatcgcctgttccttcggagggatgatcttcgcgctcgtctactgcaccgccggcatctccggaggacacatcaacccagctgtgaccttcgggctgttcttggccaggaagctgtccctgactagggccatcttctacattatcatgcaatgcctgggtgccatctgtggagctggagtggtgaagggcttccagcaggggctttacatgggcaacggcggtggcgccaatgttgtcgcccccgggtac

SEQ ID NO: 6500 - DNA, 285 bp, Zea mays
ccgctcgagcggctcgagcacaaagcctgactacgcaacttgtgtcaagatctcaacggatgcatccatcaaggagatgatccccccaggtgctcttgttatgctgacaccactgatcgttgggattttgtttggggttgagaccctcgctggggtccttgctggtgcccttgtctctggtgttcagattgccatttctgcatccaacactggtggtgcctgggacaacgccaagaagtacattgaggctggagcttcagagcatgccaggacccttggcccaaa

SEQ ID NO: 6501 - DNA, 287 bp, Zea mays
cctgatgttagtactcttaagttgacttctgtgtacattgcaattggaatcttctcggtgttcttcttgctatttagatcattaacagttgttgttcatggggtcaagacatcaagatccttattttctcagttactagactcattattccgtgcaccaatgtcctttatatgattctacccctcttggaagaatacttagccgggtttcttcagatctgagtattgttgaccttgatattccgtttggcttcatgtatagcataggtgctggcataaatgcatata

SEQ ID NO: 6502 - DNA, 278 bp, Zea mays
gttcaggacctcaaacttctggctcatgtgcccctgttgacattgagtggcctcctcgaagaagctcgtcatccgacttcaatgcatccttgtctattagcaaggagaatgaatctggaaggctatctagcgacggacttgacgatattgatccttttgctgattggcccccaaaacctagcaatgttactagcattacagcaaccgagcatcgtccaagcataaatcaaaatatttctggatttagctcaggtaacatagggtttggtggcagcggg

SEQ ID NO: 6503 - DNA, 280 bp, Zea mays
cgaccctcgatcgacgcaagacattaattattgccatggatacagcctttggaatggaatacttgcatagcaaaaacattgtgcactttgacttgaaaagtgacaatttgcttgttaatttaagggaccctcagcgtccaatatgcaaggttggtgatcttgggctttcaaaagtgaagtgtcagaccctcatctctggaggtgtccgaggaacacttccatggatggccccagaacttctgaatggtagcagcagcttggtctcagaaaaggttgatgt

SEQ ID NO: 6504 - DNA, 282 bp, Zea mays
cacctcctccgcttccgcctcgctcaggcttatagtcagtgatggaacacaaggaggcgggctgccagcagccggagggcccaatcctatgcatcaataactgcggcttcttcggcagtgctgcgacgatgaacatgtgctccaagtgccacaaggagatgataacgaagcaggagcaggcccagctggctgcctcctccatcgatagcattgtcaatggcggtgacggcgggaaaggacctgtaattgctgcatctgtaaatgtggcagttcctcaagttg

SEQ ID NO: 6505 - DNA, 282 bp, Zea mays
gtggaatgcggatttcaaggacgaactaataaattggttgatggttgctactccttttggcagggagctgccattgctttcacacaaaagttaattacgattgttgataagcaattgaactcctcgtattcctgcaaaaggccatcaggagaggatgcctgcagcaccagttcatatgggtgcaccgcgaaaaagtcttcctctgctgtggactatgcgaagtttggatttgattttatacaacagagcaaccaaattggcccactcttccataacattgcc

SEQ ID NO: 6506 - DNA, 278 bp, Zea mays
ggaagctggacaggcaggtgacggccatgctaatggacatcatcgaggcccgcctcgccagcaaggacaccgccggcggctacgggaacgacctgctcgggctcatgctggacgcgtgcgcgccgccaccggagcaccatggcgagatggcgccgaccacgctgagcatggacgagatcgtcgacgagtgcaagaccttcttcttcgccggccacgacaccacgtcgcacctgctcacctgggcctccttcctgttgagcacgcacccggagtggcag

SEQ ID NO: 6507 - DNA, 270 bp, Zea mays
tgacacggccatgttctacgggctcaagtacttcaacgaccacctgatgcaggcggggccgtacgggaacgtgcagtcggaggtgctcatgcgcaatgacgccagcaccttcaccttcaggcagggctgggccttcccgcgcaaggtctacttcaacggcgacgagtgccagatgccgccgccggacgcctacccctacttgcccaactccgcgccgccgacagccgcggcgtcgctgggcggcgcacggcagcggccgtcgtggtgctc

SEQ ID NO: 6508 - DNA, 274 bp, Zea mays
ccgcacctctctccatctccctgctcctccgcctccttcttgatccagccaagccagggatcgccatgtcggactcggaggagcaccacttcgaatcgaaggccgacgccggagcgtccaagacctacccgcagcaggctggcaccgtccgtaagaacggcttcatcgtcatcaagaaccgcccctgcacagttgtggaggtttctacctcaaagactggtaagcatggccatgccaaatgccactttgttgccatagacatattcaacgggaa

SEQ ID NO: 6509 - DNA, 274 bp, Zea mays
acttatatacacatcagttccaacggtagtagttggcattttcgacaagaacttaagtcataatacgcttctttgttacccgagactatatgaggcagggcttcgaaatgagggctacaacttgacactcttctggatcacaatgctcgatacattgtggcaaagccttgttcttttctatgtcccttttttcacatacaatatcagtacaatggacatatggagtctgggaagtttgtggacaattgctgtggttataattgtcaatatccat

SEQ ID NO: 6510 - DNA, 272 bp, Zea mays
ctatgccgtcggtcgtcgtcctcgcggatgccgtctgcgtggcgtcgctcgcgcagcccgtcgcggccgacctgaagctggactagtacgcgagcacctgcccctacgctgaggccatcgtgcgcggcgtggtgcagcagcgactgcatgcaacaatgccggccgtcggctccaccgtccgcctcttcttccacgactgcttcgtcgagggttgcgtacgctctgtgctgatcgaatccacgcccggcaaccaggccgagaaggacgcctcc

SEQ ID NO: 6511 - DNA, 274 bp, Zea mays
agaagctatccatgttataagctgtggctatgatgacaagactgaatggggaactgagatcgggtggatctacggttctgtgacagaagacattctcaccggattcaagatgcacgcgcgacgctggcggtcgatctactgcatgcccaagccgccagctttcaaggggtctgcccccatcaatctttcggaccgtctgaaccaggtgctccggtgggctcttgggtccgtggagatcctcttcagccggcactgccccctgtcgtacggctac

SEQ ID NO: 6512 - DNA, 252 bp, Zea mays
agaagatgtgagaagagaagtgagaatattgagttctctgacaggccacagtaatttagtgcagttctacgatgctttcgaggatgaagataacgtgtatatagttatggaattatgtaaaggaggtgaactgctggacaggatattggctagaggtggaaagtactctgaagaggatgcgaaggtcgttatggtacaaattttgagtgttgtatcattttgccatcttcaaggtgttgttcaccgtgatct

SEQ ID NO: 6513 - DNA, 289 bp, Zea mays
gggcaatgttaacccaattggagtcaggagctgttatgatgagggtaagcgtgtagcagagacgctgatgttcgactatcacaggcagcatggcattgaaatccgaattgccaggattttcaacacctatggaccaaggatgaacattgacgatggccgtgttgttagcaacttcattgctcaggctgtgcgtggcgaaccccttactgtccagaagccaggaacacagactaggagcttctgctatgtcgccgatatggttgatggtcttattagactgatgaatgga

SEQ ID NO: 6514 - DNA, 285 bp, Zea mays
cgcgctcgagccggtcctcaccgacgccgaccgacccgcgccgcagcccacggggactaacatccgccgcgccctcgcccgcctcgtcggggatgcccgccccggggacttcctcttcttccactacagcggccacggcacgcgcctgccagccgagacggggcagcacgacgacaccggctacgacgagtgcatcgtgccctgcgacatgaacctcatcacagatcaggatttcagggaactcgtgcagaaggtccctgaaggttgcctattcacatcgtctct

SEQ ID NO: 6515 - DNA, 254 bp, Zea mays
ctgagatcgtccacggcgacaagacttacactattaccgacgccaccaccctcaccatcactgattgcccttgcactgtcaccaagcctgtcatcaccacctccgctgtcgtctgccacgactgccctgctcctcccgcccaccacggcaacaactccaccctggtccccgtttaccctaccggtaagcccggccacggtggtgagagcggcaagcctggctctcctgctggtcccggtgctacccccaccgct

SEQ ID NO: 6516 - DNA, 291 bp, Zea mays
gcaaaaaccttgccacgaatcgccgacactccaacccggaagaggcaacgaggtgactccgcgcctccgtaatgggtgacagccaatactccttctcgcttaccactttcagcccgtcgggaaagcttgtgcagatagagcacgcgctcacggctgtcggatccgggcagacctccctagggatcaaagctgccaacggtgtagtgattgccactgagaagaaactgccttctattttggtggatgaaacatctgtgcaaaagattcaggcactaacaccaaatattggag

SEQ ID NO: 6517 - DNA, 284 bp, Zea mays
gctgcttcctcggccctcttgctcctcgtcgcggccttggtggccaccagtgcgagggcggccacattcaccatcaccaacaactgcggctcgacggtgtggccggcggcaccccggtgggcggcggcacgcagcttgaccccgggcagacgtggaccgtggacgtgccggcggggacccagtccggcagggtgtgggggcgcacggggtgctccttcaacggcggcacgggagctgcagacgggcgactgcggcggcgcactctcctgcacgctctcggggca

SEQ ID NO: 6518 - DNA, 288 bp, Zea mays
ggcaaggcaattggctctctcaggggtcacttggattactcatttgcatctgcatggcatcctgatggcaatatcgtggcaactgggagtcaagacactacatgcaggctatgggacatcaggaacctatcccaatcagtagctgtgcttggtggaaggatgggctcaattcggtgtgtgaagttctcttcagacgggcgcttccttgcaacagcagagcccgtagattttgtccacatgtacgatgcttatgcggactacagcagatctcacgagattgacttgttt

SEQ ID NO: 6519 - DNA, 234 bp, Zea mays
atggaagatttcaactcaaggagatccaaggatcagaagagattattgaagctgatctcgtcctcctagctatgggattcctgggtcctgaagcgtctatcgctgagaaactgggtttggagaaggacaacagatcaaacttcaaagcgcagtttggagacttcgctaccagtgttgatggtgtgttcgcagccggggactgcaggcgtggacaatcactggtggtatgggcca

SEQ ID NO: 6520 - DNA, 281 bp, Zea mays
ccacgaattgtggtaacatggggctcaccttcacgaagctcttcagccggctcttctccaagaaagagatgaggatccttatggttggtctcgatgcagctggtaagaccaccatcctctacaagctcaagctcggagaaatcgtgaccaccatccctacaatcgggtttaatgtggagactgttgaatacaagaacattagcttcactgtctgggatgttggaggtcaggacaagatcaggccattgtggaggcactatttccagaacacccaaggcctt

SEQ ID NO: 6521 - DNA, 280 bp, Zea mays
tgccgctgagccacgtgctggccaccaagctgggcgcgcgcctcaccgaggtgcgcaagaacggcacctgcgcctggctgaggcccgacggcaagacccaggtgacggtggagtacgtgaacgagggcggcgccatggtgcccgtccgcgtgcacaccgtgctcatctccacccagcacgacgagaccgtcaccaacgacgagatcgccgccgacctcaaggagcacgtcatcaagcccgtgatccctgagaagtacctcgacgagaagaccatcttcca

SEQ ID NO: 6522 - DNA, 282 bp, Zea mays
gctctccatccaggaaatggtagaatgggagttcaagagcaaggaagacgggaagatgcatgcgtgcggccatgacgcccacgtggcgatgcttcttggagcagctaggttgcttcagtctcggagggacgatttaaagggtacagtgaagctcgtcttccagccagccgaggagggacacgccggcgcataccacgtcctcaaggaaggcgtcctggacaatgtgcaggccatcttcggcgtgcacgtggacacggcgttgccggtggggctcgtcgggtc

SEQ ID NO: 6523 - DNA, 281 bp, Zea mays
gcactacctgcacgccgcgctgaccgagacgctcaggctgtacccgtcggttcctctggataacaagcagtgcttcggagacgacgtcctgcctgacggttccagcgtcagaagggagacatcgtgttctacgtcccctacgccatgggccggatggagtacctctggggcaaggacgccgaggtgttccggccggagcggtggctggatcaggacggagagttccagcaggagagcccgttcaaattcagcgttccaggtacgacgatgacttgagtttc

SEQ ID NO: 6524 - DNA, 280 bp, Zea mays
  unsure (1)..(280): unsure at all n locations
gcatccgcaggctctcgagctctagtccatcccctcgatctcgtagcgcacagcagcagtcaggcggccatggacgccagcgcagcgatagccggcgggaaagcgaagaacggcgcggccgggcgcaaggccggcgggccgaggaagaagtcggtgacgaggtccgtcaaggccgggctgcagttcaacgtcggccgcatcgtgcggtacctgaagaacggccggtacgcgcagcgntcggcacaggcgcacccgtctacatggccgccgtcctcgagta

SEQ ID NO: 6525 - DNA, 305 bp, Zea mays
gagcacccggaccagacgcccaagtcgatcgccatggcgatgaagccggcggctgcggctccccctaccccggccgcggcgcacagcgtgttcgtctacggcagcctgatggcggacgaggtggtccgcaccatcctcaagcgcgtcccgcccgccgccccggccctcctcccaaactaccaccggttcaacatcaagggccgcatttacccggcgatcctgcccgttgagagcaagagagttgctgggagggttatcatgggtgttactgatgaagagctccagcttcttgacgcgtttgaaga

SEQ ID NO: 6526 - DNA, 301 bp, Zea mays
cgtttccaacaggccagtcccctcccactcccagtcccatctcgacgacatggccgcagccgcacggccatcaagctctgtgaaggagacgctcccgccggccctcggctccacctcccagccacctcccgtcttcgatggcaccaccaggctgtacatctgctacttctgcccgttcgctcagcgcgcctgggtcaccaggaacttgaagggtttgcaggacaagatggagctggtggccatcgatctgcaggacaaaccggcttggtacaaggacaaggtttacgcacagggcacggtg

SEQ ID NO: 6527 - DNA, 308 bp, Zea mays
gatcttttgtggtctgacccagatgaccgatgtgggtggggaatttcaccaaggggtgctggatacacatttggccaagatattgcacaacaattcaaccatacaaatgggctaagtcttatttcaagggcacatcaacttgtaatggaaggcttcaattggtgtcaggataagaacgttgtgacagtgttcagcgcgcctaactactgctaccgatgcggaaacatggctgccatcctcgaaattggcgagaacatggatcagaacttcctccaattcgacccagctccgaggcaaattgagccgga

SEQ ID NO: 6528 - DNA, 314 bp, Zea mays
cggctcgagtggtatcgttgctgccgctcgcctttgggtcacgatcctctattctttttacaaattactttttggtagtgagtcatcacattaaattagcaaaaatgtcaaaccctgaaactgaagaggtagccgtacaatccaactcggtgtacacctttggcaaaaagaagaaggcaaccgctgttgccatttgcaaaccaggcaaaggtttgatcaaggtaaatggtcgcccacttgaatctgtgcaaccagaattattgcgattcaaaatttttgaaccaattttgaccttaggaaaagacaaattccga

SEQ ID NO: 6529 - DNA, 303 bp, Zea mays
ccaagatcaagatcgggatcaatgggttcggcaggatcggaaggctggtggccagggtggctctgcagagtgacgatgtcgagctcgtcgccgtgaacgaccccttcatcagcaccgactacatgacctacatgttcaagtacgacactgtacacggacagtggaagcaccatgaagtcaaggtgaaggactccaaaacccttctctttggtgagaaggaggttgctgtgtttggctgcaggaaccctgaggagatcccgtggggttcggttggtgctgaatatggtgttgagtctactggtg

SEQ ID NO: 6530 - DNA, 298 bp, Zea mays
tacagttcacgtatcatgggtccagcctagagtgcttggaattccacaggttaaggctttgcgcgaccgcctggatgcctgggttggaaaggtgcataccacattgctttcagttgaggcggaaacacctgatcttgttgctgtgtaatttcacagctgttacacttccgcgagaggcttggtcagcaaggtcccatttgcaaaatgtgagatgctttgtgtgacacgtagtcattttctggataatgagatctgctgctgccctgagcgtttgtcttcctgcgcctactgatcagga

SEQ ID NO: 6531 - DNA, 298 bp, Zea mays
cggctcgagtgtctccctccgtccctcgaagcttctctggtttcagacgcaaccccgcgggtgcgcggatcaaggagccagagagcgggacgcagcgagcgttccgccagagatcgagaccgtagctagggtttgaggcgccgggctgcggtggacgagatgtcgacgccggcgatgaagcggctgatgcgggacttcaggcgcctgcagcaggacccgcccgccgggatcagcggcgcgccgcacgacaacaacatcatgctctggaacgccgtcatattcgggccggatgatacgc

SEQ ID NO: 6532 - DNA, 298 bp, Zea mays
cccagcgtggtcgccatccgcggcgcgtacgaggacgccgtggccgtgcacctcgtcatggagctctgcggcggcggcgagctgttcgaccggatcgtgcggaggggccactacaccgagaggaaggccgccgagctcggccgcgtcatcgtcggcgtcgtggaggcctgccactccatgggcgtcatgcaccgggacctcaagcccgagaacttcctcttcgctgaccactcggaggaggccgctctcaagaccattgacttcggactctccatcttctttcgccctggccaaatct

SEQ ID NO: 6533 - DNA, 162 bp, Zea mays
atatcgagaaggccggaatcgtaaatcaacagaaactagagaagaaattgtgggcagtcttctgttttgtgtcgcatcaacactgtcttgagaacggaggggaccctgagagagcgcaagtaccagctttctccttctgagaggagagctaatacagtgtta

SEQ ID NO: 6534 - DNA, 301 bp, Zea mays
gacagatgtccgcgaccaatgtgctacaaggcctatggaagcggaaaagaagatagccctctatgtgatgtgcctggatttgaaaacactagaatgagactcctgagacatgtttcttttgttgattgcccgggacacgacattctcatggctacaatgcttaatggagctgctatcatggatggagctcttcttttgatcgcagcaaatgaaagttgtccacagccccagacatcagagcatcttgctgctgttgaaatcatgcgtcttcaacatatcatcattctgcagaacaagatcg

SEQ ID NO: 6535 - DNA, 304 bp, Zea mays
tggatagtcacaagccaaagaagtctcttggaagttatgtcagagttcccatcagcaaagcctccacttggtgttttctttgcagctatttgtcctcgcctgcagccaagatactactcaatatcttcctcaccgagaatagcaccaacaaggattcatgtgacatgtgcactagtatatgggccaacccctaccggaagaattcacaaaggagtctgttctacttggatgaagcattcgactcccttggaagatagcaaagactgcagctgggctccaatttttgttaggcaatcaaacttca

SEQ ID NO: 6536 - DNA, 303 bp, Zea mays
aagcaagccatgtcgaggagggctttagcgatggtcctgttcatggctggcgccgcgctgctcgccggggctgccggcgccggcgcgcagcagggcgtgtggagcatcatcacccggcccatgttccagagcatgctgagccaccgcggcgacagcgggtgccagggcgccttctacacctacgacgccttcatcgaggccgccagcagagtccccggcttcggcaccaccggcgacgagcagacgcgcatgcgggagctcgccgccttcttcggccagacgtccacgaatacacggtggatg

SEQ ID NO: 6537 - DNA, 307 bp, Zea mays
ctcctgcctcgttgccggagccggagccgacgtggcggggcggatcgacaccggcgccgagtacatgcgcacctacgaggacaaggacggcgactggatgctcgtcggagacgtccccttcaagatgttcgtggactcgtgcaagaggatccgcctcatgaagagctccgaggccgtcaacctatctccgaggacatcatcccggcagtgattgttgttggtgtggacgccatatgccctacgcggcttatctctgcgaattagttcacagagtgtgtgctggaagaggcttggctgctcaggtcct

SEQ ID NO: 6538 - DNA, 292 bp, Zea mays
gatcttgtgactctccctcagccgcgtcgcgtctcatcctacgatccaaaggtctctctgctcgcagccatggcgaagaactacccgaccgtgagcgccgagtacagcgaggctgtcgagaaggccaggcgcaagctccgagccctcatcgccgagaagagctgcgccccgctcatgctccgcctcgcgtggcactccgcggggacgctcgacgtgtcgtcgaggaccggcggtccattcggcacgatgaagcatcagtcggaattggctcacggcgctaacgcggggctgg

SEQ ID NO: 6539 - DNA, 274 bp, Zea mays
ccgcgttcgtcgatatgctcgccagcagcggcaaggtcaacgtcctcctcatcgtcaacgccggcgacgtggtcaccaatgtgccctgggaggcgccgcggctgcccaacaagaaggagcagtaccagcacgtgggcgcggactccggatctacagcaagaactcgccgtgcctccgcccggatgctgggcccgcctttcgccacgactctggatgcgtacctgcacctcatcgacggcttcaccgggactgggcgcccgtttcggcacgacgc

SEQ ID NO: 6540 - DNA, 293 bp, Zea mays
cggctcgaggccgctgcagaaggtgcaaggattgctggagcgtcaaggatcattggtgtcgacctgaaccccagcagattcgaagaagctaggaagttcggttgcactgaatttgtgaacccaaaggaccacaacaagccagtgcaggaggtacttgctgagatgaccaacggaggggtcgaccgcagcgtggaatgcactggcaacatcaatgctatgatccaagctttcgaatgtgttcatgatggctggggtgttgccgtgctggtgggtgtgccgcataaggacgctga

SEQ ID NO: 6541 - DNA, 292 bp, Zea mays
gttgctgggatgataaaggactttgatgaacctggaactcttgcaccaactggtctttttgttggaggtacaatacatggtgatccaaggtgaacctggagttgtcatccgaggaaagaagggcactggaggcattactatcaagaaaactggcatgtccttgattatcggtatctatgatgagccaatgactccagggcaatgcaatatggtggtggagaggctcggcgattacctgatcgaacagggcttctaagtttgtcataatgctattttggtcattgggcactta

SEQ ID NO: 6542 - DNA, 322 bp, Zea mays
aattactaggtgcttaatttaactagtggccctaggcgtgaaacttcaccagctccgccactgcccatggccaacggccttccggaccctcgctgcgtcgtcctcaccgccgacgctgcccgatccctcgtcgattccgtcgacgccttcctcttcgactgcgatggggtcatttggataggagataagctcattgaaggggtcccagagacgatggagctactgaggaaactgggaaagaaattagtttttgtaacaaataactctagaaagtcaagaaggcaatactcaaagaaattcagatcacttggacttgaagtta

SEQ ID NO: 6543 - DNA, 323 bp, Zea mays
gcctgccgctgcttcggctacatggtctccaagaagaagtacatctacaccatcgacgacgactgcttcgttgccaaggacccatctggcaaggatatcaatgctcttgagcagcacatcaagaacctcctcagcccatccaccccgttcttcttcaacaccctgtacgacccctaccgtgagggtgctgactttgtgcgtggataccccttcagcctcagggagggtgctcacaccgccgtctcccacggcctgtggctgaacatccctgactatgatgctcccacacagctggtcaagcccaaggagaggaatgagaggta

SEQ ID NO: 6544 - DNA, 325 bp, Zea mays
tgccatggctctttgcttcaagcagaaaaactatgcaactgcggcacactttgctaggatgcttcttgagaacagccctcaggaggcccaagcaaagaaggcccgacaggtgctgcaagcttgccatgacaaggacgattcccaccaactggactatgacttcagaaatccaatcgttgtttgtggcgctacgtatgttcctatctatcgtggccaaaaggatgtttcgtgcccatactgtggatcccgatttgttccttccatcgaaggacagctttgtaccatatgcgagcttgctgcggttggggcagatgcatcaggcctc

SEQ ID NO: 6545 - DNA, 324 bp, Zea mays
catttccatccccaagacaatggagaactacaggctgctttatgacaccaagggccgcttccgtcttcacccaatcagggatgaggatgccaagttcaagctctgcaaggtgaggtctgttcagtttggccagaagggcatcccctacctgaacacctacgacggccgcaccatccgctaccccgacccgctcatcaaggccaacgacaccatcaagatcgatctggagacaacaagatcatggacttcatcaagtttgacgtcggcaacgtggtcatggtgaccggcgggaggaacaccgggcgtgtaggtgtgatcaagaac

SEQ ID NO: 6546 - DNA, 298 bp, Zea mays
  unsure (1)..(298): unsure at all n locations
cgtggctggcgcttctggtcgtggtggtgctcgcgttggcggacgcggcggcggggaggttcgtggtggagaagaacagcatccaggtgacgtcccccgacgagctcaagggcaagtacgagtgcgccatcggcaacttcggggtgccgcagtacgggggcaccctgcacggattggtcgagtacccaaagtccaaccggaaggcgtgccagagcttcgacatctcgttcaagcccaagcaggccgggggacganccacttcgtcctcgtcgaccgcggagaatgcttcttcacaacc

SEQ ID NO: 6547 - DNA, 308 bp, Zea mays
  unsure (1)..(308): unsure at all n locations
gagaattcaagatgggtanagaaaaggttcacatgaatattgtcgntattggtcacgtagattctggtaaatctaccaccactggtcatcttatctacaaatgcggaggtatcgataaaagaaccatcgaaaaattcgaaaaggaagctcaagaaatgggtaaaggttctttcaaatacgcttgggtcttagacaaattgaaggctgaacgtgaaagaggtattaccattgatattgctctttggaagttcgaaaccgaaaagagacattacactattatcgatgctcctggtcacagagattttatt

SEQ ID NO: 6548 - DNA, 306 bp, Zea mays
  unsure (1)..(306): unsure at all n locations
gtcataagtgattcgttctcattgtgctaaggtggcatggatattggtggcggtgctatggtactcggtggaatgcttgctcctccagacatgattttttcaaactcggaccctctccgcagcccatattacaacattgagttaaaagaaatacatgttgctggaaaggcactgcgggtggaatcaaggatcttcaacagcaaacatgggactgttttggatagtgggaccacatatgcttatttgccagagcaagcttttgtggcttttanagaagctgtgacaagcaaagtacattctcttaag

SEQ ID NO: 6549 - DNA, 315 bp, Zea mays
gccggaggaagaaggcgcagacgacaagcagatcagcttgtaccatcgatcaatggcggcggtgacaaagatctacgtcgtgtactactcgacgtacggccacgtggcgaggctggcggaggagatcaagaagggcgccgactccgtggacggcgtcgaggcaaccatctggcaggtggcggagacgctgccggatgaggcgctggcgaagatgcgcgctccggcgaggagcgaggagcaccctgtgatctcgggcaagcagctggtggacgctgacggcatcctgttcggcttcccggcgcggttcggcatgat

SEQ ID NO: 6550 - DNA, 274 bp, Zea mays
  unsure (1)..(274): unsure at all n locations
tggcaccaggatacttgcccgtggcatacagtatggtaaggaaagccggtgggctctgcatcgctgacgaattcaggcaggagtcgcgcgaactgggagccacttctggggattcgaagggcatggtgtcatcccggacatagtcaccatggccaagggtatcgggaatggcatacccataggagctgtcgtaacgacgccagagatcgctcaggtgttgcccgcanaagctacttcaatnagagtacctttgatggtaaccctgtcagcactg

SEQ ID NO: 6551 - DNA, 314 bp, Zea mays
  unsure (1)..(314): unsure at all n locations
cggctcgagggcgcgtcggcacgccgcagtacgacttcatcgagcactgcctgtccacggtggaccgcaagcaccagccgtggctcatcttcgccacgcaccgcgtgctgnggctactcctccaacgcctggtacgccggcgaagggtccttcgaggagcccgagggccgcgagaacctgcagcgcctgtggcagaagtaccgcgtcgacatcgccttcttcggccacgtccacaactacgagcggacctgccccatgtaccagagccagtgcatgaccagcgagaagaccactactcagggatcatgaacggc

SEQ ID NO: 6552 - DNA, 241 bp, Zea mays
agcacgccgagatgtacttccctctcagcagcagcggcgacggcgacaaatgcctcatcctgtgcttcgaggacgacgacgacgacgaggctgctcgcgtcataaagccgtggcggttccgctactcgtactggaccagcagctagagctacgtgctcaccaagggctggagccgctacgtcaaagagaagcagcttgacgccggcgacgtcgtgcgcttcgagatgatgcgtggtttcgg

SEQ ID NO: 6553 - DNA, 119 bp, Zea mays
cgaaccccaaaccctagcttcgctcgttgcggcggcagcggcgagccggcgatggcgaagtctctgcgatccaaacgcgagaagcggcttcggacgttgcgccgggagatagcggagcc

SEQ ID NO: 6554 - DNA, 311 bp, Zea mays
  unsure (1)..(311): unsure at all n locations
tgctggaattactggcccagtanaactgagtggactaaacggtgcgctcgatctgtcttctgcagaatggacatatcagattggactcagaggagaagatttgcacctatatgatccttcagaagcttcaccagaatgggtctcagccaatgcttatccaatcaatcatccactgatttggtacaagaccaagttcacacctcctgcaggtgatgatcctgtcgcgattgacttcacgggaatggggaaaggtgaagcatgggtgaatggacagagcattggtcgatactggccaacaaatctggctccac

SEQ ID NO: 6555 - DNA, 325 bp, Zea mays
gtcgcttccagccgccgccgcgtccgcctcgccaagcgcacgagccgccgcagcacatcgctctcttgatctcagccatggcggaggtggagcagcaacaggacacgccgaagctcttcaaccgctggaccttcgatgatgtccaggtgaacgacatctcgctgaacgactacctcgctgtgaacgcgacgaagcacgcgatgtacctgccgcacaccgcggggcgctactccaagaagcggttccgctaagcgcagtgcccgatcgttgagcgccttacaaactccctcatgatgcacgggcgcaacaacggcaagaaggtcat

SEQ ID NO: 6556 - DNA, 317 bp, Zea mays
ccgccgtcgtcgggcgcgttccgggaggacctggcggagtacatgaagcccatcctggacttccacgcccagacggggtcgccgttcctcatcaacgcctaccccttcttcgcgtacaaggcgagcccgggcagcgtgtcgctgccgtacgtgctgttcgagcccaacccgggggtgcgcgaccccagcaccggcctcagctacgacaacatgctgtacgcccagatcgacgccgtgtacgccgccatgaaggccatggggcacacggacgtgggcgtccggatctcggagacctggtggccgtccaggggcgacga

SEQ ID NO: 6557 - DNA, 316 bp, Zea mays
  unsure (1)..(316): unsure at all n locations
gcatccgcctctcttctcagtgccagccgccgtgcgctcgctctctctgtccctcaaggccttcgccggcgaagagcgcctagtcacccaccaggatgaagtttgttgctgcttacctgcttgctgtccttgctgggaactccagcccctctgctgaggacttgacggccattctggagtcagttggctgtgaagttgacaatgaaaagatggagctcctgctgtcccaactgagcggtaaggacattaccgagctcattgctgcgggcagggagaagtttgcttcagtcncatgcggcggcggcggcggtatggc

SEQ ID NO: 6558 - DNA, 243 bp, Zea mays
gtttttggaacaatagcagctataagtcgaaaagtagtggccgatgagcttcaagtttttgacccagaaggggccatgtgcctcgctgttcaccaaacacattacatgccaaagcgatggcgtggtaaagagaacagcgaacttgtacgaagagaatttgagacattatttccgtatactataatcatgctacttgaagagatggcctccattttcatcactccttacttgcttatttctgag

SEQ ID NO: 6559 - DNA, 298 bp, Zea mays
tagtcgcatgcaaaatgagtagcatcagaagtacgctcgatccgagaacggctcgagacgatcgcattggatgtcttcatgcaatgtcacattaaaggggtgccaggtccttgcatcgaagatgccgatgctcaatgtggagatcatgaatgaactagatggaagtagtgaaatggagaaccatggagacctctctagagtggacaagttatatgtttaccgcacaactgctggagcgagggatgatgcaccaaattttgttaagatcctacagagctagccgcgactacccttatat

SEQ ID NO: 6560 - DNA, 308 bp, Zea mays
gctcagggacgacctcgagaggctcaagaagatcaggaaccaccgtggtctgcgtcactactggggcctccgtgtccgtggccagcacaccaagaccactggcaggcgtggaaaaactgttggtgtctccaagaagcgataagctacatatctatcgacaaatctcagatgtactagtgttggttcttgttcaaactgtcttgatgaagggtttctgttgggacagtttcctgaaattatgttttgccctaggataatcttgcagttatggaaccttgttatattgtatcctgcaatttgttttttgc

SEQ ID NO: 6561 - DNA, 310 bp, Zea mays
aagttctcgaaacatctgcgaagatgagagccaaatggagaaagaagcgcgttcgccgtctcaagcgtaagacaagaaaggtcagggccagatccaaataaacgctcggcccctccatctcagttctttcatgatgaagccttccgttgaataaccaaacacgacatgatgagttttattcgaaacatcatttctttctcaatcgggattgtccaagagctcgcctagcgatttgatcttctttatcgccagtcgaaaaatcgtttatctggagctgtcacatctttcagcaattcattccagtcgccga

SEQ ID NO: 6562 - DNA, 304 bp, Zea mays
gagcctccggcgctcaaccagttcacccgcaccctcgacaagaacctcgctaccaacctgttcaagatgcttcttaagtaccggcccgaagacaaggctgccaagaaggagaggcttctgaagagggcccaggctgagaatgaaggaaaaactgttgaatccaagaaaccaattgttgtgaagtatggccttaaccatgtgacttacctcattgagcagaacaaggctcagctcgttgtcatcgctcatgatgtggatccgattgaactggttgtttggcttccagccctgtgcaggaagatgg

SEQ ID NO: 6563 - DNA, 254 bp, Zea mays
tgcaattctcatccgaacccgatcatctccggccgccgctccctccggaccctccgtcgacatgggcaccgtcactgccgcagatccgcacccgtccttcctcgccgacaaggacgccaaggtcttcgtcgccggccaccggggcttcttctgctctgccatagtgcgccgcctcctctcgctaggcttcacctccgtcgtcgtccgcaaccacgccgagctcgacctgactcgccaggcggacgtcgaggcct

SEQ ID NO: 6564 - DNA, 329 bp, Zea mays
agccgatcttgagccacatcagattcatacgttttacgaatcagttggccatatgatccaagctgaatctgacaacactaatagggatgaatacctcaagagattgatgagccttcctaaccagaagtgggcagaaataatcggacaggcaagccaaagtattgatatcctgaagaaccaagatgttatccgatcagttctcaacattctacagacaaacacaagtgttgcgagctcacttgggccacacttcttcccacagatttcactaattttcttggacatgctaacagtctacagaatgtacagcgagcttgtatcaagcacga

SEQ ID NO: 6565 - DNA, 327 bp, Zea mays
cggaaggtgcggaggtgccgagatcttgctcgatctcttcggcggcgaagagcgccaaccagatccgccctgtttgttggtgtggcgccggagcaggagtaggtcgcggccacagaaccctaggagcgaccatggcagactttcgcgaacctgagaacgcgctcaagagagccgaagaattaatccatgttgggcaaaagcaggcagcactgcaggctttacatgatctcattacctcaaaaaggtacaggtcatggcagaagcctctcgaaaagatcatgatgaagtatgtagaactctgtgttgacctgaggaaaggcagatttg

SEQ ID NO: 6566 - DNA, 327 bp, Zea mays
cagcgacttaacaacaataatggccaccgccatagttcccacggacgccgagctgctgcaggcgcaggccgacctgtggcgccacagcctctactacctgacatccatggcgctcaagtgcgcggtggagctccacatcccgaccgccatccacaacctaggcgggtctgccacgctgccggacctcgtggccgcgctgtccctgccagcggccaagctcccgttcctcgggcgcgtgatgcggctgctggtcacgtcgggcgtcttcgcgtcgtccgacgacgtgcagtaccggctgataccgctgtcctggctgctggtggaggg

SEQ ID NO: 6567 - DNA, 326 bp, Zea mays
  unsure (1)..(326): unsure at all n locations
gcttggtctaaacattcaagaagcacatgcattttcaacaaatgatggctactcacttgatgtctttgttgttgtcggttggcatgatgaggaaacagaggatttagtagaagcagtgcagaaggaaattggcaggattgaagagacacaagcatggtcttcatctcattcatggtctactccagttgaaaaaatgcagattgctgagaattcagcagctgaccgtgttgagataccaacagatggtgctagtgaatggganattgatgcagagcttctcaagtttgggaatanagtagcatcaggatcatatggtgacctttacg

SEQ ID NO: 6568 - DNA, 224 bp, Zea mays
ttggggtgatgagtggagcggccatgtacatcaagaaggacctgaatatcacggacgtgcagctggagatcctgatcgggatcctcagtctctactcgctgttcggatccttcgctggcgcgcggacgtccgacaggatcgggcgccgcttgaccgtcgtgttcgccgctgtcatcctcttcgtgggctcgctgctcacgggtttcgccgtcaactacggcatg

SEQ ID NO: 6569 - DNA, 327 bp, Zea mays
gctggtggcgctgctgctgggcctcaacatgtcgtggagcgccatcaccgccgccctggcgctcatcgtgctggacttcaaggacgcccgcccctgcctggagaaggtgtcgtacccgctgctgctcttcttctgcggcatgttcatcaccgtggacggcttcaacaagacgggcatccccagcgcgttctgggacttcatggagccgtacgcgcggatcgacacgcccacggggacggccgtgctcgcgctcgtcatcctcctgctctccaacgtcgcgtccaacgtgccgacggtcctgctgctgggcgcgcgcgtggcggcgtc

SEQ ID NO: 6570 - DNA, 329 bp, Zea mays
  unsure (1)..(329): unsure at all n locations
acngaaatcctccagcgctctagtccccaacgacgcaggaagcaggatcgagccgaatcctccggaactcgccgccggggccaaccgacctcacactactgatcgacgatgtcgtacgcctacctcttcaggtacatcatcatcggcgacacaggcgtggggaagtcatgcctgctgctgcagttcacggacaagcgcttccagcccgtgcacgatctcaccatcggcgttgaatttggcgcccgcatgatcaccatcgacaacagagccatcagactccagatttgggacactgctggccaagaatcattcagatctattactaggtc

SEQ ID NO: 6571 - DNA, 324 bp, Zea mays
ctcgaactaacacataagcgatggctacaccacaacaacccgctaacggaattttatacgcttgcgttgctgaaggcaagactattgttgcccaacacggcgataaagatcaattcaagaaagtcgcaaaagtcattcttgagcgtattcccaacgaagatattaagaaatcatacgtgcatcaatcatatgccttcaattacattagtcaaaagggcagagtcttcctttgcgtgacctccacagatttccaaacccgtgtcgccttcgcttatttgcaaaaaatccaaggtgaatatagacccagtggtgatttggacttcg

SEQ ID NO: 6572 - DNA, 330 bp, Zea mays
  unsure (1)..(330): unsure at all n locations
ctcctctgctctcncccacctcccggtccggcagcagagagcgggggtgcagagagatcgagatccggaggccgcgagtgggagcgccaccaccagcgactgcggcaatggcgggcacggtgacggtcccggggtcgtcgaccccctccacgccgctgctcaaggacgagctcgacatcgtgatcccgacgatccgcaacctcgacttcctggagatgtggcggcccttcttccagccctaccacctcatcatcgtgcaggacggcgacccgaccaagaccatcaaggtgcccaaggcttcgactacgagctctacaaccgcaacgacat

SEQ ID NO: 6573 - DNA, 319 bp, Zea mays
cggctcgagaccggcaccaacccagcgcggcgccaccggcgacccgtaccccctcccccggagagcgatggcgacggagctgacggcggcgcactgcgcgcgtacgacggcaccgacccgtccaagcccatctacgtctccgtccggggcaaggtctacgacgtcacctccggccgcggcttctacggccccggcggcgcctacgccgtcttcgcgggccgcgaggccagccgcgccctcggcaagatgtccaaggacgaggccgacgtctccggggacctctccgggctcaccgacatagagctcggcgtcctcgccg

SEQ ID NO: 6574 - DNA, 320 bp, Zea mays
actgtacaagtttcctccctgggatctatgtgacaagtcctctcttcgaagtaaagatcttgaatggttctttttttgtcctcgtgacaagaagtatcctaacgggtctaggacaaagcgtgccacaccaaatggttactggaagactagtggaaaggatagaataattatgcttaactcccgcaccgttgggatgaagaaaacattgatatttcatgaaggcaaggcccctaagggcgacagaactgattgggtgatgtacgaatacagaatggaagatgaggatttggtttctgctggtttctcaaaggatgcttatg

SEQ ID NO: 6575 - DNA, 247 bp, Zea mays
gagagcgcaaaagtcaatatcttgatgacattgctactctcactggaggcactgtcatcagagaagaagttggattatccttagacaaggcagacaatgcggtcctaggaactgctgctaaggttgtagttaccaaggattcaacaacaatagtgggagatggcactacacaggaggaagtgaacaaaagggtgacacaaatcaagaaccagattgaggctactgaacaagaatatgagagagaaaa

SEQ ID NO: 6576 - DNA, 320 bp, Zea mays
caaggcaccaactacccccagtctcggaagagaactatccagaagcgcaagactccaaagccgtcgccttcctatccatcccttcctcgccgcgggggtcgcctgagatcacataaacaatggtgaaggctgttgctgtgcttggtagcagcgagggtgtcaagggcaccatcttcttcacccaagagggagatggccctaccactgtcactggaagtgtctctggcctcaagcctggcctccatgggttccatgtgcatgcacttggtgacaccaccaatggctgcatgtcaactggaccacactacaatcctgcgagc

SEQ ID NO: 6577 - DNA, 318 bp, Zea mays
agtcgctggctcccatatcactggccgttcatccatcccggccctatgtgttgtcgtggtgtcgctacgatagtgagataataatgaagctttgggactgggacaaaggatgggagtgcgcacgcacattccgaagtggaggcattaatgtagatcatatcgctttcgatccaaaggagaccaaccgctttgttgctaccgattgcttggatggcaaagtgatgatttggagcctcgactctcccgaacctgaatatcatctgcctaagacggattttaagggtatcatgttcctggaattcttcacacgttatggtc

SEQ ID NO: 6578 - DNA, 319 bp, Zea mays
cagccagttgctcacaagcttaccgatgaccacagaatctgcacttctctacctagatctcccttgctcaatttcaatggcagcagcagttcaacctctgacagatgcagctaaggatttccttgctgtaaaatacaaggatttgactaagttccaagatgaagtgatgaacatccctcttgctggaattgaagccatcttgtcaagtaatgacctccaggtggcatctgaagataccatctatgacttcttgctcagatgggcccgtgcacaatacccgaaatcagaagagagacgtgagatccttagttctcggctg

SEQ ID NO: 6579 - DNA, 323 bp, Zea mays
aaggaagagggcgaaatggtgaagcacaacaacgttatccccaacgggcacttcaagaagcactggcagaactatgtcaagacatggttcaaccagcccgcccgcaagcagaggcgccgcatcgctcgtcaaaagaaggctgtgaagatattcccacgcccaactgctggccctcttcgccccattgtgcaatgccagactctcaagtacaacatgaagtcgagggctgggagaggatttacccttgaggagctgaaggctgccggcattccaaagaagcttgccccaaccattggcatttctgtggatcaccgccgcaagaa

SEQ ID NO: 6580 - DNA, 322 bp, Zea mays
tggacagcgtatgcagacggggactgcaaagggtgcagctacaccgggaccttccgggcacccaagtgccaagcaggctgcggccagcccacccagcgttggtaccatgtgccaaggtcctggctgcagcccagcagaaacctactggtagtcttggaggagctgggtggggactcgtcgaagatcgccctagccaagaggtcggtctcgagcgtgtgtgccgacgtgtccgaggaccatccgaacatcaagaagtggcagatcgagagctacggcgagcgcgagcaccgcatggccaaggtgcacctgaggtgcgcgcacg

SEQ ID NO: 6581 - DNA, 318 bp, Zea mays
ttagcccccaggacatgagttaggagctgctccaatttcgccaaatgctcctataccgtctgttgacgatttggcagatcaggttgcggatgtcctcgatttctttggattaggctctgttatgtgcttcggtgtcactgcaggtgcctacattctaactctgttcgcggcaaagtatagggagcgggtactaggtcttatccttgtttcacctctgtgtaaaggccccacttggactgagtggttatacagtaaggtaacatccaatctgctgtattactatggcatgtgtgggttagtgaaggagtgcctacttca

SEQ ID NO: 6582 - DNA, 310 bp, Zea mays
aggctcgagtgaggcccaattcttcgacgatctttatgatttctgctgcaaagctgcagatcgtgatggaaaaattgtagttgttgctggcctagatggtgactacaaacggagaaagttcggttcaattcttgatattgttcctctggctgactcggtcaccaagctaacagcacgctgtgagctatgtggtcgccgggcgttctttacactgaggaagacgcaggaaaccaagactgaactaattggaggagcagatgtgtatatgcctgtgtgcaggcagcactacatggatgggcagattgttatt

SEQ ID NO: 6583 - DNA, 310 bp, Zea mays
ctatggtgttcggggactaccctccggtgatgaggaggaacgtcgggtccaggctgccgaccttcacggacgaggaggcggcgcgagtgagggggtctttcgacttcgtcggattcaaccactacatcgtcgtctacgtcaaggctgatcttggccgcctagacgaccaagtgcgagactacatgggcgatgcagccgtgaagtatgacatgccgtttctcaagtcacgcaaccagttcccgttcggcggcttgacgagcgacttcatgacgtccaccccctgggctctcaagaaaatgctgaggcatct

SEQ ID NO: 6584 - DNA, 312 bp, Zea mays
gcaaccccgcgggtcgcggatcaaggagccagagagcgggacgcagcgagcgttccgccagagatcgagaccgtagctagggtttgaggcgccgggctgcggtggacgagatgtcgacgccggcgaggaagcggctgatgcgggacttcaggcgcctgcagcaggacccgcccgccgggatcagcggcgcgccgcacgacaacaacatcatgctctggaacgccgtcatattcgggccggatgatacgccgtgggacggtggcacgttcaagcttaccttgcagtttacagaagattacccaaacaagccac

SEQ ID NO: 6585 - DNA, 241 bp, Zea mays
aataactcggttgaagatttaactggaagaggtattgaggatctcaagaagggccttattgttactcctttacccgccaaagctaccttccttgatgacccacttagagttcttcgagcaataagattcgctgctagattcaactttacattagatgaagatttgaaggaagctgcatctgatgaaaaggtgaagtcagagcttggcacgaagattagtagagaacgtatcggtcacgaga

SEQ ID NO: 6586 - DNA, 312 bp, Zea mays
tgtctgtgctaatgcgaccattccatcttcgcgccatagccgcagctatcgttaagtactcgcatgagcatggcaaacctaccaaatcctacaaggccatgggaagggacctgagggtccacttcaagaacacaacggagacagcttttgcgcttcgaagctgcctttgaccaaggctaagcgataccttgaggatgttattgctcacaagcaggcaattcccttccggagatactgtggaggtgttggtcgcaccgcacaagcaaagtctcgccactccaatgggcagggtcgctggcctgttaagtcagc

SEQ ID NO: 6587 - DNA, 291 bp, Zea mays
caggatggcgcggtgtttacaaagaaggggcatgacgaagagccatttaaattcaagaccgatgaagaggaagttattgccggtcttgatcgtgctgtgttgaacatgaagaagggcgaggttgctcttgtcacaattcctcctgaatatgcatttggttcaactgagtcaaagcaggatcttgctgttgttccacctaacagcacagtaatatatgaagttgagcttatttcatttgtgaaggacaaggagtcgtgggactgaacaatgaagagaagattgacgctgctg

SEQ ID NO: 6588 - DNA, 285 bp, Zea mays
tccacgtcgaggactccatgggccaccagttcgccacccgcatgggcaacgtgttcaccatcggcaagggcaacaagccgtgggtgagcctgcccaagggcaagggtatcaagctcagcatcatcgaggagcagaggaggcgcgactttgctgcccaggctgctgccaaggcataagttctctgaatgtgctgcttggagctttttgctatgtctagttttatttttatctgcaaggatatagagctaccttcccaagacgttttatcatcatgttttgttgctt

SEQ ID NO: 6589 - DNA, 302 bp, Zea mays
cagaccgggagtagtcgacgcgccgtcactgaatcctcagatcacggctagccgtaatcacgccactctgctgactcccggcgagcagtgtaacattttccttcagccatgggcaaggagaagactcacatcaacattgtggtcattggacatgtcgactctggcaagtcgaccaccactggccacctgatctacaagctcggcggtattgacaagcgtgtgattgagaggttcgagaaagaggccgcggagatgaacaagcggtcattcaagtatgcctgggtgcttgacaagctcaaggc

SEQ ID NO: 6590 - DNA, 304 bp, Zea mays
acaaagcctcggccaaaaagactgcagctaaagcacagcctccgcctgtcgaagaacagatcatggatgaaaaagacttgacagatgcatatgagccactctcccgggtcatcccaatatcaaagaacaagctcacaccttacagagcagtgatcattatgcggttaattgttcttgggctcttctttcactaccgtatcaccaatcctgttaacagtgcctttggtctctggatgacatcagttatatgtgagatctggtttggtttctcctggatattggatcaattcccgaagtggtatcc

SEQ ID NO: 6591 - DNA, 282 bp, Zea mays
ccctgccaagtaggctgctagctttacctcccaggtcatcatcatgaaccaccctggccagattggcaatggctatgccccagttctggactgccacacctcacacattgctgtcaagtttgctgagctcgttaccaagattgataggcgatccggcaaggagctggagaaggagcccaaatttctcaagaacggtgatgctggtatggtgaagatggttcccactaagcccatggtggtggagaccttttctcagtatcctcctcttggtcgatttgctgt

SEQ ID NO: 6592 - DNA, 285 bp, Zea mays
ctgtcagctgaaagaactggagctggaactgacggagatcagggatgttctgcgctgtattttgcacaccatattcttccatagaaccctcagcctggttcgccccaaagatgttgactgtgatttcctcgatattacttatgtacaatgtggtctaccggaactagaaaaggaagttgacgaaaagatagaccagttcagtgcatgggtggagaaacacccaaaccgcagaagccagatctgcctctcctttttcgacgagaaacacagacaccctggttggtt

SEQ ID NO: 6593 - DNA, 294 bp, Zea mays
cgctcacaatgaaattgctgctcagatctgtcgtcaggctggccttgtgaagacattggagaaaggaaagcatgcagagggtggtgaagatgacaactttgctattgtgtttgctgctatgggagtgaacatggaaacagctcaattcttcaaacgtgattttgaagagaacggttccatggaacgggtcaccctttttctgaatctggctaatgatcccaccattgaacgtattatcacccctcggattgctctaacaacagcagaatatttggcatatgaatgtgggaagca

SEQ ID NO: 6594 - DNA, 280 bp, Zea mays
acttctcacgaagaatggagatagaggctgaccacatcgggctcctgctgctcgcttctgctggttacgatccgcgtgtcgccccttcggtctatgagaagctaggaaagatcggaggagattcagcactgaataactacctctcgactcacccgtccagcaagaagagggcgcacttctgtcgcaggccagtgtcatgaacgaggcgctgaaactgtatagggaggttagtgccggccaaggcaccgaaggtttcctctagattctgggacctgctcct

SEQ ID NO: 6595 - DNA, 277 bp, Zea mays
gttgcaagaaatgaaagcgatgcaaaacttgaggcacagaaaaagtatgtaggaatgaaattacgtctagatcaagaccctgatgtactggacacatggttttcatctggtcttttccccttaacagtacttggttggccgtctgataccactgacctccgtgctttctaccctacatcggtactagaaactggacttgatattctcttcttttgggtagcaaggatggtgatgatgggaatgcaacttggtggtgacgtgccatttcagaaggttt

SEQ ID NO: 6596 - DNA, 277 bp, Zea mays
cttgaatcgccttgtgtctcaggtgatctcatcgctgactgctgctctgaggttcgatggtgccctcaatgtggatgtgaacgagttccagaccaacctggttccttacccgaggatccacttcatgctctcctcctacgcaccggtgatctcttctgcgaaggccttccacgagcagctgtctgtggcggagatcaccagcagcgcgttcgagccggcttccatgatggtcaagtgcgacccacggcacggcaagtacatggcttgctgcctgatg

SEQ ID NO: 6597 - DNA, 276 bp, Zea mays
aggctcgagaaatggtgatactttcttgggtggtgaagattttgataacacactactagagttcttggtgagtgatttcaagaaaaccgagggcattgatctgtcaaaggatagattggccctgcaaacgcttcgtgaagctgctgaaaaggcaaaggttgaactttcatcgacttctcagacagaaatcaatctgccattcataacagctgatgcttcaggggcaaaacatttgaacattacactgacaaggtcgaaatttgaatctcttgtaca

SEQ ID NO: 6598 - DNA, 288 bp, Zea mays
cgccggatctcgccgcctcttctcctaccccaccctccgtgctgctgcaatctcgggacccgccgtgctaccagatgcgcccgtggcggcgtcggtggcggcccagccgcccccgctggcctggacactctgggcgatgtccatggccaccttcacacgcacgaagccccatgtgaacgtcggcacccttgggcacgtcgatcacggcaaaaccagtctcactgccgctattaccaagggaatatcaactacaaggaatttgcttgcagatgatgctatggtgcctat

SEQ ID NO: 6599 - DNA, 221 bp, Zea mays
aaacaaggtcattgatctggcaagattgaatcatgagaacatagcaaagttcttagggtactgcagggagagtgatccattctctcggatgctagtcttcgagtacgcaccaaatgggacgttatttgagcatctacattatggagagggaggccaattttcttggctcaggcgaatgaagatagccattggaattgcccaggggttaagatacctgcaca

SEQ ID NO: 6600 - DNA, 291 bp, Zea mays
aggccttcctcgccaggagcaaggccaactccgaggctaccctcggcacctacaagggtgatgctgccgccgacaccgagagccttcacgtcaaggactacaagtattgagttgcttctctttgcgatcccgttgttttgaaactcctgcctgcgagtaggttgctgagtgttgtttgcttgttagagcttttatattcgaacataaaaaaaacatgcttcctatgtggatgatggttatctttatattcgtatattaactactagtctctgttgttagtttccgtgtaaa

SEQ ID NO: 6601 - DNA, 308 bp, Zea mays
cacacaaacacacaccagcccagctccgagagatcatccggcggccggcgagatgagccgcggcacgggcgcgggttatgaccgccacatcaccattttctcccctgagggacgcctgtaccaagtcgagtacgcgttcaaggcggtgaagtcggcgggtgtcacgtcgatcggcgtccgcggcgcggactccgtctgcgtcgtcacccagaagaaagtcccggacaagttgctggatcagacgagcgtgacacacttgttcccgatcaccaagtacgtcggattgcttgccactggcctcacagctg

SEQ ID NO: 6602 - DNA, 306 bp, Zea mays
cgcaaccagtgccgcacccagaccagatctccgcgacatatcagtcgttcgtccagctaactgcactgcactgcactgcacgcaatggccaccacggcgaccgaggcggccaaggctgcaccggcgcaggagcagcaggccaacggcaacggcaacggcgagcagaagacgcgccactccgaggtcggccacaagagcctgctcaagagcgacgacctgtagcagtacatcctggacacgagcgtgtacccgcgggagccggagagcatgaaggagctgcgcgagatcaccgccaagcacccatgg

SEQ ID NO: 6603 - DNA, 310 bp, Zea mays
cctgccgggccgcacggacaacgaggtcaagaactactggaggacgcgggtgcagaagcacgccaagcagctgcactgcgacgtcggcagccgcaggttccacgacgccatgaggaacctctggatgccgcgcctgatcgagaggatccacgccgacgactcagccgccgtcgccgctaatgccaccggcgacgtctcccacttctactccgcgagcccatcgcatgagctgtcgtcgtcctcccagccggcgccggcgtaccgaaacgctgcgcccaacggcagctgcgcgcgtgcgccgtccccggac

SEQ ID NO: 6604 - DNA, 312 bp, Zea mays
ctctggtcgtcctcgcgccgccgcagcgacgccaccgccggtaatggcttccaccgttgtgctccggaacgcctgctcccgccgactcttctgctactccactctccgcgccgccgcaatattgggacccgccgcgccacctgatgcgcccgcggcggcgtcggcccagccgccaccgatggcaggaaccctctgggcgaggtccatggccactttcacgcgcacgaaccacatgtgaacgtcggcaccattgggcacgtcgatcacggcaaaaccacactcactgctgccattaacaaggttctggcagag

SEQ ID NO: 6605 - DNA, 310 bp, Zea mays
tgggtctgcaggaggaatttgaggagcatgctgagaaggcaaagaccttgcctgagagcacgagcaatgagaacaagctgatcctctacgggctctacaagcaagccacggttggagatgtgaataccgatcgtccgggcatattctaccaaaaggacagggccaagtgggatgcctggaaggctgttgaaggcaaatcgaaggatgaggcgatgaatgactacatcaccaaggtgaagcagctccaggaggaggctgccgcctcttagaagtctcttaatagtgttgccaaacagctatttgtcagatg

SEQ ID NO: 6606 - DNA, 314 bp, Zea mays
agcggcgatccattccacacaaccaccactgctcttgccccagcccgccgcaggagttgccagatctgctccggtcacaggagctccgactccgagccctctccaatggcggttaaggtctacgtcgtgtactattccatgtatggacatgttggcaaactagctgaagagatccagaaaggtgcctcgtctgttgaaggtgttgaagctaaaacatggcaggtccctgaaaccctccctgaggaagtgcttggaaagatgggcgcaccccctaagcctgacgtgccagtcatcacgccgcaagaactcgcaga

SEQ ID NO: 6607 - DNA, 314 bp, Zea mays
cggacggacaggcgaaggagtagcagcagcaggcggcgccgagtagcggctccccacctcgagcttgccaccatggctagaggattgaagaagcatttgaagaggctcaatgcgcccaagcattggatgctggacaagcttggcggagcttttgctcccaagccatcttctggacctcacaagtctagggagtgcctgccactgatcctcatcatcaggaacaggctcaagtatgctcttacataccgtgaggtcatttccatcctgatgcaacgccatgtacttgttgatggcaaggtcaggacagacaagac

SEQ ID NO: 6608 - DNA, 300 bp, Zea mays
cttgtgtacaagaagaatgaggttttcttggacatagttgagagtgtaaaccttcttatgtcttcgaaagggagtgttctaagatgtgatgtgacgggaaagattcttatgaaatgcttcctttctggaatgcctgatctgaagctgggattaaatgacaagattggacttgaaaaagaggcccaactaaagtccagaccagcaaagagtgggaagatatagaacttgatgatgtcacattccaccagtgtgtcaacttaacaagatttaactcagaaaagacagtcagtttcgtgccac

SEQ ID NO: 6609 - DNA, 298 bp, Zea mays
cagtttcggtgggtctaatatcgatcccactgcatgggaggataagaagtgtaaaggtgaatctagattcccagcgcaggtgaggatccgcgttaggaagctctgcaagccgttggaagaggattccttcaggccagttttgcaccactatgatggcccaaagtttcgccttgagctctccatcgcggagaccctgtccctgctagacctatgcgagaaggaaggcatctgagctgttggctgcctcgtgaggttctagtaaatatcaatcatccttgtatgttctgtggatggtggt

SEQ ID NO: 6610 - DNA, 302 bp, Zea mays
ttggcgagttggagcaggtctgggtctggccgtgtgagttatttcccagccaggcatctgagagctttggtcttgacctcgacagagatcgccatggacgcatcggcggaggtggaccacctcgccgccgagaggtcggccgcgcgcttcgatgtcgaggcgatgaaggttgcatgggctggctcgcgacacgccgtcgaagtcggcgaccgcatggcccgactcgtcgcgtccgaccctgtcttccgcaaggataacaggaccatgctctccaggacagacttgtgtaaggacactctaag

SEQ ID NO: 6611 - DNA, 309 bp, Zea mays
acacgctgggcgtctccatggcgcgcatcgactacgcgccgggcggccagaacccgccgcacacgcacccgcgcgccaccgagatcatcttcgtcctcgagggcacgctcgaggtcggcttcatcaccaccgccaacgcgctcttcaccaagaccgtcaccaagggcgacgtcttcgtcttcccgcgcggcctcgtccacttccagcagaacagggggcacggcccgccgccgtcgtcaccgccttcaacagccagctccagggcacgcaggccatcgccatgacgctcttcggcgccgtgccgcccgt

SEQ ID NO: 6612 - DNA, 314 bp, Zea mays
cggcaagagctgccggctgcgttgggtcaactacctccaccctggcctcaagcgtgggcgcatgtctcccaatgaagagcgcctcatccttgagctgcacgctcggtggggaaacaggtggtccaggatagcacggcgcttgccagggcgcactgacaatgagatcaagaactactggaggacacacatgaggaagaaagcacaggagaggaagaggaacatgtctccatcatcatcctcatcttcactgagttaccagtcaggctacccagatactccatcaatcattggagttaagggacaggagcttcatg

SEQ ID NO: 6613 - DNA, 289 bp, Zea mays
ctgtctttctccttcggccgtgccctccaggcgagcaccctcaaggcctgggctggcaaggtggagaacctggagaaggctagagctgccttcctcgccaggtgcaaggccaactctgaggctaccctcggcacctacaagggtgatgctgccgccgacaccgagagcctccacgtcaaggactacaagtactgagttgcttctctttgcgtgcccgttttggaactcctgcctacgagctaggttgcggagtgtggtttgctcgttagacttattttcggacatccaa

SEQ ID NO: 6614 - DNA, 287 bp, Zea mays
gcaagtcgaagcatcaaatggcgcgtcaggagatcgagcacagccacctccccgtccgcgggatcaacctccacgtcgctcaggtcggcaaaggtgacctgggcacggtggtgttcctgcacggcttcccggagatatggtactcgtggcgccaccagatgcttgccgtggccgcggcggggtaccgcgccatcgcgccggactgccgcggtacggcctgtcggaccagccgccggagaacgaggaggcgtcctgggtctgggatgacctcgtcgcggacgtgctcg

SEQ ID NO: 6615 - DNA, 293 bp, Zea mays
tggtctagagaagaagagtggcaaacatgcactcaggcattggacttcggatggatgcaaatggcgaacacgtgatgaatttatatacagaagcaactgatggatcctacattgaggccaaggaaagtgccttggtgtggcaccatcaggatgctgacctaggctttggatcctcacaggcaaaggagatgcttgatcacctggaaagtgtactagcaaatgaaccagtctctgtcaagagtggccagttcattgttgaagtcaaaccacaggttcattcatcttttacattt

SEQ ID NO: 6616 - DNA, 307 bp, Zea mays
tcgaaggtgctgatgccatcatgttatctggtgaaactgctcatggaaagtacccactaaaggcagtcaaggtgatgcacactgtggccctcagaacagaatccagcatttataacccaactacttcccctagtgttatagcatctgcacagggtctacagaacgaggagttttccccaagccagctaagtaaaatgtttggatcccatgcaactatgatggccaacacccttcggacaccaatcattgtatttacgcagacaggctccatggctgtcctcctgagccactatcgtccctcgtctac

SEQ ID NO: 6617 - DNA, 216 bp, Zea mays
aagtccatggcgctcaacgccgccgtagacctccgcatagcggacgccatccacctgcacggcggctcagccaccctctcgcagatagtcaccaaggtcacactccacccgtccaagataccatgcctgcgacgcctcatgcgcgtgctcactctcaccggcgtcttcagcgtcaactccggcgccgttgtcgacgagcccgtttacgggtcacgc

SEQ ID NO: 6618 - DNA, 311 bp, Zea mays
cccactggcgtcctcgttcctccctgccggggagcggcggagagcttttcacctcgtcttagggacctctggcttccttccccctgccggcgatcggcggagatccgctgttctaacatcgtctcccgctgctgacttgtgaacaaggcagcacatggttcagtttggaaacatgtcatcaaagaagatagagttggatcacaaggacatggtccatgattctgctatcgactactatggcaagcgccttgccactgcctcctcagactctaccgtgaagatcatcaacattggcgcggcaaatgccccat

SEQ ID NO: 6619 - DNA, 311 bp, Zea mays
  unsure (1)..(311): unsure at all n locations
agccgccgtcgcagcaatcacagcagcccggagaacggccaggtccgacaagatgcagatctttgtgaagacgctgacagggaagaccatcaccctcgaggtcgagagcagcgacaccatcgacaatgtcaaggccaagatccaggacaaggaagggatcccgccggaccagcagcggctgatctttgccgggaagcagctggaggatggccgcacccttgcggactataacatccanaaggagtctacgctccacctcgtgctcaggctccgcggtggcatcattgagccctcgctgcaggcgctcgctc

SEQ ID NO: 6620 - DNA, 290 bp, Zea mays
cgcaaatgctatgcacggctgcaccctagggctgtcaactgccgcaagaagaagtgtggtcacagcaaccagctgagggccaagaagaagatcaagaactgaggtgttgctgctagtcagtttcatggacaatgttgtttggttgttgaaccgtgtttgtttacgaactgtatttttgtttggttgttgaaccgtgtttgtttaccgaacatattggccttatgttatgttttaccatgttgtcgatgacacaatactatatgacgatagcaactatgctattgtagtta

SEQ ID NO: 6621 - DNA, 310 bp, Zea mays
atcagcagagagacgccactaccaccaccgcaagcgacgacggggagatgtttctgcgacggatcctgaccggcggaggtggcctggcggcgctgagggcggcgcgcgccgtgaaggagacgacggggatcgtcggccttgaggtggcgcccaacgcgcgggaggttctcatcgggctctacacgcgtacgctcaaggagatcgaggccgtccccaaagacgagggctaccgcatagccgttgagtccttcaccaatcaccgcctccagatctgccaggaggaggacgactggaagcgcatcgaggaccg

SEQ ID NO: 6622 - DNA, 186 bp, Zea mays
caaatccccaaagcctccgacccccttcctctctccctccgccgccgctgcgcacgcagggaacaagcgacatgggcgtctacacctttgtgtgccgcaacaacggcggcgagtggaccgccaagcagcactccggcgagatcgaggcttccgccgctaccccatacgagctgcagcgccgcctcg

SEQ ID NO: 6623 - DNA, 249 bp, Zea mays
  unsure (1)..(249): unsure at all n locations
ccgcgcatgagcgtacgaactcgaatcgctcacgactcgaatcaatcgccgcagggctcctatcgtgcgctgcctcgcgcgatcctcacgcgagcacaataggagtccgcggctgacaacgccgcgatgttggcacgctgcatcaaggacgtgccggcgaacgagaacgacctccagctccaggagctcgcgcgcttcgccgtcaatgagcacaaccantaggccaatgctcttctggggatcgagaag

SEQ ID NO: 6624 - DNA, 309 bp, Zea mays
gcgcttaaggaaggaatgggcggtggatgatccatgttgatccatttgacatcgtctcatcattttttggaccctcttttggaggaggtggtggaagcagcaggggaagaaggcaaaggaggggagaagatgtagttcacccacttaaagtttctctggaagatctttacaatggcacctcaaagaagctctctctttcgcgcaatgtcatctgctccaagtgcaagggcaagggctcgaagtctggtgcttcaatgaggtgccctggttgccagggctcaggcatgaaagtcactattcgtcagctgg

SEQ ID NO: 6625 - DNA, 229 bp, Zea mays
gggcaggcagcgcggcgaagacgactggcgccacatctttaccaaggctggcttctccgactacaaggttgtcaagaaaatcggagctcgtggtgtcatcgaggtctacccatgatccatgatcgatgtcatgtgactgtgagaggacgatactgtacaattaaataaacggggtatctagctactactcagcttttgtacctcgagatccatgcatgttaattacttg

SEQ ID NO: 6626 - DNA, 298 bp, Zea mays
gacgacttgtttcattgattcttcaagagatcgagcttcttttgcaccacaaggtcgaggatgtcttgcagctgcggatcaagctgcggctgcggctcaagctgcaagtgcgggtaatatataataatatataagtgcaccgtgcatgattaatttctccagccttcttcttgtcttgtctagttaatttcccttctttatttattttttccattgcaaaacaaacaaacaaaaaacaaagttaatctggatcgagtagttcaatccatttgcgcgctgtccttttcagcaagaagta

SEQ ID NO: 6627 - DNA, 295 bp, Zea mays
ggaggctgctgctggtgcagatggtctttctgacttccagaagaagatttttgacgtcctgtacaagattgctgatattccgttcttggcaccctacaagaccaagattattgatgttatcgagaagggagagaagcagcccaacatcactattggcattttggtctccgttgtcatcgtgttcgttaccgttctcttcaagatcctttttggtggcaagaggccggtggcacctgtgaaacctgcagctgaggcgaagaagcccaaggccgcggagacggacggtgctggaagc

SEQ ID NO: 6628 - DNA, 300 bp, Zea mays
ccgcttcagttggcagttgcgagtggctccaacaatccaccggcaccaacccagcgcggcgccaccggcgacccgtaccccctcccccggagagcgatggcgacggagctgacggcggcgcactgcgcgcgtacgacggcaccgacccgtccaagcccatctacgtctccgtccggggcaaggtctacgacgtcacctccggccgcggcttctacggccccggcggcgcctacgccgtcttcgcgggccgcgaggcagctcgcgccctcggcaagatgtccaaggacgaggccgacgtct

SEQ ID NO: 6629 - DNA, 292 bp, Zea mays
gcaagttcaatctcacctccaaccatgggtaaagagaagtcccacatcaacattgtggttattggccacgttgactctggcaagtcgaccaccacaggacacctgatctacaagcttggaggcattgacaagcgtgtgatcgagaggtttgagaaggaggctgctgaaatgaacaagcggtccttcaagtacgcgtgggtgctcgacaagctcaaggctgagcgtgagagaggtatcaccattgatatcgctctgtggaagtttgagaccaccaagtactactgcacggtca

SEQ ID NO: 6630 - DNA, 298 bp, Zea mays
agattatcgaactaccaactcataggtttttcgtcggagcacagtttcaccctgaattcaagtcaaggcccggcaagccatctccgcttttcttaggattggtagcagcgtcatcaggccagcttgaccacttgctccaacgtggccttaccagttcagcaggcagagacatctgcggcaaagggggagcgcagaaaccaaaagcttgccagaacgggcatgtcatgaagccactgaatggcctggtgcacgggcactattcagcgactcgctgcaatggcgtcattcgcatctagca

SEQ ID NO: 6631 - DNA, 295 bp, Zea mays
gctatttgtttgagcgaagagattcaaacaaatgagtgtttggagaacaatgggggttgctggctggacaaagctaataatgttactgcatgcaaggataccttccgcgggcgtgtttgtgagtgccctattgtgagaggtgtaaaatttgttggtgatggatatacccattgtgaagcttccggtgttggtaggtgtgagatcagtaatggagggtgctggcaggaaactacagatgggaaaacaatctctgcctgctcaaacgaaatatctgaacgttgtaaatgtccagtgg

SEQ ID NO: 6632 - DNA, 231 bp, Zea mays
  unsure (1)..(231): unsure at all n locations
ctcttctccctcttgccggtcncgaataaagagcagcagcgctagaggtcggtagagcgagaagaaggcaatggcggccgagagcttccttttcacctcggagtccgtgaacgaggggcaccccgacaagctgtgcgaccaggtgtcggacgccgtgcttgacgcatgcctcgcgcaggaccccgacagcaaggtggcctgcgagacctgcaccaagaccaacatggtgat

SEQ ID NO: 6633 - DNA, 305 bp, Zea mays
ctgctcatctctaagatcagggaggagtacccggatcggatgatgttaacattctctgttttcccgtcgcccaaggtgtctgatactgtagtggagccctacaacgcaacgctctctgttcaccagctcgttgagaacgcagacgagtgcatggtgctcgacaacgaggctctctatgacatctgcttccgcacgctcaagctttccacaccaacctttggtgatctcaaccacctcatctctgcaacaatgagtggtgttacatgctgccttcgtttccctggtcagctgaattctgaccttcg

SEQ ID NO: 6634 - DNA, 300 bp, Zea mays
acggctcgaggtcactgcaaagttttaaattcagttattggacaaggctgcaagattgggaaaaatgttctgattaacggctcatttatatgggacaatgtcataattgaagatggatgcaaagttagtaactctttagtctgtgatggtgtccatctaagagctggtgctgttgttgaacctggttgtgtactgtcatttaaggttgaagttggaaagaatgttgttgttcctgcccactcaaaagtttcattacttcctcagccttcaaatgaagatagcgatggagaacttgagtat

SEQ ID NO: 6635 - DNA, 296 bp, Zea mays
gacagtgtggaagggaggcagggtagcccccgcggcgccgctccgctcgaaatccccaaaaaggcaagatcaaatcaaatcagatctctccacccccagcccatccatggcgatcgtgtacgccctggtcgcgcggggcacggtggtgctggccgagttcgccgccgtctcgggcaacgccggcgccgtggcccgtcggatcctcgagaagctgccgcccgacgccgagtccaagctgtgcttcgcgcaggaccggtacatcttccacgtcctccgatccgacgccgccggcatca

SEQ ID NO: 6636 - DNA, 301 bp, Zea mays
tgaatttctcaatactgaaggaggcacaaatgtaaagctggcaaccattccttcaagtgttgtggttctcaccccagagacctttgactcaattgtccttgatgaaaccaaagatgtccttgttgagttctatgccccatggtgtggtcactgcaagagtcttgcaccgacgtatgagaaggtggcttctgttttcaagttggatgaaggagttgttattgctaaccttgacgctgacaaacaccaggatttggctgagaagtatggagttagtggatttcctaccttgaagtttttccca

SEQ ID NO: 6637 - DNA, 305 bp, Zea mays
cgacgagaaggaagccgagatcagcgccgcgctccacgaggacctcgccaagccgcatatggagtccttcctccacgagatatcacttacaaagtcgtcgtgcaagtttgcgctcaaggggctcaagaactggatgaagcccgagaaggtacctgcggccataactacattcccgtcctccgcccaaatcgtgccggagcccctcggcgtcgtgctcatcatctcagcctggaactaccctttcatactctctatcgacccagtcattggagcaatcgctgctggaaatgctgttgttctgaagc

SEQ ID NO: 6638 - DNA, 293 bp, Zea mays
gcttcaggccatatacctgcccctatgctggttctgaatgtgctgtggctggtgatattccattccttgttgcacatttgagggatgatcacaaagtcgatatgcacagcggctgcacgttcaaccatagatatgtcaagtccaacccgcgagaggttgaaaacgccacctggatgcttacggtattccattgttttgggcagtacttctgcctgcacttcgaggcattccagctcggaatggctccagtctacatggctttcctccggttcatgggtgatgagaatgatgcg

SEQ ID NO: 6639 - DNA, 293 bp, Zea mays
attcaagaagatttccttcccacatacatcttatgctgtgcaagatggtattacctcttgtttgctagagtggggattggttggtgatttgtttaccctgactttggataatgctagtgtaaacaatagagcaatgaaagatatgcgagatgctttgggcagccagatgtttttcagtggtgaacacctccatgtgaggtgttcttctcatgtgctcaacatcatggttcaagctggactaaaggtcgttccaaatgcagtcgggaaggtgagggacattatcaaggtcgtaa

SEQ ID NO: 6640 - DNA, 293 bp, Zea mays
attggccataatgaaattgatgagccgtccttcacccaacctaagatgtacaaggtgattaggaaccatccaagtgcgcttgagatttatcaaagaaagttgttagagtctggaaagatctcaaaggtagatattgataagttaaacaagaaggtcagcactatacttaatgaggaatttcagaacagcaaggactatgttcccaacaagagggactggctttcagcttactggactgggttcaagtcaccagagcagatttcgcgtatccgaaacactggagtcaagccaga

SEQ ID NO: 6641 - DNA, 295 bp, Zea mays
cgctactactcatcactcgccaacgtgcagagatcagggaagcggcactccatccactgactgaccgctcatggcgaaggtccacctctacgtcgccgcggcctgcgccgtcgtcctcgcgctcgccaccccggccctcgccggtgaccccgacatgctgcaggacgtctgcccggctgactacgcctccccggtgaagctgaacgggttcgcgtgcaaggcgaacttttcggcggacgacttcttcttcgacgggctgaggaacccgggcaacaccaacaacccggcgggctcg

SEQ ID NO: 6642 - DNA, 291 bp, Zea mays
ttcctccccaaaacacatcctgcgatcctcgaagcctccgccgagcatcgatcatgtcggcctactgctgcaagtacgcggatgagctcatcaagaatgctgcctacatcggcacccctggcaagggtatccttgctgctgatgagtcaactggcaccattggcaagctcctttccagcatcaatgtcgagaacgtggaggagaaccggcgggctctccgtgagctcctgttctgctgccctggtgccctccagtacatcagctgtgtgatcctcttcgaggagaccctct

SEQ ID NO: 6643 - DNA, 284 bp, Zea mays
tgcaagatcttcttcttcgccggccacgacaccacgtcgcacctgctcacctgggcctccttcctgttgagcacgcacccggagtggcagcacaggctacgggacgaggtccggcgggagtgcggcgacgacgaggtccccaccggcgacgcgctcaacaggctgaagcttgtcaacatgttcctcctggagaccctgcggctgtacggcccggtgtccctgatccagaggaaggcgggctcagatctcgacctcggcggcatccgggtacccgatggcgcgat

SEQ ID NO: 6644 - DNA, 298 bp, Zea mays
tcttggcaaggcctgatagctggcacaaagaagcaaaagtatgatataatcagtgaaaagaaaatgcttacaccagttgaggtcctctgtaaatcgcatccatcagagttcactgcatactttcattactgtagatcactacgatttgaagataaaccagattactcctatttgaagagactcttccgtgacttatttctccgcaaggggtaccaactagattatgtatttgactggaccattatgaagtatcctcagtttagagataaaaacaaatttcagtctagcggcaagacta

SEQ ID NO: 6645 - DNA, 296 bp, Zea mays
gaatgtacgaagcggcacatgttagagtgaatggtgaagaaatacttgacaatattctcattcacaccaagagacagcttcaatgtattgtagacgatctcgaaccaacactgcaagaagaagtgagatatgcattggagacacctcttttcagaagactcaacagagtacaggccagacaattcatctcaacatacgagaaaagcactacgcgtaacaatatgctcctggagttctcaaagttagacttcaacatcttgctcaccctatactgtgaggagctaaaagatcttacg

SEQ ID NO: 6646 - DNA, 290 bp, Zea mays
gtcgcatcccagtgtggcttaaccaactccaactacactgagctggcccagctctatgagaagtacaaggaccaaggctttgaaatcctggctttcccatgcaaccagtttggtgggcaggagcctggtaccaatgaggagattgtccagtttgcctgcacacgcttcaaggctgagtaccccatcttcgacaaggttgatgtcaacggtagcaatgctgcgcccatctacaagttcttgaaatctagcaaaggtggccttttcggcgacacatcaagtggaacttttcc

SEQ ID NO: 6647 - DNA, 289 bp, Zea mays
gctataatgggtgaaagagtaattgttgaaggttcagtccaacacaaccccctgaatgagggttcaattctttggataacagaaagtaggatgccgcttggtatagttgatgagttgtttggacctgttaagaacccatactaccttgtgcggtacaactctgaggaagaggtacctgctgggatcagtgcaggaaccgatgtctgttttgtagcggagtttgcagaccacatcctgaatatgaaggagctctatgcaaaaggctatgatgaatctgattctgtagagg

SEQ ID NO: 6648 - DNA, 281 bp, Zea mays
ccaagaatgaaccaccctgggggcgtccaccttgaaatgactgggcagaacgtgaccgagtgcatcggtggatcacggaccgtgaccttcgacgatctgagcgaccgctaccacacccactgcgacccaaggctgaatgcctcccagtccctggagctcgcctttatcatcgcagagaggctgaggaagaggaggatgcgatcggggctcaacagcagcctgccactgccgccactggctttctgagtagccggagccaaacacaaaggagggtaggaata

SEQ ID NO: 6649 - DNA, 282 bp, Zea mays
tgactggcaagaccataaccctggaggttgagagctccgacaccatcgacaacgtgaaggcgaagatccaggacaaagagggcatccccccagaccagcagcgtctgatcttcgccggcaagcagctggaggatggccgcaccctagcagactacaacatccagaaggagagcactctccacctggtgctccgcctccgcggtggtcagtaagccatggttcatttaagctgctgctgtacctgggtatctgcgtcgtctggtgcgctctggtgtacctcta

SEQ ID NO: 6650 - DNA, 281 bp, Zea mays
gtttaggttgccaaggacccatctggcaaggatatcaatgctcttgagcagcacatcaagaacctcctcagcccatccaccccgttcttcttcaacaccctgtacgacccctaccgtgagggtgctgactttgtgcgtggataccccttcagcctcagggagggtgctcacaccgccgtctcccacggcctgtggctgaacatccctgactatgatgctcccacacagctggtcaagcccaaggagaggaatgagtagtatgttgatgctgtcatgacaat

SEQ ID NO: 6651 - DNA, 318 bp, Zea mays
ctccaggacatcggcatgatcagcgccgtgcccgggatgaaggcgctcgacatgaacgccgccgaggacgagatcgtgcgcctcacgcgcgaggtcgtgcccggcatgatcgtcaccgggatggaggtcgccgagatcgacggcgccccgaggatgggcccgacgttcggcgccatgatgatctccggccagaaggcggcgcacctggcgctgaaggcactgggcagggccaacgccgtggacgggaccatcccagatgtgtcgccggcgctgcgcgatgagttcgtgattgcgctcaaggacgacgaggtcgtggac

SEQ ID NO: 6652 - DNA, 321 bp, Zea mays
cgtggtgctgcaatcattaaagcgagaaagttctccagtgctctctcggctgctagctctgcttgtgaccacattcgtgattgggttcttggaacacctgagggtacatttgtttccatgggtgtgtactctgatggttcatacggtgttccttctggactcatttattcattcccagtaacatgcagtggtggtgaatggaaaatcgttcaaggcctcccgattgatgagttctcaaggaagaagatggatgccactgcccaagagctgacggaggagaagacgcttgcttactcatgcctcgagtaaattctaccacac

SEQ ID NO: 6653 - DNA, 322 bp, Zea mays
gccgctgggatctagcacgcgagcgagcgagagagccgcgcacctatctggcaagcgacgccgcggcctcgatcggagtcggaggcgaacacccccatggcggcggctggcggcggcgcaggagggaaggtatccttcaagatcatcctcacctccgaccccaagctccctttcaaagtgttcagcgtgcccgaggcggcgcccttcaccgcggtgctcaagtacgccgcggaggagttcaaggtcccgccccagaccagtgccatcatcaccaacgatggaattggcatcaacccccagcaaagtgcaggcaacgtgtttc

SEQ ID NO: 6654 - DNA, 316 bp, Zea mays
ctggttcactgtatgcttatggtatcttggatgatggttaccgcttcagcatgtcagttgaggaagccgccgaattagcgcgacgggctatttatggggcaacattccgtgatgcagcaagtggtggttgtgttagtgtttaccacgttggccctgatggttggacgaagctttctggggatgatgtcggggagctgcactaccactactacccggttcagaaaactccggttgaacaggagatggccgatgcgcctactgcttctgcttaaacctgttgctgagaaaaccttgagcggaccgcatgtatccatga

SEQ ID NO: 6655 - DNA, 323 bp, Zea mays
  unsure (1)..(323): unsure at all n locations
ccacgacttccgtccgagtctgaactcatctccgcgcgcgcaccgccgccgccgctcgacgcccaccgcgcaccatnggcggaacagactgagaaggctttcctcaagcagcctaaggtgttcctcagctcaaagaaatctggcaagggaaagaagccaggcaagggtggcaatcgattttggaagagcattggccttggtttcaagactcccagggaagcaattgaagggacctacattgacaagaaatgtccattcactggaaccgtttctatcagaggcagaattattgctggaacatgccacagtgctaagatgaacag

SEQ ID NO: 6656 - DNA, 312 bp, Zea mays
tgactccaccaccccgcttcgatcttctgttgcagctgaaatctgtcagattctgcagttcattccaaatggctgctgcagcagagcacggcaactgcgatgcttgggcggccagagacccttctggggttctctcaccatacaagtttaaccgcaggcagtgcaaagcagcgacgtttcgctgaagatcatatactgcggggtgtgttacggtgacgttatgtggatacagaacaagcacaacgactcagtttatcctctggttcctgggcatgagatagctggggttgtgactgaggttggcgcagacgt

SEQ ID NO: 6657 - DNA, 315 bp, Zea mays
  unsure (1)..(315): unsure at all n locations
caacgattgtatggacaaagtccaatcgtttttggatctttcccttctctacatgctgcttggccaattgctattacgatttttgcaccagattacaagatcgtaaagtttgttggtactttgtatgttgcaactgtttggtgggctgcaatgtatcttaatcatcactttttggtggatttgctcggtggagctatttttaccgcttttgcttactttgtttctacacaatttattgctctcatgactanatacctgaaacacaagatatattctcgtggttctttgaaatggattatcatgagtggagagaaa

SEQ ID NO: 6658 - DNA, 315 bp, Zea mays
gtgagggacatgaaggagaagctcgcctacatcgccctggactacgaccaggagatggagaccgccaagaccagctcctccgtggagaagagctacgagctccccgacggacaggtgatcaccatcggcgccgagcgcttccgctgccccgaggtcctcttccagccatccttcatcgggatggaagctgccggcatccacgagaccacctacaactccatcatgaagtgcgacgtggatattaggaaggatctgtacggcaacatcgtcctctccggtggcaccacatgttccctgggatcgctgacaggatga

SEQ ID NO: 6659 - DNA, 314 bp, Zea mays
ccatacttcagtggcctttctaaattggaacttgagccttcagcacaaccaatttcgaaggttgactttgaattcgagggaaggaaactaacaaaggctggtgtgagagaaatgatatatcgggagattttggagtaccacccccagatgcttcaggagtacatcgaaggtggagatcagattcacttcctatacccaagtggggtcgatcgcttccagcgacagtttgctcatctcgaggagaactacaggagaggagtagcaagcaccccgccgcgaaggcagcccacatctctgccgagagagcgagtctg

SEQ ID NO: 6660 - DNA, 314 bp, Zea mays
  unsure (1)..(314): unsure at all n locations
cgctcgccaagagttcttcttgttaggcaaggcaaaagcagaagcaaaaagagaaaggtcttgttgccgatggggagctcagggttctcgtggacgcttccggaccaccccaagctccccaaggggaaaccggtggctgtcgtcgtgctggacggatggggcgaggccaaccccgaccagtacaactgcatccatgtcgctcagactcctgtcatggactcgctaaagaatggcgctcctgagaaatggagactagtgaaggctcatggaacagctgtgggcctcncatctgatgatgacatgggcaacagtga

SEQ ID NO: 6661 - DNA, 319 bp, Zea mays
gagctcctgctgtcccaactgagcggtaaggacattaccgagctcattgctgcgggcagggagaagtttgcttcagtcccatgcggcggcggcggcggtatggctgtggcagcagctggccctgctgctggcggagctgctcctgcagctgaggcgaagaaagaagagaaggtggaggagaaggaagagagcgacgatgacatgggcttcagcctcttcgactgagctgtgtgggcagtcatcacatcagagtagtttgttttgttttgacttttgagtcgtggaaccagaggaaaatcgtagtcgttgcttggacttt

SEQ ID NO: 6662 - DNA, 320 bp, Zea mays
ctccgatcgacctgctccctccccaccaccgagcccatggcggaccagctcaccgacgaccagatcgccgagttcaaggaggccttcagcctcttcgacaaggacggggatggttgcatcacgaccaaggagctgggcactgtcatgcgctcgctggggcaaaatcctacagaggctgagctccaggacatgatcaacgaggtcgatgctgatggcaacggcaccatcgatttcccagagtttctcaaccttatggctcgcaagatgaaggacaccgactctgaggaagagctcaaggaggccttccgtgtgtttgacaa

SEQ ID NO: 6663 - DNA, 311 bp, Zea mays
gtaggggcttcgctccatagatttcgccgcaacgggcaacggcacacccaccaactgacctgacccacgagggatccgcagatgaagatcattccggtcccttgcctggatgacaactatgcctacttaatcgtggacgagagcaccaagaaggcagcggccgttgaccctgtggaaccggagaaggttctcaaggcggccggcgaggtcggcgcctacgtcgactgcgttctcaccacccatcaccactgggatcatgctggtggcaatgagaagatgaggctgcaggtgccagggataaaggtatttgg

SEQ ID NO: 6664 - DNA, 320 bp, Zea mays
ggacgttcgcctgggcgccaaccgctactcggagcgccaccaatcggcacggcggcgcagggcacggaggagaaggactacaaggagcctccgccggcgccgctgttcgaggcggaggagctgacgtcgtggtccttctaccgggccgggatcgccgagttcgtggccaccttcctgttcctgtacatcagcatcctgactgtgatgggacgtgacaagtcgtccagcaagtgcgccaccgtgggcatccagggcatcgcgtggtccttcggcggcatgatcttcgcgctggtgtactgcacggcgggcatctccggcgg

SEQ ID NO: 6665 - DNA, 306 bp, Zea mays
cgcactcgccgcaacgccgagaagacgcgagaggaagggatgaggtgagccaccggaagcggagacgtgagcactcgaccaaccccgtcgatccggctgcggcgcggcgtgctagatcgctaccgaccatggtggtggaggagatcgccgagggggtgaagaacctaaccgtcaccggagatgcggcggcttcaggcggagaggggcagaggaggggcggcggcggcagcagcaaccgcatccaggtgtccaacaccaaaaaacccctcttcttctacgtcaacctcgccaagaggtatatgcaac

SEQ ID NO: 6666 - DNA, 306 bp, Zea mays
gtggttttgaggctggtatctccaaggatggacagacccgcgagcatgctctccttgctttcacgcttggagtgaagcagatgatttgctgttgcaacaagatggatgccaccacacccaagtactccaaggcccgttatgatgagattgtgaaggaagtctcttcctacctgaagaaggttggatacaaccctgacaagatccactttgttcccatctctggtttcgaaggtgacaacatgattgagaggtccaccaaccatgactggtacaagggcccaaccctacttgaggctttggacttga

SEQ ID NO: 6667 - DNA, 311 bp, Zea mays
acttcaagttgcattcaaatgcgcaatgtcattcttagtgcttttccacgtaacatgagactgccagacccttctacccctaatctaaagattgatttgttggctgaaatttcaatagcaccacgaatcatgtcggatgttgatggtgcccttaaatcaaagcagttgaagactgaggttgatgaatatctcaagaggccggaaggctcttcctttttaagtgacctgaaccaaaaattgctgctgcctcagaatgaagcaagtgttgctgggacacgctacaacgtgcctctgatcaattcacttgtttt

SEQ ID NO: 6668 - DNA, 313 bp, Zea mays
  unsure (1)..(313): unsure at all n locations
ttcctcgccgcctcactccctctgaggtcgcagatccgtccggttagacgaagccgcccgcacccatggcctccggtgagctcgcctgcacctacgccgccctcatcctcagcgacgacggcatcgccatcaccgccgagaagatcgccaccatcgtgaaggcggccaacatcaaggtcgagtcctactggccggcgctcttcgctaagctcctggagaagcgcactgntgaggatctaatcctctccgtgggatctggtggtggcgctgctccagttgctgcttccgccccagctgggggtgctgcagctgc

SEQ ID NO: 6669 - DNA, 276 bp, Zea mays
  unsure (1)..(276): unsure at all n locations
tcgtgggttggcttctcctcnccctccggttcgggttcgggttcgtgaggttctccggggttcgggttcgtgggtgagcggatcgagatggcggcgtcggatgttgagtaccgctgcttcgtcggcagcctcgcctgggccacggacgaccactcgctccacaacgccttcagcacctacggcgaggtcctcgagtccaagatcatcctcgatcgggagacgcagaggtcccgctgcttcggcttcgtcaccttctccacggaggaggcgatgcgg

SEQ ID NO: 6670 - DNA, 318 bp, Zea mays
caccccagtgtatacgtcggctgtgtcgcatgcctcgctcactcgtcgtcggcgacctcgccgtaccggagatggcgcatccgtacatgaagaaggacgacgacgacgaagatgtcgagtattcaccattctttgggatcgagaaggggtctgttctgcaggaggcacgagctttccatgatccacagcttgatgtgagacgatgttcgcaagtcatcatcaagctattatatttacttaatcaaggagagacattcaccaaggttgagggcacggaagtcttctttgcagtaacaaagttattccagtctagtgatg

SEQ ID NO: 6671 - DNA, 318 bp, Zea mays
ctcaacctcgccgacctcgtctggctctcaggggctcacacgatcggcatctcccaatgcaactccttcagcgagcgcctgtacaacttcacggggcgctgcgggcccgacgacgcggacccgtcgctggacccgctgtacgccgcgaagttgcggctcaagtgcaagacgctgacggacaacacgacgatcgtggagatggaccccggcagcttccgcaccttcgacctgagctactaccgcggcgtgctcaagcggcggggcctgttccagtccgacgccgcgctcatcaccgacgccgcctccaaggccgacatc

SEQ ID NO: 6672 - DNA, 314 bp, Zea mays
aaaatcaacacctcccaattccacgctgccaccaactcgccgtcctccgcgccaagcaccaaagctccgatggcccgcacgaagcagacggcgcgcaagtcaacgggcggcaaggcgccccgcaagcagctggcgaccaaggcggcgcgcaagtctgcgccggccaccggcagcgtgaagaagccccaccgcttccgccccggcaccgtcgcgctccgggagatccgcaagtaccagaagagcacggagctgctcatccgcaagttgcccttccagcgcctcgtccgtgagatcgcgcaggacttcaagaccga

SEQ ID NO: 6673 - DNA, 304 bp, Zea mays
ctcaagatcctgagcccgcacctggacccgctggccgacgcgcacgcactgccggtgcggccgcctgccgcacacgtcggcgcaggccgaggacgcgctgtcgcagggcatggagaagctgcagcagaacctcgcggagaccctgacggccgacgccgacccgttcgggccccccgacccctacatgctgcagatggccaccgcggtgggcatactgaaagagctcgtcaacttcgtgacccaggcggaccatctccggctgacgacgctgcagcagatgcacaagatcctgacgccgcggcag

SEQ ID NO: 6674 - DNA, 311 bp, Zea mays
  unsure (1)..(311): unsure at all n locations
catcnctcactctcctccgacgccatcgtccacgtctcagcctccccggactctaggggcagaagctgcagcgtcgagatggtgaaggggcgcacggcgcagcgcgtgacgctctacgtccggggcaccgtccttggatacaagcggtccaagtcgaaccagtacgagactacgtcgctggtgcacatcgagggggtgaacaccaaggaggacgtcgcgtggtactgcgggaagccgatggcctacatctacaacgccaagaccaagagcagcggcacccactaccgctgcatctgggcgaacgtcgcccg

SEQ ID NO: 6675 - DNA, 308 bp, Zea mays
cactttggcctctccatcttcttcaagcccggtgaaaagttttcggaaattgtgggaagtccatactacatggctcctgaagtcttgaacaggaactatggacctgaaatacacatatggagcgctggtgttatcttgtacactttgttatgtggcgttcctccgttttgggctgagactgaacaaggagttgcacaagctattctccggggaaatatagactttaagcgagaaccctggcccaatgtttctgacaatgctaaagatcttgttcggcagatgcttcaacctgatccaaaactcacgct

SEQ ID NO: 6676 - DNA, 307 bp, Zea mays
cagcgttcgtgcgccgtcgcacggtcatactggccgagtacacggacgttcaccggcaacttcaccaccatcgcctcccagtgcctcatgaagctcccccgaaagaaacaacaagttcacctacaactgcgacggtcacactttcaattacctcgtggaagacggattcacatactgtgttgttgctgttgaatcggtggggcaacaaattcctactgctttcatggacacggttaacgaggatttcacaaaaaggtatggtggtgggaaagctgctactgctgcagctaacagcctcaatcgagag

SEQ ID NO: 6677 - DNA, 306 bp, Zea mays
cttgaaattatggcaacggtgttctctagaaatgcatggcgctgtgtatggcatatgattcacaatgacttggtccatggatggggtcttgactttgctcttaggaaatgtgtggagccggctcatgagaagattggagttgttgatgctcaatggattgttcatcaagcagttccttcacttgggaaccagggcaagtcagataatggaagagcaccatgggaacgggtaagagcacgctgcagaaaagaatgggggatatttcagacaaggctggctgatgcagagaacgcttattacttggag

SEQ ID NO: 6678 - DNA, 313 bp, Zea mays
catcaaagggccagtaccactgtgccggatgtggaatatgtagaaccggcggcgtggagaactttttccactgtgataaatgtgggtgttgctacagcaatgtcttgaaggattccaccactgcgtcgaaagagcaatgcatcacaactgcaccgtctgcttcgagtatctgttcgactccacgaaggacatcagcgtgctgcaatgtgggcataccatccatttggagtgcatgaacgagatgagagcacaccatcacttctcatgcccagtgtgctcgacgtacgcctgccacatgtcggccacatggcgg

SEQ ID NO: 6679 - DNA, 256 bp, Zea mays
  unsure (1)..(256): unsure at all n locations
cgtgggttggcttctcctccccctccggttcgggttcgggttcgtgacgttctccggggttcggtttcgtgggtgagcggatcgacatggcggcgtcggatgtcgactaccgctgcttcgtcggccggctcgcctgggccacggacgaccactcnctgcacaacgccttcagcacctacggcgaggtcgtcgactccaagattatcctcgatcgggagacgcagaggtcccgcggcttcggcttcgtcaccttctc

SEQ ID NO: 6680 - DNA, 297 bp, Zea mays
cgcttggcttctcctccgcctccggttcgggttcgggttcgtgaggttctccggggttcgggttcgtgggtgagcgcatcgacatggcggcgtcggatgttcagtaccgctgcttcgtcggctgcctcgcctgggccacggacgaccactccctccacaacgccttcagcacctacggcgaggtcctcgagtccaagatcatcctcgatcgggagacgcagaggtcccgcggcttcggcttcgtcaccttctccacggaggaggcgatgcggaacgcatcgagggcatgaacggcaa

SEQ ID NO: 6681 - DNA, 343 bp, Zea mays
tccatcgacacgcagccactcggacctcggctcgacacgctcgcctctcgatcttcttcaagcccggtgaaaagttttcggaaattgtgggaagtccatactacatggctcctgaagtcttgaagacgaactatggacctgagatagacatatggagcgctggtgttatcttgtatattttgttatgtggcgttcctccgttttgggctgagactgaacaacgagttgcacaagctattctccggggaaatatacattttaagcgagaaccctggctcaatgtttctgacaatgctagagatcctgttcggcagatgcttcaacctgatccacaactcaggct

SEQ ID NO: 6682 - DNA, 298 bp, Zea mays
cgcagtgtactggggccagaacggcaacgaacgcagcctggcggacgcctgccactccgggctctacgcctacgtcaacatcgcgttcctcacaaccttcgggaacggacacaccccagttctcaacctcgccggacactgcgaccccggctccggcagctgcaccggccacagcaccgacatccacacctgccactcgctgggcatcaaggtgctcctctccatcggcggcgtcagggcagctacggcctctcctccaccgacgacgccaacagcgtggccgactacctgtgggaca

SEQ ID NO: 6683 - DNA, 301 bp, Zea mays
cgggaatgtatgatgctggggatcacatgaagttcaccttcccgatggcattcacggcgacggtgctctcgtggtcggtgctggagtacggggatcagatgagcgcggcaaagcaactgcgaccctgccctcgatgcactgaagtggattacacatttccttactgctgcacatccttctgacaatgtgctgtacatccaggtcggtgatcctgatctggaccacaattgttgggaaacgccagaaacaatgaccgagaaaacacctctcacacagatcaacaagaagactcccggatcag

SEQ ID NO: 6684 - DNA, 200 bp, Zea mays
acaacagaagctctcgatctcaccgacaccgaggaagaacgagatcaatggcgtccgagcagggagtcgtgatcgcctgccacagcaaggctgagttcgacgcccacatgaccaacggccaggaagccggcaagctggtggtcatcgacttcactgccgcctggtgcggtccatgccgcgccatcggcccactgttcgtc

SEQ ID NO: 6685 - DNA, 337 bp, Zea mays
atggatttggacatggctgactttgtgctgcaagacgtggtggtgtctgctgtaagtcaagtactgataggttgccagggtaaaggcatcagagctgcttgcaacctgccggagagatccatgaagcaaaacgtttacggggatggtatacggctccagcagatcctctccgacttcttattcgtttcggtgaaattctctcctgctggtggctctgttgatatctcttccaaactgaccaagaacagcattggcgaaaaccttcatctcatagacttcgaacttaggatcaagcatcaaggagcaggagtcccagcagacatactgtcacagatgt

SEQ ID NO: 6686 - DNA, 307 bp, Zea mays
  unsure (1)..(307): unsure at all n locations
cgctgcagacacgcctggggcggtactgcggacctaacttctacaccacagaagtcgtccgcaagtttgccaggtcacagctcgactacatccttggcaagaacccattgaacatgagctacgttgtgggtttcggaaacaagtacccgaaccgncctcatcacagaggcgcgtcgatacctcacaacggcgtcaagtatgggtgcaaaggaggttacaagttgagggacacaaagcaggcaaaccctaacatccttgtcggagcaatggtggctggccccgacacgcgcgatggctacaaagatgt

SEQ ID NO: 6687 - DNA, 375 bp, Zea mays
  unsure (1)..(375): unsure at all n locations
accccctgcagaccancacagtcggcattcggctcgacatcaagactatatatgtctttcgcttcggtgttcctttgttcattgatactgatcaacgaactagtgggaaatggggcctgtcgattctccacaaacttgtgcttactggagtctatgggctgattgttttcatgcatcattcaagatggagagacatgctgcctgcaaaaccagcatactacaactatgtatgtgtgatgttgctactgaatggcatatcactgtttggatgtttccttattgcaagtggagctggatttggtttatggttatataatctcacaaccgtatgctatcattctctttaacttcccctcctatatgtgactttcttag

SEQ ID NO: 6688 - DNA, 212 bp, Zea mays
acacgacacgctgcagcagacgctacaagccatgatagagcgcgtcgacggacacctggacctacgccatcttctggcagtgctccgttgactccgccaccgcggcgtcgctgctcggctggggggacggctactacaagggctgcgacgaagacaagcgcaactagaagccgctcacgctctccggccaggccgagcaggagcaccgcaag

SEQ ID NO: 6689 - DNA, 331 bp, Zea mays
cacgcgatcgacagcgcggtggatcccctccgcgacttcgccaaggacagcgtccgcctcgtcaagcgctgccacaagcccgaccgcacagcgttcaccaaggtggcggcgcggacggcgatcggcttcgtcgtcatgggcttcgtcggcttcttcgttaagctcatcttcatccccatcaacaacatcatcgtcggttccggctaggcttacaggagtacagggcgactagcatgggagtagtgcaatacttttgggagcaatagataacgaggatcctggtctttcgaatagtattgttaatgagatttttcgttcggttgtgtttctg

SEQ ID NO: 6690 - DNA, 311 bp, Zea mays
aatggcgagcctgacacaaccgatatggttgagcacttcggtgagcagctctccggttttgcgttcactgccaatggctgggtgcagtcttatgggtcaaggtgcgtcaaccctccgatcatctacggtgacgtgagccgccccaaccccatgaccgtcttctggtcgaacacggcgcagagcatgacgtctcgcgcaatgaaggggatgctgactggaccagtcacaatcctcaactggtacttcgtccggatacgacagccgaggtttgagacttgctaccagatcgctcttgcgatcaagaaggaagt

SEQ ID NO: 6691 - DNA, 329 bp, Zea mays
  unsure (1)..(329): unsure at all n locations
caccaaagggagaagcgcctccgtacaggaaaccgcatgacctgaagaaggtttggaaagttggtgtcgtgacgggcgtgatcaagcacatggcnccaaacttcgataagatcacgaaccgtgtaaggaagtcgaagtgtctgcaggacaaaatgactgcaaaggagagcctcatctggcttggtgttctacaacgcgaggagaagtctgttcacggctttggcagtgctttactacagaatgctcggcatagtagcacttcagacgacagaacacgaggcatatatagcagcagtgacgagtatgatcgtcgacgcctcgagcagcct

SEQ ID NO: 6692 - DNA, 294 bp, Zea mays
cgtccctcacacactcactatacactgctctgctgcagcaagacggaagacgctagcgcctccctagctctcgttgtcagcactggccaccaccgccgcgtccagcctcctcaagtcgtccttcgcgcggctcccggctcgcttcggccacgcgcaccaccaccccgtcgtccgtggccgtggccactccgcgcgctggcgcgtcgcccatccgcgcgtccatctcctcctcttccaccccgtcctacgacatgacgtccttgcggttcagccccatcaacgagtcgatcgtgt

SEQ ID NO: 6693 - DNA, 362 bp, Zea mays
  unsure (1)..(362): unsure at all n locations
gcacctgctagcctacgtcagntcggccttccgctcgacactgctcctaccgcagctctccctcaggtttagtgttcgccatggcggccttcaacaagcttggtggccttctaaggcacagtgctctggtgagccgtatcactggtggctcttctcctgcagtgttcaatgctgcacggctcatgtctaccaagctatttattggtggtcttgactggggtgttgatgacgtgaaactaagagaagcatttagcagctttggagacgttactgaagcgagggtgatcacagacagggagactgggaggtcaagaggctttggctttgtgaactactccgacagtgatgctgccaaggaagct

SEQ ID NO: 6694 - DNA, 327 bp, Zea mays
  unsure (1)..(327): unsure at all n locations
catgtttttaaaccaaattacaaatatccctacccctttctcaattaattataactgacacataggatctctattaggaataacattaagaattcaactaatttctggaattttaatttcaatgcattatacatcttctataagagaagcatttgatagtgtaattcatttaacacgagatgtacaaaatggttgattcatacgaagaattcatatcaacggagcttcattattttttgttttaatctacttacatattggacacgatatatttaactcttcatttancattancagtacatgaatatctggaatctctattctttt

SEQ ID NO: 6695 - DNA, 337 bp, Zea mays
cgcggcggcgcgggcggacaaggagcaggcggaggaggagctgtgccaagccacaatgggtatctcgcgtgactcgatgcacaagcggcgggccaccggtggaaagcagaaggcctggaggaagaagcgaaagtatgagcttggtcgccagccagccaacaccaagttgtcaagcaataagacagtgaggagggtccgtgttcgtggaggtaatgtgaaatggagggctcttcgccttgatactggtaactactcatggggaagtgaagctgttacccgcaagacccgtatcctcgacgtggtctacaatgcatcaaacaatgagcttgtgaggaca

SEQ ID NO: 6696 - DNA, 322 bp, Zea mays
  unsure (1)..(322): unsure at all n locations
cacgctcgacacccatccatcgattggaccccagatccgcacgccgcagcacaagacggtgggatcggctcggatcggagcagagggggacaaccgaccagaatccgccggtgtacaccatgggctccgcgagccgtgccgtctcgtgcctgtgctgcccctgcaagtggctggcgtgcgggctcctgagctgnctgtgcagcatcctcgtctcgctcgncgtcgtactgggcgtcgtcgcctcatcctctacttcatcttcaagccgcacatgattgcgacgcacgtggactcggcctcgctctcgcagttcgcgctgtcg

SEQ ID NO: 6697 - DNA, 322 bp, Zea mays
  unsure (1)..(322): unsure at all n locations
ctcgtcgatggcttcggtttggagccgaccaaggagttcacgctggtgacaaacgtgaagtacggagaatactacgtcgacgcagcatggccgctaggcgatgcgatagaacccttgtcgtcccagaagctgaaccaaatcgcgtgaccagtaataataatgcttaatggagtggtaaaaagacgacgtgctacagttgatgtaatggcgtaataaatggatgtatatatctatgtcncttggctacgcctgctaatatatatcagagaggaagatcgatgagaggaggaaattgtaagttctgcaataattagcatgttca

SEQ ID NO: 6698 - DNA, 347 bp, Zea mays
  unsure (1)..(347): unsure at all n locations
gcgcatgcccgcctacctcagccnggccttccgctcgacacgctcgacccgctcgaggctgtccctccctccctcgcctgtgcttctgccagctaggtgcctgccgaggagagctagggatacgatggccggccgtggcatcgtgaacacgggcggtggcaaggactaccccggcaagctcaccctcttcgtgttgctcacctgcatcgtcgccgccaccgggcgtctcatcttcggatatgacatcggtatctcaggtgcggtggcaaggactactgcttgctgttatgagttatgagttatgacttgatgatccattattcattcatgcaggcggcgtgacgtcc

SEQ ID NO: 6699 - DNA, 258 bp, Zea mays
gagggcaacttcctggcgcacaacagctcgcagtcgtctccccgcagtacggagaccagccgctagttcaacgaagaccgcaccgtcgtggtggtggccaatggagagaactacaaccacaagaacgtccggaagcagttcaccggcacacacaacttcagcacgggcagtgactgcaaggacatcatccccctgtacgagaagtacggcgagaacttcgtggacatgctggacggggtgttcgcgttcgtgctctac

SEQ ID NO: 6700 - DNA, 261 bp, Zea mays
cggacggtggtcgagacgcgtgggccattctcagccgccgccaatcccttcccgtgctccgcaaccgctgagtgagaagaagagatggccggcaaacgcgatggcccacctatcgggatcgatctcggcacgacgtactcttgcgtcggcgtgtggcagcacgaccgcgtcgagattattggcaacgaccagggtaaccgcaccacgccctcgtacgtcgccttcaacgacatcgagcggctcaacggagatgcgggcaag

SEQ ID NO: 6701 - DNA, 258 bp, Zea mays
ggaccgttgggccggattaccttgcgacggtggatttggatcccagctctcctacatactcccaggtgatccacaggctcccggtcacccacatcggcgacgagctgcatcactctggctggaactcctgcagctcctgccacggtgacccatcggccaagcgccgcttcctgatcctgccttccttgctgtcaggccgtgtgtatgtcgtcgacacagcgacagacccaagggcgcaatccttgcataaggtggttg

SEQ ID NO: 6702 - DNA, 257 bp, Zea mays
ttagcctgccattcattactgctactgctgatgggccaaaacacattgaggcaaccctctcgagagccaaattcgaggaactatgttcagaccttatagacaggcttaaaactcctgttaataatgccttaagagatgccaagttgtctgtcagtgatctagatgaagttattcttgtgggtggatccacccgaatccctgcagttcaagaacttgtgaggaagcttactgacaaagatcccaatgttacggtcaac

SEQ ID NO: 6703 - DNA, 258 bp, Zea mays
cccacgcgtccgcttcaacatctataacaagcaggtactcaaggttttcccataccctataaacatcacagaagttcaatttgctgtcggaactgtagcagctctgttcatgtggatcactggtattattaagaggccaaagatttctggagcacagcctgtagccatcctacctctggctattgttcatactatgggcaatctcttcaccaacatgagccttgggaaagttgcagtgtcatttacgcacaccatcaa

SEQ ID NO: 6704 - DNA, 260 bp, Zea mays
ctcaacacagcacaggcagctcgacagagagagagagagacagatgtcgtggttcgggcaccaccaccacaaccagccggctcccccggcgtcgggccccaaccaggtgttcaagatcttctgccgcgccaacgagaactactgcctggccgtccgcgacggcgccgtcgtgctggccccggtcaaccccaaggacgaccaccagcactggtacaaggacatgcgcttcagcacccgggtcaaggacgaggaaggcatgc

SEQ ID NO: 6705 - DNA, 258 bp, Zea mays
cccacgcgtccgtttcagtttgataagaactgtttggtcattcagtggtctggagataatcctaatagccttgcaggtttaactctgaatacccctggtgatcttgccattagccttggtactagtgatacagtattcgggataacaacagaagctaaaccaagccttgaaggacatgttttccccaatcctgttgagcctaatggttatatggtcatgctatgctacaaaaatggctccttgaccagagaagatgta

SEQ ID NO: 6706 - DNA, 259 bp, Zea mays
ccacgcgtccgcaaagaggcgtaccaggtttactggtcgagctgtgtcaagggggttcatacggggcagatggtcctcaaggtcgtcgaggccatcgatgtgtatcttgctggaacagtcatgctgatatttgggatgggtctctacggcctcttcatcagcaacgctcccgccggtgttcctcctgaatccgaccgtgccctcagcggctcgtcgttgttcgggatgttcgctttgaaggaacgcccgaagtggatga

SEQ ID NO: 6707 - DNA, 260 bp, Zea mays
aatcccaccagcaaatccccaattcctccgagttcgagcgaccatgtcggggcgtggcaagggcgggaagggtctgggcaaaggcggcgccaagcgtcaccgcaaggttctccgcgacaacatccagggcatcacgaagccggcgatccggaggctggcgaggaggggcggcgtgaagcgcatctcggggctcatctacgaggagacccgcggcgtgctcaagatcttcctcgagaacgtcatccgcgacgccgtaacct

SEQ ID NO: 6708 - DNA, 255 bp, Zea mays
  unsure (1)..(255): unsure at all n locations
gcgaaaccctagcccaaactcgaccgcctctgctataagtcgctccactctctctcctccaagcctaccccagccgncgncgccgccancgccaccggcaccgccanctgccccaccgcgccgccgccgcagccaccatgggtcgcgtccgcaccaagaccgtgaagaagacctccaggcaggtgatcgagaagtactactcccgcatgaccctcgacttccacaccaacaagaaggtgctggaggaggtctcga

SEQ ID NO: 6709 - DNA, 258 bp, Zea mays
cccacgcgtccggaaactggtagttgatgctgaaactgacaaagtacttggtgcatccatgtgtggaccagacgcacctgaaattatccagggcatcgctattgcggttaaatgtggagccaccaaagcagacttcgacagcactgtcggaatccacccttccgctgctgaagagttcgtgaccatgcgcaccgtgacgaggcgcttgagcccgacatccaagccaaagacgaacttgtaagcaagaaattggtattc

SEQ ID NO: 6710 - DNA, 256 bp, Zea mays
gatcccctcactgcattccctctgatcgccgccactccctgacatcgagaccggctgcccgaccccggtccggcgatccctctgcacccctttctttgcgctgccagccccaatctctcgcatccctgtcaaccatggcggcgtcacaggcggaggcgcggtgcgcgcgctgtcccagaaggagcaggacatacagatgatgctcgctgccgacgtccacctcggcaccaagaactgcgatttccagatggagcgg

SEQ ID NO: 6711 - DNA, 255 bp, Zea mays
gtcttctgcggttctgccgtctacgcctccaatttggcctctctcccttgcaagtttaagcttcaccttcaaccatgggtaaggagaagtcccacatcaacattgtggtcattggccacgtcgactctggcaagtcgaccaccaccggccacctgatctacaagcttggaggcattgacaagcgtgtaatagagaggtttgagaaggaggctgctgagatgaacaagcggtccttcaagtatgcttgggtgctcg

SEQ ID NO: 6712 - DNA, 255 bp, Zea mays
cccacgcgtccgaatacttcgaactcaggcccaaagttcagggaaatcccaaatggctatggataagatggtggaaggacgattgaggaagtactttgaggaagttgtgctcatggagcaaaaatatgttttaaatgacagcactaacattaagaccgtgctgaatgacttgtcgaaagaggttggttctaaggtaacaatcggtaacttcatcagaatggaggttggcgaagggattgagagaactgaagccgc

SEQ ID NO: 6713 - DNA, 254 bp, Zea mays
ccacgcgtccggcacgtctcgtctccctcccacaaacaataaaaactgctcggttgctgctcctgctccgccgcgccggcatcatgtgtggcatcttagccgtgcttggttgctccgactggtctcaggcaaagagggctcgcatcctcgcctgctccagaaggttgaagcacaggggccccgactggtcgggcctctaccagcacgagggcaacttcctggcgcacagcggctcgccgtcgtctccccgctgt

SEQ ID NO: 6714 - DNA, 256 bp, Zea mays
cgcctctcgagtctcgtccacccgtcgtcctcctagctcctctactcgccagtcgccatgggcaagattaagatcggaatcaacggcttcggaaggatcggcaggctcgtggccagggtcgccctccagagcgaggatgtcgagctcgtcgccgtcaacgaccccttcatcaccacggactacatgacctacatgttcaagtacgacaccgtccacggccactggaagcacagcgacatcacactcaaggactcca

SEQ ID NO: 6715 - DNA, 256 bp, Zea mays
cccacgcgtccgctcgacctcggccccgatgccgtgcttccccgcgaactcgaggtcatcaagatggactacgtcaacacggccatggagcggctcgagaagaacgacgtccgctaccgcttcgtcatcgacgtcgccggcagcctcggctctgccgcctaggcatggctgcaaaggtttcaatcagagcccagccgcaataatttgttagctaccgaatgaatgatggtctacgcttgttgatgagttggtgctt

SEQ ID NO: 6716 - DNA, 254 bp, Zea mays
gcttagaagactggttcaagagcctgacttaattggggtgagtcatttactagttgacgaaattcatgaacgcggcatgaatgaagattttctcatcataatactgcgtgaccttctaccaagacgtccagatcttcgccttgtactgatgagtgcaactataaatgctgaactattttccatgtactttggagatgctccagtgatgcacatcccggggttcacttttcctgttgctgagttgtttctggaag

SEQ ID NO: 6717 - DNA, 252 bp, Zea mays
agaagctggaaaaagcccaaacaaaaagggcattgtctttgtccgcgtggacgcggctgacttgcgaacccaccgtaccaaccaggacttggagcgtgcggcgtcggagttcgccggcggtgaggagcagaagaggaagggaaccaaacaaagatgggctgctccatctcggggctcaacgcgctctacgacgcggccacgggcggcggcgacgtctggatcaacgagcgccgcttccgcgtccttcgccag

SEQ ID NO: 6718 - DNA, 247 bp, Zea mays
cacagtcctacgagcagtcgcacgcaagtttcaagagacaaaacggtcgacatggctcgcacgcaatctgccgtagcggtcgccgtggtggccgcggtgctgctgctggcagcggcggcgacgacctcggaggccgccatcacctgcgggcaggtgatctccgccatcgcgccctgcctctcctacgcccgctgcacggggtccggcccctccgcgtcctgctgtagcggcgtcaggaacctcaaga

SEQ ID NO: 6719 - DNA, 258 bp, Zea mays
gccgccgccgccatcgcgcgcgactcggccgccgtgttcgcctggaagggggagacccttgaggagtactggtggtgcaccgagcgctgccttgactggggcgaggcgggcggccccgacctcatcgtcgacgacggcggcgacgccacgctgctcatccacgagggtgtcaaggccgaggaggagtacgagaagaccggcaagatccccgacccggagttcaccgacaacggtgagttcaagattgtgctcaccatc

SEQ ID NO: 6720 - DNA, 273 bp, Zea mays
caaaaccctaggccaccattctgaccaccaggcacaagcagagcagaagcagacatggccaccattccgaccaccgattctggcctcgtcctcagttcctccgctctcctccggaggactaggagggccgcctcatccgtcaccgccaggctgccagccgtcgcccgccgtcgcccgcagctcctcgtgcgtgcctccgccaaggagatcgcctttgaccagggctccagagccgcccttcaggccggcgtcgagaagctcgccgccgcggtc

SEQ ID NO: 6721 - DNA, 276 bp, Zea mays
cagctaataaggtaataaggggcgacgaaaatggctccaacgaccgccaccaaggacgacagtggctacggcgacgagcgccggcgcgagctgcaggcgttcgacgacacgaagctgggggtgaaaggcctggtggactccggcgtcaagtccatcccgtccatcttccaccacccgccggaagccctgagcgacataatttctccggcgcctctgccgccgtcgtcgtcgccctccgccgccgccatcccggtggtggacctctcggtgaagcgc

SEQ ID NO: 6722 - DNA, 264 bp, Zea mays
agtttaagcttcatcttcagccatgggtaaggagaagtcccacatcaacattgtggtcattggccacgtcgactctggcaagtcgaccaccaccggccacctgatctacaagcttggaggcattgacaagcgtgtaatagagaggtttgagaaggaggctgctgagatgaacaagcggtccttcaagtatgcttgggtgctcgacaagctcaaggctgagcgtgagaggggtatcaccattgatattgctctgtggaagtttga

SEQ ID NO: 6723 - DNA, 266 bp, Zea mays
ctgctacccagaagactgttgatgggccctcgtctaaggactggaggggtggaagggctgctagtttcaacatcattcccagcagcactggagctgctaaggctgttggcaaagtgcttcctgtccttaacggaaagttgactggaatgtctttccgtgtcccaaccgtcgatgtttctgttgttgatttgactgttaggcttgagaagtcagcaacctatgatgagatcaaggctgcggtcaaggccgaggcagaaggtagcctc

SEQ ID NO: 6724 - DNA, 267 bp, Zea mays
ctccacttctcttctccgcgtcacctcctcttcgccgccgccgacgcttcacccggcagccagccatggatgaggagtacgacgtgatcgtactaggcacggggctcaaggagtgcatcctcagcggtctcctctctgtagacggcctcaaggttttgcatatggacagaaatgactactatggaggagattccacctcactcaaccttaatcagctctggaagaggtttagaggggaagacaagcccccagcacatctaggtgcaa

SEQ ID NO: 6725 - DNA, 268 bp, Zea mays
attaaatctgccattccagctgacgtaaaccaattcattactgcttcacaagctggttgcgccatggtgaaggagagaacccagaacatgcctgttgctcgttcgtccaagttcgtaaagtctatcatcctctcaccagaagctttcatcatctgtttccaccattcgtcaatctgttttcctttttgaagctgatcactgttcaaatgttctctaatcgaagtgttgaaagaccaaatgcgcagagtctgactactactgatgaaat

SEQ ID NO: 6726 - DNA, 263 bp, Zea mays
ccgcagttccccgaccacaccgttcctccgagcccaggagcagccccgcgccaggaggaagtttgttcttttaacaatatgtcgagggaggagaatgtttacatggccaagttggctgagcaggctgaaaggtatgaggagatggttgagtatatggagaaggtggctaagactgtagatgtggaagagctcactgttgaggagcgtaaccttctgtctgttgcatacaagaatgtgattggggctcgccgcgcttcatggcg

SEQ ID NO: 6727 - DNA, 262 bp, Zea mays
tggggattgaccctaaaccctttgatccaaaaacatatgtggaagaagatgtttttgttacagatgaatctgggactaagaaaaggatacggctagaggacaatattgtgcggtggagaaccattaggaatgcagatggcactacatcttgtgaaagcaatgcacgctttgtaaaatggaaggatgggactatgcagcttctgattggcaatgaggttcttgatatatctgtacatgaggcgcatcatgaccagtcccatct

SEQ ID NO: 6728 - DNA, 258 bp, Zea mays
cgactctggtgtgagatactatgacatggagagattccagctattcaagcattttcagtttgaatggccagtgaatcatgcttcgttgagtcctgacagaaaggtggttgttattgtgggtgatgatcctgatggtctacttattgatgcaaactctggaaagacagttcattccataaaaggacatcgggactactcatttgcatcggcttggacccctgatgggcgaacatttgctaccggcaaccaagacaagac

SEQ ID NO: 6729 - DNA, 260 bp, Zea mays
cccacgcgtccgcccacgcgtccggtggaggaagccttccagactattatcacggaggtgtatggcatcgtcaacaggaaagcgctggccgccaaggaagcagctgccacagctgccccattgccttcacagggcaaaaccatcagcattgacagcaatgcaggaaatacaaagaaggcatgctgctctacataaataaaaaagatgtaaccttttttaaaatatggtagaaaatggagcatatatagtcatcataaaat

SEQ ID NO: 6730 - DNA, 259 bp, Zea mays
ctgtcatctcctcctcctcagaaacccaccaaccccgtccagccgccggctgtctcggccgtcgccgccgccgccgccgccctatcccggtccttcaggtgaaccaggttggccatggccttcaacaagatcaaggtcgccaaccccatcgtcgagatggacggcgatgagatgaccagggtgttctggaaatctatcaaggacaagcttatattccctttcgtagacctcgacatcaaatattttgacctcgggcttc

SEQ ID NO: 6731 - DNA, 258 bp, Zea mays
cccacgcgtccggtggcaaattatttgaccttctcaacgataggagcaaactttgcatgagagaggatggaaagcaaaaggtttgtattgttggtttgcaagagtatagagtgtccgatgtagagactatcaaggagttgattgaaaaaggcagtgctaccagaagtactggcacaaccggtgcaaatgaagagtcctcaaggtctcatgccattcttcagcttgccattaaacgccgtgtggatggcaatgactcca

SEQ ID NO: 6732 - DNA, 282 bp, Zea mays
agcccaccaccccaccccgcgacgctaaccgacgcaatggcgacgctcaccgttccttcctccgtcccggccgtcgccgaggactgcgagcagctccacaaggctttcgaaggttggggcaccaacgagaagctgatcatctccatcctggcccaccgcaacgccgcgcagcacgcgcgatccgccgcggctacgccgaggcgtacgggaaggagctgctccgcgctctcggcgacgagatccacggcaagttcgagagggcggtgatcctgtggacgctgg

SEQ ID NO: 6733 - DNA, 280 bp, Zea mays
ccacgcgtccgcatcgaccttcaagtctcgctacgtagcagtgcaataaaaaaagcagccgcaatggcgagcagcaccatggccctctcctccacggccttcgccggcaaggccgtgaacgtgccgtcgtcgtccgccttcggcgaggcccgcgtgacgatgcgcaagacggcggggaaggccaagccggcggcggcgtccgggagcccgtggtacggccccgaccgcgtgctgtacctgggcccactgtccggcgagccgccgagctacctgacgggcg

SEQ ID NO: 6734 - DNA, 279 bp, Zea mays
  unsure (1)..(279): unsure at all n locations
atcaaatactgtgatgtctaaaagaaagttgaatcgacttgtgacagagaagtgggtagatgggtgggatgatccccgcttgttgacactggctggtctccggcgacggggagtatcatcaactgcaataaattcctttattcgtggaatcgggataacgagaagtgacaatagcttaattcgtgttgatcgtctagaatatcacatcagggaggagcttaacaaaacagcccctcgaaccatggttgttttgcgacctctanaggtggtaataactaa

SEQ ID NO: 6735 - DNA, 283 bp, Zea mays
ggcatcttagccgtgctcggttgctccgactggtctcaggcaaagagggctcgcatcctcgcctgctccagaaggttgaagcacaggggccccgactggtcgggcctctaccagcacgagggcaacttcctggcgcacagcggctcgccgtcgtctccccgctgtccggcgaccagccgctgttcaacgaggaccgcaccgtcgtggtggtggccaatggagagatctacaaccacaagaacgtccggaagcagttcaccggcacacacaacttcagcacggg

SEQ ID NO: 6736 - DNA, 281 bp, Zea mays
cgatattgagaatttgcgatacccgataccgatctaggagaagagaaaggcgtcatgtcgtcgttcggacgcaattcatggtgtatcctcgtgctggcctccgtgctcctcctgtcctgcctcgccgagacggccgtggccaaccgaacaggcgagctcaccgtcttctggggccggaacaaggaggagggcaccctgcgtgaggcctgcgacacaggactctacaacaccgtcatcatctccttctacagcgtcttcggccacggccgctacgccctcga

SEQ ID NO: 6737 - DNA, 273 bp, Zea mays
ccctcttccacctcgaagcggcgcgaggagggagagtgtgagtggactcaggaggcggcgggcgaaatgaagcttaacgtcaagaccctcaagggcaccaacttcgagatcgaggcgagccccgatgcgtcggttgctgaggtcaagaggatcatcgaaactactcagggtcagagtacctacccagcagaccagcaaatgctcatataccaagggaaaattctgaaggatgagaccactttggaaagcaacggagttgctgagaacagcttc

SEQ ID NO: 6738 - DNA, 157 bp, Zea mays
cccacgcgtccgcccacgcgtccggcctcgaccggatctcgtcggactcggatccgcccgaccaccccgcgccgccgcagatcaaagaagatggcagctgtcgacacattcctcttcacctcggagtctgtgaacgagggacaccctgacaagctct

SEQ ID NO: 6739 - DNA, 118 bp, Zea mays
gctttctagggcattctccaacctgacatgtgggatgtagtgccatctaacagatggaactggccatctctaagggagaccatttcaaaagttgggataagaaattctcttcttgttg

SEQ ID NO: 6740 - DNA, 270 bp, Zea mays
cgcttcttgttgccaaagaattccctcccctagccgccgccgccgccgctcgtctccctgagaggtgccgggaccgaggaactggccgagtactaggtagagaatcggtttttcttgtctcagcccggggtctgctgcgtctggtggtggtgaaggggagaaattcgtgagatctgttccggatcaggcgtgcgagctcgggaatcaggggtttcacacatagcttcgtcgatttgaatttgatgtactaatggagtctaagggtggcaa

SEQ ID NO: 6741 - DNA, 275 bp, Zea mays
gggggatgggcgcacaggcggcgccaaccgtccggcgtggctgcagcagtacgaactgattggcaagattggggaggggacctatggcctcgtcttcctcgcgcgccttaagccgccccacccggcacctggccgacgcggcccccctatcgccataaagaagtttaagcagtcaaaggagggggacggagtatcacccaccgcaattagagagatcatgctcctgcgcgagatcaaccacgagaatgtcgtcaagctcgtcaatgtgcacatca

SEQ ID NO: 6742 - DNA, 278 bp, Zea mays
gacgaggccaggagcgggcacgcaggcgccgcgcaggtggtgcttcgggcctcctccgaggaccgcaagccggtgggctaccggtctccgccaccggcagcgaccgcgactgcggatgcgcacaagatccagctcaagagtgacgacatgaaggaggagatgcggcatgatgccttcgaaattgctcgcatcgcattcgagaagcacagtatggagtaggacatcgcggagtacataaagaaggagttcgacaagaaccacggccccacctggcactg

SEQ ID NO: 6743 - DNA, 275 bp, Zea mays
attttgacttggatattagagatgatgtccaagatgaatgttccaagtttggtgcagtgaagcatatttttgttgacaaaaatactgcaggcttcgtgtatctgcagttcgatagtgtaactgcagcagggaaggcccaacaagcacttcatggaagatggttcgccggaaagatgattacagcgacatttatgtccgatcaggaatacagtactaagttcccaaacttgtgagcatatgcggggaagagttggtcagacccgcatagttcgttc

SEQ ID NO: 6744 - DNA, 267 bp, Zea mays
ggaatttgaaaaccttagtgaacaagaattgtgcttacgagaatctttagcagcctaccgcaatgctgctgatgctgctagcaacatacaagccgcactcagggagcgaactcttaagcttcaaacaaaagcaattcagttggccaatcccgagaatgatgcatctgcaatagttgctgctatgaggattcagcacgcataccggaactacaacagaaagaaaatgatgagagctgctgcaagaatacagagtcatttccgaacatg

SEQ ID NO: 6745 - DNA, 267 bp, Zea mays
gtctcatcgaaaactccctcgttttatttcctctgctccctctccgcttctctccactatcctaccaggcaccactcgcatcgtgtgctcagtcagatccccgtcccgcatttcctaaggccaggttagttggcattgaagacgatgactgcttctgcagctgctggtgtgcagatggtggctgcacgcccttgcatttcggcctcgccaggaattcttaccgcacgggtttctaggactgattgcatgctcagtaccactgctaca

SEQ ID NO: 6746 - DNA, 267 bp, Zea mays
gcaaggttctgctatggtgtgaaaatagagctttcacctgcaaatgttgtctacctacggtgtgcctcagagcatctagaaatgactgaagaagtagctgaggaaaacctgattgcacagtcagaaatgttcctcaaccaagtggttctccgtaactggaaagattccttggcagcattggaaacatgtgatgacctactcccccatgctgaagacctccagattgtgaacagatgcatcgagtcattggcatcaaaagctactagt

SEQ ID NO: 6747 - DNA, 266 bp, Zea mays
gtctcttcgtccccacgagcaaccgataatccgccggcgctgagatgttggtttatcaagacctcctatctggcgacgagctcctgtcggattcattcacctacaaggagctcgagaacggcgtcctgtgggaggtcgagggaaagtgggtcacccaaggtcctgttgatgtagacattggtgccaatccatccgccgagggtggtgaggatgaaagcgttgatgacacagccgtgaaggtggttgatattgttgacacattccgt

SEQ ID NO: 6748 - DNA, 269 bp, Zea mays
ctcgccgtctgccttctgcgcctccatttcggcctctgtcccttgcaagttcaatctcacctccaaccatgggtaaagagaagtcccacatcaacattgtggttattggccacgttgactctggcaagtcgaccaccacaggacacctgatctacaagcttggaggcattgacaagcgtgtgatcgagaggtttgagaaggaggctgctgaaatgaacaagcggtccttcaagtacgcatgggtgctcgacaagctcaaggctgagcgt

SEQ ID NO: 6749 - DNA, 294 bp, Zea mays
tgaggaacctcctctgccagcgcttcggcttccccggcgagtgcatcatcatgctcactgacgaccagagggacccgttcaggctgcccacgaaggagaacatccggatggcgatgcactggctggtgcagggctgcagctacggcgactccctggtgttccacttctcgggcatcggcgcgcaggtggcggacgacgacggcgacgaggcggacgggtacgacgaggccatctgcccgctggacgcgttccagagcgggcccatcctggacgacgagatcaacgagaccatcg

SEQ ID NO: 6750 - DNA, 288 bp, Zea mays
cggacgcgtgggggctgggatgctcaggtgctcggagaagcaccctacaaattcaaaagtgcacttgaggctgtgaaaacagtgagagcacagcccaaggcaaatgatcaatacttgcccccatttgtgatagttgatgacagcggcaaagctgttggacctgtattagatggtgatgcagttgtcactatcaacttccgggctgatcgcatggttatgcttgcgaaagcactagagtatgcagattttaacaactttgaccgtgtacgtgtccccaaaattcgatat

SEQ ID NO: 6751 - DNA, 286 bp, Zea mays
cccacgcgtccgagcgcttatagcttgtcagccatggccaccgccgccgcgtctagcctcctcaagtcctccttcgcgggctcccggctcccggccgccacgcggaccacaccggcgtccctcgtggtggccaccggcccgcgcggcgccggcgcggggcccatctgcgcgtccatgtccatgtcctcctccaacccgccctacgacctgacgtccttccggttcagccccatcaaggagtccatcgtgtcccgcgagatgacccgtcgctacatgacggacatga

SEQ ID NO: 6752 - DNA, 245 bp, Zea mays
agatcgtgcgcctcacgcgcgaggtcgttcccggcatgatcgtcaccggaatggaggtcgccgagattgacggcgcccccaggatgggcccgacgtttggcgccatgatgatctccggccagaaggcggcgcacctggcgctcaaggccctgggcaggcccaacgccgtggacgggaccatgtcgccgccgttgcgcgaggagttgatgattgcgtacaaggacgacgaggtcgtggacgcctga

SEQ ID NO: 6753 - DNA, 290 bp, Zea mays
catctaccagcgactcagcgagcgagagcagcacacacgcagctagctaggagcagcagcagagcagcggcgatggcggcctccatgatctcctcgtcagctctggcggtggcgcctcagggcctgccgcccctcggccgccgcgcctcctccttcgccgtcgtctgctccaagaagaagatcaagaccgacaagccctacgggattgggggtggcctgaccgtcgacgtcgacgccaacgggagaaagggcaagggcaagggcgtgtaccagttcgtcgacaagtacgg

SEQ ID NO: 6754 - DNA, 287 bp, Zea mays
gcactccatccactactttactcaaagtctagagctagctttttgctttgctcaccagacaaaccgcagcagatggcgtcgacgatcatggccgccacctcccgcatcgtcgcggccaagacgccgtttcttggccagggtcgcgccgccgccgccgccgccaatgccagccccctccgcgacgtcgccgccgccgctgctggcggccggatcaccatgggcaacgacctgtggtacggcccggaccgcgtcaagtacctgggccccttctccgcccagacgccctc

SEQ ID NO: 6755 - DNA, 285 bp, Zea mays
ggggtctttgcaatttctacaaaaacgaagtcgcaatattggttccaaaagcaggaggttcttaatcgacgctgaagatgccatggaactaaagcttacctgggaagaagctcaagagttgttgcgccctgctcccactgcaaaaccaactgttgtgatgattgaggactatgaatttgaagaatatgatgaaccccctgtctttgcaaagagatcaatttttaccatccgtgcaacaggggaacaagaccagtggattcaatgtgacgagtgctcaaaatggcg

SEQ ID NO: 6756 - DNA, 125 bp, Zea mays
cggcgaccagaggctgctggacgcgagccaccgcgacctgcgccgcgcccgcgccgccgcgctcaacatcgtgcccacgtccaccggtgccgccaaggccgtctcgctggtgctccccaacctta

SEQ ID NO: 6757 - DNA, 264 bp, Zea mays
cccacgcgtccgctgatttcaggttcatatttgatgcaatgcatgcaattactggtgcgtatgccggacccatttttgttgagaaacttggagctgatccggactgcatattaaatggggtgcctcttgaagattttggaaatggccatccagatccaaatctaacttacgctaaggagcttgtttttactatgtttggagcccatgcacctgactttggtgcaacaagtgatggtgatggtgatcggaacatgattcttggga

SEQ ID NO: 6758 - DNA, 282 bp, Zea mays
gactagttctagatcgcgagcgccactgtccagtgcgcgcgtcaagcttgcttagctagccgccatggcctccctcgccgccgtctccgtgaagcccgtggccatcaagggtctcgccggcagctccatctccggaaggaagctcgccgtcgccaggccgtcggcccgctccatccgcatgccccgcgcaccgccgtggtggccaagtacggcgacaagagcgtctactttgacctcgacgacatcggcaacaccaccggacagtgggacctctacggctct

SEQ ID NO: 6759 - DNA, 258 bp, Zea mays
tgccgcttatcatggtggcgctgcaggaggaatcattgatgccgatcgtgcctggcgagggcccgtttgggatgatcatatgcccgtcgcgggaactggccaagcagacatatgatgtgattgagcagtttctcattccacttaaggaggctggttatccggagataaggcatttgctttgcattgggggtgtggatatgaggacacagctcgatgtgttgaagaagggcgtgcacattgtggtggcaacgcctggtc

SEQ ID NO: 6760 - DNA, 278 bp, Zea mays
catctagctccctaactgcaccggccgccacaccaccccgaccggaccctccacaacaatggccaccgtcctgggcagcccccgcgcgccggccttcttcttttcgtcgtcctccctccgcgccgcgccggcgcctaccgccgtggcgctgcctgcggccaaggtgggcatcatgggccgtagcgccacacgcaggcgcaggctgcgcgcgcaggccaccttcaacgtgaagctgattacgccgtatggggaggtggagctgcaggtgcccgacgacg

SEQ ID NO: 6761 - DNA, 148 bp, Zea mays
gtctcatctcagtcccatcgaaggtctagctgtgagtgttgatggattgctttgctgcacgatatcaaacgatcggtctgtgaagatatatgatgttgtaaactatgacatgatgttcatgatacgtctctcatttgttcctggggct

SEQ ID NO: 6762 - DNA, 296 bp, Zea mays
ctttaccattgtctcccccctcgtccgacctcctcgccgccgcagacgaccgccgccgccgctgccgctgccgctgcgaaccctttgtgaatcttcgttgtccgggctgtgtggggcaggcatggcgctccggaggctgctgcaggggagcgtcctgccgcggataatcggcagggatttggcaccggccgtggcgccgttttcaacggagtccggggagaccattcgtgccacgctctttcccggcgatggcatcgggccagagatcgctgagtctgtcaagcaggtattcaatg

SEQ ID NO: 6763 - DNA, 292 bp, Zea mays
cccacgcgtccggctcgatctccatctcgaccgtcgctcaccgggaagctacgctacgacgaagcatggcgtccgtcaccgcccgcgccccggtcgcggccctgcgcccgtcggcgtctctcaagtcgtcgtcgtcgtcggcggcggccttccttggccactctagccgcctcggccgcactgctaccgcgtcgccgacgaggcgcagcttaaaggcggaggccaagggcgagtggctcccgggccttccctcccccgcctacctcgacggcagcctgccgggtgacaatgg

SEQ ID NO: 6764 - DNA, 284 bp, Zea mays
gcggcgcggcgtgctcgtgatctcaacccaaggcgtgcctccgctccggtcacccgtcgctccacgcaaccatgtcgaggaggaagaccagggagcccaaggaggagaacgtcacccttggacccactgtccgtgaaggagagtatgtctttggtgtcgctcacatctttgcatccttcaatgacaccttcattcatatcactgatttgtctgggagggaaactctggttcggatcaccggtggcatgaaggtgaaggctgaccgtgacgagtcgtcaccttac

SEQ ID NO: 6765 - DNA, 285 bp, Zea mays
cggacgcgtggctggaccatgtggaagctgcccatgttcggctgcaacgacgccacccaggtgtacaaggagctgcaggaggccatcaaatcctacccggacgccttccaccgcgtcatcggcttcgacaacatcaagcagacgcagtgcgtcagcttcatcgcctacaagcccccgggcagcgactagaccgcgcccgccggccgccccccgccggctagctatagctcctgcgtgagctagtagctagctagtgccatgcgtcgtctctgtcgttcggttttg

SEQ ID NO: 6766 - DNA, 285 bp, Zea mays
cattcctcgcgcggcgaccacccgattcgaagcgtgcggagagaccgaagaagcgggtgagatggctcgtaccaagcagactgctcgcaagtccacgggagggaaggctcccaggaagcagcttgccaccaaggctgcccgtaagtctgcccccaccactggtggagtgaagaagcctcaccgctaccgccctggaactgttgccctccgtgagatccgcaagtatcagaagagcactgagctgctgatcaggaagctgcccttccagaggctcgtcagggaaat

SEQ ID NO: 6767 - DNA, 284 bp, Zea mays
cccacgcgtccgcgaaggcttccgtgttgtgcttccagtgagatcaaagaatgctcgtggccagcaaggctcatatccaattaagctgttctacacttcaaacatgcccatcattcttcactctgcgctgattaccaacctctattttatatcccagcttctctacaggaagtacagtggaaacttccttgttaaccttcttgggaagtggaaggagtctgaatactctggccattctattcctgttggtggtcttgcttactatgtaactgccccatcaagtt

SEQ ID NO: 6768 - DNA, 282 bp, Zea mays
cagcacaccaaggagagtacgtggaggagcagccatggcttcatcggtggccgccgctgcgagcacattcctgggcacccgcctggcggacccggcgccacagaacgggcgcatcgtggcccggttcgggttcgggttgggcggcaaggcgaacatgctccgaagaaggtggcgaagacatcgacctcctctgaccggccgctgtggttccccggcgccgtggcgccgactacctggacggctcgctggtcggcgactacgggttcgacccgttcggtctcg

SEQ ID NO: 6769 - DNA, 284 bp, Zea mays
ggcacgggcgcggcgacgcctcgcccctcgacgtcatcgccatcaacgacaccggaggcgtcaagcaggcgtcccacctgctcaagtacgactccacgctcggcatcttcgatgccgacgtcaagcccgtcggcgacaacgccatctccgtcgacggcaaggtcatcaaggtcgtgtccgaccgcaaccccagcaacctgccgtggggcgagctcggcatcgacctcgtcatcgagggcaccggcgtcttcgtcgaccgcgagggcgcggggaagcacatccag

SEQ ID NO: 6770 - DNA, 283 bp, Zea mays
agcaagcaagcaagcagcgagtacatacatactaggcagccaggcagccatggcgcccaccgtgatgatggcctcgtcggccaccgccgtcgctccgttccaggggctcaagtccacctccagcctccccatcgcccgccgctcctccagaagcctcggcaacgtcagcaacggcggaaggatccggtgcatgcaggtgtggccggcctacggcaacaagaagttcgagacgctgtcgtacctgccgccgctgtcgacggacgacctgctgaagcaggtggac

SEQ ID NO: 6771 - DNA, 281 bp, Zea mays
gagggtagtacttagggtggacggtggattcaggagtggtcaagatgttcttattgctgctgctatgggagctgatgaatatggctttggttctgtagccatgatagctactggatgtgtcatggcacggatttgtcacacgaataattgtccagttggagtggctagtcagagagaagagcttcgtgcaaggtttcctggtgttcctggtgatcttgttaactacttcctctttgttgccgaggaggttcgagctgcattagcccagttgggttatgaga

SEQ ID NO: 6772 - DNA, 278 bp, Zea mays
gggaaacagatcggctggcggcaatcggtagccggcttggctggcacgatgggcggcgaggccgagggcggggagcggcggctggggcgggtgctgagctttgggatcccggacacggcgctggggctagtgatggggtacgtggaggatccctgggaccgcgacgccatctcgctggtgtgccgacactggtgccgcgtcgacgcgctcagccgcaagcacgtcacggtcgccatggcctactccacaacacccgagcgcctgttccggcgcttccc

SEQ ID NO: 6773 - DNA, 278 bp, Zea mays
gattgagatccccagggcagctctggtggctgatgagatagcggacaggctgaattcttctccttcggaacgaacgacctgacgcagatgacctttgggtacagcagggatgatgtgggaaagttcattcccgtctatcttgctcagggcattctccaacatgaccccttcgagatgcccgtacacctaccaggtcctggaccagaggggagtgggcgagctggtgaagcttgctacagagaggggccgcaaagctaggcctaacttgaaggtgggca

SEQ ID NO: 6774 - DNA, 277 bp, Zea mays
cggacggtggtgctgacgcgtgggcggacgcgtgggtggtgctgcgtctcatgggcggcatgcagatcttcgtgaagactctgaccggcaagactatcacccttgaggtcgagtcttctgataccattgataatgtcaaggccaagatccaggacaaggagggcatccctccggaccagcagcggctcatttttgccggcaagcagctcgaggacgggcgcacgctggccgactacaacattcagaaggagagcaccctccacttggtgctgcgtct

SEQ ID NO: 6775 - DNA, 277 bp, Zea mays
gggaaacaagaatggtgcaccaaaaactgttgaagagagaatagaggaatataataaagcacgagcacgcatcttcaatggttctgtttctgcagattctgatgctgcaagtgttttgggaactctttgcactggcagagatgagtcagtaaatgttgaaccttctgttgatgaaatcaaagtcagcacgatgaacaaccgttccagagttgctgttttcaaggatactcaaaaggatcgcagtgacccagattatgatcgaaactacaaaaggtat

SEQ ID NO: 6776 - DNA, 263 bp, Zea mays
gccgagaaggacttgcagccttggattgctagagacgacgaacaaggccagaagatgtggagagtcaaccaacgtatagtgaagcttatagcggactcatgaggaaccatgacagccctgaagccttggtgatactcgctagtgcttctgaccttctacttcgtgctactgatggaatgcttgttgacggtgaagcttgtactttgccacagcttgagcttctcgaagtaaccgctcgagcagtccatcttattattgaatgg

SEQ ID NO: 6777 - DNA, 271 bp, Zea mays
gccgctcgctcctgcagaaaaacgcgaggatccggaattgtgcgacccagctgaatgccaaggacatcactgacgacgacaagcaggagctcgatgaggctctgcagagagagatccaagcaggcttcagaactgatgaaatcaggagggcacaacccaccccacaggacgaaatgcgctatgggatgagctacatccatgagactgtatggaagggcgtgcctaagttcttgcgccgtgtggatacagccctgaagaatatcggcatcaa

SEQ ID NO: 6778 - DNA, 265 bp, Zea mays
ggaaaaagttcaggcaaagcaatttgaggcactggcctcagttgaggacaagatactcagaaaaataagggacaaagaggcggaagtggagaccataaacaaaaggaactctgaactagaggaccagattaagcatttgggagtggaagttggtgcttggcagcatagggccaagtacaatgaaagcatgatcaatgcactcaagtacaacttggaacaggtttgtgctcaccagagcaaggatttcaaggaaggctgcggcgat

SEQ ID NO: 6779 - DNA, 255 bp, Zea mays
ttcgtcggccgcctcgcgtgggccgacgacgaccactccctgtacaacgccttcagcacctacggcgaggtcctcgagtcgaagatcatcctcggtcggcagacgcagaggtcccgcggcttcggcttcgtcacgttctccacggaggaggcgatgcggaacccatcgagggcatgaaccgcaaggagctggacggccgcaacatcagcgtcaaggtagcccagtcccgcagcggccgtggaggcggcggcgggg

SEQ ID NO: 6780 - DNA, 270 bp, Zea mays
ccgagaccttcgccaagaaccgcgagctggaggtgatccactgccggtgggccatgctgggcgcgctcgggtgcgtgttcccggagctgctcgcccgcaacggcgtcaagttcggcgaggcggtgtggttcaaggcgggctcccagatcttcagcgagggcgggctcgactagctcggcaacccgagcctggtccacgcgcagagcgtgctggccatctgggcgtgccaggtggtgctcatgggcgccgtcgaggggtagcgcgtcgccg

SEQ ID NO: 6781 - DNA, 267 bp, Zea mays
caaggaagtctacttcagggatatatggccctcaacagaagaaattgcgcaggttgtccaatccagtgtgctgcctgacatgttcaagggcacctatgaggctatcacaaaaggcaacccaatgtggaaccagctaactgtcccagaagcgtcactctactcatgggattccaaatccacttacattcatgagcccccttactttaaggacatgaccatgtccccacctggcccctctacagtgaaagatgcctactgcttgctgaa

SEQ ID NO: 6782 - DNA, 269 bp, Zea mays
cccgttcaaggccggcaagtaccagatgaagaagctgtgcctggagccgacgtccttcaccgtcaaggcggagggcatcgccaagaacgccccgcccgagttccagaagaccaagctcatgacccgcctcacgtacacgctggacgagatcgagggcccgctcgaggtcggctccgacggcacgctcaagttcgaggagaaggacggcatcgactacgccgccgtcaccgtgcagctcccggggggcgagcgcgtgccgttcctcttca

SEQ ID NO: 6783 - DNA, 266 bp, Zea mays
cggacgcgtggaagatgataggcatgtggctgtgaagaagctggagaatgtaaggcaagggaaggaagtgtttcaggctgagctaagtgtaattgcggacgctcaaccacatgaaccttgtgaggatatggggcttctgttcagagggatctcataggttgttggtctccgaatatgttgagaatggatcactggctaacattttgttcagtgaaggaggcaacatcttattggactgggagggaaggttcaacattgcgttaggt

SEQ ID NO: 6784 - DNA, 266 bp, Zea mays
gaacgctcagggtgaggatgtggttgccggaataagaaccccagaggaccttgacgccatgaagaacctcatgccacaggcctacgacgagcttgttgagaactgcaacatcctggagagccactataaggaaatgcaggatatcgagttcactgtccaggaaaacaggctgtggatgttgcagtgcaggacagggaaacgtacgggcaaaagtgccgtgaagatcgccgtggacatggttaacgagggccttgttgagccccgct

SEQ ID NO: 6785 - DNA, 265 bp, Zea mays
ggaggtgcttcacaatgaaggccctcattcttgtcggttgtttcggaacccgccttcggcctttgactctgagcttcccgaaccccctcgtggattttgcaaacaagcccatgattctgcaccagatcgaagctttgaaagaagttggggtcacagaggtggttttggctatcaactatcgcccagaggtaatgattaatttcttgaaggactttgaggataagcttggcatcacaattacatgctcccaagagactgagccctt

SEQ ID NO: 6786 - DNA, 266 bp, Zea mays
cacagctctcgccttctctctcccatcggcacacccgagctcgctccctccttccacgtcgaggtccgagtcctgctttgatggcgaccgacgtggctgagactcccgcgccgttggtggatgcggccccagaagcgcccgccgacgccccggcggcgcctgctgccgacgcgaaccggccaaggccaagaaggccaccgcgccgaagaagcgcgccagcccgacccacccgccgtacgccgagatggtctcggaggcgatcacgt

SEQ ID NO: 6787 - DNA, 266 bp, Zea mays
ccatggcgggccccaagaacgggacccccgaggcgaagaagaagtacgcggccatctgcgtcaccatgcccaccgccaaggtctgccacaactgagcacgcccgcgttgcatgcagctgcagggccggggggtggtatataattaatgtacgtgccacggtgttgttgtccctattgttggttcgagctttagatgcatgcctgacgtgaggccgcttaattgctttctgacggcctcggagctgtaagaatatcaagtgcactgc

SEQ ID NO: 6788 - DNA, 263 bp, Zea mays
gcctcctcgtcctccaccaccgccgtcgcggcgctccccaggaatgggcagcagcgggcgtcgtcgtcgttgttctcctcctcctcctcttcctccttcctcgtcggcaagacgctgctgaggcaggccgaggcagcccggccgtcgttcgccgtgcgcgccgggcggattccgacaggccgatctggttccccggcagcacccctccgccgtggctcgacggcagccttcccggcgacttcggctttgatccctggggcctc

SEQ ID NO: 6789 - DNA, 259 bp, Zea mays
ggaccgtggtcgcagcggaggagatagctagggaagggcaaatctgcagggcctgagagggtgaggtagagcgcgccaccagaatgcaggagcaggcaccgagctcgcggccttccagcagcgagaggtcgtccagctccgggcaccacgtggacatggaggtcaaggaagggatggagagcgacgatgagataaggagagtgccggagctgggcctggagttgccgggagcctccacgtcgggcagggaggctggccc

SEQ ID NO: 6790 - DNA, 260 bp, Zea mays
ggaaggcgcccttcgtcgtcaggaccagctccagccctccagccaagcaaggtgccgacagcagctgtggttcgcgtccaagcagtccctctcctacctcgatggcacgctgcccggcgactatagcttcgacccgctgggcctctcggacccggaggcaccgggggcttcatcgagcccaagtagctggcctacggcgaggtgatcaacggccgctacgccatgctgggcgcggtgggcgccatcgccccggagatctt

SEQ ID NO: 6791 - DNA, 258 bp, Zea mays
gtgctaccaagaacaggaaggaaacaccgccgccgccgcgccttccatgccagtactcgcggaggaaaggaacaccagccagcgccatggtcacgtcgacggccgccgccgccgtgctggccccgccgtccgtggccgggcttcggctggcgccgtctccccggacgcgcgtggcgttccgcgcggcgcgggcgcggcggtccgtggcggcgcgcgcggactgaggccgtcggtggtgatcagcctgagcacgggggt

SEQ ID NO: 6792 - DNA, 251 bp, Zea mays
cccctgcctgcaggctcctgcaactgcaatgtcggcgctcgggacgctctccggctgggccgccggtgtctccggcctcatccgcctccgccgtcgggtggcccccgcactcactgcgccgtcgcaccacgccgctgggacgttgaagtgcgccgccttgcccggtgccggcccggtcgtctggagacgccagctccggccgtcgctcctcctgcccgccacactgctcgggtcgtcgtcggaaggcgcca

SEQ ID NO: 6793 - DNA, 266 bp, Zea mays
cccacgcgtccgcccacgcgtccgccaagtactccgtcgcggacagctccatggacctgggcagctgcccgttctccgaggtcgaagtgggcgggggaagtctgcgagaaggtgacgagtcggagaaggagaggccactggttctgcgcaacaaggcgccgaggtggcacgagcagctgcagtgctggtgcctcaactttcgcgggcgcgtcaccgtggcctcggtcaagaacttccagctgatagctcctgcaaagacgcagccg

SEQ ID NO: 6794 - DNA, 276 bp, Zea mays
cacacactcgattccgctgctctctccctcttcctctcccccgcggcggagcataaaccctaggcctcgccgtcgtcggaagcgccgccgcgatgtcgcactttggaaggacgggtccgccggacatccgcgacaccttctcgctgctcgtcctcaacatcagcttccgaaccacggccgacgaccttttcccgctcttcgagcgctgcggcaaggtcgtcgacgtcttcatcccgagggaccgcagaccggggactcgaggggttttgcgttcgt

SEQ ID NO: 6795 - DNA, 276 bp, Zea mays
ctacacgatcgcgagcgcaacacgtacgttgtcggaagctcaagttagaagaagcaccagtgcctgatcgatggcggcccaggctctcctctccggccggcagctgctgggccgccccgtgcagtcggccgtctctaggtcgtcggcgaggaaggcgcccttcgtcgtcagggccagctccagccctccagccaagcaaggtgccgacaggagcgtgtggttcgcgtccaagcagtccctctcctacctcgatggcacgctgcccggcgactatgg

SEQ ID NO: 6796 - DNA, 281 bp, Zea mays
ccagcactgaacactctgactgcttcagctcaggtacgctagctcacgcttgaatcacaatggatcctaccaagttccgtccgtccagtagccacgacatgacggtgacgacgacgaacgctggcgctcctgtgtggaacgacaacgaggcgctgactgtggggcctcgcggtcccatcctgctggaggactaccacctgatttagaaggtggcgcacttcgcgcgggacgcatcccggagcgcgtggtgcactcctcgtggtctccgccaagggcttctt

SEQ ID NO: 6797 - DNA, 273 bp, Zea mays
caacactggtgttacatttgatgatgttgctggtgtcgatgaagcgaacaagacttcatggaagtggttgagttcttgaagaaacccgaaaggttcactgctgttggtgctcgcattcctaagggtgttctgcttgtcggtcctcctgggacgggtaaaactttgcttgccaaggcaattgcaggagaggctggcgtgccatttttctcaatttcaggttctgaatttgtggagatgtttgttggtgttggagcttccagagttcgtgacctt

SEQ ID NO: 6798 - DNA, 276 bp, Zea mays
ctctcttcgccgtccgaagctccgcacccaatctaatcgacacctcaccgagatgggccgcaagttcttcgtcggtggcaactggaaatgcaatggaaccacagatcaggtcgagaagattgtcaaaaccctgaatgaaggacaggttcccccttcagatgttgtcgaggtcgttgtcagccctccttatgtcttccttcctgtggtcaagagccagctgcgccaagagttccatgttgctgctcagaactgctgggtgaagaagggaggtgcttt

SEQ ID NO: 6799 - DNA, 276 bp, Zea mays
cggacgcgtggcgccgcgctcggccgcacccgcgacgcgctccgcttcgcacgcttcgctgtgaggtacggcaagagctacgatagcgcggcggactgtccacaagcggttcaggatcttctccgagagtctccagctcgtccgctccagcaatcggaaaggcctctcctaccgcctcggcatcaaccgcttcgcgtacatgagctgggaggagttccgtgcgacccggctcggcgcagccagaactgctccgccacggttaccggcaaccaccgg

SEQ ID NO: 6800 - DNA, 273 bp, Zea mays
cgggagattctgtgcgaggaggtgctcggcaagatgggcgcgccacccaagaccgacgcgccggtcgtcaccccgcaggagctggcggaggccgacggcgtcgtgttcgggttccccacgcggttcggcatgatggcggcgcggatgaaggcgcttcttcgacgcgaccggcgggctgtggcgcgagagagcctggccgggaacccgccggcctgttcttcagcagcggctcccatggtggcggccaggagaccacggcggtgacggctgtga

SEQ ID NO: 6801 - DNA, 272 bp, Zea mays
gatcgacgccatcaccacgcacctcggcatcgggtcgtaccgcgagtggtccgaggacaagatgcaggagtggctgctgtcggagctgctaggcaagctcccgctgctgcccccggaccttccccagaccgacgagatcgccgacgtcatcggcgcgttccacgtcctcgcggactcccgcccgacagcttcggcccctacatcatctccatggcgacggccccctcggacgtgctcgccgtagagctcctgcagcgcgagttcggcgtgcg

SEQ ID NO: 6802 - DNA, 272 bp, Zea mays
gcgaactcgcgctcactgccgcgctcgtctgccgctctggcggtcccgctgccgtcgtcgtcgtcgttccggccgccgctcaggccgtcccgttcgtccgtcgtcctcctcccctgcacggaaggcccttagcctcctccactccttacgcacagtcccagaagctgcagcttggcctcgacaagctcggaaagatcaggccatgcccgtccaccaacccggggtgcgtgtccaccaacccgctgggatcctccggctcgttcgcctcgcca

SEQ ID NO: 6803 - DNA, 273 bp, Zea mays
cccacgcgtccgagcacgtccagccgttcctccccagcacgcgcatcacctgcatcaccgtgggcaacgaggtgctctccggcaaggacacgaccgccatgcagagcctcctcccggccatgcagaccgtgtaccaggccgtggtcgccctgggcctcggcggccaggtgaacgtctcgacggcgcactcggtcaacatcctggccagcagctacccgccgtcgtcgggcgccttccgggaggagctcgggcagtacatccagccgatcctca

SEQ ID NO: 6804 - DNA, 266 bp, Zea mays
tgcatagataaacaggagcgagacaagtggcacggcggcgtccgtgacggcaccaacgtcgtgctctggaagtggtgcgagggcgacaaccagcgctggaagatccagccctactactgaaccaacggatgatatgaccatcgcgcccatcgatcgtgcacatgcatgcatacgtactagcagaataacaggggtcttatctcccgaggcgtcttttgcatgcatgccagcagttgcatagataaacaggagcgagacaaagggtg

SEQ ID NO: 6805 - DNA, 269 bp, Zea mays
ctcgccacggggatcgactacgcctgcaagtccatctccaagcgcaagtcatcaccaaggaggacgtcgacgacgtgcgccgcgagatccagatcatgcagcagctatccggccacaagaacgtcgtcgctatcaagggcgcgtacgaggaccaggtctacgtccacatcgtcatggagctctgtgccgggggcgagctcttcgaccggatcatacagcgcggacactacagcgagcgcaaggccgccgcgctcacaaggatcatcgtc

SEQ ID NO: 6806 - DNA, 268 bp, Zea mays
ccagccggccgcgcacccggagagctgcgacccgcccacggagttcctggcgttcagcagcagcttccacggccggaccatgggcgccgtagccgctcaccagcaagtcgcagtaccgggagcccttcgcgcccgtcatgcctggggtgaccttcgtggattacggcgatctggaggcggccaagaagttcgtacggtccggcagggtcgctgctgtcttcgtagaccccgtacagtgagggtgtggttcacagtgtgacaccaggga

SEQ ID NO: 6807 - DNA, 270 bp, Zea mays
gccagggcgttccgcgtcgacgccggcgccgccaggatcacgtgctccctccagtccgacgtcaggcacgtcgccagcaagtgcgtcgacgccgccaagctcgccggcttcgcgctcgccacctcggctctcctcgtctcgggcgcgacgcggagggcacgcccaagaggctgacctacgacgagatccagagcaagacgtacctggaggtgaagggcacgggcacggcgaaccagtgcccgaccatcgacggcggcgtggactcgttcc

SEQ ID NO: 6808 - DNA, 280 bp, Zea mays
cacagactggattccgctgctctctccctcttcctctcccccgcggcggagcatggaaccctaggcctcgccgtcgtcgtgaagcgccgccgcggtgtcgcactttggaaggacgggtccgccggacatccgcgacaccttctcgctgctcgtcctcatcatcagcttccgagaccacggccgacgaccttttggcgctcttcgagcggtgcggcaaggtcgtcgacgtgttcatcccgagggaccgcatgaccggggactcgaggggttttgcgttcgt

SEQ ID NO: 6809 - DNA, 265 bp, Zea mays
acgccatggcccttctcaagggtgctttggattattcagatttcaaggatgttgatatggttattgaggctgttattgagaagattcctttgaagcaatcaatatttgctgacattgagaaaatctgtccaaaacattgcatacttgcaacaaacacatccaccattgatttgaatgttgttggcaagaagacaaattctcaagatagaattataggggctcactttttcagccctgctcatattatgcccttgcttgaaattgt

SEQ ID NO: 6810 - DNA, 269 bp, Zea mays
cctcacttctgcgccgccacccactacaggtaaggcagacgaggagggcaggatgtcgcaccgtaagttcgagaacccgacgcatggctccctcagcttccttcccaggaagcgcacctcgcgctacctcggcaaggtgaagtcatttcccagggatgaccccaagaagccttgccatctcactgccttccttggctacaaggctggcatgactcacattgtccgtgaggttgagaagccaggatccaaactccataagaaggaaactt

SEQ ID NO: 6811 - DNA, 268 bp, Zea mays
gcaagcaagcagcgagtacatacatactaggcagccaggcagccatggcgcccaccgtgatgatggcctcgtcggccaccgccgtcgctccgttccaggggctcaagtccaccgccagcctccccatcgcccgccgctcctccagaagcctcggcaacgtcagcaacggcggaaggatccggtgcatgcaggtgtggccggcctacggcaacaagaagttcgagacgctgtcgtacctgccgccgctgtcgacggacgacctgctgaa

SEQ ID NO: 6812 - DNA, 270 bp, Zea mays
cccaagtttagcttagctccccttgtaggacggttgtctgagcttcttggcattcaggtgcaaaaagccgacgatgttattggccctgaagttgagaagctggtggcggccttgcccaacggtggggttctgctgcttgagaacgtaagattctacaaggaagaggagaagaatgacccagagtttgcacagaagcttgcctccctagcagatctttatgttaacgatgcatttggaacagcccacagggcgcatgcatcgaccgaggga

SEQ ID NO: 6813 - DNA, 135 bp, Zea mays
ggcaagggtatccttgctgctgatgagtccactggcaccattggcaagcgcctttccagcatcaatgtcgagaacgttgaggagaaccgccgtgccctccgtgagctcctattctgctgccctggtgctctccag

SEQ ID NO: 6814 - DNA, 131 bp, Zea mays
gcaatgtggtgaggctggtgccgccgctcatcgtctcggagaaggagctggagcatgccgcggatgtcataagggactgtctaccggcgctcgatgtcgttgctgctgcctaatgtatatggtggtgcaat

SEQ ID NO: 6815 - DNA, 130 bp, Zea mays
ggcaatttctgcatccagttactcctatgtttcattgcttcagcacttccttcctataatgaatcccggtggtgctagcatctctctaacatacattgcatctgaataggcgattcctgggtatggtggt

SEQ ID NO: 6816 - DNA, 133 bp, Zea mays
cccacgcgtccgcccacgcgtccgatttcttctctctctgctcctccgcctccgcctgatccatccaagacagggatcgccatgtcggactcggaggagcaccacttcgaatcgaaggccgacgctggggcgt

SEQ ID NO: 6817 - DNA, 132 bp, Zea mays
gaccctgaccggcaagactatcaccctcgaggtggagtcttcagacaccatcgacaacgtcaaggccaagatccaggacaaggagggcattcccccagaccagcagcggctcatctttgctggaaagcagct

SEQ ID NO: 6818 - DNA, 127 bp, Zea mays
cggacgcgtgggcggacgcgtgggcggacgcgtgggatggggaagaacacgctcatcaggcgttgcatcaaggtgtacgccgagaagaccggtaaccacacctttgacccgctcatcgacctcctgg

SEQ ID NO: 6819 - DNA, 127 bp, Zea mays
gaaggttgttatctctgccccaagcaaagatgcacccatgtttgttgttggtgtcaatgaggacaagtacacctcggatgttaacattgtttccaatgctagctgcaccacaaactgccttgctccc

SEQ ID NO: 6820 - DNA, 130 bp, Zea mays
gcagaccctacaaacattcttcggttcctcacatgaatactcaggcaacacagaccatgggtatatcttgttttatgaggggcttggtgggaagagttagatgggtttattcatcttccttgtttctttt

SEQ ID NO: 6821 - DNA, 122 bp, Zea mays
cgctgagcccctcggaagtccctaaaagagactggttcccctctgacttcatctttggtgccgccacttcagcgtaccaaattgaaggtggatggaacgaggatggaaagaagccaagcaca

SEQ ID NO: 6822 - DNA, 284 bp, Zea mays
aatttctgcatctcttatgaagatagcaaacgacatacgtttgctaggaagtggtcctcggtgtggtcttggtgaactaatcctaccagaaaatgagcctgggagcagcattatgcctgggaaagttaatccaacccagtgtgaggctctgacaatggtttgtgcacaggttaacggtaatcatgttggtgttacaattggtggtgccaatgggcattttgaactgaatgtttttaagccaatgatcgcagccggattacttcgatcattgaggttgttagggg

SEQ ID NO: 6823 - DNA, 288 bp, Zea mays
gtgagctacttcgagtgggtacaaaacatccaggggttcatgtgggacgaagagaaggtaaacgcggactgcggacgtacatgacgcgcgccttcggggacgtgaagcagatgtgccggagccacagctgcgacctccgcatgggcgccttcacgcttggcgtcaaccgcgtcgcgcgcgccaccgtcctcaggggatgggaagcatgacctccctccgtgtcgtccgtgtgcccctccctgttgtatcctcttggtcttgggcccttgtttttctttggttaattat

SEQ ID NO: 6824 - DNA, 228 bp, Zea mays
ctccttgtctgagcaggagcttgttgactgtgacacttcatacaaccaggggtgcaatggaggtttgatggactatgcgtttgagttcatcatcaacaacggcggaatcgacaccgaggaggattacccttacaagggcacggacggacggtgtgatgtcaacaggaaaaacgccaaggttgttactatcgacagctatgaagatgtaccagcgaacagtgagaaaag

SEQ ID NO: 6825 - DNA, 288 bp, Zea mays
ctcctcgcgattccaatccacgcacgcctcctccgcttccgcctcgctcaggcttatagtcagtgatggaacacaaggaggcgggctgccagcagccggagggcccaatcctatgcatcaataactgcggcttcttcggcagtgctgcgacgatgaacatgtgctccaagtgccacaaggagatgataacgaagcaggagcaggcccagctggctgcctcctccatcgatagcattgtcaatggcggtgacggcgggaaaggacctgtaattgctgcatctgtaaatg

SEQ ID NO: 6826 - DNA, 285 bp, Zea mays
cccacgcgtccgagcgctttcgaagcaggccttggttgatcaacttggactggaattgataaaggaccgggaggtttgttgctacatgatctcgtgtaaggattctgtgaacatagacgtcgtcatcgactggcttatcaagcactctagaacagcgaagtaggctttctgtgtgtttgtatcgcttgatgcacggtgttttatcttttgtgaatctgcgcttcccagaagcctggttccttggtccccatgttaaaagcggccaccttgtaatttatggtttct

SEQ ID NO: 6827 - DNA, 287 bp, Zea mays
ggacgggcgcacgctggccgactacaacattcagaaggagagcaccctccacttggtgctgcgtctcagaggtggcatgcagatcttcgtgaagacacttactggcaagacgatcacccttgaggtggagtcctcagacaccattgacaacgtcaaggccaagatccaggacaaggagggcattccaccggaccagcagcggctgatcttcgccggcaagcagctggaggatggtcgcaccttggctgactacaacatccagaaggagagcaccctccacctggtgc

SEQ ID NO: 6828 - DNA, 281 bp, Zea mays
cggacggtgggtgcctagtgggaagattgaaatggtcaagaagattaggccaggggtcaagctgttcctgtatgattttgacttgaagcttctgtatggcgtgtacaatgcatcatcacatggtgggctgaaccttgtccatgaagcatttaatgggaagttccctgcacaggttaagtttaagattgataaagattgccgtcctctccctgagagtagtctcaagcaagccatcaaggataattacaatgcaaatagcatatttgatccagagctcacca

SEQ ID NO: 6829 - DNA, 280 bp, Zea mays
agcacagcgacatcacactcaaggactccaagacccttctcttcggtgacaagccggtcaccgtctttggcatcaggaaccctgaggaaatcccgtggggtgaggctggcgctgagtatgtcgtggagtccaccggcgtcttcactgacaaggacaaggctgctgcacatctcaagggtggtgccaagaaggttgttatctctgccccaagcaaagacgcacccatgtttgttgttggtgtcaatgaggacaagtacacctcggatgttaacattgtttc

SEQ ID NO: 6830 - DNA, 280 bp, Zea mays
aataggagatgttgttctggaaggacggcggcggtactggtggcggcaacggacgggaccttagcggcgggccgccctgcgccaggttcgtgtactcgtcgttggcgactcaggtgttggcaaatcttcattggtgcatctcttactgaaagattctgcagtggctcgaccagcccaaacaattgggtgtgcagttggtgttaaacatattacttacagtagcccagggagttcatctaatagcgtcaagggtgatgctgaaaggaacttctttgttgag

SEQ ID NO: 6831 - DNA, 275 bp, Zea mays
cttcaccaagttctccggtgggctcttggttctgtcgagatcttcttcagtcggcactgcccgctgtggtacggttacggtggcggccgtctgaaatggctccagaggctctcctacatcaacaccatcgtgtacccgttcacttctcttcctctcgttgcctactgttgcctgcctgccatttgcctgctcacaggaaagttcattatacctacgctgtccaacgctgcaacgatatggtttcttggcctcttcatgtccatcatcgtgacgag

SEQ ID NO: 6832 - DNA, 250 bp, Zea mays
aggctacccctctccctcgaggcctttgccggcgaagagcgcccagtcgcccaccaggatgaagtttgttgctgcctacctgcttgctgtcctcgctgggaactccagcccctctgccgaggacttgacagccattctggagtcagttggctgtgaagttgacaatgaaaagatggaactccttctgtcccaactgagcggtaaggacattaccgagctcattgctgctggcagggagaagtttgcttca

SEQ ID NO: 6833 - DNA, 274 bp, Zea mays
ttatcttgaaagaatttgctccatctattccagagaagaacgttacttgcctgacccgtctggaccacaacagggctcttggccagatttctgagagacttaatgtccaagttagtgatgtgaagaatgttatcatctggggtaaccactcgtcctctcagtaccctgatgttaaccatgccacagtgaagacttccactggggagaagcctgttcgtgagcttgtctctgatgacgagtggcttaatggtgaattcatcacaactgtccaaca

SEQ ID NO: 6834 - DNA, 272 bp, Zea mays
cccacgcgtccgctcttcctcctctctctactctccaagttctcttctccgtcgaccgctctacacgtctcttgtcgacctggacaccgatgtggaagaaggaagcagtcagcagatggatccatggatcagcagccagccttctctgagccttgacctgcgcgtcggcctgccgccgctcagcctccaccaccaggcgccggtggccgtcgccttgcccaggctcaagctgctcgtcgaggagaacttcctcctgccgcctccaaagagag

SEQ ID NO: 6835 - DNA, 277 bp, Zea mays
caacaagccagtaccctcccactcccagtcccatctcgacgacatggccgcagccgcagggccatcaagctctgtgaaggagacgctcccgcaggcactcggctccacctcccagccacctcccgtcttcgatggcaccaccaggctgtacatctgctacttctgcccgttcgctcagcgcgcctgggtcaccaggaacttgaagggtttgcaggacaagatggagctggtggccatcgatctgcaggacaaaccggcttggtacaaggacaaggtt

SEQ ID NO: 6836 - DNA, 108 bp, Zea mays
gactcggccaggaagaccgccgaggcgatcgacatcctgaagctcatgtcgtccacctacatcgaggcgctgtgccaggccgtggacctgcaccacctcgaggagaac

SEQ ID NO: 6837 - DNA, 267 bp, Zea mays
aaaatcgtctgttcttccttcgctgcgaacagtgtggatcttcaaggtccgttgctccaatcaaagctggattcgttgctcaagtcggtcgtcggaaggcatgagcatctatatgtggatggtgttggggtcaataccaattcaacaatagttgattatttgttgactagagattctgcggcgcaatgttgagcaagatatatcaacgatgccctttgtctgcattcaaaggattcatctattgatgtcgcaagcttgtgacaactg

SEQ ID NO: 6838 - DNA, 267 bp, Zea mays
cagttacagaaagctcatacaagagatttctagtagatacaccaatcctgtttgtccccccaaagactggtgataatacagttccaccgtgtgggtttgggtcttttcatcagcagtacaggattgatggaaaacttgtcgctgttggtgtagttgatatccttcctaaatgtttgtcaagcaagtacttgttctgggatcctgaccttcctttcttatctcttggaaagtatactgctctgaaggagatagattggggcaagacga

SEQ ID NO: 6839 - DNA, 265 bp, Zea mays
ctcaactcccaggggtccctgttttttttctcgatctggaagcgccgcagtagcagccatggacgtgagcggacaggcggtaaggcgaagaagggcgcggcggggcgcaaggccggcgggccgacgaagaagtcggtgtcgcggtcctccaggtccgggctgcagttccccgtcagccgcgtcgggcggtacctcaaaaagggccggtacgcgcacgtgtagggcacgggtgcccccgtctacctcggcgccgtcctggagtacc

SEQ ID NO: 6840 - DNA, 268 bp, Zea mays
agccggctgctgcggtcgcgccgacgacccctgaggtggcggcgcccgatgccggagccgctacggaggcgaagggtccgcacaagcttcaccggcagtggaccttctggtacgacatccagacgaagaccaagtccggggctgcgtggggcacctccctccaaaaggcctacaccttcgacaccgttgaggagttctggagcatgtatgatcagatttttcgtccaagcaagttgtctgggagtgctgattttcatctattcaaggc

SEQ ID NO: 6841 - DNA, 262 bp, Zea mays
cccacgcgtccgctccagtggttagggatacagctcatggagctcggcggtaccgcaatgtcgctgctgctgctggtgctcgtgctcgccgcgtcgccattgcagcaggccagggcggttggcggcggcaggccgcgggtgccggccatcctggtgttcggcgactccatcgtggacacgggcaacaacaacgccgtcctcacgctcaccaagtccagcttcaggccatacggcaaggacctcaacggcggcgtccccaccg

SEQ ID NO: 6842 - DNA, 265 bp, Zea mays
aatgataacctcccaccaaatgtcatcaggcaattggctaaagaactgaagaatcttaatgagtcacctgcagaaggaattaatgtgactgtcaatgatgatgacttcactactatttttgctgatattgaaggccctgctggaactccatatgagaatggagtgttcaggatgaagctattattgtctcatgattttcctcaatctcccccaaaaggattcttcttgacaaaaattttccatccaaacatagctactagtggtg

SEQ ID NO: 6843 - DNA, 261 bp, Zea mays
cccacgcgtccgaccatgaacaaggttggtggcttcctgcagcggatggacctgtgccgcaaatacgcctttggcaagatgcttgtggtaggctctgagccccctttcaaggtcaaggggctctggctcttcaggggctcagaaattcccaagtttgtcatggacgaatctatgacatggagctttatgagtggaccaaggttgacctctctgatgaggcacagaaggagcgggtcaatgccatgattgaggaccaggagc

SEQ ID NO: 6844 - DNA, 207 bp, Zea mays
gtcgaagcaaagcaggagtgagaagaagagccgcaaggccatgctgaagcttggcatgaagcccatcactggtgtcagccgggtcactgtgaagaaaagcaagaatatgctttttgtcatctcgaagccagatgtgttcaagagcccaaactcggacacctatgtcatattcggcgaggcgaagatcgaggacctcagctcccagct

SEQ ID NO: 6845 - DNA, 260 bp, Zea mays
gtgatgctgtgttttcattcattcgaaagatggaaccgaaaaaagttatggatactatgttagtttcaagagtcaagatattatacatcagatctttgcttgctaaatcacctgaactacagtccatcaaggtctctccagttgagcgtttcttggagaaatcaaatactggtcgaagtagaagttctagtaggggaagtagtcctggcagatctcctgttcaccaccatggttatggttcccgaactgcgcttgttgat

SEQ ID NO: 6846 - DNA, 262 bp, Zea mays
gaaattgatttggttttcaataaagagtgtgagttgtcacacacatagaaaactacctgtgtatttttctttggttacaaggttgagcaaccaatcgaggaagatgaataatggatcttgattctgaagatgaagagaaggagctaaacattccagtaatcaaggaaaatggcaaaggtgatgggaaggcagttgctgcagcttcaaaatcaagtctcgggcttgaaaaaaagcaaggatgagtatgagtctgatgattctg

SEQ ID NO: 6847 - DNA, 261 bp, Zea mays
  unsure (1)..(261): unsure at all n locations
aacgcatcgccgcgccctacgacctcgtcatgcagaccaagcagctgggccgcctccccgtcgtgcagttcgccgcggggggtgtcgccacgcccgccgacgccgcgctcatgatgcagctcggatgcgacggcgtcttcgtcggctcgggcatcttcaagagcggcgaccccgcgcgccacgnccgcaccatcgtccaggcagtcacccactacagcgaccccaccatcctgaccgacgtcagcacggggctcggggagg

SEQ ID NO: 6848 - DNA, 263 bp, Zea mays
ggtcctggcaaatggactggtcagccccttgtacaatgcacttcccacatgtgcccgataagagtccactggcatgtgaagctcaactacaaggattactggagagtgaaaatcactatcacaaacttcaacttccgcatgaattacacgcagtggaacttagtagctcagcatccaaactttgataatatcactcagttgttcagcttcaactacaaaccacttactccatatggtggtggcataaatgatacggcaatgtt

SEQ ID NO: 6849 - DNA, 291 bp, Zea mays
gagagccatgaagagaaggcacacaagctgatgatgcaagccaaaatcaacgaaaccaaggatctcatgaagaagagggctaatgaacttgacaaaatgaggatggaaagaggcaagcttgacaaaggaggatactcatcaatatctggtccacgcgtgattgaaaaaacgtttagtgacatgagcatcagtggttctggatttggtagtgggtctggattaggtggactgagcactgacatggactcatttgccagcaagcccaaaggtcgtccatctacagcagctact

SEQ ID NO: 6850 - DNA, 271 bp, Zea mays
caaggatgatagtggatctcctactgatgactcaggtgatgaggaatcagatgctagtgatagtggtggtgaaaaggagaaatcatccaagaaggaagcaagcagttcaaagccagttcagaaaagaaagcataaggccagggatgacgaaggacaagagaagaaaaagccaaagaagaaaaaagatccgaatgctccgaaacgaagcatgaccccgttcatgtaattctcaatggctgagcgagggaacatgaagagcaagaacccagat

SEQ ID NO: 6851 - DNA, 280 bp, Zea mays
cccacgcgtccggtcaattgaaggatggattgtgttggtcacaggagttcacgaagaagctcaagaagatgaccttcaaaatgctttccaagaatttgggcaggtcaaaaacctgcatttgaatttggaccgccgtaccggatttgtcaaggggtacgctttgattgaatacgagaagtttgaagaagctcaggctgcaataaaagaactggatggagctgagctttataaacaaagaatgagtgttgattgggcatttagcagtggccctgctaaacgc

SEQ ID NO: 6852 - DNA, 280 bp, Zea mays
cccacgcgtccgcccacgcgtccgcccacgcgtccgtctgccaagactggtagaggccttgaacaggtattgcctgctgttattgaacgcataccttccccgcccgggaaatgtgatgcacctgtacggatgttgcttttggattcctactatgatgaatacagaggagtgatttgccatgttgctgttgttgatggtgctctgcgtaaaggtgataagattgcttcggctgcaactagccgtgcatatgaagttcttgacgttggcattatgcaccctg

SEQ ID NO: 6853 - DNA, 279 bp, Zea mays
agaagcaaaccaaggagaaaactccgaaaagcagcagcaagagcaataaagctggcccaaaaccgccacgccagccagaacccaactcaaggggttcgaagatgccacctccgaagatgaggatgacagcggaggcgaggtagaggaggaagaggaagatcacgaaaacacgctgtgtggttcttgtggtgacaactacggacaggatgagttctggatatgctgcgatgcgtgcgagacttggttccatggcaagtgtgtcaagatcactcctgccaa

SEQ ID NO: 6854 - DNA, 290 bp, Zea mays
ctagacattgcaaggtctttgcaaaatgaagccacaaaacaaaagaccgatttattaaaggaagttgaaagtattagaatggagcttcaacgtgcaagggaggaccgtgacactaaatctgctcaagtagattctttgctggttgatattggaacatacaaagaaatgactggaaaatccgtcattgagttagatagcgccatggcaaaaacctctgccctagaggaaacatgttcgtctcaaaggaagatgatagagacattggaaattaagcttgcagctgccaatga

SEQ ID NO: 6855 - DNA, 286 bp, Zea mays
ctgacgcgtgggcggacgcgtgggtgctggaagaggtctcgatcctcccctcgaagcgcctccgcaacaaggttgccggcttcaccacccacctgatgcgccgcatccagcagggccccgtccgtggcatctcgctcaagctgcaggaggaggagcgggacgccggatggacttcgtcccggagaagtcagcgctcgaggtcgaagagatccgcgtcgacaaggagaccatggagatgctcgcggcactcggcatggccgatctcccgggcgtagagcgccaggct

SEQ ID NO: 6856 - DNA, 282 bp, Zea mays
ccagccaaccgcatccagtccacccccatccccctcgaccccgacaaacccgacccgatggcgcccaaggccgagaagaagccagcggagaagaagccggcggccgaggagaaggcggagaagacgaccgcacgtaagaagcccaagtccgagaagcgcctgccggcctcgaagtcctccggcaaggagggcggcgagaagaaggggaagaagaaggccaagaagagcgtggagacctacaaaatctacatcttcaaggtcctgaagcaggtgcaccccgac

SEQ ID NO: 6857 - DNA, 278 bp, Zea mays
gctgaatgctctgtcagaagaaatcgacctactcaattccaagatcgacaagctatccagtgagagaaatgagctattcgaaaagaatgagcagaaagaaaaggaattagctggaattagcgaaaaggacatgcaattgcaagacaaaactgctgagattacttcactaaataaagagcttgtattcctcaaggaccaagtgaagatgcatttggacgaactgcacagtttaaaacgtttgaagaacgagagggaggaaacaattggaaaactgcaaa

SEQ ID NO: 6858 - DNA, 273 bp, Zea mays
cgaggaaccccagggtacatggaccccgaatatgtggttactcaagagctgacggagaagagtgatatatacagctacggggtgcttcttctggagcttgtgaccggacgtagagcaatccaggacaggactaacttggtggagtgggcacagtcgcacctctcgtcgggagcggtctctcctgaacttgtagacccgaggatcaggggcgctgttgacgtggaccatcgccggccaccagctcaccgtcgttgacgtcgacgcggtctacat

SEQ ID NO: 6859 - DNA, 276 bp, Zea mays
acctcggcggcgccaaggtcgccttctgcggcgccatccagtacgccaacctcgtcggcgtcgccatcggctacaccatcgcctcctccatcagcatgcaggccgtcagcagggccgtggtgcttccacaagcgtgggcacgccgtcccctgcaagagctccagcaacccctacatgatactcttcggcgccgtccagatcctcttctcccagataccggacttcgaccagatttggtggctctccatcgtcgccgcagtcatgtccttcagctac

SEQ ID NO: 6860 - DNA, 273 bp, Zea mays
atggaagaaggctaagtatgctggtcgctaccgcattactgattcagattcattagatgctgcaatggaggcagctggccgaatacggctaactatagaagcgaacgtgtctcctggaccaccaatgttaaatctccgtaggcatggtgttaatggccgttggcatgaaatctctgataatgttgcaagtggaaatttccttggtgctaagaggcgaggggttgttggtggcattgattatggattcaccggtgaagttaaaaaaatagatgt

SEQ ID NO: 6861 - DNA, 273 bp, Zea mays
acaaaccacacaccccacctaccccggccggaccggcaggcagcacagcatggacctcgccctcctagagaaggcctgctgggctgttcgccgcggctgtggtggccatcgccgtggccaagctgaccggcaagcggtaccgcctcccaccggggcccccgggcgcccccgtggtgggaaactggctgcaggtgggcgacgacctgaaccaccgcaacctgatggccatggcgaacgggttcggcgacatcttcctgctgcgcatgggcgtgc

SEQ ID NO: 6862 - DNA, 275 bp, Zea mays
tccatggaggaaggccgcaacaggctgttccgggagctcaccgacatcaacgcgggactcctcggagggttccacatccaggactacttccctagcctgggccggatcgagctcgtcaggaaggtggcgtgcgccaagaccaggcgcgtcaggaagcgctgggacgacctcctcgacaagctcatcgacgaccatgcggccaggatggcaacccatcaggacgaggacgacgataaggacttcatatacgtcttgctgtctcctcagaaggagta

SEQ ID NO: 6863 - DNA, 274 bp, Zea mays
aacgcagaacgccgccggcccgtcgtgcactcgtgtttcccttcctccacttgccttcgtgttcgtgattcgtgatttcgccgccggaaagccgagggagagggagcgatatggggttcgtcggagacacgatggagtcgatccgctccatgcagatccgccaagtgctcatgcagatcatcagcctcggtatgattgttacctctgcattaatcatatggaagggtttgatagttttcacggggagcgagtcaccagttgtagtggtgctctc

SEQ ID NO: 6864 - DNA, 275 bp, Zea mays
cccacgcgtccgcccacgcgtccgctcctcctcctccctgttcctggacgccggctccggcgccggctcctcatcgtccgcgggagactgaagtggtgaacgcggaagaaggttgtcattttgctaagttaaagttagatcattggagcaatgccgccccataagatcgagacggggcaccaagatgtggtgcatgatgtcgccatggattactatggcaagcgcctagctacatcctcctctgataatacaataaagatcattggcgtaagtgg

SEQ ID NO: 6865 - DNA, 278 bp, Zea mays
gacacaacacaactcgtaggcagcgagcgtctctcctcttcctctcccacgcaccgcgccaaggaaggcagagagagatcgccgctcctcttctctccgtcggtggtgcggttgaccgccctcctcgagcgagatctcgctgcagtccctcgagatctggtcacagatctatccgacaagatggtgaagatctgctgcatcggtgctggctatgtcggtggcccaaccatggcggtcattgccctcaagtgcccagacattgaggttgtcgttgttga

SEQ ID NO: 6866 - DNA, 271 bp, Zea mays
aggcacccccatctaaagcttgaagggctagatgatcaggtcttacaatggtgtgtctgccggcttgaggcatggtttgctgcagatgcagatgaaatatctctgaagaactgggatcaggagcgtgttcttactggtggacatggactgatggtaaatgggtactatcctgttattgaagctcttgctcaaggtcttgacatcaggcttaaccaaagggtcaccgaaattacccgccagcacaatggagtcaaggtcactactgaagatg

SEQ ID NO: 6867 - DNA, 267 bp, Zea mays
gttgatgctgtcttccagaaggatgacatgattgacatcattggtgtgaccaaaggtaaaggttatgagggtgtggtcactcgttggggtgtcacccgccttccccgcaaaacccacaggggtctccgcaaggttgcttgtatcggtgcatggcatccggctagggtctcgtatacggttgcccgtgctggtcagaatgggtaccaccaccgcactgagatgaacaagaaggtctaccagatcggcaaggctggacaagagacccac

SEQ ID NO: 6868 - DNA, 266 bp, Zea mays
gtttcaggcttccacgaatctccccgccgccctcaattcccctcggcgccgcgcctcctcccctcgcttcggtcctcggttagttaaccatccaggttctgtcaagatgtctgatagccatgagactgacaggaacattgagatttggaaaattaagaaactgatcaaggcattggaatcagccagaggcaatggcacaagcatgatctctctaatcatgcctccacgtgatcaggttgctcgagtggctaagatgttaggtgatg

SEQ ID NO: 6869 - DNA, 267 bp, Zea mays
attggaatggcgagtacagcatgctttgtaattgtcagtaagaatgatatcccaatctacgaggcagaagttggatctgcacccaaaaaaagaggatttgtcttatcaccatcagtttatcctgcatgctgcgttagatgttgttcaggacctagcatggaccacaaataatgcaatgtccctgaagtcagttgatagattcaatgaccttgtggtgtctgtttatgtaactgctggtcataccagattcatgttgcttcatgactc

SEQ ID NO: 6870 - DNA, 262 bp, Zea mays
atcaggacaggcatgggacttatgacgaatagagcagaaattcgaattcagtttcgccatgtccctggtaatatctaccgtgaacgctttggccatgacatagatctcgacacaaacgagctggttctacgcgatcaacctgaagaagcaatcctgttgaaagtcaacaacaaggtcccagggcttgggctccagctggatgcttcagaactgaacctgctttaccgggataggtacaacaccgaggtaccagattcgtatg

SEQ ID NO: 6871 - DNA, 275 bp, Zea mays
cccacgcgtccggcgaccgctacgctactgagctcctccttcgccatgcccgccgccgcccgtcacgctcctccccttcctccgcctcattgagcttcgccacgtcgcagctcgccggcctctccctctccgccggcgttgcaactccaaccgccgtcgccctcctccccaagaggcagcagctccagcccattgtcgcgcggcgtgtgtgcccgttcacggacaagaagacgaaccgggcgaacaaggtgtcgttttccaaccacaagacgaag

SEQ ID NO: 6872 - DNA, 295 bp, Zea mays
gcgacgggcgcgggcaccgtgctggactctggcaccatgttcacccggctggtggcgccggcgtacgtggccgtgcgggacgaggtccggcgccgcgtcggcgcgcccgtatcctcgctgggagggttcgacacgtgcttcaacaccaccgccgtcgcgtggccgcccatgacgctgctgttcgacggcatgcaggtgacgttgccggaggagaacgtggtcatccacagcacgtacgggaccatcagctgcctggccatggccgcggcgcccgacggcgtcaacaccgtgctca

SEQ ID NO: 6873 - DNA, 291 bp, Zea mays
gatatagcaggccaaagcttgttgccggttctcccgaagatttcctggtcatgttgatgggaagctgcgagaggcgaggatgaaccatccgaaggatttacagtggatgacaagggtaacatctatgtggctgatgccatgaacatggctattagaaagatcagtgatacaggggttacaactattgctgggggaaaatcaggcagaggagggcatgttgacgggccaagtgacgaggcaaaattttctactgattttgaagttcgttacattggcagtagctgctcgctt

SEQ ID NO: 6874 - DNA, 291 bp, Zea mays
cacgacggtgccggcgctgtcgttcgtgacggggcacttcatcgtgcagcggcccaccaccatgttctacgtgtacctggccatcgtgctgggcacgctgctgatcctggccgtcctggaggtgaagtgggcgggcgtgacggtgttcgagtggttcaggaacgggcagttctggatgacggccagctgctccgcgtacctggccgcggtgtgccaggtgctggtgaaggtggtgttcaggcgggacatctcgttcaagctgacgtcgaagcagcccgctggggacgagaa

SEQ ID NO: 6875 - DNA, 291 bp, Zea mays
ttccactcatgcagtggtgtatgctcggctgataactgaaggaaaggactatggtatacatggtttcattgtgcactgcgaactgtagaggatcactcccctcttcctggtattactctgggtgatattggtggaaaatttggcagtggtgcatataacagtatggacaatggtgttctgcgatttgaccatgtgcgcataccaagggatcaaatgttgatgaggctttcacaagttacaagggaggggaaatatgttcattcagatgtcccaaagcagctgctttatggg

SEQ ID NO: 6876 - DNA, 283 bp, Zea mays
ctcatatcctgagccagagatcaaacaaaccagagggagcgaagatggcggcaggcttgcaggtgtttggccagccggcgtctactgatgtctccagggttctgacatgcctgtttgagaagaaactggagttcgatcttgtccgcatcgatacgttcaagacgcatcacaagcttcccgagttcatcaggcttcgggatcctaatgggcaagtgaccttgaagcacggcgacaaaactctcgttgattcgagggacatctgccggtacgtctgcacccagtt

SEQ ID NO: 6877 - DNA, 282 bp, Zea mays
ggtgatgctccctttacaaagacctgaattgttctgcaaagggcagctaacaaagccttgcaagggaatattgcttttcggacctcctggcactgggaaaactatgcttgccaaagcagtagcaactgaagcaggtgctaatttcatcaatatatcaatgtcgagcattacgtcgaagtggtttggtgaaggggagaagtatgtaaaggctgttttctcactagcaagtaaaatagcccccagtgttatatttatcgatgaggtcgatagtatgctaggaag

SEQ ID NO: 6878 - DNA, 277 bp, Zea mays
agcagaaattcttcctgactctactgtttctcagccaaaaccgcagaagactttgtcaggccaatttaggataggggggatgacttgtgctgcatgtgtgaactcggttgaagggatcttaaaaaaattggcaggtgtaaaacgtgcagttgttgcattagcgacctcattgggtgaagttgaatatgatccttctgccattagcaaagatgaaattgttcagggcatcgaggatgctggttttgacgctgcactgttgcaaagtagtgaccaagac

SEQ ID NO: 6879 - DNA, 280 bp, Zea mays
atcacttgaaggttctttaagtgccgtgcggaaatccactcaagctgcagctcgtatatttcaagccttcagggtggagtcattccacagaaagaaagtcgtggaatacggagatgacacctgtggattatctgatgaatgcacactttcacttgtttctcttaaaaatgtcaaaccaggacaacatgatacacatctgcattctgctgctgttcgcatacagaacaagtttcgcggatggaagggaagaaaggaatttatgatcattcgccagagaatt

SEQ ID NO: 6880 - DNA, 180 bp, Zea mays
ggatcgaggacaccgtgggtgtcggcaagggcgccaccaagatatatgccaccgtcgatctcgagaaggcccgtgtcgggcggacccggatgatctccaacgatcccgtgaaccctcgttggtacgagtccttccacatctactgcgcgcacatggccgccgacgtcatcttcaccgtca

SEQ ID NO: 6881 - DNA, 273 bp, Zea mays
gacgagctttcacctcctaagctccagagcgatatcttctcggcgcagtcaagcatgagaccaagtgctagatccctttgggctaagcaaccatttgagcaattgttcggcatgtcaagtgcagagctcagtaaaggtgacttcaatcttccaggcagatcaggtggcgtggccaaggacgatttctcctataagggatctgagacgaagcctcttcagtccctcaggctctgcatcatgaagctccttaagctagagggatcagggtggctg

SEQ ID NO: 6882 - DNA, 281 bp, Zea mays
ggacaacctgtggaacgcgttcctcggcggcggcaacagcgacgtgccccgccccttcggtgacgcggcggtcaacggcatcgacttctacatcgacgaccacagcgcaccgggcgaccactacgacgagctcgcgcgccgtctcgactacttcaacagcatgtactaccacgccacgacgaagtacgtacggctgacggcgacgcccggtgcgcgttcccgcccgacgaccccatggcgcgggcgctgcggacggggctgttcgagcgcatccacgtccg

SEQ ID NO: 6883 - DNA, 280 bp, Zea mays
gccgccgccgcttggtgctgaggctttggttggtctcttcggcggcgacgagcacccaccagcagttctgtagaaatggctgatggtgaggacatccagcctcttgtctgcgacaatggcaccggaatggtcaaggctggttttgctggcgacgatgcaccaagggcggtttttcctagcattgttggccgtcctcgccacactggtgtcatggtagggatgggacagaaggatgcatatgttggcgatgaggcacagtccaagagaggtattctcacgc

SEQ ID NO: 6884 - DNA, 283 bp, Zea mays
ggctcctatctggtataggacggagctgagcttctagcaacgtacagtgtatccgccatgagtcctttcggggcggtgatcacgccagaaaccctcaagtacatgtccaagtaccagggacgtgagatcacgcaggtggactgcgcacgggaggcgatgaggctgatccacgcggaagacaagaacctcaaggccgaggactcagcgtgggagctgaagaagaagttcggcaacggcgtgagcaccatggtcctcgtctacaacgccaccggggccagcctga

SEQ ID NO: 6885 - DNA, 277 bp, Zea mays
ctctgatcttatcacccactcgtgagctttcagtccaaatccatgaagaagcaaggaagtttgcataccagactggtgtcagagttgtggttgcatatggtggcgcaccaataactaaccagctgagggagttagagagaggtgtggaaatcctggtggcaactcctggtcgcttgatggatctgttggagagggctagagtctcacttcaaatgataaagtatttagctcttgatgaagctgatcggatgcttgatatgggttttgagccacagat

SEQ ID NO: 6886 - DNA, 275 bp, Zea mays
cggacgcgtggggtaaagagcttacgctgctggggttatgggcgagcccgttcgtgctccgggcgcgcatcggctcagcctcaaaggcctcacctacgcttactccgaggagaacctcgacgacaagagcgagtttctcctcagctccaaccccgtgctcaagaaggtgcccgtgctcatccaccacggcaagcccgtctgcgagtcccagatcatcgtgcagtacgtcgacgaggctttccccgccgccgcacctaatttccttccatccgacc

SEQ ID NO: 6887 - DNA, 275 bp, Zea mays
ctcactactacatacatcaccaactaggatcgatctctcgacagcaaatagctagcaatggagaagtacaccaaagccctagcgtcattgctcagcatgctggtgctggcacctctcctcgccatggccaccgacccagaccccctgcaggacttctgcgtcgccgacctcaacggcaagctgtcagtgaacgggtacccatgccagccgccgtcgtcggccggcgaccagttcctcttctcgaccaagatcgccacgggaggcaaccccctggc

SEQ ID NO: 6888 - DNA, 274 bp, Zea mays
gcaggcagttcaacaccattcctgggttgatggagggaacagccaagcccgactacgcaacctgtgtgaagatctccactgatgcttccatcaaggagatgattcctccgggcgctctggtcatgctgactcccctcatcgttggaaccctctttggcgtcgagactctctccggcgttcttgctggtgccctggtttctggagtgcagatcgccatctctgcttccaacaccggcggtgcatgggacaatgccaagaagtacatcgaggctgg

SEQ ID NO: 6889 - DNA, 272 bp, Zea mays
gtgaaggagggtatgtctgggcttgcaagaattatgatggagatgtgcagagcgatttcttagctcaaggttttggctcattgggtttgatgacttcggtactggtgtgccctgatggaaagacgatcgaagctgaagctgcccatggtactgttacccgtcattaccgtgttcaccagaaaggaggtgaaactagtacgaacagtattgcctcaatctttgcgtggacaagaggacttgcacacagggcaaagcttgatgacaatgctaga

SEQ ID NO: 6890 - DNA, 265 bp, Zea mays
cccacgcgtccgagatgggcgtcgtgctcatgttcggtggccagatgccggtcgtcaaggtggggaggatggctggccagttcgccaagccaaggtctgagccgttcgaggagaaggacggagttaagctgccgagctacaggggcgacaacgtcaacggcgacgacttcaccgagaagagccgcgtgccggacccgcagaggatgatccgcgcctacgcacagtcggtggcgacactcaacctgctccgcgcgttcgccaccgg

SEQ ID NO: 6891 - DNA, 270 bp, Zea mays
ggtgacacaagtaaaggggacatccatcaccatgaccatgctgccgttcacatccacagcagcggcaacaagctagtagcagatgttttcttcttccacgacgtcctacgcccagggtccgtaatcacgccgatcatcccaccgaccaccaccctaccacctctgctgcctctccgcgaggccgacgcgctcccgttctccaccgggcgcttcgccgacatcctcgccatgttcgcgccgacgacatccgacgccatgggcgaagagata

SEQ ID NO: 6892 - DNA, 267 bp, Zea mays
ctcccgtctcgcacgttccttcccaactccgcagcgtagctctccgcggcgcgatccagatccaggtttttcagcatgggcctggtgaaggaaggcatcgacatggaggagggaacccttgagatcggcatggagtacaggactgtatctggagttgctgggcctctggtcatattggataaagtaaagggcccaaagtaccaagcaattgtaaacatccggcttggagatggcaccaatcgccgtggtcaagtcctggaagttgat

SEQ ID NO: 6893 - DNA, 271 bp, Zea mays
ctcacgcgctcgccgcctaggagcattcacgttggtggcgggcggtggctcggttcctctcctccaccggacctccaagaatccacctccacgactgagctgacggctcggcggcgccatggcggttcaccggctccaaccttccctctctgggctacagtgctccaccgcccggtcggcagtggtcctccatgggccacggctgacgggtgcacgcaccggtatgcatcccttgctgctctaattcccgacgctctagctcgtgtaccag

SEQ ID NO: 6894 - DNA, 324 bp, Zea mays
cccacgcgtccgccctacaccagaaaaattcccagttctttggtccgcgtcagagaggcggcggcgatgtctgggcgcggcaagggcggcaagggtctgggcaacggcggcgcgaagcgaccgtgaaggtgctccgcgacaacatccagggcatcaccaagccggcgatccggacgctggctaggacgggtggcgtgaagcgcatctcggggctcatctacgaggagacccgctgcgtgctcaatatctttctcgagaacgtcatccgcgacgccgtcacctacaccgagcacgcgcgccgcaagaccgtgaccgccatggacg

SEQ ID NO: 6895 - DNA, 315 bp, Zea mays
ccacgcgtccggcaggtcaaagccaagcaagttacattccacaggaagaagaacttgcagtactatgagatttctgccaagagcaattacaactttgagaagcccttcctttacctcgcaaggaagctggcaggggatcagaaccttcactttgtcgaagccgttgctctgaagccaccggaagtgcagattgatatggccatgcagcagcagcatgaagctgagcttgcagctgccgctgcgcaacccctccctgatgacgatgatgacctgatcgaatagatgttccatggcccttgttgatgcgagggggag

SEQ ID NO: 6896 - DNA, 321 bp, Zea mays
attcctcccaacaccacctcgcctgcgatcttcgtagcctccgtcgcgtcgagcatcgatcatgtcggcctactgcggaaagtacaaggatgagctcatcaagaatgctgcctacattggcacccccggcaagggtatccttgctgctgatgagtccactggcaccattggcaagcgcctttccagcatcaatgtcgagaacgttgaggagaaccgccgtgccctccgtgagctcctattctgctgccctggtgctctccagtacatcagcggtgtgatcctcttcgaggagaccctgtaccagaagaccaaggatggcaa

SEQ ID NO: 6897 - DNA, 322 bp, Zea mays
ccagccgccgtcatgtcgaagcgaggtaggggaggttcggctgggaacaagttccgcatgtcactgggtctaccggtggcggccacggtgaactgcgcggacaacacgggcgcgaagaacctctacatcatctccgtcaagggaatcaagggccgcctcaaccgcctcccgtccgcctgcgtcggcgacatggtcatggccaccgtcaagaagggaaagcccgacctcaggaagaaagtgatgcctgccgtcatcgtccgccagcgcaagccgtggcgtcgcaaggacggtgtctacatgtacttcgaagataatgctggag

SEQ ID NO: 6898 - DNA, 323 bp, Zea mays
cccacgcgtccgaccacgcgtccggtggagtgtcagaacttgggaggcacaaattaagtacaaagcagtctaattaatgacgggcccgatggagattccggtgatcgatctcggcggcctcaacggcggcggcgaggagaggtcgcggaccttggcggagctccacgacgcctgcaaagactggggcttcttctgggtggagaaccacggcgtggacgcgccgctgatggacgaggtcaagcgattcgtctacggccactacgaggagcacctggaggccaagttctacgcctccgccctcgccatggacctcgaggccgcca

SEQ ID NO: 6899 - DNA, 320 bp, Zea mays
cccacgcgtccgcccacgcgtccgcccacgcgtccgcccacgcgccgcccacgcgtccgcacctatcatcgccgctgcgccgtctcctccgctcccgtcgtccggaaagatggcgtcccacattgttggataccctcgcatgggccccaagagggagctcaagtttgcacttgagtctttctgggatgggaagagcaccgctgaggatctggagaaggttgctaccgacctcagggccagtatctggaagcagatggctgatgctgggatcaagtacatccccagcaacaccttctcgtactatgaccaggtccttgaca

SEQ ID NO: 6900 - DNA, 316 bp, Zea mays
ccaagctgcgcaaagtctcagttcctaaaatatactgctggtattgttccaagatctgtttacacgtcagggaagtcatcatctgctgctggtctgacagcaactgttgctaaagaaccggagactggtgaattctgtattgaggctggcgccctgatgttagctgataatggcgtttgttgtatcgatgaatttgataaaatggacatcaaggatcaggtcgctatacatgaagcaatggaacagcaaacaattagcataaccaaagcaggaatacaggcaactttgaatgcacgaacatcaattttagctgcag

SEQ ID NO: 6901 - DNA, 314 bp, Zea mays
gcgtccaccactaaacgtaagatggcggcggagaccaaaccggctgcggccatcggggttgccggcgagatggaggtggaggcataccgccgcctattcccggtggccttcctggagcgccacctgggtgagtccgtccgcatcgatgcccgccgcctgagagaggcccgcaccaccaccgtcgccctcggcgccgtgtcctccgcgcatggttccgctctcgtccgcgttggcgacaccgccatgctcgcgtcggtcaagctcgaggtgatgtcgccctcggccgagtacccagacgaaggatccgtctctgt

SEQ ID NO: 6902 - DNA, 310 bp, Zea mays
cccacgcgtccggcagttcgaaaccaaggatcgatccaggagcttccggaaggctaggcgcgcgcgcagtacgaggtgctggtgccggtgccgcccatggatcgggctcgcggatccgcgttcctgctcggcgtcctgctcgcaggatccttgttcgcgttttcagttgctaaagaggagaccaagaagctcgggaccgtgatcggtatcgatctcggtaccacctactcctgtgtcggtgtgtacaagaacggtcatgtcgagatcatcgccaatgaccagggtaaccgtatcacaccctcatgggttg

SEQ ID NO: 6903 - DNA, 314 bp, Zea mays
ccacgcgtccggccatctatccagtggattgcagcttcggatcttgaagatgcaactgcaatatctgcaccagatgcccatgctgaagcctgggaaactcttaaaggttcatcatgcattttgatacctggaggatttggggatcgtggaatttcagggatgatattggctgcaaaatatgctcgtgagaatagagttccatatcttggtatttgcttgggcatgcagatatcagtgattgagatttccagacatgtcctgggcctggaagatgcagacagtgaggagtttaacaaggatacaccgaatcatgt

SEQ ID NO: 6904 - DNA, 309 bp, Zea mays
cccacgcgtccgcggacgcgtgggttatgtgctccccaagcaccttgatgagaaggttgctgctctccacttgggcaagcttggtgccaagctgaccaagctcaccaagtctcaggccgactacatcagcgtgccgatcgagggtccctacaagcctgcccactaccggtactaggcacacggcttgcagctcactcgggccgttgtgtgctatgaagttcgctacactggcctgtcagttatcttttgcatgcatatgcattatcatatacgcagtcgcgtacagggttttcttatggttatcgcttg

SEQ ID NO: 6905 - DNA, 313 bp, Zea mays
ccgtgaatttagcaattcaggaagccctggctggcacggaaatccagttgctcaacctcacttacatgagcgagttccgtgctgacgcccatccagctatctggctcggcaagaaggacgcggtggctgtctatggacaggactgcatgcattggtgcctgcctggcgtgccggacacttgggtcgacatcttggctgcacagatcatgcatcacttcaagcaggagaaaggctgatcacaatttctttaaatatgtagttttgcgataactacagcaactgtgctagaactttttagatttgtatttttggg

SEQ ID NO: 6906 - DNA, 303 bp, Zea mays
caactcctcgccaaatccacgctgctattaactcgccgtcgtccgcgccaagcagcaaagctccgatggtccgcactaaacagacggcgcgcaagtcgacgggcggcaaggcgtcgcgcaagcagctggcgaccaaggcggcgcgcaagtctgcgtcggcgagcggcggcgcgaagaatccgcaccgcttccgccgcgtgcacgtcgtgctcctggagatatgcaagtaatagaagaccatggagctgctgatgcgtaacttggacttccagcttctcgctcgtgacatcgctcaggacttca

SEQ ID NO: 6907 - DNA, 307 bp, Zea mays
cccacgcgtccggggtccttcggtgctttggcccctcggagttttccgttgccgtgaccatcttcggcgggcgtggccatgccgggacatggggaaaggcacttggtgcagaggtctatgactgcaacaacatggtggagcaggagctgcctggaggcgggctcctcgtgtaccagagcttctgtgctgctgaagacgctgttgctacctcgcccaaatctgttctccactgctttgacggcgagaacgtggagagtgctcctcctcctatgaagaaggactacaaactggctaatcttctatgctg

SEQ ID NO: 6908 - DNA, 309 bp, Zea mays
accaaatgaagcatttgacaacattgtctttcactgaagtagaggagcttggcaagacatctcatgttgatgcaaggttaccttcaggctctgatactgcagttatcatgtatacaagcggaagtactggtcttcccaagggtgtaatgatcacacatggcaacatggtggccacaactgcagcagtcatgacaatagtcccaaaccttggcatgaatgatgtttatctggcttatcttccattggctcatgtctttgaactagcaggggagactgtcatgttagcttctggcagtgccattggatatg

SEQ ID NO: 6909 - DNA, 309 bp, Zea mays
ctcgttccatttccccatctcccagatccaattcgcgagttctccctcctctgcggccatggcgctctctgtggagaagacctcgtctggacgggagtacaaggtcaaggatctctcgcaggcggacttcggccgcctcgagattgagctggccgaggtcgaaatgcccggcctcatggcgtgccgcgccgagttcggcccgtccaagcccttcgccggcgctaggatctcggggtctctccacatgaccatccagaccgccgtcctcatcgagaccctcaccgcgctcggcgccgaggtccgctggtg

SEQ ID NO: 6910 - DNA, 310 bp, Zea mays
ccaccaatggctcccaaggttgcgctcttccttgccctaagcctcctgttcgctgccaccgcgcatggctgcgaaccctactgttccggcccagtcgtcccaacaccaccagtcgtgccgactccgtcgtcgcatagccacgggcgctgcccgatcgacgcgctcaagctcaaggtgtgcgccaatgtgctgggcctcgtcaaggtcggcctaccgcaatacgagcaatgctgcccattgctggaggggctggtggaccttgacgccgcattgtgcctctgcacgccatcaaggcaaacgtcctcggcat

SEQ ID NO: 6911 - DNA, 271 bp, Zea mays
agccgccgccgctgctcatctcacatccctcgagaagacgcctgctcctcgccgatcgatacgatggccgtcttctccgacctccacaccgccgacggcctcaagtccctcgaggctcacctcgccggcaaaacctatgtgtctggtgactccattactaaggatgacattaaggtcttcgccgcggtgccgtcgaagcctggcgctgagtttcctaatgccgcccgctggtacgagaccgtctctgcggctgtagcctcaagattccctg

SEQ ID NO: 6912 - DNA, 279 bp, Zea mays
gctgcctctcgtttctcttttcaataatcaagatgagccgtggtggtagtgccggtggtggtcaaagttctctgggttatctctttggaagctgtgagccccccaaaccagcagtggcaccagctgcaagtgctccacctgttgagaaaccatctgctgcaaagactgatgcggccaagcaggttgctgctggggttaccagccaaaccaataactaccacagggctgatggtcagaacactggcaacttccttacggaccgtccttcaaccaaggtcc

SEQ ID NO: 6913 - DNA, 280 bp, Zea mays
ctttcttccaggtgcttaacatccccaccaagattaacaagggtaccgtggaaattatcacccctgtggagctgatcaagaagggtgaaaaggtgggctcgtccgattctgccctgctcgccaagctgggtatccgccccttctcgtacggcctccaggtcaccagtgtctacgaggatgggtccgtgttcagccctgaggtgcttgacctttccgaggaggacctgattgataagtttgccactggtgtctccatggttgcctccctgtcactggcgat

SEQ ID NO: 6914 - DNA, 281 bp, Zea mays
gctcaagacgcacgcgcacgtgttcgagccgcagaggtggacgacggctgcgaggcggaagacgacgagcaggccgtcatcggcttcgccagcggcttcttctggcttgccttcaacaccgtgctcatcgccatcctgtccgagtacgtggtcggcaccatcgagcctacctccaaatcctggggtttgtccgtcagcttcatcagcatcatacttctacccatcgtggggaacgccgcggacacgccggagcaatcatttttgctctcaagaacaagctg

SEQ ID NO: 6915 - DNA, 274 bp, Zea mays
aggagctgctggagatgatcacctggtgccagctcgggatccatgacaaaccagttgggttgctgaacgtcgacggctactacgacccgctgctcgccctgttcgagaaaggcgccgccgagggtttcatcagcaccgactgcagccagatattcgtctcggcggcaaccgcgagcgagctgctcacaaagatggagcaatacacccgggtgcaccaggaggtagccccagcgacgagctgggagatctcggagctcggctacggcagatgagg

SEQ ID NO: 6916 - DNA, 273 bp, Zea mays
ggtgactgatggaactgagaaccaccttgttctctgggatctccggccccttggcttgactggaaacaaggtcgaaaagctatgtgatctttgccacatcacattgaacaagaatggtgtcttcggtgacagcagtgcattgtctccgggtggtgtccgcattggttagtatcatttatttgttcatttcttctgttgtggtgcaagcttcaattaagtactaggtacgtgcccgtgcgttgctacggttttcatttattatataggtagacc

SEQ ID NO: 6917 - DNA, 275 bp, Zea mays
ctacaatcctaaaaccatctgcttcagctagccccaagtttagtcggccgatcattcactgaagtagtaatggcctccgtcaacagctggaccctcgagatcgcgtcgccggtggctccgcagcgcctgttccgcgccgccgtgatggactggcacaccctggcgcccaaggtcgcctcccacgtcgtcgccagcgcgcagctcgtggagggcgacggcggcgttggcagcgtcaggcagttcaacttcacctcagtcatgccgttcagcttcat

SEQ ID NO: 6918 - DNA, 274 bp, Zea mays
gcaagggtgacgactgacgagatggggagagagagatgcgaggcaggagggagagagcacgggggcttgatcgaagatggatgccggagcaaaggtggtgaagaaggccgcggctgggcgtcgcggcgggggcggccccaagaagaagccggtctctcgctccgtgaaggccggcctccagttccccgtaagccgtatcggccgctacctcaagcagggtcgctactcccagcgtgtcggcaccggcgcccccgtctacctcgctgccgtcctc

SEQ ID NO: 6919 - DNA, 273 bp, Zea mays
gcttacttcgcagcaaatgctgctgctcaggcctcgaggaaatcctcaccccgtgtgaccaatgaagaagtccagaaggctgctgctgctctcaagggctctgaccaccgccgtgggaccaacgttagtgctagattggatgcccagcagaagaagcttaacctccccatccttcccaccactacaatcggttcgttcccacaaaccgttgagctcaggagggtccgccgtgagtacaaggcaaaacagatctctgaggaggaatacgtcact

SEQ ID NO: 6920 - DNA, 277 bp, Zea mays
aaacccaagcccctgcgaccccgagataccaaagccagcagaagaagggatgcagcagccgatgcacatgcagccgcagcgccggcgataaccccagctgccggaatcaccacggagcagatccaaaagtatctggatgagaataagcagcttattttggctattttggaaaatcagaacctaggaaaattggcagaatgtgctcagtatcaatcacaacttcagaagaacctcttgtatctcgctgcaatcgcagatgcccaaccgcagactgctg

SEQ ID NO: 6921 - DNA, 275 bp, Zea mays
cagagcctcattcatctccattcgaaacaccctcgcacccacactctcccttcgtccccagcctaaatccccgcaaagatggctcgcacgaagcagacggcgcgcaagtccacgggcggcaaggccccgaggaagcagctggcgaccaaggcggcgcgcaagtcggcccctgcgaccggcggcgtgaagaagccgcaccgcttccgcccgggcaccgtggcgctgcgcgagatgcgcaagtaccagaagagcacggagctgctcatccgcaagct

SEQ ID NO: 6922 - DNA, 99 bp, Zea mays
gccacactgacctccacgtcatcaagaacgagtttggcaacgcaggtaccccgtcgttcccgggcacgagatcgtcggcgtcgtcaccggcgtcggctc

SEQ ID NO: 6923 - DNA, 271 bp, Zea mays
gcacgtacggtctcaggcgcatcggcctcgccgctgcacaacgccggagacgagacgacggcggctgcgggatgacggtcttccacttcctcaactgcgccttcctcaccttcggccctcacgtcgtctactactccgccacgcccctgtcagagtatgatacaatcggcacttctataaaagcagctgctgtttatcttggaactgcgcttgtaaagcttgtttgcttggcaacattgctcaaagtacctgagaatgatagctttgaccc

SEQ ID NO: 6924 - DNA, 270 bp, Zea mays
cccacgcgtccgaagagaccttgtcaacatggcaaagaagaggaccaatgtgatccccattattgaggatgccaggcatccggcaaggtaccggatgttggttggcatggttgatgttatcttctctgatgttgcacagccagaccaggctaggatcttagcacttaatgcttcatacttcttgaagaacggtggccactttgtcatttcaatcaaggctaactgcatcgactccaccctgcctgctgaggccgtgtttgcagcggaagt

SEQ ID NO: 6925 - DNA, 268 bp, Zea mays
ctccggcttctccgggttcaaggccacctacatctacgccaacgcctgggccatcgagttcatcaagtgaaccaccgtcgccgcgatgagatggcatggctgccacatgctttgcttgcttggtcctcgtatcgtacgtcgccgtcgtcgtcttcttctggttattgcgctgctacctcgctgctctcgcgtatgcatgtacttttgcttaattttctttcttcatatcatgcactctggctggcctagactgcccccgatccatggt

SEQ ID NO: 6926 - DNA, 273 bp, Zea mays
gtacaagaagaacgacccatccgaccagatatatgtcttcttccccaacgatgacaaggtagggatgaagcacatcaagaagtacgtcgaaatgatgacgcacgagaacgtctccagagctgtgctggttctccagcagaacctaactccgtttgcgaagtcgtttctcatagagctggagccgaagatccatctggaaattttccaggaggccgagatgcttataaacatcaaggaacatgtccttgttcctgagcatcaggtgctcacaaa

SEQ ID NO: 6927 - DNA, 258 bp, Zea mays
tggcgcgcgacgtggtccggcaccggccccccgcgacgctggtgccgcacatcgcgggcgaggcgttccagctgacggagtggtacacgatgcccaagggcgccatcgtgttcccgtccgtgtacgagtcgtcgttccatgggttcccggacgcggaggcgttcgacccggagcgcttcttctcggatgcgcggcgggaggacgtggcgtacaggcgcaacttcctggcattcggcgccgggccgcaccagtgcgtgg

SEQ ID NO: 6928 - DNA, 316 bp, Zea mays
gatcaatgtcagccctgaggtctctgaatctacaaggatcatctatggaggttcagtaactgctgcgaactgcaaagagctggcagcacagcctgatgtcgatggtttccttgtgggcggtgcttctttgaagcccgagttcatcgacatcatcaacgccgccgccgtgtgaagtccgctgaagatgttccaacccttcaccctgttgcggtgatgtgctgaagacagatcagactatttttttgtttaaccgtgcagtgctatgtaagctactaactttgcgctggtgcggatgctgatttccctccccctagct

SEQ ID NO: 6929 - DNA, 314 bp, Zea mays
gatctttccaatctggtaaaaccggaggatatgatcacctcggaacatctcgtgacacttcttgcaattgttcccaagtactcccaaaaagactggttgtcaagctatgagaaaattgacacattcgtggtacctaggtcatctagaaagctctatgaagacaatgaatatgctctctacactgtaacactgtttgctaaggttgttgacaattttaaggtccgtgctcgcgagaagggttttcaggtccgtgattttgagtacagtcctgaagcacaggaaagtcggaagcaggagatggagaagctactgca

SEQ ID NO: 6930 - DNA, 315 bp, Zea mays
acagcacgtctcgtctccctcccacaaaaaaaaaaaactgctcggttgctgctcctgctccgccgcgccggcatcatgtgtggcatcttagccgtgcttggttgctccgactggtctcaggcaaagagggctcgcatcctcgcctgctccagaaggttgaagcacaggggccccgactggtcgggcctctaccagcacgagggcaacttcctggcgcacagcggctcgccgtcgtctccccgctgtccggcgaccagccgctgttcaacgaggaccgcaccgtcgtggtggtggccaatggagagatctacaacc

SEQ ID NO: 6931 - DNA, 312 bp, Zea mays
ctccacaatcgacaagccaaagctccttagtcagctatctgcattgctatctgacattggattgaacatcagagaagcacatgttttctctactcatgatggctattctcttgatgttttcgttgttgatggctggcccattaaggatactgatggtttgcacaaagcactggaagcatccattttaagaaatgagggttcatggtctggttcatctcattcgtcagcagctgaaagaacactgcccttccaagttaaaggtggtgaatgggaaatcgataaacgacttctgaagatgggagggttgattgt

SEQ ID NO: 6932 - DNA, 315 bp, Zea mays
gtttgatgagcccactcttgtcctcgaccttgattctgacaaattggctgcattctctgctgcatacgcagaacttgaatctgtactttctggattgaatgtgcttgttgagacttactttgctgatgttcctgctgagtcctacaagaccctaacatccctgagcagtgtgactgcttatggttttgatcttgtccgtggaacccaaactcttgggcttgtcacgagtgctggtttccctgctggaaagtacctctttgctggtgttgtggatggacgcaacatctgggctgatgatcttgctacatctctcag

SEQ ID NO: 6933 - DNA, 313 bp, Zea mays
caccggttgcgatccgccgccatcgcttcaagcagcgaaccctagccgccctcagcgacggattgcagatctcccagccatgacgatcaagcggaggaacagcggacgcaacaagcacgggcgcggccacgtcaagtacatacgctgctccaactgcgccaagtgctgtccaaaggataaggctatcaagcggttcttggtgaggaacattgttgagcaggctgctgtgagggacgtgcaggaggcttgtgtgcatgatggatatgttcttcccaaattgtacgcaaaggttcatcactgtgtctcatgcgca

SEQ ID NO: 6934 - DNA, 309 bp, Zea mays
gtcttctacctcaagatgaagggtgactatcacaggtatcttgcggaatttaagactggtcctgagaggaaggaatctgctgagagcacgatgatggcctacaaggctgctcaggacattgcgctggctgagctggcacctacccatccgataaggcttgggcttgctcttaacttctcagtgttctattatgagattctgaactccccagacaaagcttgcaaccttgcaaagcaggcgtttgatgaagctatctcccagttagacacccttggggaggagtcatacaaagatagcactctgatcatg

SEQ ID NO: 6935 - DNA, 309 bp, Zea mays
caccacctccacctcgtcgtctcccaccaccgccgagcgcgagcctagcccgatctagccggcggcaggcaccagatcccgccgcccgcctggtcccgggacgcgccccgccgaatccgccgctcctcgcactgcaacacgcacggaccacggtgcatttgatccgtcccggccgcctacacgatgtccaagtcgggagcgctggatcttgcttctggcctcggagggaagatcaacaaggtggaagtcaagtcggccgtcgatgagtatgagaaatatcatggatactatggagggaaggaggaagca

SEQ ID NO: 6936 - DNA, 313 bp, Zea mays
caagaaaactagaaaaggctcctcccgaccgcaacgcccctcatctccctcgaccccgacatccccgacccgatggcgcccaaggcggagaagaagccagcggagaagaagccggcggccgaggagaaggcggagaagacaccgcaggaagaagcccaaggccgagaagcggctgcccgcgtccaagtcctccggcaaggagggcggcgagaagaaggggaagaagaaggccaagaagagcgtggagacctacaagatctacatcttcaaggtgctgaagcaggtgcaccccgacatcggcatatcctccaag

SEQ ID NO: 6937 - DNA, 309 bp, Zea mays
cggacgcgtgggctctgaacgaccacttcgtcaagctcgtctcgtggtacgacaacgagtggggctacagcaaccgcgtcgtcgacctgatccgccacatgttcaagacccagtaggggtttttcccccctgcttctcatggatggttgctgcttgtgtatgccgagaataaatgtggatggcgcgtgcctctgggtcgccaggttcatgctgagtctggacatgttttgcacttttgtttcccttcctgctaccatctgtgacagatccgctcgctaatatgggacctgagattagctttttgcaaaa

SEQ ID NO: 6938 - DNA, 310 bp, Zea mays
gttgagctctttcccttcctcgcttggaaccaaatcaattcggagcggcggacaaaacgatcccttgcctcgcttccattcgaatcatctcgaatggggcactaatcgagaagctaatgacgcacaaatcgcgagatctgtagcggcactcggcttcaccggcggcgcggcgggcatggaagcgcagaacggctccggcgtaggggcgcccgtggtgctcaacgtgtacgaccttacgcccatgaacaactacctctactggttcggcctcggtattttccactccggaatcgaagtccacggcatggag

SEQ ID NO: 6939 - DNA, 248 bp, Zea mays
cacactcttgcaccgagctagcagccaagatggcgaccaaacacctggctctttgcctccttgttctctttagcataggcatgggcatggccaccgctgctgcaaaccgcaaactgggttatggccccgggggatgacgtggcggtggtggtagcggtggcggtggaggcggtggttacggaggaccaggctatgggtccggatcagggtatggtgatggcggtggcagcggaggtgctgctggaggg

SEQ ID NO: 6940 - DNA, 107 bp, Zea mays
gatggcttctcctccccctcttaccaagtcctcctcgggttagggttccttagggttttgtggaggtgcgatggcggcggctgatgtggagtaccgttgcttcgtcg

SEQ ID NO: 6941 - DNA, 304 bp, Zea mays
gtcaacggcacgtctgtgggctccgcgctcgggccaccgtgatgtacgacgccaacgtcctggccgtcctgtcggaggtcctgtccgccgtcttctgtgaggtcatgaacggcaagcccgagtacacggaccacctgacccacaagctgaagcaccacccggggtccatcgaggccgcggctatcatggagcacatcctggagggcagctccttcatgaagcaggctaagaaggtgaacgagctggacccgctgctgaagcccaagcaggacagatacgcgctccgcacgtcgccgcagtggct

SEQ ID NO: 6942 - DNA, 305 bp, Zea mays
gatggaaagagatttctcaatatcacatttggttctccattggaggaaattctcattgaaaagcttatcgtaaaggttgttctacctgaagggtcaaaggatatcgaagtttcagctccctttccaacacagcagcagcaagaggttaagtattcacaccttgacattgtcggaagaccagttgttgtcttggagaaacctgatgttattccagagcataatttgtatttccaggtttactacagattcaacaacatatccttgctcagagagccgttgatgctgattactggtttcttcctcct

SEQ ID NO: 6943 - DNA, 303 bp, Zea mays
ccacaccccccgagctcagcttagctccactccagctccaatcacagtcgtgaccagagcgcgagagctagctagagggccgtgaaaatgccgatcaataggatcgccctggggagccaccaggaggtgtaccacccgggcggcctcaaggcggcgttcgctgagttcatctccaccctcatcttcgtcttcgccggccagggctccggcatggccttcagcaagctgaccggcggcggcccgacgaccccggcgggcctgatcgcggcggcggtggcgcacgcgttcgcgctgttcgtggcg

SEQ ID NO: 6944 - DNA, 303 bp, Zea mays
cggcgcgtgggctgcagtcgaagaggctgcaccgcttcctaactttcaagatggacgacaagttcaaggagatcgttgtggaccaggtcggggatcgcgctaccagctacgaggacttcacaaacagcctccccgagaatgactgccgatacgcgatctatgatttcgactttgtcactgcagaagatgtccagaagagcaggatcttctatatcctatggtccccatcctccgccaaggtgaagagcaagatgctttatgcaagctcaaaccaaaaattcaagagtgggctcaatggcattc

SEQ ID NO: 6945 - DNA, 303 bp, Zea mays
cggaccgtggcgactcacgacgacggaaacagtagtgctgccagtagagctctcagaactcgggaaaaaaatgtcagatgccgccgtgcgtgtgatcgtgcctatggcgagcccgttcgtgatccgcgtcctgatcgccctgaagctgaagggcgtcgagttcgagttcgtggaggaggtggtgggcaggaagagcgagctgctgctgaggtcgaacccggtgcacaagaagatccccgtcctgctccaccacggcaagcccatctccgagtctctgatcatcgtccagtacatcgacgaggt

SEQ ID NO: 6946 - DNA, 307 bp, Zea mays
gagagatgctgcaggtggaggaggcgctggcggcggtgctgtccgcggcggcgggccacgcggaccgcacgccgtgccgctgcagggcgcgctcgggctcgtcctcgcggaggacgtctgcgcgcccgatccgctccctcccttccgcggcctccatcaaggacggatacgccgtcgtggcctccgatgggccaggggagtatcctgtggtcacggagtcgagggcgggcgacgacgccctcggcgtggtcgtcgtccccggcacggtcgcctacgtcaccaccggagggccggttcccgatggcgc

SEQ ID NO: 6947 - DNA, 308 bp, Zea mays
cccacgcgtccgcccacgcgtccgcccagatccaattcgcgagttctccctcctctgccgccatggcgctctctgtggagaagacctcgtctggacgggagtacaaggtcaaggatctctcgcaggcggacttcggccgcctcgagattgagctggccgaggtcgaaatgcccggcctcatggcgtgccgcgccgagttcggcccgtccaagcccttcgccggcgctaggatctcggggtctctccacatgaccatccagaccgccgtcctcatcgagaccctcaccgcgctcggcgccgaggtccgc

SEQ ID NO: 6948 - DNA, 311 bp, Zea mays
agagaatcctaccaaacctagctaccaactcgatcgtcgtcatcacgctcgaccgcacaactgcaccatggggggaggagacctaaaaactactacatcttttatagctacatctctagctaaagatcgagagggtaaataaggacgagcgggcgcgagctagaagagcagctgcaggtactaccatcatcgtcgtcgtcgtcgccaggatgaccgtcgtcgacgccgtcgtctcctccaccgatgccggcgcccctgctgccgccgccaccgcggtaccggcggggaacgggcagaccgtgtgcgtgacc

SEQ ID NO: 6949 - DNA, 252 bp, Zea mays
ctcgccagtccccaactcgaacctcagtcaggcggcgtgacggagggagagttcgaggaccgaggcggcgtcgggcgagatgaagcttaacgtcaagaccctcaagggcaccaacttcgagatcgaggcgagccccgatgcgtcggttgctgacgtgaagaggatcattgagaccactcagggtcagagtacctaccgggcggaccagcaaatgcttatataccaagggaaaattctcaaggatgagaccac

SEQ ID NO: 6950 - DNA, 253 bp, Zea mays
caccgccatagttcccacggacgccgagctgctgcaggcgcaggccgacctgtggcgccacagcctctactacctgacatccatggcgctcaagtgcgcggtggagctccacatcccgaccgccatccacaacctaggcggtgctgccacgctgccggacctcgtggccgcgctgtccctgccagcggccaagctcccgttcctcgggcgcgtgatgcggctgctggtcacgtcgggcgtcttcgcgtcgtcg

SEQ ID NO: 6951 - DNA, 259 bp, Zea mays
gctgcatatacccaggcaactggcaagcccatctctctctctgagcaacagcttgttgactgtggttttgcattcaacaatttcggatgcaacggaggccttccatcccaggcctttgaatacatcaaatacaatggtggccttgacactgaggaatcttacccttaccaaggtgtcaatggaatctgcaagtttaagaatgagaatgttggagtcaaggttttggactcggttaacatcaccctgggtgctgaggatg

SEQ ID NO: 6952 - DNA, 245 bp, Zea mays
ctcctaataactagtttctatcttgctccccaaaccagcgcaaaccctgccctgacaccggcagcgacacgtccaccggcggcgccatggtgctccaggcaacgatgatctgcatagacaattcggaatggatgccgaacggcgactacgctccgtcgcggttccaggcgcaggccgatgccgtcaacctcatctgcggggccaagacccagtcgaacccggagaacacggtaggcgtgatgaca

SEQ ID NO: 6953 - DNA, 247 bp, Zea mays
cccacgcgtccggttccccaagatggagtgtttattaggagattcggctctgaggtgtcttcttcagagcaaatgaaccttattaagcaactcagacaaagaacgagtgctccaatcaaagatgtcaaggcctctctagttacctgcaactgggatattgaggctgcacagaaggacctaaggaagagaggtgttgctcttgctgccaaaaagtcttcacgcactgctgctgaaggtttgctagcta

SEQ ID NO: 6954 - DNA, 242 bp, Zea mays
aacgacaactccgtgtccgacgtcgtcatcttctccgcggccacggggatcatggtcaccgcgccggccaactccatctccggcgtgcactgctacaacaaggccacgggcttcggcggcaccggcatccacctcaagatcccgggcctcacgcacgcgtggatcagcaactgctacatggactacaccagcatcgtcgccgaggaccccgtgctgctccacgtctccggatccttcttcct

SEQ ID NO: 6955 - DNA, 251 bp, Zea mays
cgcctgcgtcacagctgccgattcgaaagccctcgtcctgacccctcgcaaaaccctagctccaaccaccatgaagggcaaggccaacgcctccaagaaggatgaggccaggctccgggccggcggcggcggcgccggaaagcgcaagaaggccgccgcgagcgtgaagcccaagcgccctccctccgccttcttcgtcttcatgtctgaattcaggcaggagtaccaggcgcacaccctggcaacaagag

SEQ ID NO: 6956 - DNA, 255 bp, Zea mays
cggagcacgacgcacgcagagccgcagagatccgtcacactgcaagttttgaaaactgaactgtaagatggcatcagcagagctttcccgtgaggaaaatgtgtacatggcgaactcgccgagcaggcagagaggtacgaggaaatggttgagttcatggagaaggtagcgaaaactgttgactcggaggagctcactgtggaggagcgcaacctcctgtctgttgcatacaagacgtcattggagcccgcgtgc

SEQ ID NO: 6957 - DNA, 235 bp, Zea mays
ccgggaaagagcttacgctgctggggttatgggcgagcccgttcgtgctccgggcgcgcatcggtcagcctcaaaggcctcacctacgcttactccgaggagaacctcgacgacaagagcgagtttctcctcagctccaaccccgtgctcaagaaggtgcccgtgctcatccaccacggcaagcccgtctgcgagtcccagatcatcgtgcagtacgtcgacgaggctttccccg

SEQ ID NO: 6958 - DNA, 242 bp, Zea mays
ccgcattgaggcctggaacagtgacaccctgccaatctacgagcctggtctcgatgatgttgtgaagcagtgcaggggcaggaacctcttcttcagcactgatgttgagaagcacgtcgctgaggctgacattatctttgtctcggtgaacacccccaccaagacccgtgggcttggagctggcaaggctgccgacctcacctactgggagagcgctgcccgcatgattgcggatgtctcca

SEQ ID NO: 6959 - DNA, 240 bp, Zea mays
caccccccgagctcagcttagctccactccagctccaatcacagtcgtgaccagagcgcgagagctagctagagggccgtgaaaatgccgatcaataggatcgccctggggagccaccaggaggtgtaccacccgggcgccctcaaggcggcgttcgctgagttcatctccaccctcatcttcgtcttcgccggccagggctccggcatggccttcagcaagctgaccggcggcggcccg

SEQ ID NO: 6960 - DNA, 242 bp, Zea mays
gaaaacagaaagcaatatgtctagagaggtacagaagacgagatgaggatccgaaaactgtggtatcagagattgatgataatatagaggaggaatgtggcatatgcatggaaataaatgtcaaagttgttcttccaacctgtagccacgctatgtgcattaaatgctatcgtgaatggaggtcaaggtcccagtcctgtccgttctgccgcgacagcctcaagagggtaaactctgctgac

SEQ ID NO: 6961 - DNA, 242 bp, Zea mays
ctacccggcgctcgcgcggctttctttcccaactccgacgaaggctagctacaccaccttgtgcgggctcgtctccatcgcccgccacccgctccgtcgtcgtcgtccccgccgcgccgatcccgaatcgaatggggagcctggcgtccgagaggaaggtggtcgggtgggccgccagggacgccaccggacacctctccccctactcctacaccctcaggaacacaggccctgaagatgtg

SEQ ID NO: 6962 - DNA, 243 bp, Zea mays
caaaagcgcaaacgcgaccacagacagagcgcgcttcaaggccttttttttttgagataacaaggaggagaggaggagatggcggtcacgatcacctgggtgaaggcgaggcagatcttcgacagccgcggcaaccccaccgtcgaggtggacgtgggcctcagcgacggcagctacgcgaggggggccgtacccagcggcgcatccactggaatatatgaggccttggagttgagggatgga

SEQ ID NO: 6963 - DNA, 242 bp, Zea mays
gcgagatgacccggcgctacatgacggacatgatcacccacgccgacaccgacgtggtgatcgtgggcgccgggtccgcgggcctgtcctgcgcgtacgagctgtccaaggaccccaccgtgagcgtcgccatcgtggagcagtccgtgtccccgggcgtcggcgcgtggctgggcgggcagctgatctcggccatggtggtgcgcaggccggcgcacctgttcctggacgagctgggcgtg

SEQ ID NO: 6964 - DNA, 239 bp, Zea mays
gctacctactactcaagtatccatccttattgagtacagtgttgatccatggactcggaaggagttgtagcagcaaaggtggcagatgagactactaaaccggcaatccaagaagacggcgccgagagcaaggccgggatgactgatctgctgatgctgaccgacaagtcgcagctgcaggcgctggcgatgctggtgcggaacaacgaggagctcatgatgagccaggcgatcaagtc

SEQ ID NO: 6965 - DNA, 239 bp, Zea mays
atcgacgaggcgaagcccagcgcccgagtccctctccctgctcccacgacccatggcggcggatatggcgtacgcgccgccgatgaaggcgggcaaggccgggttcgaggctggcatgatggatccgcagcacaggatccgcatcacgctctcctccaagagcgtcaagaacctcgagaaagtctgcggggatctggtgaagggcgccaagggtaaggagctcaaggtcaagggccccg

SEQ ID NO: 6966 - DNA, 244 bp, Zea mays
gccatcaagcaagtcttcaaggacccatctgggatcaaaataaatgcaaccaagtccatgataggacattgccttggtgcagcaggtggtttggaagccattgctactgtcaaagcgataactactggatgggtgcatccaagcataaaccaatttaacccagaggaagcggttgaattcgacacagtacctaatgtaaaacagcagcatgaagtgaacgttggcatctcaaattcttttggat

SEQ ID NO: 6967 - DNA, 248 bp, Zea mays
aagatgcaagatttgcaggattggtctggtcaacgacgtattattagagtaatggccaacaccccttcagctgttggacaagctgcatcagtcatgtgtttgggagagatggctactcaggatgatgaaaaccgtgtaagaaaactgttcagtgccattggaaaagtctggacagctgaagagaaatattttgatgctgtaactggtctgagtggtagtggcccggcctatatcttcctagcaataga

SEQ ID NO: 6968 - DNA, 255 bp, Zea mays
cccacgcgtccgaccacgcgtccgcggacgctggccccggcgatgatggacctctccagtgtccagctcggccatggcgttcaccgtctccttctcccccgccaacgttcagatgctccaggctaggagtggccacggccacgccacctttggaagctgttccgccgtgccaagagccgggccaaggctgcgctccacggccgtccgggtcagcagcaagcaaaaggcggcgacggacgtcaggcggcgtcccgg

SEQ ID NO: 6969 - DNA, 259 bp, Zea mays
cagcatctgagcttatatattactacatcgatcggttgccaaatggcggggatgacagtcggcaataagctggcgctggctgcggtgctgctgtgcgcggcggcggccatggccacggcgcacaggcctccggcgtgcgcgccacctacaacttctacaacccgcagcagaacaactgggacctcaacgccgtgagcgcgtactgcgcgacgtgggacgccagcaagccgctgtcgtggcgcatgaagtacggctggac

SEQ ID NO: 6970 - DNA, 260 bp, Zea mays
cacgcgtccgaaaatgttctacttcaactacttgctcttgttggcaagcagccagcttttcatcaattgcgatcagttgagcaacttggctacatagcgcttcttaggcaaagaaatgattcaggtgtccgtgggttgcaatttataatccagtcaacggtgaaggatcctgctaatctggatgccagagttgaaaattttctcaacatgtttgaaagcaatgtctacaatatgtctgatgcagagttcaagagtaatgt

SEQ ID NO: 6971 - DNA, 156 bp, Zea mays
gaaggatctgtatgtcaagagtgtccagcgtactgttatctggatgggaaagaagcaagagtcggttgatgatgttccgtgtggtaaactgttgctatggttggtctggatcagttcatcacgaagaatgctacactcactaatgagaaggagact

SEQ ID NO: 6972 - DNA, 257 bp, Zea mays
ggacgcgtggcagctggggactggagatacccaaccaagatcacaccctatacgcgttgaaggactatctgatctctcactggttgacattgctgctggaggctggcattcaactgcactaactatacagggagaggtgtatgcttgggggagaggagaacacgggaggcttggatttggagatgataagagtagtcgcatggtccccctaaaggttgagcttctagctggagaggatattgttcaggtatcatgtg

SEQ ID NO: 6973 - DNA, 257 bp, Zea mays
ctcgattatgctgatgcggcactattagcaagggtgaggaagtaacccttatggattgggggaatgctattgttaaagagatcaaggtggagagtggagtaattactgaactagttggagaactgcatcttgaggggtctgtgaaaacaacaaaattgaagatcacatggctagcagatatagaggagctagttcccctttcattggttgaatttgattacctcatcagcaagaaaaagctagaggaagacgaggac

SEQ ID NO: 6974 - DNA, 261 bp, Zea mays
gcctcctcaaatttctgaccacgagctagaggagatagcaaagatgggcagtgctggtgatcctgctttagctgatgagcttggtgaaggaagcactgccacaagaaccttgcttgccagctattctcagactccaaggcttggtatgacaccattgcgaactccgcagcgaactccagctgggaagggtgatgcaatcatgatggaggcagaaaatcttgcacgtctcagagaatcacaaacgcctttattaggaggtga

SEQ ID NO: 6975 - DNA, 258 bp, Zea mays
cccacgcgtccgcccacgcgtcacccacgcgtccgcccacgcgtccgaagtgagggcgggagaggttgaggttgaggaagagcagaggaatccattccaggagtgtttaatggcgggaggcaaggaagcgcacgggtgggcagccagggatgtctctggtcacctctccccttaccacttctcacggagggttcagagagacgacgacgtcaccatcaaggtgctcttctgcgggctttgccacactgacctccacgt

SEQ ID NO: 6976 - DNA, 258 bp, Zea mays
ctagttctcctcaaccaaattcaaggtcacagcggcgaacctctcggctatcatgtctggccgcggcaagggcgggaagggtctgggcaagggcggcgccaagcgccaccgcaaggtgctgcgcgacaacatccagggcatcaccaagccggcgattcgcaggttggcgaggaggggcggcgtcaagcgcatctccgggctcatctacgaggagacccgcggcgtgctcaagatcttcctcgagaacgtcatccgcga

SEQ ID NO: 6977 - DNA, 257 bp, Zea mays
cattcctcccccaagtccatagagtgatagagaatggaggataatctaccagttaatgtccgggaatatcaagaacttgctaagaaagcactaccaaagatgcactatgattatatcaacggaggagcagaagatgaatatacactgagggagaatattgcagcatatggaagaattctgttacggccacgagtccttatagatgtgagcaagatagacatgtcaacaagcttattaggatataatatgccatcgcc

SEQ ID NO: 6978 - DNA, 260 bp, Zea mays
agcagtcaagctcctcctcctcctcccccccagtccctcccaggctcccaccccgccttgctcgcagcctccccaaaaccctagccctagccctagccctagctctcccacacccgcactgggagatggacggcggcggcagcaccgcacgccggaagacgtgttccgggatttccgcgcgcggcgggctggtatgatcaaagcgctcaccaccgacgtggagaagttctaccagcagtgtgacccagagaaagagaatc

SEQ ID NO: 6979 - DNA, 257 bp, Zea mays
cccacgcgtccgcaagatctagtttctttcaaacaacccccggcagatgataaaatagctcttattgacctaactactaacagggaattgccttctcagatggatctcgacatcactgatgcagagacaaaaaggtctaatgcggtctggaaaaatcttgagctcgcaaccatgaaattgtcccaagaactggcagagcaattgcgcctggttatggaaccaactcttgctagtaagcttcaaggggattatagaac

SEQ ID NO: 6980 - DNA, 251 bp, Zea mays
cccacgcgtccgctgcaccgagctcactggcaatggctaccagcaccaagctcgtggcccttggctttgccgtcctcctgagcatcggcttctccgatgcagcgagggtagttaggcttggtagccatgcgtccgctggatgtggaggttgcggtgggggaggcggctccgggtcgactgggggtggctttggcggtgggtctggcggtggcggtggttacggcataggtaagggtggcggggactggtgg

SEQ ID NO: 6981 - DNA, 254 bp, Zea mays
gaaggagttgattggcaaagctttgatgaagcgtgttatgcaaacgtggcttccagccagcactgcacttcttgagatgatgatattccaccttccttccccggcaaaggctcaaaagtatcgtgtggagaacttgtatgagggaccccttgatgatgtttatgcaactgctatcagaaactgtgatccggagggtcctcttatgctgtatgtttcaaagatgattccagcatctgacaagggcaggttctttg

SEQ ID NO: 6982 - DNA, 250 bp, Zea mays
aatttgttggtgtattatacgcagggcttatgatagagaagaaatctgggctgcccaagcttattgagtacaatgtaagatttggtgacccagaatgccaggttctgatgatgcgattagaatctgatctggcacaagttctgttatctgcttgcaaaggagagttgagcaatgtttcactgacctggtctcctgaaatggctatggtggttgtgatggcaagccagggataccctggctcttataagaa

SEQ ID NO: 6983 - DNA, 251 bp, Zea mays
cggacgcgtggtatgaaggttgtgaccctgtcaacaaattatactattgtgaaatttcttctcttcctcaaggaatagagggctttagagggactcaggatttgcttccgtttgtcaagcttattgacaattttgatgctcaatatcaagttgtggccaatgatggtgatgaatttacatttttgaccaataaaagtgcccctaagaataagctggtaagggtaaatatcaaaaatccagagctgtggact

SEQ ID NO: 6984 - DNA, 258 bp, Zea mays
ctacctactactcaagtatccatccttattgagtacagtgttgatccatggactcggaaggagttgtagcagcaaaggtggcagatgagactactaaaccggcaatccaagaagacggcgccgagagcaaggccgggatgactgatctgctgatgctgaccgacaagtcgcagctgcaggcgctggcgatgctgctgcggaacaacgaggagctcatgatgagccaggcgatcaagtcggagacggagcgcattgagt

SEQ ID NO: 6985 - DNA, 306 bp, Zea mays
ctacgacggatacagtagtgctgccagtagagctctcagaactcgggaaaaatatgtcagatgccgccgtgcgtgtgatcggcctatggcgagtcccgttcgtgatccgcgtcctgatcgccctgaagctgaagggcgtcgagttcgagttcgtggaggatgtggtgggcaggaagagcgagctgctgctgatgtcgaacccggtgcacaagatgatccccgtcctgctccaccacggcaagcccatctccgagtctctgatcatcgtccagtacatcgacgaggtctggtcctccggcgcgccgg

SEQ ID NO: 6986 - DNA, 303 bp, Zea mays
acccacgcgtccggagagattggatttgacacctacttctccatggccaggggcaacgccactgttcctgctatggagatgaccaagtggtttgacaccaactaccactttattgtccctgaattgggcccaaacaccaagttctcctatgcttctcacaaggctgttaacgaatataaggaggctaaggcgctcggtgttgataccgtgccagtacttgttggaccagtctcgtacctgttgctctcaaagcctgccaagggtgtggagaagggattccctcttctttcccttcttagcagc

SEQ ID NO: 6987 - DNA, 306 bp, Zea mays
agccacgcgtccggagagattggatttgacacctacttctccatggccaggggcaacgccactgttcctgctatggagatgaccaagtggtttgacaccaactactcacttctattcgtccctggaattgggcccaaacaccaagttctcctatgcttctcacaaggctgttaacgaatataaggaggctaaggcgctcggtgttgataccgtgccagtacttgttggaccagtctcgtacctgttgctctcaaagcctgccaagggtgtggagaagggattccctcttctttcccttcttagcag

SEQ ID NO: 6988 - DNA, 298 bp, Zea mays
  unsure (1)..(298): unsure at all n locations
gggcctcctgtatcctctcacttccctcagtcctcgtccgtctgctccctcctctctctacctagctctagctagccttcctgtagcgcggcagagatggctgcccctgcctccaccacggcggcggcggcggcagcgctgctgctgctgctcctcctgtcgctcgccgcggcggcggacatgtcgatcgtgtcctacggggagcgcacgcngaggaggcgcggcggatgtacgcggagtggatggcggcgcacggccggacctacaacgccgtcggcgaggaggagcggcggtacca

SEQ ID NO: 6989 - DNA, 301 bp, Zea mays
cgaacacacaccgcgcccagctccgaggtgatcttccggcggccggcgagatgagccgtggcacaggcgcgggctatgaccgccacatcaccatcttctcccccgagggacgcctgtaccaagtcgagtacgcgttcaaggcggtgaagtcggcgggtgtcacgtcgatcggcgtccgctgcgcggactccgtctgcgttgttacgcagaagatagtcccggataagttgctggatcagacgagcgtgacacacctgttcccgatcaccaagtacgtcggattgcttgccactggccttac

SEQ ID NO: 6990 - DNA, 297 bp, Zea mays
aaagaaggcgtcatcatccttggcgacgataccatctgatgttgatgaggaagtcctagaggtccaagctcagaagaaaggtagaggaaggaagcctgctgccgttgtgaagcccaaggctcctgccgccgccaggaaaagggcgccggctcagggcaaggtaacgcagaagaaaatagatgagatgctcaaggccactgaggataacaacaccagtgcatcttcccctgagaagaaggtccggaagatgaggtcctctcccttcaacaagaagagcggctcaatcttacagagagg

SEQ ID NO: 6991 - DNA, 302 bp, Zea mays
ctcacgcgtccgggacgcgtggttttgaggctggtatctccaaggatggccagacccgtgaacatgctctccttgcgttcacccttggagtgaagcagatgatttgctgctgcaacaagatggatgcaaccactcccaaatactccaaggcacgttatgaagagattgtgaaggaagtctcatcctacctcaagatagttgggtacaaccctgataagattgcctttgttcccatttctggttttgagggcgacaacatgattgataggtccaccaaccttgactggtacaaaggcccaacc

SEQ ID NO: 6992 - DNA, 296 bp, Zea mays
aacgcgaccacagacagagcgcgcttcaaggccctttttttttgagataacaaggaggagaggaggagatggcggtcacgatcacctgggtgaaggcgaggcagatcttcgacagccgcggcaaccccaccgtcgaggtggacgtgggcctcagcgacggcagctacgcgaggggggccgtacccagcggcgcatccactggaatatatgaggccttggagttgagggatggaggatctgattatcttggcaagggtgttcttaaggctgtcagcaacgtaaacaacattattgga

SEQ ID NO: 6993 - DNA, 295 bp, Zea mays
gagatcgaccccatctgcgccctccaggctctgatggagggtcttcaggtccttcccttggaggacgttgtctcggaagctgacatcttcgtgaccaccactggcaacaaggatatcatcatggttgaccacatgaggaagatgaagaacaatgccattgtctgcaacattggccactttgacaatgaaattgatatgctcggccttgagacctaccctggcgtcaagcgcatcaccatcaagccccagactgaccgctgggtgttccccgagaccaacactggcatcattgtcc

SEQ ID NO: 6994 - DNA, 299 bp, Zea mays
agttattccactaatgaaaaatgggcaaccactcccctttgacagattggccgctagcaagtatctcaaagatgctggagatgcccatggtacagtaaacattgatatatcagttgggagtggaggaggaaatggaaaggcatggggctgtgatctgagctacaaatatgttgaaataaatgctgaatatacaacatgagatttatatttgccatggagaaaaaaatcttgtaatgatgaatgggtgcgactaccgtcaggagaatgtagtttcgtgttgcaatggcagccttgcggat

SEQ ID NO: 6995 - DNA, 294 bp, Zea mays
cacgccgaggaaggtcgacatgtcgtctccgccgccgccggtgaagctgatcggcttcttcggcagcccgtacgcgttccgcgcggaggcggcgctgtgcctgaaagcgtgccgtacgagctgatcctggaggacctgttcggcagcaagagcgagctcctgctccaccacaaccccgtgcacaagaaggtgcccgtgctcctccacggcgacggcagggccatctccgagtccctcgtcatcgccgagtacgtcgacgaggccttcgacgggccgccgctgctccccgccgac

SEQ ID NO: 6996 - DNA, 293 bp, Zea mays
cagtaagcagcagcaggaaccctagcaccgccgcatccgcagccatgggtatcgacctcgttgccggtgggaggaacaagaagaccaagcgcacagcgccgaagtccgacgatgtttatctcaagctccttgtcaagctctaccgtttcttggtcaggaggaccaagagcaacttcaatgctgtcattctcaagaggctcttcatgagcaaaaccaatcgcccaccaatctccatgcgccgccttgtcaagttcatggaaggaaaggagaagaacattgctgtgattgttggc

SEQ ID NO: 6997 - DNA, 290 bp, Zea mays
ccacgcgtccggcccgacggcgtccagcggggcctgatcggggacatcatcagtcgcttcgagaagaaagggttctacctcaaggggatgaagttcatgaacgtggagaggtccttcgcgcacagcactacgctgacctttccgacaagcctttcttccccgggttggtggagtacatcatttccggccccgtggtggcgatggtgtgggaggggaaggacgtcgtgttgactggccgcatgatcattggggccaccaggccttgggaggcagcccccggtaccattcgt

SEQ ID NO: 6998 - DNA, 290 bp, Zea mays
atggcgtttacgagtcctacgaccaaccctagagtaggtccgccagggtatggacaggaaaaccagggcagtcgtgtttcttggaatacgagttatgagcagggagtgtttatgagttctacaaacatctcaagagaagccggtccgccaggttatgggcctggggaaagtcagggcaatatcacttcatggatttcgacaggcgggcagagaatgtttacaggtccttcaactatcccgaacgaagtcgggcagcaaggatatggcccttcaggaatcccgggaacgga

SEQ ID NO: 6999 - DNA, 286 bp, Zea mays
ccgagctgagggcaagggcgccggtggaggcatgggcggtggtgccaatggtgcatatggttctggtgctggtggaggcgttggcaagggcgagggtgtgagtggtgtggcactcgcaccatcgtccaacggctactacaatggcggtgccgccgatgctaccggtggcggttccggcgccggcggtggacatggtggtggcgcactggagctccaagctatggaaccggaggcggcctcggcggaggcaagggtgaggccggcagcgatggatcgtgggggtcag

SEQ ID NO: 7000 - DNA, 289 bp, Zea mays
atcaggaacagaatcagccgtctttgtgaagaaggagcacatcaagattcatggtttctgagcaaccgccgggtccatagcaaaccaaccctgcatgcagggccagcttattatatataatatctgaggtggagcatatctatctggctgtgtactgcaagcaggcctagtacgccgcctgcgcgttcctcctattacacatataggcccctccctgcgtgtatgcttgttaccgtcgtgtcgaaccttgtactacgaggctccatcgaacatcgatggcttgcttctt

SEQ ID NO: 7001 - DNA, 290 bp, Zea mays
  unsure (1)..(290): unsure at all n locations
gcgtccaccactanacgtaagatggcggcggagaccaaaccggctgcggccatcggggttgccggcgagatggaggtggaggcataccgccgcctattcccggtggccttcctggagcgccacctgggtgagtccgtccgcatcgatgcccgccgcctgagagaggcccgcaccaccaccgtcgccctcggcgccgtgtcctccgcgcatggttccgctctcgtccgcgttggcgacaccgccatgctcgcgtcggtcaagctcgaggtgatgtcgccctcggccgagta

SEQ ID NO: 7002 - DNA, 290 bp, Zea mays
  unsure (1)..(290): unsure at all n locations
accagctgaccgccgaacggaacgagcccggcgggcgnagagaagggagagagcgcgccagagcggcgccgaacaaccctcgtccaccgcactctcctggaccgtggccatggccatggccgcagtgtcccggtcccgggcgctgtgggcgtcccgcgccgccgcctacctcaggatctccaccttccccagggccttctccaccgtgctgaaggatctgaaatatgctgacactcatgaatgggtgaaggttgagggcgattcagcaaccgtggggattactgaccatg

SEQ ID NO: 7003 - DNA, 291 bp, Zea mays
gtttgatgtaagcagcagtgtaacattttccttcagccatgggtaaggagaagactcacatcaacattgtggtcattggccatgtcgactctggcaagtcgaccaccactggccacctgatctacaagcttggaggtattgacaagcgagtgattgagaggttcgagaaagaggctgccgagatgaacaagcggtcattcaagtatgcgtgggtgcttgacaagctcaaggctgagcgtgagagaggtattacaattgatattgccctgtggaagttcgagaccaccaatt

SEQ ID NO: 7004 - DNA, 328 bp, Zea mays
cgtctggccgcttcgtcatcggcggacctcacggcgacgctggcctcactggccggaagatcatcatcgacacctacggtggctggggagcccacggcgggggcgccttctccggcaaggacccgaccaaggtggaccgcagcggggcctacgtcgcgaggcaggctgccaagagcatcgtcgccgccggcctcgcccgccgtgccatcgtccaggtctcctacgccatcggcgtgcccgagcccctgtcggtgttcgtggacacgtacggcaccggcgcgatccccgacaaggagatcctgaagatcgtgaaggagaacttcgactt

SEQ ID NO: 7005 - DNA, 172 bp, Zea mays
gacgttatgaccgcaaacagtctggatatggtggtcagacaaagcctgttttccacaagaaggcaaaaacaacaaagaagattgtgctgaagctgcagtgccagagctgcaagcactactctcaacaaccgatcaagaggtgcaagcactttgagatcggtggtgacaagaa

SEQ ID NO: 7006 - DNA, 321 bp, Zea mays
cacaaagataggtggtttcattagagctgtattttctgttttccaagacttggatttctcatttcttgagatgaacccattcaccttggtaaatggtgaaccgtatcctctggatatgagaggagaactagatgacacagctgctttcaaaaacttcaataagtggggcaatattgtgtttcccctaccatttggaagagttctcagtccctccgaaagttttatccatgaactggatgagaagacaagtgcttctctgaaattcacggtactgaacccaaaaggacgcatctggacaatggttgcaggtggtggtgctag

SEQ ID NO: 7007 - DNA, 322 bp, Zea mays
cacgagacgaacagacctctaaaacctagcagaggcccgcgccgccgccgccaaccgcgacgaggaaggaagcaggaacgcgatgccgaagtcgaagcgcaaccgcccagtgaccttatcgaagaccaagaagaagccaggtttagagcgcaagggcaaagtagtcgccgagataaaagatgctgtcgacaaatacagcagcgcctatgtttttacctacgataacatgaggaatcagaagctcaaggacctcagggagcagctcaagtcttctagcaggatttttctcgctggaaagaaggttatgcagatagcgctgggg

SEQ ID NO: 7008 - DNA, 322 bp, Zea mays
cgcagttcccccgcgcccgagacgcaaccccgcgccaggagtaagtttgttcttttatcgatattatcgatatggcgagggaggagaatgtctacatggccaagctggctgagcaggccgaaaggtatgaagagatggttgagtatatggagaaggtggctaagactgtagatgtggaagagctcactgttgaggagcgtaacctcttgtcggtcgcatacaagaatgtgattggggctcgccgtgcttcatggcgcattgtctcttctattgaacagaaggaggagtcccgtaagaacgaagagcatgtgaaccttatcaa

SEQ ID NO: 7009 - DNA, 277 bp, Zea mays
gccctgccggcgagctgcgctacccgtcctacccggagatcgacggcacctggtcgttccctggcatcggcgagttccagtgctacgacaggttcatgctgagtagcttgaaggcggctgctgatgcagtgggcaagccggagtggggcaacgcgggttcgggcgactccggcagctacaaggactggccggaggacacgggcttcttccggcgcgatgtttgctggagcacggagtacggggagttcttcatgagctggtactcgcagatgctcct

SEQ ID NO: 7010 - DNA, 319 bp, Zea mays
ccggcagccaagcagaaaaataagagtatcgcacgcgcaaggcgattccgtccccattctccacccaatagggagctagagctacgagagggggaaatgggggacgggaataggcgtcgtcggccatgtcgtcgtcgtggaactcggtgggtctggcgatcctgtaccaggtgctgggctgggtcgccttcgccgcgtggtccttcagcttctacccgcaggtcctcctcaactacaagcgcaagagtgttgtgggcctgaatttcgattttctggtgttgaacttgacaaagcactcgtcctacctcatatacaatgc

SEQ ID NO: 7011 - DNA, 313 bp, Zea mays
atcagcgacttaacaacaataatggccaccgccatagttcccacggacgccgagctgctgcaggcgcaggccgacctgtggcgccacagcctctactacctgacatccatggcgctcaagtgcgcggtggagctccacatcccgaccgccatccacaacctaggcgggtctgccacgctgccggacctcgtggccgcgctgtccctgccagcggccaagctcccgttcctcgggcgcgtgatgcggctgctggtcacgtcgggcgtcttcgcgtcgtccgacgacgtgcagtaccggctgaaccggctgtcct

SEQ ID NO: 7012 - DNA, 312 bp, Zea mays
cccacgcgtccgctcaaataactaatacagtgtggaattcattgaaaggacggccagttctgggtcgtatataccaagggaaggagccaccacagtttgttgcacttttccagcccatgattatcttgaagggtggaattggatctggatacaagaagctcatagaagaaaagggtgcgacgggtgagacttatactactgaaggcatagctctaattcgagtatctgggacatctatccacaacaacaagactcttcaagtcgatacggtggcaacatctttaagctcaatggagtgtttcatactgcgat

SEQ ID NO: 7013 - DNA, 317 bp, Zea mays
ggttctaccaggagaccttcggcgtccctccggccacgcgagctcgccgaaatggtcgcccacaggttccatcagtaccaggtggtgggtcgcgcgctgccgaccccaaccgatgagcaccccaagatctaccgcatgaagctctgggccaccaacgaggttcgcgccaagtccaagttctggtacttcctgagaaagctcaagaaggtgaagaagagcaatggccagatgcttgccatcaacgagatctttgagcgcaacccgaccaccatcaagaactatggcatctggctgcgctaccagagcaggactggtta

SEQ ID NO: 7014 - DNA, 319 bp, Zea mays
gttcggagcgcacacacacacaaccagatctcccccaaatccacccgtcggcacctccgcttcaagatgcagatctttgtgaaaaccctgactggcaagactatcaccctcgaggtggagtcgtctgacaccattgacaacgttaaggccaagatccaggacaaggagggcatccccccagaccagcagcggctcatctttgctggcaaacagcttgaggacgggcgcacgcttgctgactacaacatccagaaggagagcaccctccaccttgtgctccgtctcaggggaggcatgcagatctttgtgaaaaccctga

SEQ ID NO: 7015 - DNA, 315 bp, Zea mays
gtgcaagtggcagtcgagcatggacgccaagaagtgcaggtgaagctggaatccgggctgcaagaaccggcgataagagggacaacccaagagggggacgccagcaacgaggagtgcaactggtccaggggaaggtgggtctacgacaacgtgtcccgcccattgtacagcgggctcaagtgctccttcatcttccccgaggtggcctgtgacaagtatggcaggaaggatgccatgtaccagcactggagatggcagcctcatggtcatggatgcgacctcccaagatttgatgccatcaagctgcttgaaaat

SEQ ID NO: 7016 - DNA, 314 bp, Zea mays
gtggagtagtggtaggaaaagctcgtcgccgagtcgccgtacggtggctcggctcgggtgatcgagctgcggccggcgggtactgatgcctgatggcgatgcgatgggccgcctccgtgacgggcgatccttcctccaccgcgcgcttgtcctctcgtcgctgctccttctcgcctccggcgtaatcttcttcgaggaacggttcgatgatgggtgggatagccgctgggtgaaatctgattggaagaagagccaaggacaagctggaaccttccgacacacagcgggaacctactctggagaccctgacgata

SEQ ID NO: 7017 - DNA, 310 bp, Zea mays
tccacgcgtccggtctcggcagccacaagaaaccacccccttccggcacacgggctcgaccacctgactccatcaccgtgcctgtctgtgttctagggacaagaagagcagagatatacaggagcgagcagatgcggggagaagaggatgagcaccacaacggcgtcgtcgctgaaccccaacgcgccgctcttcatcccggcggcgtaccggcaggtggaggacttctcgcccgagtggtgggagctcgtcaacaccaccgcctggttcctggaccactgcttccggcagcgtcagctccacgaggccg

SEQ ID NO: 7018 - DNA, 310 bp, Zea mays
ggctcttgccttggtagccgtacttgggttcctatggatctgcttgctgtccaggaagaagagcattggtggaaactatgtaaagatggacaaacagactgttcctgatggtgcaaagcttgtgacataccagtggaaccttccatattcatcaagcgagattattagaaggttggagctgcttgatgaagaggacgtggtcggttgtgggggctttggcacggtgtacaggatggtgatggatgatggcacgtcgtttgccgtcaagaggattgacctcagccgcgaaagtcgcgacaggaccttcgag

SEQ ID NO: 7019 - DNA, 311 bp, Zea mays
ggcttctcctcccccaccggttcgtgttcaggttctggttcgtgggcgagagggaagagatggcggcgtcggacgttgagtaccgttgcttcgttggcggcctcgcctgggccaccgacgaccactccctcaacaacgccttcagcacctacggcgaggtcctcgagtcgaagatcatcctggatcgggagacgcagaggtcccgcggcttcggcttcgtcaccttctccacggaggacgcgatgcgcacgcctatcgagggcatgaacggcaaggagctcgacggccgcaacatcaccgttaacgaggcc

SEQ ID NO: 7020 - DNA, 314 bp, Zea mays
tgctgttcttatcattgactcaaccactggtggttttgaggctggtatctccaaggatggccagacccgtgagcatgctctccttgctttcacacttggtgtgaagcagatgatttgctgctgcaacaagatggatgctactacacccaagtattcaaaggcccgttatgatgagattgtgaaggaagtctcttcctacctgaagaaggttggatacaaccctgataagatccacttcgttccaatctctggttttgaaggtgacaacatgattgagaggtccaccaaccttgactggtacaagggcccaaccc

SEQ ID NO: 7021 - DNA, 306 bp, Zea mays
gaaagaaaaggggcaggaagaaatcgagcctcactcgatccatcgcctcgccgcagcacacacgatgccggcggcgccatggccatgaagctggacatgtccgcgctcgagaccaacttcgccaacctgaccgcctccgccggcgacgacacgtacttctccgccgaggcccccgacgtgccgtccatggtgctccccatctgcgacgacttcgacggcttccaggcggccaccaaggatatggtgaagaataagaaggggacgaccacgcttgccttcatcttcgacaagggcgtcatcgtcgcc

SEQ ID NO: 7022 - DNA, 307 bp, Zea mays
ggaaaaattcaagaagaagatatcgaccgtgccctttttaatctattctcggttcagttgcgtcttggaatatttgataagcccagcaacaaccaatggttctctcaactagggcccaacagtgtgtgcacgaaagagcatagagagcttgcagcagaagctgtaaggcagggtgctgtccttctgaagaatgaccataattttttgcctctgaagagaagcgaagttagacatgttgccatcattggaccatctgcaaatgacgcgtatgcatgggcggagactatacaggtgttccctgcaatcc

SEQ ID NO: 7023 - DNA, 300 bp, Zea mays
atgcactagcacctcctcgcctccacctccgtcctcttcgatcccgtccaatcccccgctccccggcgcccctctccgccggcggctttgctgggtcccgcgctcctcctcctcctaggctgttctggttggggctgcggcggagggaactaggtaatgtggaaggaaaggggaggtttgagggagagcgcacgctagcggcagcagcgatgccatcgcacgcggatctggaccgccagatctcgcagctgcgggattgcaagttcctgcctgatgcggaggtcaaaacgctatgcgagc

SEQ ID NO: 7024 - DNA, 304 bp, Zea mays
ccacgcgtccgggttgctacaaggagatatatcgtgtgttgaagcctggccagtgctttgccgtgtacgagtggtgcattacggatcactatgatcctaacaatgcaacccacaaaaggatcaaggatgaaattgagcttggcaatggcctgccagatatcagaagcactcggcaatgtctccaggcagtaaaagacgccgggtttgaggttgtttgggataaggatcttgctgaagattctcccttgccttggtacttgcccttggatccaagccgattctccctgagtagcttccgtttgac

SEQ ID NO: 7025 - DNA, 311 bp, Zea mays
cccacgcgtccgcccacgcgtccggatgcaggtacttcaccaaggacttcaagggcagcgtgcccggcttcaaggtcgacaccgtcgacaccaacggcgccggcgacgccttcgtcggctccctcctcgtcaacgtcgccaaggacgactccatcttccacaacgaggagaagctccgcgaggctctcaagttctccaacgcctgcagcgccatctgcaccaccaagaagggcgccatcccggcgctgcccacggtcgccaccgcccaggacctcatcgccaaggccaactagatggccgcacaccccgcc

SEQ ID NO: 7026 - DNA, 309 bp, Zea mays
cccactcgtccgcccacgcgtccggtacaacatgaagtcaagggctgggagaggctttacccttgaggagctgaaggctgctggcatcccaaagaagcttgctccaaccattggtatttctgttgatcaccgccgcaagaacaaatcccttgagggactgcaggccaatgtccagaggcttaagacatacaaggccaagctggttatcttcccaaggcgtgcacacaaggttaaggctggtgactctactccagaggagcttgccaccgctacccaggtccagggtgactacatgccatttagtcgtgg

SEQ ID NO: 7027 - DNA, 296 bp, Zea mays
gaacattgcagcactccttacatcacagtccggggcttattatgacctgtgggtggatggcgagaagataatgttcagctgaagagcctcctgaggtgacaaaagcccgcaatgacaactcgcatggaacgaacttccctgactctccggaaccaatctatggcacccagtatctaccaaggaagttcaaggttgcagttaccgcggctggtgataactctgttgatattctgagcaatgacatcggtgttgtaggtgtttcagatgatgcaggagaacctattggctttagcatc

SEQ ID NO: 7028 - DNA, 304 bp, Zea mays
cccacgcgtccgcccacgcgtccggagagagagagagagagagagagagagagtgagggaggcgccgacgccgagtcctttctccatcgtgcatctgccgctgtttccgacaggatgtttctcacgaggacggagtacgaccgtggggtgaacaccttctctccggaggggcggctgttccaggtcgagtacgccatcgaggccatcaagttgggatccactgcgatcggtttgaagacaaaggatggtgttgtcctcgccgttgagaaacgtgtgacctcaccactgctggaaccaagcagtg

SEQ ID NO: 7029 - DNA, 298 bp, Zea mays
gggaccgggcgacgacggaaacagtagtgctgccagtagagctctcagaactcgggaaaaaaaaatgtcagatgccgccgtgcgtgtgatcggcctatggcgagcccgttcgtgatccgcgtcctgatcgccctgaagctgaagggcgtcgagttcgagttcgtggaggatgtggtgggcaggaagaacgagctgctgctgaggtcgaacccggtgcacaagaagaatcccgtcctgctccaccacggcaagcccatctccgagtctctgatcatcgtccagtacatcgacgaggtct

SEQ ID NO: 7030 - DNA, 301 bp, Zea mays
caattgtcaaccgactctatcttagctctctttgcaagccagtaggtcaccactcaaaagcttgtgaagcaggtgagatgggcaaggaggtggatgtgtccactctagatgccggcggcgtccgtgaccgtgactacgcggaccctccgccggcaccgctgatcgacatcgacgagctcggcaagtggtccctgtaccgcgccgtgatcgccgagttcgtggccacgctgctgttcctgtacatcacggttgccacggtgatcgggtacaagcaccagacggacgcgtcggcgtcggggcc

SEQ ID NO: 7031 - DNA, 300 bp, Zea mays
cccacgcgtccggctgcggcggacacggaggcgaaggaggaggagcagcagcagcaggcggcgccgaggagcggcatcccactcagtgcttgcaaccatggctaggggattgaagaagcacttgaagaggctcaatgcgcccaagcattggatgctcgacaagcttggcggagcttttgctcccaagccatcttctggacctcacaagtccagggagtgccttcctctggtcctcatcatcaggaacaggctcaagtatgctctgaactaccgtgaggtcatttctatcctgatgcaacg

SEQ ID NO: 7032 - DNA, 303 bp, Zea mays
tgttgatggaagattcaaactatttgaaagtcatgcgattttgaggtatcttgcatcggttttccctggagttgctgaccactggtatccttctgacttgttcaccagagccaaaattgagtcaatcttggattggcatcactcaaatttgcggcgtggtgcagcaacccttgtaatgcacactgcattggctcccttccttggtcttacgacaagtcatgaggctgtgaaacaagcagagaagcttgtgatgcagtcactgggggtgatcgaatccgtatggctgaaaggcgatgccaagtt

SEQ ID NO: 7033 - DNA, 303 bp, Zea mays
gtttgttttgtcacgcgccccgcccgacgcccgccacggcgccaccatgtcgcaggctacggatgtcgtcggaaacccgtacgccgccgagctcgctgcagccaagaaggccgtcgccctagcggcccgcctctgccagacagtgcagcggagcattttgcagtctgacattcaatcgaaggcagacaagactcctgttacagttgcggattatggatcacaggtactggtatgtctggtcctgaagaaggaattgccttctcggtctttctcagtcatagctgaagaggattcaaaagactt

SEQ ID NO: 7034 - DNA, 300 bp, Zea mays
cccacgcgtccgctcccggtccggcagcagacatcgggggtgcagagaggtcgaggtccggaggccgcgagttggagcgccaccaccagcgagtgctgcaatggcgggcacggtgacggtcccggggtcgtcgacctcgtccacgccgctgctcaaggacgagctcgacatcgtgatcccgacgattcgcaacctcgagttcctggagatgtggcggcccttcttccagccctaccacgtgatcatcgtgcatgacggcgacccgaccaagaccatcaaggtgcccgaaggcttcgacta

SEQ ID NO: 7035 - DNA, 297 bp, Zea mays
cagggtctctccacatgaccatccagaccgccgtcctcatcgagaccctcaccgcgctcggcccgaggtccgctggtgctcctgcaacatcttctccacgcaggaccacgccgccgccgccatcgcgcgcgactcggccgccgtgtacgcctggaagggggagaccctcgaggagtactggtggtgcaccgagcgctgcctcgactggagcgatgcgggcggccccgacctcatcgtcgacgacggcggcgacgcacgctgctcatccacgagggtgtcaaagccgaggaggattac

SEQ ID NO: 7036 - DNA, 300 bp, Zea mays
ctccaccacaccacaggcaccggcaccggcaccgcctcctccctccctcctgccaccgcgcggcaccccagccacagcacagcaatggcgggcaacggcgccatcgttgagagcgacccgctgaactggtgcgctgcggcggcggagctggcggggagccacctggacgaggtgaagcgcatggtggcgcaggcccggcagccggtggtgaagatcgagggctccacgctccgcgtcggccaggtggccgccgtcgcgtccgccagggacgcgtccggcgtcgccgtcgagctcgacgag

SEQ ID NO: 7037 - DNA, 297 bp, Zea mays
cccacgcgtccggccgccgccgctgcagtgtccatagccaccgcagagactgagatggggggttttgtcaagacccacaagagcaatgcatacttcaagcgtttccaggtgaagttcaagagaaggcgcgctggcaagacagactacagggccaggataatgctgattaaccaagacaaaaacaagtacaatacacccaaatacagatttgttgtgcgatttaccaacaaggacatcacagcacaaatcatatctgctagtatagcaggtgatatggttcttgcttctgcttactcg

SEQ ID NO: 7038 - DNA, 299 bp, Zea mays
cggacgcgtggcgtgacgcgtgggctcggcacggtccctcggctagggctcgtcgacctctcgcgcaaccggctcaccggcgccgtgccggacacgcactccaacctcaatcagctccgcgagctcgtgctgagtcacaaccgcctctccggcgccataccgccgagccttgcgcgatgcgtggacctgcagaattttgatctctcgcacaacgctctgcagggcgagaatccggcggacttgtccgcgctcagtggcttgctctacatgaacctctccggcaaccaactggaagggac

SEQ ID NO: 7039 - DNA, 264 bp, Zea mays
atcatggacttcgcggagaatctgatcctccgtctgatggaggacccggacaagcgcgaccaggttcggcgggagcatgtctacaagatgaaggagcggtgcgagcgcactaaggcggcgtggagcctccctctgcgcccctacggcttctggaccttcgaccgcttcaactcgcagctctcctgggatccccagatcagccaggccgccggcgtcgggacccctacgacgacctcatcggccggcagtctggctcggcggcgt

SEQ ID NO: 7040 - DNA, 145 bp, Zea mays
cccacgcgtccggttggcttctcctccccctccggttcgggttcgggttcgtgaggttctccggggttcggtttcgtgggtgggcggatcgagatggcggagtcggatgttgagtaccgctgcttcgtcggcgagctcgcctggg

SEQ ID NO: 7041 - DNA, 298 bp, Zea mays
cccacgcgtccggtcaggttgaaggagaaatatcgattccgtgttattttggaggagagtcattcttttggggtgcttggcaagtctgggcgtggccttgctgaacattatggagttcctattgaaaaaattgatatcatcactgctggaatgggaaatgcattagctactgatggtggcttttgtacaggaagtgtcagagttgttgatcatcagcgtctaagcagctctgggtatgttttctctgcatctctgccaccttatcttgccagtgctgctgtttctgctgttaactatc

SEQ ID NO: 7042 - DNA, 245 bp, Zea mays
agagagttgggcgcagagaatccccaagcaaacaaacagggtagaggtagatgtagatgagatgagacgcgatgtgatgtgaggttgggtctgggacaccatggctccgatgaagctgtacggggcggtgatgtcgtggaacgtgacgaggtgcgcaacggcgctggaggaggctggctccgactacgagatcgtgcccatcaacttcgccaccgccgagcacaagagccccgagcacctcgtcc

SEQ ID NO: 7043 - DNA, 295 bp, Zea mays
gaatacatatacaagctagacaaagttacatacaacaagtaccatccctacacgtcatggatccctataactgtttatatctgcctgcgcaattgctcccagcagttgaggagtgcctctttggtccttttcgcatggcttggcaagattacactagagacttatatctctcagatccatatttggcttaggtctagcatgccaaatggacagccaaaatggcttctttgtttcataccagattatcctatgcttaacttcatgcttactacggcgatctatcttcttctatcat

SEQ ID NO: 7044 - DNA, 297 bp, Zea mays
cttccccaagaacccaagcccccaccatgacaagctcctcctctccttcccgaaaggcgctgagcaagatcgcttgcaatcggctgcagaaggaactcgccgagtggcaactcagcccccctgctggattcaagcacaaggtctccgataacctacaaaggtgggtaattgaggtcactggagcggcgggcaccctttacgccggcgagacctaccagttgcaggttgacttccctgagcattatcctatggaggcacctcaggtcatttttctcaatccagcgccaatgcatccac

SEQ ID NO: 7045 - DNA, 294 bp, Zea mays
cccacgcgtccggaaagtctaaccatggaagagcgtatgacactgtgcacatggttattgaagctggtggaaagaacggtgttgtgcctgctgatgaaactacatttaaataccttgagggtaagacatcagtcgattatgaacctgtctacagtgatgctcaagccagattttttagcgactaccggtttgatgtatcaaaactggagccagtagttgccaagccacattcgcctgacaaccgtgctccagcaagagaatgcaaagatgtgaagatcgaccgagtctatattg

SEQ ID NO: 7046 - DNA, 298 bp, Zea mays
ccgcctccactcccccctcccaggtgctgcccaggtaagtcggcggcggcgatgacaacgcgcttcaagaagaaccgcaagaagcgcggccacgtgtccgccgggcacggccgcatcggcaagcacaggaagcacccgggaggtcgcggtaacgcggtggcatgcaccaccaccgtatcctcttcgacaagtaccatccgggctacttcggcaaggttggcatgcgttacttccataagctccgcaacaagttctactgccccgcggtcaacatcgagcgcctctggtcgatggtgcc

SEQ ID NO: 7047 - DNA, 298 bp, Zea mays
gcaaaacaacatcaagctctatgtgcgcagggtgttcatcatggacaactgcgaagagctgatccctgagtggctgagcttcgttaagggtattgttgactctgaggaccttcccctcaatatctctcgtgagactcttcagcagaacaagatcctgaaggtgatcaggaagaaccttgtgaagaagtgtgttgagctcttctttgagattgctgagaacaaggaggactacaacaagttttacgaggctttctccaagaacctcaagcttggcatccatgaggactcgcagaacagg

SEQ ID NO: 7048 - DNA, 295 bp, Zea mays
cccacgcgtccgcacaccgcaaccgcaagcaagcgaagtagagcctgcctgaccagagctagctgagtgcaacagccaacagcagctggtctgactgacatggcgaaggacatcgaggcatcggggcccgatgcgggcgagttctcggccaaggactacaccgaccctccgccggcgccgctggtcgacgcggaggagctcacccagtggtccctgtaccgcgcggtcatcgccgagttcatcgccacgctgctcttcctctacatcaccgtggccaccgtgatcgggtacaagc

SEQ ID NO: 7049 - DNA, 310 bp, Zea mays
aacgacctgaatggaagtcccttgtgcctctacaactgagcagattgagcaggaaatctgccatgcgtttctttttgttccccaaggttcagtcggctggtcaatcgccagatgataccccagtttatcttaatgtgtatgatttgacgccaatgaacggttatatatattgggcaggcctgggcatatttcactcaggaattgaagttcatggtgttgaatatgcattcggagcacatgactttcccaccagtggggtctttgaggtagaacctcgccaatgccctggtttcagattcagaaaatcaat

SEQ ID NO: 7050 - DNA, 298 bp, Zea mays
gctgttttaggtgaggaggtctacatttttgaagtaccaactaccagcatagggtaagggatcatgcaggcaaccgtaagactgtctccagcagcgtcctctaaattccgtcctctaaagattaggagtcacgcacagaagtactttttgaaggttcaaaagaatggaacaggtgagcatttgcccccacctaggccaaagcgaaaggctgcccatccatatccacacaagtcctcaaaaaaggcccttcaagttgtcttaccacaacaagtttcgcacataatggagcaaggctgtg

SEQ ID NO: 7051 - DNA, 293 bp, Zea mays
gggcaaccctgcgttcgccctcgtcaacaaggccactgggctcgccatcaagcactccctcggccagtcccacccggtgaagctgtgtgccgttcaacccggagtaccaggacgagtcggtgctgtggacggagagcggcgacgtgggcaagggcttccgctgcatccgcatggtgaacaacatccgcctcaacttcgacgccttccacggcgacaagggccacggcggcgtgcacgacggcaccaccgtggtgctgtgggagtgggccaagggcgacaaccagagctggaag

SEQ ID NO: 7052 - DNA, 289 bp, Zea mays
gtcttgaagttggtctgaccaactatgcagctgcctactgcactggacttctgttggctcgccgtgtgctaaagatccgtggtttggataaggagtatgagggcaatgttgaggccactggtgaggacttctctgttgagccagctgatgagaggaggccattccgtgctctcttggatgttggccttatcaggactacaacagggaaccgtgtctttggtgccctcaagggagctttggatgggggcctggatattcctcacagcgagaagaggtttgctggattcaa

SEQ ID NO: 7053 - DNA, 115 bp, Zea mays
cccacgcgtccgcatcatcccagagatcagcaacttcgctagtatctggttcatctctctcttcatctcgatcttcgccacgggtatcctggagatgaggtggagcggcgtgggc

SEQ ID NO: 7054 - DNA, 287 bp, Zea mays
ccaagacccactgaaccctcgccgtttcgtcgcacccaccaacacgagagatgagctccggcggcgcggacaagcccggcagtggcggcggcgcggtgaagacgccgtcggacttcctcaagtccatcaggggccgccccgtagtcgtaaagctcaactccggcgtcgactacagaggtatattggcttgtctggatggttatatgaacatcgcaatggagcagaccgaggagtacgtgaatggccagttgaagaacaagtatggcgatgccttcataaggggcaac

SEQ ID NO: 7055 - DNA, 287 bp, Zea mays
cggacgcgtgggaaaaaaaaaacaggcaaggaaaatggctccgaccgccgccaaggacagtggctccgccgatcgctggcgcgaggtgcaggcgttcgaggacagcaagctgggtgtgaagggcctggtcgactccggcgtcaagtccatcccggccatgttccaccacccgccggagtccctcaaggatgtcatttctccaccagctctgccctcctccgacgatgcgccggccatcccagtggtggacctgtccgtggcgcggcgcgaggatctggtggcccagg

SEQ ID NO: 7056 - DNA, 292 bp, Zea mays
gaaaagcagttcttcagctaggcaggagggcacaggaaggaggagatggcgtcaaagaggattcagaaggagctcaaggatctgcagaaggaccctcccacctcgtgcagtgcaggtcctgttggtgaagacatgttccactggcaggcaacaataatgggtccatctgatagcccatattctggtggagttttcctagtcacaatccattttcctcctgattatcctttcaaaccaccaaaggtgacatttcgtactaaggtgttccatccaaacatcaacagcaacggga

SEQ ID NO: 7057 - DNA, 289 bp, Zea mays
cgatcatcgacatggacgcggacgtgatcaccatcgagaactcgcggtccgacgagaagctgctctccgtgttccgtgagggtgtcaagtacggcgcgggcatcggccccggtgtctacgacatccactcccccaggatcccgtcggccgaggagatcgccgaccgcatcgacaagatgctggccgtgctggacaccaacatcctctgggtgaaccccgactgcggcctcaagacccgcaagtacacggaggtcaagcccgccctgaccaacatggtctccgctgctaa

SEQ ID NO: 7058 - DNA, 290 bp, Zea mays
ctccttcaccatgtgcgagcctgaagctcaaagcaaagttgcagaataaggagccgcctcacaacatgctagaccatgctcccttgtgtaatttcataagactacaacccttttagggcttgttcggttgtgtctgtatctaagggaattgaaggtgattaaatttccttctatacaaatagaggggctttaatcccctccaatactcttcaatccactcctaatcgaacaagcacttaatatgatatcttagattgccgtacctgtgtaatatcatgaataacatttgc

SEQ ID NO: 7059 - DNA, 287 bp, Zea mays
cacaaacacaagtcgtcgtaggcagcgagcgtctctcctctcccacgcatcggccaaggaagagagagagatcgccgctccccttctcggcgtcggtggtgcgggtgccctccctcctcgagcgagatctgtctggtcacagatctatctgacaaaatggtgaagatctgctgcatcggtgctggctatgtcggtggcccaaccatggccgtcattgccctcaagtgcccagacattgaggtcgtcgtcgttgacatctccaagccccgcattgaggcctggaacag

SEQ ID NO: 7060 - DNA, 287 bp, Zea mays
ggaatttctttccctgattctcgacgtctcacggaatataaacattttctagaggaagctaagaaacgtgatcataggatattagggaaagcacaggaactcttctttttccatgaacttagccctggaagctgcttcttccttccacatggtgccaggatatataacaaactgatggacttcatgcgacaacagtacagagatagaggataccaagaggtgttgagcccaaatatttacaatatgcaactatgggagacttctggacacgccgcaaactataagga

SEQ ID NO: 7061 - DNA, 287 bp, Zea mays
acatcaccaactaggatcgatctctcgacagcaaatagctagcaatggagaagtacaccaaagccctagcgtcattgctcaccatgctggtgctggcacctctcctcgccatggccaccgacccagaccccctgcaggacttctgcgtcgccgacctcaacggcaagctgtcagtgaacgggtacccatgccagccgccgtcgtcggccggcgaccagttcctcttctcgaccaagatcgccacgggaggcgaccccctggccaacccgaacggctccaacgtgacg

SEQ ID NO: 7062 - DNA, 294 bp, Zea mays
atacatcaccaactaggatcgatctctcgacagcaaatagctagcaatggagaagtacaccaaagccctagcgtcattactcaccatgctggtgctggcacctctcctcgccatggccaccgacccagaccccctgcaggacttctgcgtcgccgacctcaacggcaagccatcagtgaacgggtacccatgccagccgccgtcgtcggccggcgaccagttcctcttctcgaccaagatcgccacgggaggcgaccccctggccaacccgaacggctccaacgtgacggagct

SEQ ID NO: 7063 - DNA, 290 bp, Zea mays
caaagagctagtagtggaaccgaagatgttcgggaacatcggaaagatccccatcatcggcgacctgacgggcagcaacaagaatgcgcacctcaagggcaacgtggtgctcgtgcgcaagaccgtgctcggcttggacgtcaccagcatcgccggctccctcctcgacggcgtcggcgagttcctcggccgcggcgtcacctgccagcttatcagctccaccgtcgtcgaccctaacaacggcaaccgcgggaagttgggcgcggaggcgagcctagagcagtggctgc

SEQ ID NO: 7064 - DNA, 286 bp, Zea mays
gcctcaccaccattagagcgcgcgcgccaagctcgtggtgaggttttcgagatgaaggttatcgagaagatcctggaggcggcgggggatggccggacggcgttctcgttcgagtacttccctcccaagacggaggagggggtcgagaacctgttcgagcggatggaccgcatggtggcgcacggcccctccttctgcgacatcacctggggcgccgggggatccaccgctgaccttaccctcgaaatcgccaaccgtatgcagaacatggtgtgtgtggaaacca

SEQ ID NO: 7065 - DNA, 287 bp, Zea mays
acgggatctgcgtgaccgcgcacaccccgctgggtggctccaccgccaacgccgagtggttcgggacggtctcgtgcctggacgaccctgtcatcaagagcttggctgataagtacggcaagacgccggcgcactcgtcctccgctggggtctgcagcgggacacggtggtgatccccaagacctccaaggtggagaggctgcaggagaactttgacgtcttcggtttcgacatctccggcgaggacatggagaggatgaaggccatcgaccggaagtaccggacta

SEQ ID NO: 7066 - DNA, 286 bp, Zea mays
ttctgggaggccaaggggcaaaccccggtgttcccgaggatcttaggacacgaagcgggaggcatcgtggagagcgtcggagagggcgtgaccgagctcgcgccaggcgaccacgtcctcccggtgttcaccggcgagtgcaaggcgtgcgcccactgcaagtcggaggagagcaacatgtgcgacctcctcaggatcaacgtcgaccgcggcgtgatgatcggcgacggtaagtcccgcttcaccatcagcgggcagcccatcttccacttcgtcgggacgtcca

SEQ ID NO: 7067 - DNA, 285 bp, Zea mays
cgctgattttggaaagctttttaagtcatctgcacctgtagaattgactgaagctgagactgaatactcagttaatgttgtgaagcatatttttgatggacatgttgtgctccaatacaactgtaccaatacaattcctgaacaattgcttgaacaggttactgtttttgttgatgcttctgaggctgatgaatttttagaagttgcttcgaagcctttagaatcattaccatatgattctcctgggcagacctttgtcgcttttgagaagccagaaggtgtcat

SEQ ID NO: 7068 - DNA, 281 bp, Zea mays
cggacgctggttgcttctgtgactatggaattttgtaaacagcttttaatgcatgttggagtatttattaattttgtatacttctttgaaaatgagcttggtgttgtatttgcaaatcatcagatggtgactatatgggaatgtatttggttacccaatgtggaatggtttattttcatgattttgtgttaacagaagttttaacctttaagggtctgtttggttgggctgtggctgtgaaaaaagttgctgtgggctgtgagctgtgaaaaaagctgctg

SEQ ID NO: 7069 - DNA, 283 bp, Zea mays
ctccatagcacctgttccagctagctaggagagagctttatttaggcggcggcaacaagatgaacaggaagccaggagactgggactgcagggcgtgccagcacctcaacttcagccgtcgggacgcatgccagcgctgcagtgaaccacgtggagttggtgatcgtagcggcggtggtggcgacttgggtgggcgtggtggttcctccttcggcggtggctttggtgctggctctgatgtccgccctggtgactggtactgctcctgcggcgcacacaactt

SEQ ID NO: 7070 - DNA, 288 bp, Zea mays
caaccacttcgtccaggagttcaagaggaagaacaagaaggatatcactggcaaccccagggctctccggaggctgaggaccgcttgtgagagggcgaagaggactctgtcttccactgcccagaccacgattgagattgactcgctgtatgagggcatcgacttctactccaccatcacccgtgccaggtttgaggagctcaacatggacctgttcaggaagtgcatggagcctgttgagaagtgcctgagggatgccaagatggacaagagcaccgtccatgacgt

SEQ ID NO: 7071 - DNA, 283 bp, Zea mays
ctctacgagtgccccgttacccgtatcaaggacgagagattgggggtcggcgagacgatccggacgctcaaatacctggacaagatggatgccgacgagaacgagcgcccagtgtccgatgacgacgatgacgacggcgagggcgatggcgagggcgatggcgacgatgatgacgaagatgaagaagacgaggaagaccctgggaacggcgaggtagcgaacggcggcgtcgcccatgcgcgcgagggcgtagcctcgcacccggtggaggtgaatggggtga

SEQ ID NO: 7072 - DNA, 281 bp, Zea mays
cccacgcgtccgatttacggatcgatcacagaggatatcttgactggatttaagatgcactgccatggctggcggtctatttactgcatcccgaagcggcctgcattcaaaggttctgcgcctctgaacctttccgaccgtcttcaccaggtccttcgctgggcccttgggtccgtcgaaattttcttcagcaagcactgcccactttggtacggatacggcggcgggctaaaattcctggaaaggttttcttatatcaactccatcgtttatccctggac

SEQ ID NO: 7073 - DNA, 281 bp, Zea mays
cggacgcgtggcgttgaacgaggggcacccagacaagctgtgcgaccaggtgtcggacgcggtgctggacgcctgcctggcgcaggaccccgacagcaaggtggcctgcgagacctgcaccaagacgaacatggtgatggtgttcggcgagatcaccaccaaggcgagcgtggactacgagaagatcgtgcgcgacacctgccgcgagatcgggttcacctccgacgacgtggggctcgacgccgaccgctgcaaggtgctggtgaacatcgagcagcagt

SEQ ID NO: 7074 - DNA, 281 bp, Zea mays
ctgtgttcttgcgcgtacgtgtacacagccccgatccgaatcgtcctcctcgcgagcctcgccgatcccctattcccctcccctcgcttcaagatgcagatctttgtgaagaccctcaccggcaagactatcaccctcgaggtggagtcttctgacaccattgacaatgtcaaggctaagatccaggacaaggagggcatccctcctgaccagcagcggcttatcttcgccggcaagcagcttgaggacggccgcacacttgctgactacaacatccagaa

SEQ ID NO: 7075 - DNA, 129 bp, Zea mays
cggaccgtgggtcgtccccctccggttcgggttcgggttcgtgaggttctccggggttcggtttcgtgggtgagcggatcgagatggccgcgtcagatgtatagtacagctgcttcaacttcagcctca

SEQ ID NO: 7076 - DNA, 287 bp, Zea mays
cattgatattgctctgtggaagtttgagaccaccaagtattactgcaccgtcattgatgcccctggacaccgtgacttcatcaagaacatgatcactggtacctcccaggctgactgtgctgtccttatcattgactccagcactggtggttttgaggctggtatctccaaggatggccagacccgtgagcatgctctccttgcgttcactcttggagtgaaacagatgatttgctgctgcaacaagatggatgcacgactcccaaatactccaagggcgttatgat

SEQ ID NO: 7077 - DNA, 159 bp, Zea mays
cggacgcgtggtgggaacaaaactctggtgctccctgtacctgcctttaatgtgattaatggagggtcacatgctggaaacaagcttgccatgcaggagttcatgatcctcccaactggtgcctcctcgttcaaggaggccatgaagaagggaggtgag

SEQ ID NO: 7078 - DNA, 154 bp, Zea mays
  unsure (1)..(154): unsure at all n locations
aacaagaacaagctgaaaaagcgagttgtgactaatgaaggttacactgatgtaccttccaacaaagaagatttgttacttcaggctgntgcccagcaacctgttagtgtagggatatgtggtagcgctagagcatttcagttatactaccagg

SEQ ID NO: 7079 - DNA, 282 bp, Zea mays
  unsure (1)..(282): unsure at all n locations
cgaaatgggaaagaagattgctggtcgcggttttggcgagtataataggtacacgtgggaggagattcaggcancgacgncaacgntctcttctgctcttatgatcggtaagggatcgtatggcacagtttacaaggcgaacttcgtcatacagtagcagctgtcaaagtactgaactcccctgaaggctgtggaactcagcaactacagcaggagctcgaggtcctcggcaaaatccggcaccctcacctgctgatgatgctgggagcatgccctgaacac

SEQ ID NO: 7080 - DNA, 289 bp, Zea mays
ggccaggtctctcccatatcgggttctcccttcctcttcctgtttccgcgcgcgagatcgccgccccgggtgggctctagatcccgatggcctcgcgccgccgcaccctgctcaaggtcatcatcctcggcgacacgtgggttgggaagacgtctttgatgaaccaatatgtgaacaagaagttcagcaaccagtacaaggctacgattggggcggatttcctcaccaaggaggtgcagttcgaggacaggctcttcactctgcaaatatgggacactgctggtcagga

SEQ ID NO: 7081 - DNA, 283 bp, Zea mays
aataggaaccccaacatgaccaaactagagatagagaatgagctgaaggattttcttggagtctcgaaggtcatctggatacctcgtggactttatggtgatgaggatacaaacggccacgttgacaacatgtgctgcttcatcaaacccggtgtgatcctgctgtcgtggaccgacgacgagaaggaccatcagtacgaacggtcggtcgaggcactgtctgttctctcccagtccgtcgacgcgaaagggcggcactccaagtggtgaagatccacgtccc

SEQ ID NO: 7082 - DNA, 290 bp, Zea mays
gggttggcttctcctccccctccggttcgggttcgggttcgtgaggttctccggggttcggtttcgtgggtgatcggatcgatatggctgcgtcggatgttgagtaccgctgcttcgtcggctgcctcgcctggtccacggaagaccactccctccacaacgccttcagcacctacggcgaggtcctcgagtccaagatcatcctcgatctggagacgcagaggtcccgctgcttcggcttcgtcatcttctccacggaggatgcgatgctgaactgcatcgatggcatg

SEQ ID NO: 7083 - DNA, 265 bp, Zea mays
ctggccgcaagcaaaccgaacgaacccaaccgaagcgagactgagcaaggcagaggcgtcgtgaccggcgatggagcggctgcagcggatctttggcgcctccggcatggggcagccgccgacggactcgccgctgctcgattcctccgagcaggtctacatctcctccctagcgcttctcaagatgctcaagcacgggagggctggggtgcccatggaggtcatgggcctcatgctcggcgagttcgttgacgactacaccgtc

SEQ ID NO: 7084 - DNA, 291 bp, Zea mays
caacagcatggattaaaggggaaggtgttatgatctggctgcttgccattatctacttcatatctggtgcgcctggggcttatgtgctatggtatcgacctctttataatgcaatgagaactgagagcgctttgaagtttgggtggtttttcctattttacatgattcatataatcttctgtgtgtgggcagctgtggctcctccatttcctttcaaaggaaaatctttggctgggattttaccagcaattgatgtcataagcaagaatgctattgttgggatattttact

SEQ ID NO: 7085 - DNA, 289 bp, Zea mays
cgcagatgcagcgtggcaattccgtcgtcgtgatgtcgcggtttgacatggactctgtgatggccgcggtgcagcggcaccgtgtcactcacctcttctgcgtgccgccggtcatgatagcgctcgccaagctcgggagcgttgggaaatatgacctcagctcgctcaggttcatcggctctggcgcagaccgctcggcaaggacgtgatggagggagtggccaagaattttccagaagctgtgattgcccagggttacggaatgactgaaacttgtgggatcatatct

SEQ ID NO: 7086 - DNA, 290 bp, Zea mays
cgactcacgacgacggaaacagtagtgctgccagtagagctctcagaactcgggaaaaaaaatgtcagaggccgccgtgcgtgtgatcggcctatggcgagcccgttcgtgatccgcgtcctgatcgccctgaagctgaagggcgtcgagttcgagttcgtggaggaggtggtgggcaggaagagcgagctgctgctgaggtcgaacccggtgcacaagaagatccccgtcctgctccaccacggcaagcccatctccgagtctctgatcatcgtccagtacatcgacga

SEQ ID NO: 7087 - DNA, 285 bp, Zea mays
ggacgtggcgacgacgtcgagctcgtcgccgtgaacgaccccttcatcagcaccgattacatgacctacatgttcaagtaagtgcctgtgcacggacagtggaagcaccatgaggtcaaagtgaaggactccaagacccttctctttggtgagaaggaggttgctgtgtttggctgcaggaaccctgaggagatcccatggggttcggttggcgctgaatatgttgttgagtctactggtgttttcactgaccaggagaaggctgcagctcacttgaagggtggt

SEQ ID NO: 7088 - DNA, 290 bp, Zea mays
gttgtttctcttctcttgctccgcaaaccagcgcaacccttccctgacagcggcggcgacatggtgctcgaggcgacgatgatctgcatagacaactcggagtggatgcggaacggcgactacgccccgtcgcggttccaggcgcaggccgatgccgtcaacctcatatgcggtgccaagacccagtcgaacccggagaacacagtaggcgtgatgacgatggccgggaagggcgtccgcgtgcttgtcactcccaccagcgacctcgggaagattctcgcctgtatgca

SEQ ID NO: 7089 - DNA, 288 bp, Zea mays
cagaagatgccggcggggcacgggctgcggtcgcggacccgcgacctgttcgcgcggcccttccgcaagaaggggtacatcccactcaccacgtacctgcgcacctacaagatcggcgactacgtcgacgtcaaggttaacggcgccgtgcacaagggcatgccgcacaagttctaccacggccgcaccgggagcgtctggaacgtcaccaagcgcgccatcggcgtcgagatcaacaagcaggttaatggccgcatcatcaggaagcggatccatgtccgcgtggag

SEQ ID NO: 7090 - DNA, 289 bp, Zea mays
gttctctcgtgaccgccttccctcctctcctgcgtcccaactgggcaattccccaaacctaactaacctttgccaccgcgggagccaccatgggtggccagatgccggacgccgacgggaaggcccgctcggcggactcctcgtcctcttacgggtaccgccgtcggcgccgccgcagcaccagtacggcacctttggtcccccatccggagcctccggggagtttccgcagccggcggtcgggttcccccagccggcggcgcctgcctgggatgcagcactacccgca

SEQ ID NO: 7091 - DNA, 297 bp, Zea mays
cttactctccgccgtcgccctgctcgcccgaagcagctgccggcaaaatggccccgaagagaggcggtagggcgccggtccccgccaagaagaaggcggtggtgacgaacccgctcttcgagaagaggccgaagcagtttgggatcggcggcgcccttccgcccaagaaggacctccaccgcttcgtcaagtggctcaaggtcgtgcgcatccagcgccagcgccgcatcctcaagcagcgcctcaaggtgcccccggcgctcaaccagttcacacgtaccctcgacaagaaccttg

SEQ ID NO: 7092 - DNA, 285 bp, Zea mays
cccatccgtccgctgcattcctgctctctcgctctcctcgctctcagaccacagttgccgccgccgccgccctaagccagggtgctgaggctttcgttggcctcttcgccggcagcgagcacccaccagcagttctgtagaaatggctgatggtgaggacatccagcctcttgtctgcgacaatggaaccggaatggtcaaggctggttttgccggcgatgatgcaccaagggctgtattccctagcatcgttgggcgtcctcgtcacaccggtgtcatggtagg

SEQ ID NO: 7093 - DNA, 286 bp, Zea mays
tgaggaattcattcttatgccaaacgttgccaaccttcaaaatgttggtgaccgtctgtatgacgaagaactatatgaagctgcaaaaatcatctatgctttcatctcaaactgggctaagctggctgttaccctggttaagctgaagcagtttcaaggtgctgtggatgctgctcgcaaggctaacagtgccaaaacatggaaggaggtctgctttgcttgtgttgacgccgaggagttccgtcttgcacaaatttgtggtctcaatattattgttcaggttgat

SEQ ID NO: 7094 - DNA, 285 bp, Zea mays
atggcggcgctggggccgacggcaggcgtccgtggagcgggtgttcgcggacaaggcggtgccgtcgtggcgggagcagctcacgctgcgggcattcgtcgtcagcgcgctgctggccgtcatgttcagcgtcatagtcatgaagctcaacctcaccacggggatcatcccctccctcaatgtctccgcggggctgctcggcttcttcttcgtccgcatgtggaccgccgccgccgagaggatgggcttcctccgccagcccttcaccaggcaggagaacaccgt

SEQ ID NO: 7095 - DNA, 288 bp, Zea mays
gcgccatctcattcttcttcctccatcttgtctctacttgccccgcgccggggagccgcgagcgtcgcgccactcccatcgcctgcccacaactccggcatggagccgtcggcgtgggccgtcgccttcgccgcactctgcatcgtcgcgctcgcgccgccggcctcagggttctacctccccggcgtcgcgcccaatgacttcgagaagaaagatccacttcctgtgaaagtcaacaagctgacctcaatcaagacacaacttccctactcctactattctctccca

SEQ ID NO: 7096 - DNA, 281 bp, Zea mays
ggacctggcgcgacgactcgtaccagaagtggcggtggcagcctgcgggctcgacctgccgcggttcgacgcgcggctgctagctggagcggctgcggaacaagcggctgatgttcgtgggggactcgctgaaccggaaccagtgggagtcgatggtgtgcctggtgcagtcggtgatccccgacaggcggcagaagacgctgacaaagttcgtcaacggcgggtccagcaacgtgttctacgcgcacgagtacaacgcgacggtggagttctactgggcg

SEQ ID NO: 7097 - DNA, 288 bp, Zea mays
ttatccgccattgctcaccgcacaagtgcacgctcacctcacacacgcagctaagtagctaacgccgtagatgaacaagaaaaggctcgacatggccgaggagaagaagcagggcctgcagctgctggacttctgggtgagcccattcgggcagcgctgccgcatcgcgctggacgagaagggcctggcctacgagtacctggagcatgacctggggaaaaagagcgagctgctcctccgcgccaacccggtgcacaagaagatccccgtgctgctgcacgacggccg

SEQ ID NO: 7098 - DNA, 139 bp, Zea mays
agggaactgtttgatgccttcttgaaaccatatttcctagaagcatacaggccgttgaggaaaggagaccttttccttgtcagaggaggaatgagaagtgtggaattcaaagtgatagagactgatcctgctgaatatt

SEQ ID NO: 7099 - DNA, 288 bp, Zea mays
cccacgcgtccggtacaagttattcattactcctacctatttgacaatattacacatggcaaggttttgattgccagtttggctacaaagaatggagcattttcagcatcaagcttgatgaattttgttcccacatagggagagctgtggctgctgatccaggggctcaactgtacaccatactggacctctgccgtgcttttgaccgtgttttcaaggaacatcttgatggagggaggtcaggtggagatagaatatacggcgtgtttgaccataagctccctgctg

SEQ ID NO: 7100 - DNA, 286 bp, Zea mays
gccccccaaaccctcgcaccctaaaacagcggcgcacaagatgtccgacgaccccaccaacggcggcggcggtgatcgcgtggaggacgtcgtccgcgccgagggtgaaacacaacctcgtgatgatggcttgtcgaaatccaaggatagggacaaagatagagaaaaggacaaggacagagatcgtcgccgagaccgtgacagagatcgagggagagacagggaccgtgatagggatagggacagggacagggatcgggacagagacaaggatcgccaaagtagg

SEQ ID NO: 7101 - DNA, 282 bp, Zea mays
ataggataaagcttccaggaaatgcaatgctaggtgaaggaaaaccagagaaccagaaccatgccataattttcacacgaggaacattatatggaggagactttgaaaatgaggaatttgttgcaagagtttctgaagaaacatgatggtgtgagatatccatcaatacttggtgtaagagaacacatcttcaccggaagcgtgtcttctcttgcatggttcatgtcaaaccaagaaacaagttttgtgaccattggacaacgtgtacttgccaatcctttg

SEQ ID NO: 7102 - DNA, 277 bp, Zea mays
actcgcagctagctgacacggccgagaagcagcttgcattgcaggcgtagtacgtacccagcagcagctagcactagcagtccatcggagcgacgatggtgagaaggacggtgctggcggcgctgctggtggccgccgccctcgccggcggcgcgcgggcgcactcaaggaggggttctacgactactcctgcccacaggcggagaagatcgtcaaggactacgtgaaggcgcacatcccccacgcgcccgacgtcgcctccaccctgctccgcacc

SEQ ID NO: 7103 - DNA, 127 bp, Zea mays
gccaagagaactctgtcttccactgcccagaccaccattgagattgactcgctgtacgagggcattgacttctactccaccatcacccgtgccaggtttgaggagctcaacatggacctgttcagga

SEQ ID NO: 7104 - DNA, 146 bp, Zea mays
gtccttacaaggctgctcctttttcacggaaagacattgactcgattaatgatgagacattcgggtcttctgaattatcaaatgaggatagagcagaagaagaaaggaagcggagggcatcttttgagttgatgagaaaagagcaa

SEQ ID NO: 7105 - DNA, 231 bp, Zea mays
cgcaaggtcactgctgggagcgcagaccgcatggtctacatctgggacacaacatcaaggcgcatcctgtacaagcttcccgggcacaatggttctgtcaatgagactgctttccatcccacagagccgatcattggatcttgcggcacgacaagcagatctatcttggggaactttaagtgactatcagttccttttcagctagatgttcttgtgacactttgatgagga

SEQ ID NO: 7106 - DNA, 270 bp, Zea mays
gaacaatgctattctcgctgaggagaagcacttgcctatgtatgacgagttggctagcaagagcaatgttgaatatattgccggaggagccacccagaactctatcagggttgcccaatggatgcttcaaactcctggtgcaacaagttacatgggatgcattggaaaggacaagtttggtgaggaaatgaagaaaaacgctcaagctgcaggagttactgctcattactacgaggatgagactgctcctactggcaatgtagatgtatt

SEQ ID NO: 7107 - DNA, 279 bp, Zea mays
gacgcagaggcgcgggcgctcgcaccaccacaaccacgacccgatggctttcatgcgctcccgctcaaatgcatcttctggcatgggagttgctcctaacattagggagacattcgttgagcttcaaatgaagaaggcattccgatatgttatcttcaaaatcgaagagaagcaaaagcaggtggttgtggagaagacaggggctactactgaaagctatgatgattttttggcctctctcccagagaatgactgccgatatgcgctgtatgattttga

SEQ ID NO: 7108 - DNA, 277 bp, Zea mays
gcggggatgaacttgatggatatcaagcaaaggacctggtcaaagtctgctttagaggcaactgctcctggacttgaagcaaagcttggaaatctagcaccagcatattcagctgctggccgaattgctccttattttgtagaaaggtttcagtttgataagaactgtttggtcattcagtggtctggagataatcctaatagccttgcaggtttaactctgaatacccctggtgatcttgccattagccttggtactagtgatacagtattcggga

SEQ ID NO: 7109 - DNA, 276 bp, Zea mays
agctcccatatccgctcccctacctctccagcatctcccgtctccgtcgtctcgtctctgctcctcacctcgccgccagccatgggcaagatcaagatcggaatcaacggtttcggaaggatcggcaggctcgtggccagggtcgccctgcagagcgaggatgtcgagctcgtcgccgtcaacgaccccttcatcaccacggattacatgacctacatgttcaagtacgacaccgtgcacggccaatggaagcacagcgacatcaccctcaaggac

SEQ ID NO: 7110 - DNA, 279 bp, Zea mays
cctgatgctgtttacctagttgatgctattgagggtggaaaagaacttattcaagcttgtaagcccgcacttgagtctgatcatatcaccaaagttattcatgattgtaaaagggacagtgaggctttgtattttcagtttggcataaaactgcataatgtgatggatacacagattgcttattctctgatagaagagcaggagcaggaaggaaaaaagatgacatctgatgattacaattacatatcttttgtcagccttcttgctgataaacgatac

SEQ ID NO: 7111 - DNA, 283 bp, Zea mays
gttcgtgctaaaactttttatgctggaaaagcgggtgtgccagttactgaggtgaatgttcctgttgttggaggccatgcgggtattactattctgccactcttctcgcaggccactcctgcaagcaattcgttgtcccaagaagacattgaggccctcaccaagaggacacaagatggtgggacagaggtggttgaagcaaaggcgggaaaaggctctgcaacgttgtccatggcatatgctggtgctgtttttgcagatgcatgtttgaagggtctgaatg

SEQ ID NO: 7112 - DNA, 124 bp, Zea mays
cccgttttggtgcttgatgccaaagggggagaaaataaaggccaaagcaatagatggatcaactaccacttgagaaattttgaaaatagtagattagagcttttggtttgacaaaactctttta

SEQ ID NO: 7113 - DNA, 91 bp, Zea mays
cccacgcgtccgggcgaccctccctccttcgctccttccgcgccgcctcccggccgtcgccgccatggtgaagtactcgcaggagccgggc

SEQ ID NO: 7114 - DNA, 134 bp, Zea mays
cacacactcgagaactccatttcgatcccatttgaaatcaacccatcctcgtttcctccgtctagcagcctctcaccctcatggccaagatcaagatcgggatcaatgggtttggcaggatcggaaggctggtg

SEQ ID NO: 7115 - DNA, 181 bp, Zea mays
ccatcatcatcaatcacggcggcgaccccgccccgcctcgatcgcccacgctgcccgactggaaccggacgctgctgctgctgctgctgctagtaggctgacagcgacgacgatggggatgacgaggcgaggggagccatggctcagatcttgctccacggcacgctccatgccaccatct

SEQ ID NO: 7116 - DNA, 270 bp, Zea mays
cccttgctcgcccgcatctctctaaccgccggctccggcgccgcgccggccatcgttcacatggctgcgatgccaccggccttcacgggcaacctgaagaaagcacttgcaggtctgagaagaatcaatttagatgggcttcgatggcgcgtatttgatgcacagggtcaggacctgggacgattggcttcccaaatagccgttgtgcttcaaggcaaggataaaccgacctatgcgccacatgtggaaaatggagacatgtgcattgta

SEQ ID NO: 7117 - DNA, 101 bp, Zea mays
gcttgacatgctcaagcagaccggcaagccagaaatggttgtaggctggtatcactcacatcctggcttcggttgctggctatcaggcgttgatatcaata

SEQ ID NO: 7118 - DNA, 280 bp, Zea mays
ttcccgggtcgacccacgcgtccggtcatatttgatactgatgttgacaggtctgcggctgttgagtccccacggatgccgagcatctggggcgtggccgacctgtggcgcacacagcctctactacctgacatccatggcgctcaagtgcgcggtggagctccacatcccgaccgccatccacaacctaggcgggtctgccacgctgccggacctcgtggccgcgctgtccctgccagcgtgcaagctcccgttcctcgggcgcgtgatgcggctgctg

SEQ ID NO: 7119 - DNA, 274 bp, Zea mays
gatccggcacgccctggatggtgctccagcacgagtacacggacaacctgacccacaagctgaagcaccacccggggtccatcgaggccgcggccatcatggagcacatcctggatggcagctccttcatgaagcaggccaagaaggtgaacgagctggacccgctgctgaagcccaagcaggacaggtacgcgctccgcacgtcgccgcagtggctgggcccccagatcgaggtcatccgcgccgccaccaagtccatcgagcgcgaggtcaa

SEQ ID NO: 7120 - DNA, 262 bp, Zea mays
cttcgtccttccccaatcacctcgaaacactacccctgtcaaatcgcccactggtcaccaggccgtgcaaaagtccaagctttttcgacaggaatcctcctccgcttctgcttggcttgcgatgcttgtttgaatgcgcgggcctgcggtgaggcgacacggcgccggacggttgcatgctgattgatggtagccgatggagagtagacgaggagggtcggtggcagaagatgcgagcagggcgatgacgagctttgggcca

SEQ ID NO: 7121 - DNA, 243 bp, Zea mays
gggcgagcgggctaccacgcgtccggtgaatgagcgtgggctgcaccgccggctacgtggccgcagtggtgggagcgaggagtggtggatgtatcgcgatgcaggatgtcgtcgtcgtccatcgtgcccatgacgctgaagaacgccatcgagctggggctggtggaggtgctgcaggaggattccggctgcgcaaggcggccgtggcgcccatgaggtggtggcgcggatcccggtgcgccc

SEQ ID NO: 7122 - DNA, 272 bp, Zea mays
ctctgcgctcctctacgagaagagatttgggccatatttctgccagccagtcattgctggacttggagatgacaacgtaccattcatttgtaccatggactgcctcggtgcaaaggagctggccaaggattttgttgtttctggaacagcatcagaatctttgtatggtgcttgtgaatccatgtacaagccggacatgcaacctgatgaactcttcgagactatatcccaagccctgaattcatcagtagaccgtgactgccttagcggat

SEQ ID NO: 7123 - DNA, 276 bp, Zea mays
cccacgcgtccgacgactactcctgcccacaggcggagaagatcgtcaaggactacgtgaaggcgcacatcccccacgcgcccgacgtcgcctccaccctgctccgcacccagttgcacgactgcttcgtcaggggctgcgacgcgtcagtgctgctcaacgcgacgggcggcagcgaggcggagaaggacgcggcgcccaacctgacgctgcgcggcttcggcttcatcgaccgcatcaaggcgctgctcgagaaggagtgccccggcgtggtgt

SEQ ID NO: 7124 - DNA, 254 bp, Zea mays
  unsure (1)..(254): unsure at all n locations
caaatccatccatcctcgtttcctccgtcccgcagcatctcaaccccatggccaagatcaagatcgggatcaatgggttcggcaggatggaaggctggtggccaggtggcctgcagagtgacgatgtcgagtcgtcgcgtgaacgaccccttcatcagcaccgantacatgacctacatgttaagtangaantgtgnnnggtaggatgcncngtntctgtttacgattgnctaatattgaaggtttactncnat

SEQ ID NO: 7125 - DNA, 269 bp, Zea mays
tccgtccttccttcaatcacgattggtttcgtacctggtgagggactgagggtcttcggagtggattgatttgggcttctgttcgaagatttgcagcagggggcaatggcgaccgcggggaaggtgatcaagtgcaaagctgcggtggcatgggaggccggcaagccactgtcgatcgaggaggtggaggtagcgcctccgcaggcctatggaggtgcgcgtcaagatcctcttcacctcgctctgccacaccgacgtctacttctggg

SEQ ID NO: 7126 - DNA, 270 bp, Zea mays
agtacggcgccattgagaggccacaagcccgcaccacgcctccctcgttcacgcgcgcgcgcacgcatgcacgaggagctgctgcagagaagaggaggcctgtcgatttgattggactttccaaattcagattcagaagctggccaagatgactgccggtttccagctcggcgtgatcgggtctctcacgctctccgtcgcgtcgtcggttgccattgtcatctgcaacaaagccctcatcagcaccctaggctttccattcggtaagga

SEQ ID NO: 7127 - DNA, 265 bp, Zea mays
gaagcagcaccagttggctcgggttcaggtcgagcgcgcgccaagcaagtcttgcggccggccgcgaagagcgcaatcaagcaaggcaagatggtgaagctcggcttcggaagcgtcggcgagtcgttgagcggcaggtgcatcaaggcgtacgtgggcgagttcatcgccacgctggtgttcgtgttcggcggcgtcggttgcggcatcggctacgggcaactgacgaatggcggcgcgctggacccggcgggcctggtggcga

SEQ ID NO: 7128 - DNA, 266 bp, Zea mays
accattcctcccaacaccacctcgccgcgatctccgtagcctccgtcgcgtcgagcatcgatcatgtcggcctactgcggaaagtacaaggatgagctcatcaagaatgctgcctacattggcacccctggcaagggtatccttgctgctgatgagtccactggcaccattggcaagcgcctttccagcatcaatgtcgagaacgttgaggagaaccgccgtgccctccgtgagctcctattctgctgccctggtgctctccagta

SEQ ID NO: 7129 - DNA, 259 bp, Zea mays
accacgcttccgcccgctcgtccgctaaaagtagcaggtagttcaccacctaccaggaccagcagaccactgtctccatccaggtctttgagggtgagcgcagtatgaccaaggactgccgtcttctcggcaagttcgacctcaacggcattgcgccagtccaaggggcacaccccagatcgaggtgaccttcgaggtggacgccaacggtatcttgaacgtgaaggcggaggacaagggcacgggcaagtcggagaag

SEQ ID NO: 7130 - DNA, 257 bp, Zea mays
caacctggcgtgggacgtgttcaccacggagcacgaggtggaggccatcctcaagggcagcctcaacctcctggcggggctagggggcttcgccgtggaggccgtcgtcggcgcggctgtcaccaaggcggtcgcaaacgtcggcgccggcgtctttgcttgctctctcgcgggcttcgtcgtgggcgccatagccgggctgatcttcatcggcgtcacggcctcctcattaacctcatcatcggctcccctaggaa

SEQ ID NO: 7131 - DNA, 261 bp, Zea mays
agtacgaggagttcaaagtccgcatcaacgcgctggtggccaagggcatgaaggtgccggcagaggggtggatcatgaaggacggcacgccgtggcccgggaacaacacccgcgaccaccctggcatgatccaggtgttcctgggccacagcggcggccacgacaccgagggcaacgagctgccccgcctagtgtacgtctcccgtgagaagcgcccgggcttccagcaccacaagaaggccggcgccatgaacgctctga

SEQ ID NO: 7132 - DNA, 262 bp, Zea mays
cgaccgtggctagtacggcacacgggtggctgtgctcgctggcgattttatgttcgcgcagtcttcttggttcctagcaaacctagtaaacattgaagtcatcaagctcatcagccaggtaattaaggatttcgcgagcggcgagataaagcaagcgtcgacgcttttcgactgcgacgtgaccctggacgactatctgctgaagagctactacaagacggcctccctgatcgcggcgagcacgaggtccgccgccatcttc

SEQ ID NO: 7133 - DNA, 275 bp, Zea mays
  unsure (1)..(275): unsure at all n locations
caaatccatccatcctcgtttcctccgtcccgcagcatctcaaccccatggccaagatcaagatcgggatcaatgggttcggcaggatcggaaggctggtggccagggtggccctgcagagtgacgatgtcgagctcgtcgccgtgaacgaccccttcatcagcaccgantacatgacctacatgtncaagtangacantgtgcacgganagtggatgctccgatcnttcngtttnancaattganctaatattgaagggntctgtaccttctaa

SEQ ID NO: 7134 - DNA, 116 bp, Zea mays
cacacactcgagaactccatttcgatctcatttgaaatcaacccatcctcgtttcctccgtctagcagcctctcaccctcatggccaagatcaagatcgggatcaatgggtttggc

SEQ ID NO: 7135 - DNA, 306 bp, Zea mays
cccacgcgtccgctcctcgaggcctccgcacactcaactctgtttgggcccaacatcttagcgaagaagtgaggagaaggttctacaagaactggtgcaagagcaagaagaaggctttcacaaagtatgctctcaaatatgaaaatgatgctggcaagaaggaaattcagctgcagcttgagaagatgaagaaatatgcttctgttatccgtgtcattgctcatacccagattaggaagatgaagggtttgaagcagaagaaggctcacctgatggagattcaggtcaatggtggtaccattgctg

SEQ ID NO: 7136 - DNA, 306 bp, Zea mays
cccacgcgtccgtgaaaacatggaagatttttgcaacgagatatacatcctgagccggttgcgacatccaaacgttatattgtttcttggtgcatgcattacacctccacacttgtcaatggttactgaatatatggaaatgggatcactgtattatctcatccatatgagtggtcagaaaaagaaacttagttggcgtaggaggttgaaaattattcgtgatatatgcagggggttgatgtgcatacaccgcatgaaaatagttcacagggatctcaaaagtgcaaactgcctggtgaacaagca

SEQ ID NO: 7137 - DNA, 305 bp, Zea mays
ctcacggagatgatctacctctcgtccatcctgtccaagttcatccagggcggctacctccccttctgcttcgcgctggtcctcatgacgctgatggcgacgtggcactacgtccacgtgaagcggtactggtacgagctggaccacatcgtgcccaccaaccagatgacggcgctgctggagaagaacgacgtgcggcggatccccggggtggggctcctgtacacggagctggtccagggcatcccgcccgtgttcccccgactcatcaagaagatcccgtccgtgcactccatcttcctctt

SEQ ID NO: 7138 - DNA, 310 bp, Zea mays
tcccgtcgcatcccatcccactaccacccatctcgtcgtccgccgattcgatccggttcttccaacccaggggctgtgatggcgacgaagaggagcgtgggcaccctcggcgatgcggatctgaaggggaagaaggtgttcgtgcgcgccgacctcaacgtccctctcgacgacgcccagaagatcaccgacgacacccgcatccgcgcctccgtccccaccatcaagttcctcctcgagaagggcgccaaggtcatcctcgccagccacctgggtcgtccaaaaggtgtcaccccaaagtacagcttga

SEQ ID NO: 7139 - DNA, 304 bp, Zea mays
cccacgcgtccgcccacgcgtccgcccacgcgtccgcccgggtctccagcattcctatcctctccccgcccgcccgtgccgccgccgcggcttcccttcctctcccgagccaagatgaatgttgaaaagctcaagaagatggcaggtgctgtgcgcaccggggggaagggtagcgtgcgcaggaagaagaaggcagtccacaagactacaaccacagatgacaaacggcttcaaagcaccttgaaaagaataggagtgaacagcattcctggtattgaagaggtcaacatctttaaggatgatg

SEQ ID NO: 7140 - DNA, 300 bp, Zea mays
ctcttgaggagatactgtaacgaaacatggctcctctgactcctagactggtagtgcccatagacgtgaagaagcagccatgggagcagaaggttcctctccacaaccgctggcatccagacatccctcccgttgctgatgtaaccgaagggtaactgttccgggtcgagatggtagactggactggagggagggttagagacgataactctgcagacgacatcaaatccctggacctcacaatcactcattatcttagtgggcccctaagaatcgttgattccgaaggggttccggctt

SEQ ID NO: 7141 - DNA, 299 bp, Zea mays
cgtcgcttccagccgccgccgccgcgtccgcctcgcccagcgcacagccgccgcagcacatcgctatctcgatctcagccatggcggaggtggagcagcaacaggacacgccgaagctgttcaaccgctggaccttcgatgatgtccaggtgaacgacatctcgctgaacgactacctcgctgtgaacgcgacgaagcacgcgatgtacctgccgcacaccgcggggcgttactccaagaagcggttccgcaaggcgcagtgcccgatcgtcgagcgcctcacaaactccctcatgatg

SEQ ID NO: 7142 - DNA, 298 bp, Zea mays
gcccggctagggttttgcctccttcccgctgccgccgtctcagcgagcgagactgagctgtgcttagtaagccatgtcgctgcgcccgagcgagcgggtcgaggtgcggcggaaccgctacaaggtggcggttgacgcggaggaggggcggcggcggcgcgaggacaatatggtggagatccgcaagagccgccgcgaggagagccttctcaagaggcgccgcgaggggctccaggcccaggtccctgcccctccctcgggggtcgagaagaagcttgaaagcctcccagctatggtc

SEQ ID NO: 7143 - DNA, 299 bp, Zea mays
cggacgcgtggcgccacccccttcaggtaaggaagaggaggagggcaggatgtcgcaccgtaagttcgagcacccgaggcacggctccctcggctactttcccaggaagcgctcctcccgccaccgcggcaaggtgaagtcattccccagggatgaccccaagaagccttgccatctcactgccttccttggctacaaggctggcatgactcacattgtccgtgaggttgagaagccaggatccaaactccataagaaggaaacttgtgaggctgttaccatcattgaaacccctcctc

SEQ ID NO: 7144 - DNA, 300 bp, Zea mays
gcaaccactcccaaatactccaaggcacgttatgaagagattgtgaaggaagtctcatcctacctcaagaaagttgggtacaaccctgataagattgcctttgttcccatttctggttttgagggcgacaacatgattgagaggtccaccaaccttgactggtacaaaggcccaaccctgcttgaggctcttgaccagatcaccgagcccaagaggccttcagacaagcccctgcgtctgcccctccaggatgtgtacaagattggtggtattggaactgtaccggttggtcgtgtggag

SEQ ID NO: 7145 - DNA, 301 bp, Zea mays
catccgcgcctctacatttcttctctctctgctcctccgcctccgcctccgcctgatccatccaagacagggatcgccatgtcggactcggaggagcaccacttcgaatcgaaggccgacgctggggcgtccaagacctacccgcagcaggctggcaccgtccgtaagaacggcttcatcgtcatcaagaaccgtccctgcaaggttgtggaggtttctacctccaagactggtaagcatggccacgccaaatgccactttgtcgccatagacatattcaatgggaaaaagcttgaagata

SEQ ID NO: 7146 - DNA, 298 bp, Zea mays
cttgggtgatgggatatccatagctgtgaatccgctgatccaatgtgcaatgcctgtgagatggctgtggtatggatgcagaaccaacttgaccagaacaagacacaggagctcatcctgaactacattaatcagctttgcgagcgtcttccgagtccgatgggagaatcagctgtggactgtggcagtcttgcgtccatgcctgacattgcgttcaccattggaggcaagaagttcaagctgaaaccagagcagtacattctgaaggttggtgaaggacaggctgcccagtgcatca

SEQ ID NO: 7147 - DNA, 297 bp, Zea mays
ccttccagaaacctccaggatccgactccaatcgaatcgccaaagcagacaggggcgctcgcgggggcgccgagctcgacggggcgagatggccgggaacgactggatcaacagctacctggaggctattctggacgctggcggggccgcgggagatctctcggcagccgcacgagcgtgggacggccgcgacgggacggccgtggagaagcgggataagtcgtcgctgatgctccgagagcgcggccggcttcagcccgcgcgatacttcgtcgaggaagtcatctccggcttcga

SEQ ID NO: 7148 - DNA, 287 bp, Zea mays
cccacgcgtccgctactactcaagtatccatccttattgagtacagtgttgatccatggactcggaaggagttgtagcagcaaaggtggcagatgagactactaaaccggcaatccaagaagacggcgccgagagcaaggccgggatgactgatctgctgatgctgaccgacaagtcgcagctgcaggcgctggcgatgctgctgcggaacaacgaggagctcatgatgagccaggcgatcaagtcggagacggagcgcattgagtacctcaagacggtgagcgact

SEQ ID NO: 7149 - DNA, 289 bp, Zea mays
ccacgcgtccgctaagacacttacaattggtcagtttaagcttggtctgtgccatggtcatcaggttgttccatggggcgacctggactccctggcgatgctccagcggcagctgacgtggacatcctggtgaccgggcacagccatcagttcaaggcatataagcacgagggaggcgtggtgatcaaccctggctctgccacgggcgcctacagcagcatcacttacgacgtgaacccaagctttgtgctgatggacatcgaaggactccgtgtggtggtatacgtct

SEQ ID NO: 7150 - DNA, 291 bp, Zea mays
atgacaactgttcatgccatcactgccacccagaagactgttgatggaccctcagccaaggactggagaggtggcagggctgccagctttaacatcattcccagcagcaccggtgctgccaaggctgtcggtaaggttcttcctgaattgaatggcaagctcactggcatgtccttccgggttcccaccgtggatgtgtcagttgttgacctcactgtcagaatcgagaagggggcctcttacgaggaaatcaagaaagctattaaggctgcttctgagggcccactcaag

SEQ ID NO: 7151 - DNA, 292 bp, Zea mays
ctccatccttccacgaactagacgagggaagagcgctgaagcctgaagctgtggaggaaaacgaaggatctccccgtgcttgtgtatgccaggtcgcctgctctccgtccgcatcccgtccctcgcgaaactcggcgctcccaggtgtgcaaaatccatggcttcagacactggcaagaagctcatccagatcgatgtgagctcggacacagtatgcccttggtgctttgtcggcaaaaagaacctcgagaaagcgatggagcaaagcagggacaagtttgacttcgaggtt

SEQ ID NO: 7152 - DNA, 290 bp, Zea mays
cccacgcgtccgccttttgccttcaaaagagttgatgcgatgctatacatcgcgaacttcgattcagaggtcaattacttgaagaagtcgttcgagaccctcgaggctgcttgcgacgagcttagaagcagcagactatttcttaagctacttgaagcagttctcaagaccggcaacaggatgaacgttggcacaaaccgcggggacgcgcacgcgttcaagctcgacactctgctcaaactggttgacgtcaaaggcaccgacggacacacgacccttctgcacttcgt

SEQ ID NO: 7153 - DNA, 289 bp, Zea mays
caaacacttgcgccgccgctgcctcacaggtaaggccgccatggtctccggttcgggcgtgtgcgcgaacactcagaggtcgacgcgcgccaccacatgctgggccgtctctcctcgatcatagccaaggagctgctcaatgggcagaaggtggtcgtcgtccgctgcgaggagatctgcatgtcgggcggcctcgtccgtcagaagatgaagtacctccgcttcctccgcaagcggatgaacaccaagccgtcccacgggcccatccacttccgcgcccccgccaaga

SEQ ID NO: 7154 - DNA, 291 bp, Zea mays
acgcaacaccagacgctccagcagtccagcactcggagctcgcgcgcccgacggcccaccatgatcatccccaagaagaaccgcaatgagatctgcaagtacctcttcaaggagggcgtgctgtatgccaagaaggactacaacctggcgaacacccacagattgatgtgcccaacctccaggtgatcaagctcatgcagagcttcaagtccaaggagtatgtcagagagaccttctcctggcagtactactactggtacctcaccaacgatggcattgagcacctacgca

SEQ ID NO: 7155 - DNA, 285 bp, Zea mays
gagaaagggtccaacccgaacaggaactccctcagggggtttgaggtgatcgaccagattaaggctgctcttgaggctgcctgcccaggcacagtctcctgtgccgacattgttgcccttgcggctcgtgattccaccgccctggttggtggaccatactgggacgtgccacttggccggagagactcgctcggtgcaagcatccagggctccaacaatgacatcccagcccccaacaacacactccccactatcatcaccaagttcaagcgccagggcctcaat

SEQ ID NO: 7156 - DNA, 287 bp, Zea mays
agcagctattgtggtcgtccctcagccgcgtcgcaccgcatcgcattctacgattcgaagctctctctgctcgcagccatggcgaagaattacccaaccgtgagcgccgagtacagcgaggccgtcgagaaggccaggcgcaagctccgcgccctcatcgccgagaagagctgcgcgcccctcatgctccgcctcgcgtggcactccgcggggacgttcgacgtgtcgtcgaggaccggcggtcccttcggtactatgaagtgcccggcggaactggctcacggcgc

SEQ ID NO: 7157 - DNA, 287 bp, Zea mays
ccacgcgtccgtgagaaacgtgtgacctcgccactgctggaaccaagcagtgtggaaaaaatcatggaaattgatgagcacataggctgtgccatgagtgggcttattgctgatgctagaacactagtcgagcatgctcgtgttgaaactcagaatcataggttctcatacggggagccaatgaccgtagaatcttcaacacaagctatttgtgacttagctctgcgctttggcgaaggtgacgaagagtcaatgtcacggccatttggagtctctctcctaattgc

SEQ ID NO: 7158 - DNA, 286 bp, Zea mays
ctcctgagcactttctcctcgtccccgacaagccaatcgaagccgagatacggccatggactccaccggcaccggagcagggggtaaggggaagaagggagcggccgggcgcaaggtcggcgggccaaggaagaagtcggtgtcgaggtccgtgaaggccgggctccagttccccgtcggccgcatcgggcgctacttgaagaagggccgctacgcgcagtgtgcggcaccggcgcccccgtctacctcgccgctgtcctcgaatacctcgccgctgaggttctgg

SEQ ID NO: 7159 - DNA, 278 bp, Zea mays
agcagacacggtccgggacggggacggggcaaaagcgcaaacgcgaccacagacagagcgcgcttcaagggccttttttactgagactaacaggaggagagctgaggagatggcggtcacgatcacctgggtgaaggcgaggcagatcttcgacagccgcggcaaccccaccgtcgaggtggacgtgggcctcagcgacggcagctacgcgaggggggccgtacccagcggcgcatccactggaatatatgaggccttggagttgagggatggaggat

SEQ ID NO: 7160 - DNA, 284 bp, Zea mays
cacaagcctcagatctcagtcacctgcgccgccgcttcgttcgtgtggaggggagaagagaggaaatggcggcgaccgagggcgtgctcctggggatgggcaaccccctcctcgacatctccgccgtcgtcgatgacgccttcctgacaaagtatgacatcaagctgaacaatgctattctcgctgaggagaagcacttgcctatgtatgacgagttggctagcaagagcaatgttgaatatattgccggaggagccacccagaactctatcagggttgcccaa

SEQ ID NO: 7161 - DNA, 284 bp, Zea mays
cctcactcccgttccatttccccatctcccagatccaattcgcgagttctccctcctctgccgccatggcgctctctgtggagaagacctcgtctggacgggagtacaaggtcaaggatctctcgcaggcggacttcggccgcctcgagattgagctggccgaggtcgaaatgcccggcctcatggcgtgccgcgccgagttcggcccgtccaagcccttcgccggcgctaggatctcggggtctctccacatgaccatccagaccgccgtcctcatcgagacc

SEQ ID NO: 7162 - DNA, 283 bp, Zea mays
cccacgcgtccgcgttgttccgttgtggttgctctcgctctcgttcggtcgatcatggagtggagggacagcttcttggacctggcgctcatcccgctcagcctgctcctccccatggcgtaccacgcctggctgtggcgcgaggtccgcctccgcccgctgcgcacggccgtcggcatcaacgccgccacgcgccgcctctgggccatcggcatgatgaaggacaacgccaagaacgcggtgacggtggtgcagtcggtgcggaacgtcatcatggggtcga

SEQ ID NO: 7163 - DNA, 285 bp, Zea mays
caatcccatcctccacccaatcgaaggacctagcgagcggcacggcggcggcgatcggagaagatggtgcgcaaggcgaaggttgagttcgacgagcagccgccggataacttcgacccgaagaacccgtatgccgacccggtggcgatgctcgagtaccgggaacacctggtgcgagagaagtggatccagatcgagaccgccaagatcatccgggagcgcctccgctggtgctaccgcatcgagggcatcaaccaccaccagaagtgccgcacctcgtcgaca

SEQ ID NO: 7164 - DNA, 282 bp, Zea mays
cggcgctcacacgtacgagagggacaggcttcccgccaacctggtgcaggctcagagagactacttcggcgctcacacgtacgagagggttgacatgcctggttctttccacaccgagtggttcaagattgcgcgcaactccaagatctgaacatggcctcgtgtttgcatatgccagtatgccaccgtgtcgagtaatcactcatattactgcttgcagggaggaactgtgtttgatttttattttccatgcgcaatgcttaatttaggtcaggaagtcca

SEQ ID NO: 7165 - DNA, 280 bp, Zea mays
ctctcgttccatttccccatctcccagatccaattcgcgagttctccctcctctgcggccatggcgctctctgtggagaagacctcgtctggacgggagtacaaggtcaaggatctctcgcaggcggacttcggccgcctcgagattgagctggccgaggtcgaaatgcccggcctcatggcgtgccgcgccgagttcggcccgtccaagcccttcgccggcgctaggatctcggggtctctccacatgaccatccagaccgccgtcctcatcgagaccc

SEQ ID NO: 7166 - DNA, 280 bp, Zea mays
ctagttctagatcgcgagcagccgctcggacgccgaaaagagggggctcatcactccaggaaagaccacgttgatcgagcccacgtcggggaacatgggcatcgggctggcgttcatggcggcgctcaaggggtacgagctcgtgctcaccatgccgtcctacaccagcctggagaggagggtgacgatgcgggcgttcggcgccaacctggtgctgaccgacccggccaaagggatgggcgggacggtgaggaaggcgacggagctgtacgagagacat

SEQ ID NO: 7167 - DNA, 264 bp, Zea mays
aattgagaaagagaggtacattgttggtgaagctttatttcaaccacatatattgggcttggaagattatggtatcgttcaccagctagttactagcgcctcaaatgtttcatcagagtaccatcgtcagctgcttgaaaataccatgttatgtggtggcaccacatcaatgactggctttgaggacaggttccagagagaagcaaatctgtctgcttcagcaatctttccatcacttgtgaagcccccctgaatacatgtccg

SEQ ID NO: 7168 - DNA, 303 bp, Zea mays
cactaccacccatctcgtcgtccgccgattcgatccggttcttccaacccaggggctgtgatggcgacgaagaggagcgtgggcaccctcggcgaggcggatctgatggggaagaaggtgttcgtgcgcgccgacctcaacgtccctctcgacgacgcccagaagatcaccgacgacacccgcatccgcgcctccgtccccaccatcaagttcctcctcgagaagggcgccaaggtcatcctcgccagccacctgggtcgtccaaaaggtgtcaccccaaagtacagcttgaagcctcttgtt

SEQ ID NO: 7169 - DNA, 300 bp, Zea mays
attcaatccagtgtatatatatttgtttttcgagacaaacggcattaaggcgtggtcagctcttggtggttgtgtcttgtgcatcacaggagctgaagcaatgtttgctgatttgggccatttctctgtcaaatcaatacaggtagcatttaccgccgtcgtattcccctgcctgctaattgcttacatggggcaagctgcttttttgatgaaaaacccacttgttgtagaaagaatattctatgattctgtaccaggggttttattttggccagtatttgtgattgctacacttgcagc

SEQ ID NO: 7170 - DNA, 301 bp, Zea mays
gagctccatccatttcatttcctccactctctgaaaagtagaccagccaggggagagaagtgaggcatcgaaggaagcccccaccatggcggccaacggcaagagcagcttggcgaacggcgcctccacccggggaaagcccatcaaatgcaaagcggcggtggcgtgggggcccggcgagccgcttgtgatggaggaggtggaggtggcgccgccggggcgcctggaggtgcgcgtgaagctgctcttcacctccatctgccacaccgatctcagtttcttgaagggagagaacgagctg

SEQ ID NO: 7171 - DNA, 301 bp, Zea mays
cccacgcgtccgccgcgccgccgtctctcgctcactcgctcgcgctctccatccagatcggagcgctcggttcggataggggcgactaggaggtgaacgcgggcgcgtcaccatggcggacgaggagcacccggcgaggagggaggaggcctccgagcttgccccctttgatccaaccaagaagaagaagaagaagaaggttgtcatccaagagccttctgatgaagtggacaaggttgcagagaagacagaatcactagcagtcgcagaacctgctgaacttaacttcactggaatgaag

SEQ ID NO: 7172 - DNA, 302 bp, Zea mays
actagttctagatcgcgagctgccgcccttttttttttttttttttgtttttccaaaatcagggtctaccattaaaatccatttttttaggccatgcctcctgacaatacatatgatttttctgttgctagcttaagcagcagggatttaatcacatttgatattcctgtagattctccttacaaaaagggttgaccctagatagccaatagctccacaaagtatgcctaggccaaggcagaacatcagcgtgtagccgaaatagaaacttgtctggaagaagcctgacatctttgtcttca

SEQ ID NO: 7173 - DNA, 300 bp, Zea mays
cccacgcgtccgggaccgtggtggtagtccactaacaacaggaggattatattcaaatggagcagctactgacatgaatgtgtggacatcagcacttcaaccagaatgttcaccagactatagctggcttggaggatcccagggcagctcctctggacttattgtcaagaaaacaatgaaggtcgatatcccagtagacaaatatccaacattcaatttcgttggccgcatccttggtccaagaggaaattccttgaagcgggtggaggcaaatacggactgccgtgtgctaataagagg

SEQ ID NO: 7174 - DNA, 299 bp, Zea mays
ggcgattccagggtttagagaggagcggagatggtgaaggtcatccacgggcgcccggccgagatggggttccggatgccggcggagtgggagccgcacgagcagtgctggatgggatggcctgagcgtccagataactggagggagaatgctggtccagctcaagaggtatttgctagaactgcaattgccatttcaaagtttgaacccgtcacgttatgtgcaagtgccaagcagtaccccaaagtccacgagctgatggaacatcaaaccaacatcagggtcgttgagatgagcat

SEQ ID NO: 7175 - DNA, 303 bp, Zea mays
gagcgtcaagaacctcgagaaagtctgcggggatctggtgaagggcgccaagggtaaggagctcaaggtcaagggccccgtgcggatgcctaccaaggtgctccacatcaccaccaggaagtctccctgtggagaaggtaccaacacctgggatcgctttgagatgaggattcacaagagggtgatcgatctcgtcagtacaccagacgttgtcaagcagatcacctcaatcaccattgaaccaggtgtcgaggttgaggtgactatcagtgacgcttaatatggtagccttatcatttcaaa

SEQ ID NO: 7176 - DNA, 306 bp, Zea mays
cacacacaggctgaccccaccaacagcaagcgaaaatctcccgatcccctctagtctccgcggcgaagatgtcggggcgcggcaagggcgggaagggcctgggcaagggcggaacgaacggcgaccggaaggtgctccgcgacaacatccaggggatcacgaagccggcgatccggcggctggcgcgcaggggcggcgtgaagcgcatctccgggctcatctacgaggagacccgcggcgtcctcaagatcttcctggagaacgtgatccgcgacgccgtcacctacaccgagcacgcgcgccgca

SEQ ID NO: 7177 - DNA, 317 bp, Zea mays
ctcttcaactcgggcgtgatggtgatcgagccgtcggcgtgcacgttcgacgcgctcatgcgggggcgccggaccgtccgctcctacaacggcggcgaccaggggttcctcaacgaggtgttcgtgtggtggcaccgcctgccgcgccgggtcaactacctcaagaacttctgggccaacaccacgggggagcgcgcgctcaaggagaggctgttccgggcggacccgcccgaggtctggtccgtccactacctggggatgaagccatggacgtgctacagggactacgactgcaactggaacgtggcggaccagag

SEQ ID NO: 7178 - DNA, 292 bp, Zea mays
accggaaccgcccccaccccgccccgagcgccaattgcaccgccgctcccggccaaaccggccaagtcaacggcgcatccacttctccttaccatcccggaggtaatcttgcgccgattcggtgccgatttgcgccatccgcgaccggacgctccgccgggtcttgtgttcttgcggggcgggggctcaggacaacctggcctctgcttgattggattcggggcgttcggcgcctccagctcgcgatctttcctgccggtttcgtcgaccgctggtcaacctggccggtcgg

SEQ ID NO: 7179 - DNA, 292 bp, Zea mays
gggcggcggcgcgtggctgggcgggcagctgttctcggccatggtggtgcgcaggccggcgcacctgttcctggacgagctgggcgtgggctacgacgaggccgaggactacgtggtggtcaagcacgcggcgctgttcacgtccaccgtgatgagccggctcctggcgcggcccaacgtgaagctgttcaacgccgtggcggtggaggacctgatcgtgcggcgggggcgcgtcggcggcgtggtcaccaactgggcgctcgtgtccatgaaccacgacacgcagtcgtgc

SEQ ID NO: 7180 - DNA, 286 bp, Zea mays
gactctctcacccgactcgtcagacgtcagccagcagttcgaaaccaaggattgatccaggagcttccggaaggcgaggcgcgcgcgcacgtcgcaggtgctggtgccggtgccgcccatggatcgggctcgcggatccgcgttcctgctcggcgtcctgctcgcaggatccttgttcgcgttttcagttgccaaagaggagaccaagaagctcgggaccgtgatcggtatcgatctcggtaccacctactcctgtgtcggtgtgtacaagaacggtcatgtcgag

SEQ ID NO: 7181 - DNA, 295 bp, Zea mays
tctccctcttgccggtcccgaataaagagcagcagcgcaagaggtcggtagagcgagaagaaggcaatggcggccgagagcttccttttcacctcggagtccgtgaacgaggggcacccgacaagctgtgcgaccaggtgtcggacgccgtgcttgacgcatgcctcgcgcaggaccccgacagcaaggtggcctgcgagacctgcaccaagaccaacatggtgatggtgttcggcgagatcacgaccaaggcgaccgtggactacgagaagatcgtgcgcgacacctgccgcga

SEQ ID NO: 7182 - DNA, 290 bp, Zea mays
cggaccgtgggctggtgctgttcttgctctctgctcaaccttgatggggtctatattgccacagccaagaatattgatggccatggcacgagatggcctactaccatcattcttctctgatgtccataagacgacacaagttccagtcaaaagcacagtagtgactggcatctgtgcagctgctcttgctttcttcatggatgtctctcaactggctggaatggttagtgtaggcacgctactcgcgttcactatagttgctgtgtccatcttgattcttagatacgttc

SEQ ID NO: 7183 - DNA, 292 bp, Zea mays
accagacgagacctctcgcgttccgtcctcctccctgcccctgctgccgttccccttcttcctcagttctcccgcccgctgctgccctccgtccgcgtccagatcccgccaccaaccgatccggcgccctccagcatggcgggggcgggggcgaaggcggcgggagcctggctctggcgctcgtgctcgcgctcgcgggggccaactcggagggcgacgcgctctcggcgctgcgccggagcctcagggaccccggcggcgttctgcagagctgggaccccacgctcgtcaa

SEQ ID NO: 7184 - DNA, 296 bp, Zea mays
cggacggtgggtctgagattggtgcagagatgatccttaaacaaaaacttaggggccaggggatggcttttcttgttggtggtggatcagtcatgcagaaaatccttgctcctagagaggtgattactgttgatgctgcttgtattgtggctatgtcggccaccattaacttccagttgaagagccctaaccagcttagaagagcagtttttgggggtgataaccagctaacagcatctctcacgggaccaggtgttgttttcattcaaagtctgccattccatcgactctcacag

SEQ ID NO: 7185 - DNA, 288 bp, Zea mays
aaaacctacctgaatctatatacgttagagtctatgaggacaggactgatctgctgagggctgccatagtcgggccagcaggaactccataccatgatggtctgttcttcttcgatgtccgttttccttgcgaatacccaaagtgcccaccaaaagtatactaccattctggcggacttcggctgaacccgaacctgtacgagagcgggaaagtgtgcctgagccttctgaacacctggtggggcaaggggtgcgagaagtggggcaagtcgagctccagaatgctgc

SEQ ID NO: 7186 - DNA, 289 bp, Zea mays
cggacggtgggacgccatcagcagctagcgcggtcgtcgagcccagcagagaaaggccccccgccctaacggtaatagccatggggtccaccgccggagacgaggccgcggtggtggacgaggaggcgtgcatgtaggggatgcagctggcgtcgtggtccatggtggccatgacgctgaagaacgccatggagctgggcgtgctggaggtgctggagaaggaggccggcagcgggaaggcggcgctggcggccgacgaggtggtggcgcggatggcgtgcgcgccgag

SEQ ID NO: 7187 - DNA, 290 bp, Zea mays
acacgacctcgcagatcacgagatgggcctacgtcagtggcagctgtcatccagcggtgggctgagcgcaacaagcatttggagtatgaggaatctgaggaggcaaagcgaccaagaaaagcacctgcaaagggttcaaagaagggctgtatgaagggaaaaggggggcctgacaatactcaatgtggataccgtggagtgaggcagcgtacttgggggaagtgggttgctgaaataagagagccaaatcgtgtcgacagactctggctgggtaccttcccaaccgcgga

SEQ ID NO: 7188 - DNA, 271 bp, Zea mays
cccacgcgtccgcacgacctcgagacctcgcccgcccaaatacgaaagcctcacacctcagtgaccagcgccgccgcttcgttcgtgtcgacgggagaagaggcaatggcggcgagccagggcgtgctcctggggatgggcaaccccctcctcgacatctccgccgttgtcgatgacgccttcctagcaaagtatgacatcaagctgaacaatgccattctcgctgaggagaaccacttgcctatgtatgatgagttgcgcagcaacagca

SEQ ID NO: 7189 - DNA, 289 bp, Zea mays
actacgagaagaccggcaagacgcccgacccggagtccaccgacaacgctgagttcaagaccgtgctcaccatcatccgcgacgggctcaaggctgaccccaagacgtaccgcaagatgaaggacaggcttgtcggcgtctctgaggagaccaccacgggtgtcaagaggctctaccagatgcaggagaccggcgccctcctgttccctgccattaacgtcaacgattccgtcaccaagagcaagtttgacaacctgtatggttgccgacactcgctccctgacggtct

SEQ ID NO: 7190 - DNA, 291 bp, Zea mays
cccacgcgtccgaatgtgctcaatctgtggtgaagaaagctttggcactgggtctgaccacattcgtgagaaggatggcatctgggctgtgcttgcatggctttcaattattgctttcaagaataaggacaaccttggaggagataagcttgtcactgtcgaagatattgtccgtcagcactgggccacatatggtcgccattactacacacgctatgactatgagaatgttgatgcaggggctgctaaggagcttatggcaaacctagtaagcatgcagtcatcactttc

SEQ ID NO: 7191 - DNA, 293 bp, Zea mays
gccagcctcacctggggctgctgtgggccaggttgtgttcactgctgaggatgctgaagcatggcattcccaagggaaagctgctattctggtaagggcagagaccagccctgaggacgttggtcgcatgcacgcagctgtggcgattcttacagagaggggtggcatgacttcccacgctgctgtggtcgcacgtcggtcggggaaatcctgcgtctcgggatgctcaggcattcgcgtaaacgatgcggagaagctcgtgacgatcggaggccatgtgctgcgcgaaggtg

SEQ ID NO: 7192 - DNA, 284 bp, Zea mays
cccccccacccgtccatcgcccctccctccggtctgcgctcccacagcctcacccctgcgcccccgccgattcgcgtcgccctttgttggaaggaacgatggagcagaccttcatcatgatcaagcccgacggcgtccagcggggcctgatcggggacatcatcagtcgcttcgagaagaaagggttctacctcaaggggatgaagttcatgaacgtggagaggtccttcgcgcagagcactacgctgacctttccgacaagcctttcttccccgggttggtgg

SEQ ID NO: 7193 - DNA, 174 bp, Zea mays
ggcagagttggaagctcttttgctgacacatccagaaatcgaagatgtcgccgttataccgtttcccgaccgtgaggtcgccagttcccaatggcctacgtatgaggaagaaagggagcaatttgtcagagcgcgaggtgatggagttcgttgcgaaacaggtagcgccttaca

SEQ ID NO: 7194 - DNA, 286 bp, Zea mays
cggacgcgtggcgagacgcgtgggcggacgcgtgggcaccattcctcctccggatttcgcagtcagcggtggtgaaggtagcgggcgctgaggaagaacgggctcgcgtacgggaagctctacagccggctcttcgccaagaaggagatgcggattcttatggtcggtctcgacgccgccggtaaaaccaccatcctctacaagctcaagctcggcgagatcgtcacaaccatccccaccatcggtttcaatgttgaaactgttgagtacaagaacattagcttca

SEQ ID NO: 7195 - DNA, 286 bp, Zea mays
aaccgcgaaaacggacggagggggaagggacgtgggaccgatccaatcatcaatccactagcttcactgggaaacgaagaaagaacataggactgatccggtcggtgggacttcctctcgaatcgccccgatcgagaccctagttgccccacgaaccgaggatccaagatgagtttcctgttcgggaagcggaagacgcccgccgagctgttaagagaaaacaagagaatgctggatcgatccatcagggaaattgagcgagagaggcaaggattgcaggcccagg

SEQ ID NO: 7196 - DNA, 275 bp, Zea mays
gcaaccgagctcaatccccagaggccagagccagctgctcggcgctccacgcgatggcgcagaaggagaccaatggcagcaacggcgagcacatctccaaccgcccgccgccgaccccgtcgcccctccgcttctccaagttcttccaggctaacctgcggatcctggtcactggtggggcgggcttcatcggctcgcacctcgtggacaggctcatggagaacgagaagcacgaggtcattgttgctgataactttttcaccggttcaaaagat

SEQ ID NO: 7197 - DNA, 285 bp, Zea mays
ccacgcgtccgcacgcgtgccttgatatgaagtccaccatcctagggaaataccactacatcctctacattattgtcctggcaatgcagcccaggatgcttttgactgtcgacgaggatctgaagcccctgtcagtacctgtccgcgtcgggcaagctgtcgacgtggttggtcaggcaggaaggccgaagacaatcaccggcttccagacacactccacgccggtcttgctcgcagcaggggagagagctgaactggcaactgaaaaatacattccactgaccc

SEQ ID NO: 7198 - DNA, 282 bp, Zea mays
aattgatgcaacaagaaaagggaacttgcgagattcatcaaccattcatgcatacagccaaccgaattgtgagacaaggaaatggaatgtccttggggaagtaagagttggaatttttgctaagcaaaacattccttttggcacggaattatcctatgactacaattttgagtggtatggtggtgtgatggtgcggtgcctctgtggagccgccagctgttctgggtttcttggggctaaatcacgtggtttccaggaggccacgtacctgtgggaagatga

SEQ ID NO: 7199 - DNA, 282 bp, Zea mays
gggttttgctgctctccgaccccgagctccgaagccgcagcatcaggcgcggcccccctcgcgtgtgaccgagatggcgctgccgaatcaggggaccgttgattaccccagcttcaagctcgtcatcgtcggcgatggtggaactggtaaaactacatttgtgaagaggcatctcactggagagtttgagaagaaatatgaaccaaccattggtgtggaagttcatccgttggatttcaccactaactgtggtaagatcaggttctactgctgggataccgc

SEQ ID NO: 7200 - DNA, 283 bp, Zea mays
gaccctccccggcaaccgcgtccggccgtccgcttccgtctccttggataaccacgacgcccgccggcaagcgaaacgaacagggccaacccagccatggagaaggcgatcgatcggcagcgggtcctcctggcgcacctcctcccctccccctccgccgcctcctcgcagcctcagcttgcggcgtcggcgtgcgcggccggggacagcgccgcctaccagaggtcctcctccttcggggacgatgtcgtcgtcgtcgctgcctacaggacgccgatatgca

SEQ ID NO: 7201 - DNA, 283 bp, Zea mays
aaaaaagatacaacatcttttgagactacttctggagtgtacccttctcctgatgatgcggatatagaggattctgttgcaggtgaaactaatgaagcaataagtcgtggtccgaacaaacttaaacatgtttggaaccttcaaaaaggaaaacgaattgtagttaactgtaacgagctcggccaacctattggagaggaggcaggagtcttaggaaaattccttggcatggttgctaggaatggctgcttatgtagcttaagcttcaaagattggagattac

SEQ ID NO: 7202 - DNA, 102 bp, Zea mays
cgacgctgggcatcgccgtgaacctggtgacgtacctgacgggcaccatgcacctgggcaacgccgagtccgccaacgtcgtcagcaacttcatgggcacct

SEQ ID NO: 7203 - DNA, 282 bp, Zea mays
gtacgcgcctagcgaccagcatagattcgttccacgcctacctcctgccctcgcccgtgctctcagatctcgcgcgcgccccgcaaagggtaactttgagccatgggcacagttgtggatgctccagcagttgtggctgaagaggtcactgagaacatgttgggtggtaagaaagttacagctgtatttgttctaggtggtcctggaagtggaaaaggcacacagtgtgccaacattgtggaacagtttggattcacccatcttagtgctggagatcttttg

SEQ ID NO: 7204 - DNA, 281 bp, Zea mays
ggatctatgcatcgagtgccaggcgaaccaagctagcgcgaccagcgaggagtgcactgtcgcttggggtgtctgtaatcatgcttttcacttccactgcatcagcaggtggcttaagactcgccaagtgtgcccattagataacagtgagtgggagttccagaaatatggccactagttcctgggcaccgtcatgtgatgttggggctttgctgccactcaagtgtttttgtctgccaaacagctccatctcttactgctttcgatgcttgcatctatca

SEQ ID NO: 7205 - DNA, 283 bp, Zea mays
ctttcataaaccccaagccgcgccgcaatagctcgccccctcgttcgccgcctctcctgctcctaccgcagctctccctcaggtttagtgttcgcaatggcggccttcaacaagcttggtggccttctaaggcacagtgctctggtgagcggtatcactggtggctcttctcctgcagtgttcaatgctgcacggctcatgtctaccaagctatttattggtggtcttgactggggtgttgatgacgtgaaactaagagaagcatttagcagctttggagagg

SEQ ID NO: 7206 - DNA, 276 bp, Zea mays
cggacgcgtggcgagacgcgtgggtcagaagctccagtacatctacctgttcgagaatgccctctctggcgagctcacgcgcagatgacggcgttaaacttactccagatcgacttgtcaacgaatcagctcaccggagatatacctgaagatttcggcaatctcaagaacctcacaatactgtttctgtacaacaaccagctcagcggcaccatcccggcaagcatcgggctgctaccacagctcaaggatatccgcttgttccaaaaccagctg

SEQ ID NO: 7207 - DNA, 275 bp, Zea mays
cggacgcgtggcaagcacaagcgcactctagcaatggcttctgaggttgtccgccctagcgacgccgagctactaaaggcacaagccgacatatggcggctcagcctctcctacctcacgcccctgtcactgaggtgcgccgtggagcttggcatccctacggcgatctaccgccatggcggggctgcctcagccgctgagctggtcacggcgctgtctctcccctccactaagctgccgttcctccgccgcctgctgcggctcctcgccgcgtc

SEQ ID NO: 7208 - DNA, 276 bp, Zea mays
gcaggacagtgcaaaatgtctcgaacaatatcaaattcagtaatgtgtatgtgaagaatctgtccgatactgttactgatgatgagttgaaggagatgtttggaaaatatggaaccataacaagtgctgttgttatgcgggatagtgatggaaattctaggtgttttggatttgtcaattttgaaaatgcagatgctgctgctcaggctgttcaagagttgaatggcaagatattcaatgataaggaactgtatgttggaagagcacaaaagaagt

SEQ ID NO: 7209 - DNA, 279 bp, Zea mays
cttctccctcttgccggtcccgaataaagagcagcagcgcaagaggtcggtagagcgagaagaaggcaatggcggccgagagcttccttttcacctcggagtccgtgaacgaggggcaccccgacaagctgtgcgaccaggtgtcggacgccgtgcttgacgcatgcctcgcgcaggaccccgacagcaaggtggcctgcgagacctgcaccaagaccaacatggtgatggtgttcggcgagatcacgaccaaggcgaccgtggactacgagaagatcg

SEQ ID NO: 7210 - DNA, 280 bp, Zea mays
cacgaattcaccaaccaaactccactgtctccaactctccatcgcgtctgctacgcctctcctgcaggacgaccaatggcttccaggaagttcttcgtgggtggcaactggaaatgcaacggtactggcgaggacgtgaagaagatcgtcaccgtgctcaaccaagccgaggtgccctctgaagacgtcgtcgaggtggtggtgagtccgcctttcgtttttctgcagcaggtcaaggggctgctgcggctggacttcgccgtcgcagcgcagaactgct

SEQ ID NO: 7211 - DNA, 279 bp, Zea mays
catcgatccgccattgctcaccgcacaagtgcacgctcacctcacacacgcagctaagtagctaacgccgtagcagaacaagaaaaggctcgacatggccgaggagaagaagcagggcctgcagctgctggacttctgggtgagcccattcgggcagcgctgccgcatcgcgctggacgagaagggcctggcctacgagtacctggagcaggacctggggaaaaagagcgagctgctcctccgcgccaacccggtgcacaagaagatccccgtgctgct

SEQ ID NO: 7212 - DNA, 320 bp, Zea mays
cccacgcgtccggcggaagagttctcggcttctcgcgagtcgcgacagagagaggcggagttgcggagaatatgcagagcagcagcatgaagagggagatcagcgaggcccacgacaccattcgcttcggcatcaacgccggcgtcaaagccgacctcgccccgccgcacccgctccagtctaccatccaatcggagaccaagttctgggcggacaagaagaagttcgggacagatgccatatatggatccgccctcaacatccgcatagatctcgatgcccaaatcctctccaggttccaaaggccccctggtgctttg

SEQ ID NO: 7213 - DNA, 298 bp, Zea mays
  unsure (1)..(298): unsure at all n locations
gaccgagatcatcacccccaacttctaccaggggagccggcgcgacatgcttcttcccaactgcctgttccggatgggcgcggctgcgatcctgctgtcgaaccggcggcgcgaggcccggcgcgccaagtaccggctggtgcacgtggtgaggacgcacaagggctcggacgaccgcgcgtaccggagcgtgtacgaggaggaggacgagcagggcatcgcgggcaacccgcagnccaaggagcatantgccaacgccggcgacgcgcgcaagnccaacagcacgacgagcgggccg

SEQ ID NO: 7214 - DNA, 320 bp, Zea mays
  unsure (1)..(320): unsure at all n locations
cgacgcaattgacatcccctcgcctaccccagctctacccgcgacgaagcatcaccaggaaggatgacgtgctcaatggatctcccggccaagggcgggttcagcttcgacctgtgccgccgcaacagtatgctggagaagaacgggctcaaactcccgggattcaggaagaccggaacaaccatcgtcggcctcgtctttcaggatggggttgttcttggggcagacacaagagcaactgaggggcctatagttgctgataagaattgtgagaagactccactttatgcgccaaacagtttattgttgntgagcaggaa

SEQ ID NO: 7215 - DNA, 288 bp, Zea mays
gccaaccagaagagcttgcagttactgagagtgtgtgtgagagagaggatgggtggcagcggcagggctgctctgctgctggccctggtggtggtggccgtgagcctggccgtggagatccaggccgacgccgggtacggttacggcggcgggtacaccccgacgccgacgccggccacccctaccccgaagcccgataagccccccaccaaggggccgaagtcggacaagacttccaaggagcacgggcccaagccggagaatccgcccaaggagcacaagcctacg

SEQ ID NO: 7216 - DNA, 314 bp, Zea mays
gggcagcaaccacgaaagccttctgcgcggggtgccttcctcgcagcaaatattcctgccttttgcattccggctttgcaagttccttgctttgggcatatatattgtgaggtctctatatatataggtggttcgaggtgatcggcagaaccacacaggcaaagatggcgagcgtgcacaaggccaccacccttgttctcatgttctgcctgctagcgctggggagagcggagtacctcaagtacaaggacccgaagcagcccgtcgctgttcgcatcaaggacctgctgggtcggatgactctcgctgaaaag

SEQ ID NO: 7217 - DNA, 287 bp, Zea mays
gtactggtaaatgttatgccaaagataatgggagacaataaatatctgggacaggaaaagcttcccatcattgtctgggttattgctcaggcctctcaaggtgacctagtgtctggcatgttttgctgggctcattctctatttcccacattatgtgcgaagtcaagtgggaatccccttgcaagagatttgggtttgcagatgcttgaaagaaaattgtctgtcaccaaagctcgggctatattattgaatggtgctgttagaaagggagaacgcttagttccccc

SEQ ID NO: 7218 - DNA, 289 bp, Zea mays
gtcatctcttctccggcgaagaacccccagtcgcccaccagatcacttgttaaactttgttgaggggtgatggcggtttctttcgcaaacctcagctccgaggcagggcttaaaaagcttgatgagtaccttctcactcgcagctacatcactggctaccaagcttccaaggatgacttggctgtctacacttcgttttcgtctgctccctcgtccaagtatatcaacgtagcaaggtggtttaatcacattgatgcgctcgtgaggctgagcggaattactgcagagg

SEQ ID NO: 7219 - DNA, 338 bp, Zea mays
accaagcgaccgcggacgctgggctaacgggcgcttactcgcatcgcaggctcgcagcgcactcgcgccacagtcggcatcacagaccagatccctgcgggtgcggcggccatggccgagaacttccaactccagggccggcacggaagtcccgcgtccgcgtctcccgcgtctggcgccgcccggccgcggcggggggcgacgtcatcgttgagtggaacgtcgccgtcagtatcgtctccgactgcctcccctcctacacctccagcgacaactccgccatcgtcgccacagattccatcaagaacaccgtgtatgtcaaggcgaaagagtgcacg

SEQ ID NO: 7220 - DNA, 291 bp, Zea mays
  unsure (1)..(291): unsure at all n locations
cacacacacacaaccagatctcccccaaatccacccgtcggcacctccgcttcaagatgcagatctttgtgaaaaccctgactggcaagactatcaccctcgaggtggagtcgtctgacaccattgacaacgttaaggccaagatccaggacaaggagggcatccccccagaccagcagcggctcatctttgctggcaaacagcttgaggacgggcgcacgcttgctgaccacaacagtcagaaggagagcacccgtccaccttggcgtcggcgtaggggaggcantcaga

SEQ ID NO: 7221 - DNA, 281 bp, Zea mays
cttactctcgtgcgctctccgtgggagcgaggactcgcggccggcggcagcggcaggttctcctagatctccggcatcatcagtaacaaatggctgacggtgaggacattcagccccttgtttgtgacaatggaactggcatggtcaaggctggttttgctggtgacgatgcgccaagggctgttttcccaagcattgtcggacgcccccgtcacactggtgtgatggttggcatggggcagaaggatgcgtatgttggtgacgaggcccaagtcaagagg

SEQ ID NO: 7222 - DNA, 309 bp, Zea mays
ctcctctctcgcatccgcagcctttcgagctctactccaccccctcgatctcgaagcgcacagcagcagtcaggcggccatggacgcgagcgcaccggagccggcgggaaggcgaagaagggcgcggccgggcgcaaggccggcgggccgaggaagaagtcggtgacgaggtccgtcaaggccgggctgcagtttcccgtcggccgcatcgggcggtacctgaagaagggccggtacgcgcagacgtcggcacgggcgcccccgtctacctggccgccgtcctcgagtacctggccgccgaggtgctgg

SEQ ID NO: 7223 - DNA, 286 bp, Zea mays
gacatctcgctgaacgactacctcgctgtgaacgcgacgaagcacgcgatgtacctgccgcacaccgcggggcgctactccaagaagcggttccgcaaggcgcagtgcccgatcgttgagcgccttacaaactccctcatgatgcacgggcgcaacaacggcaagaaggtcatggctgtccgcatcatcaagcataccctggagatcattcacctgctcaccgatgccaaccccatccaggtcgtcgtcgacgcgatcatcaacagtggcccccgtgaggatgcca

SEQ ID NO: 7224 - DNA, 310 bp, Zea mays
atcaaatattctattgggcgagggcttccatccaaagctatcagacttcggtcttgctaagttgggtcctgttggtgacaagtctcatgtctcaacgcgtgttatgggaacatatggttattgtgctccagaatatgctatgacaggacaacttacagttaagtcagatgtttacagctttggagttgtcttgctcgagctgattactggccgaaaggcaattgacagcaccagaccagcgtcagagcaaaaccttgtgtcatgggcacggcccttttcaatgacaggcgcaactcaccaaagatggctg

SEQ ID NO: 7225 - DNA, 217 bp, Zea mays
gaagaagaggagaagcgaacaagcaggcttcgagaacaacgcggagggggaggaccaagcgaaagggggaactagagcaagatgggcggcgaactgctgcttgcgctcctcctcgtctctgctgctgccgcccctcaggtacttggagttggcaatggagacaatcacatgagaatcatccaggaggacatcattgagacagtcaacaaccagccca

SEQ ID NO: 7226 - DNA, 306 bp, Zea mays
cggacgcgtgggcaggcacacccatcggagcagcactgacaaaaattctccagatatggcaagcaaaaggattcagaaggaactcatggatctccaaaaggacccaacgacatcatgcagtgcagggcctgctggagaggatctattccactggcaggccacaatcatgggtcctagtgacagcccctatgcaggcggggttttctttattaatatccattttcctcctgactacccctttaagcctccaaaagtgaacttccaaacaaaagtttatcacccaaacatcaactctaatgggagcat

SEQ ID NO: 7227 - DNA, 167 bp, Zea mays
agccgagggactacatcacgggcctgcgcctgtacctggactcgctgcggaagaaggcgcccgccaggctcgcgtcgggcgcgcacgtcctgggcaacgtgctggtgcacgagaccgcggtcatcggggacggctgcctcatcgggcccgacgtcgcggtcgggcca

SEQ ID NO: 7228 - DNA, 270 bp, Zea mays
ccctgtgactgttaaggagttcaaggacaaatatcttcctaaaccttatgtgattaaccttatggatgaacttacactgaagggaattacgcagttctatgcttttgttgaagaacgacagatagttcactgtctcaacaccctcttttccaagcttcaaatcaatcagtcaataatattctgtaactctgtaaatcgtgttgaactattggcgaagaagatcacagagcctgggtaatcctgcctccaaaagcaagcaaagaagctaca

SEQ ID NO: 7229 - DNA, 311 bp, Zea mays
ggtactatgaaccagagcactggaaatttggggaagtgggtaataaatattttcggcatgccaccggtcaactgtacgctatttcaaaagatttggcagcctacatatcgctaaacaagcatgttttgcacaaatatatcaacgaggacgtgtctttgggagcttggttgatagggttagatgttgagcatattgatgaccgcagactatgctgcggcactccaccagattgcgaatggaaagctcaggctggtaacacctgcgctggctcgttcgattggaaatgcagcggtaatctgaactctgtgcag

SEQ ID NO: 7230 - DNA, 284 bp, Zea mays
cggacgcgtgggcggcagctggccgggaacggcatcaccgtcgtcttaacagccagggacgagacgaggggcgcagtgccttggaggagctcagagcgctgggtccttccgacgtcgttttccatctgctggacatcacggacgcgtcgagcatcgctaggctagccggtttcttgaaggcccgtttcgggaggctagacattctgataaataatgccgcgtttggcggcgtcgaatacgcccgggagtctgctgctgctgctgggtcagtgaccagtgaagag

SEQ ID NO: 7231 - DNA, 293 bp, Zea mays
cccacgcgtccggagaaaaagcctaagacgaagacaataaaggagactacttctgaatgggaacttctgaatgatgtgaaggctgtatggcttcgcagcccaaaggaggttactgacgaagaatactcgaagttttaccactcactagccaaggacttcagtgatgacaagcctatgggttggagccacttcactgctgaaggagatgttgagttcaaagctttgctcttcattccaccgaaggctccgcatgatctctatgagagttactacaacagcaacaagtcaaacct

SEQ ID NO: 7232 - DNA, 292 bp, Zea mays
gatggtggcgcgtctgatgatgatttgtagggggagttcttccccggcgtcccgaaaatcaagtatgagggtccaacaagcaagaaccctcttgcttataagtggtataacaaggaggaagtgattctcggtaagaagatgaaggattggatgcgcttcagtgttgcattctggcacacgttccgtggtactggcgctgatcctttcggtgctcctacaaagacttggccttgggaggacggcacaaattctttggccatggctaagagaagaatgagagctcactttgagt

SEQ ID NO: 7233 - DNA, 110 bp, Zea mays
cccacgcgtccgcggacacgtgggcggacgcgtggggttcctcgggatgttgtgcctgagaaactgattcatgttcacggtcgcctcggtctaatttggcacaactccgt

SEQ ID NO: 7234 - DNA, 294 bp, Zea mays
cagttcgcatccacgcgcgccgccgccgcctcgccggtcgacgctcaccgcgcaccatggcggaacagactgagaaggctttcctcaagcagccaaaggttttcctcagctcaaagaaatctggcaagggtaagaacgcctggcaagggcggcaaccgattctggaagagcattggccttggcttcaagactcccagggaagcaatcgaagggacctacattgacaagaaatgcccattcactggaactgtttctatcagaggcagaattattgctgggacatgccacagtgct

SEQ ID NO: 7235 - DNA, 293 bp, Zea mays
atcgcctcgcgattcgcgagggctccccccaaccccatcaagtctggccaggtctctcccatatcgggttctcccttcctcttcctgtttccgcgcgatagatcgccgcccacgggtgggctctagatcccgatggcctcgcgccgccgcaccctgctcaaggtcatcatcctcggcgacagcggggttgggaagacgtctttgatgaaccaatatgtgaacaagaagttcagcaaccagtacaaggctacgattggggcggatttcctcaccaaggaggtgcagttcgagga

SEQ ID NO: 7236 - DNA, 290 bp, Zea mays
cggaccgtgggtcgagaagttcacgaacaagagtctcgggaagatgatcgccctcggggtggcgagctacgacggcgagaaatgggccaaacacaggaagatcctgaaccccgcgttccatctcgagaagctcaagcgcatgcagccggcgttcttgacgtgctgcaccgagctcattgatcgctgggacaaggaggtcgctggtggttccgacgggtcattcgagctggacgtctggccggagttccagagcctcaccggcgacgtgatctcccgcacggcgttcggca

SEQ ID NO: 7237 - DNA, 294 bp, Zea mays
accacctcgcctgcgatcttcgtagcctccgtcgcgtcgagcatcgatcatgtcggcctactgcggaaagtacaaggatgagctcatcaagaatgctgcctacattggcacccccggcaagggtatccttgctgctgatgagtccactggcaccattggcaagcgcctttccagcatcaatgtcgagaacgttgaggagaaccgccgtgccctccgtgagctcctattctgctgccctggtgctctccagtacatcagcggtgtgatcctcttcgaggagaccctgtaccagaa

SEQ ID NO: 7238 - DNA, 292 bp, Zea mays
cccgccgcagccaaaccctctccagcagccgtcgtcgccaccgctgcagcgcggaggcgacccccatcgccgccaagatgcagatcttcgtgaagaccctgacggggaaaaccatcacgttggaggtggagtcctcggacaccatcgacaacgtgaaggccaagatacaggacaaggagggcatcccgacggaccagcagcggctcatcttcgccggcaagcagctcgaggacggccgcaccctcgccgactacaacatccagaaggagtccaccctccacctggtgctcgg

SEQ ID NO: 7239 - DNA, 285 bp, Zea mays
tctctctctttattcgttccccgcctcaccccgagccagccgtctcgctagggtttctccgccgccgccgccgccgccatgcctcgccgcagctcaggaaggtctgccccacgcccagctccccgtgctgctccagtgaggaacccgccacagccagcacgccaggctcctcctccagctcctgttcgagatggtggtggctccatgtttggaggaattgggtccaccattgctcaaggtatggcgtttggcacgggtagtgccatggcacacagggctgttgat

SEQ ID NO: 7240 - DNA, 283 bp, Zea mays
cgagtacattgactcggctgtgagacacgttcttctcagacagggtgttctcggtatcaaggtgaagatcatgcttgactgggacccgaaggcaaggttggcccgatcactcctcttccggacctggtgaccatccacaccccgaaggacgaggacgagccgcgccctccggtcttggcacctcctgaggtgtaaggtcccaactgtgtccttgaaatggcagtttgatcgggtcctagataggtttctatcttacgataaggacaatgctaagacagttggt

SEQ ID NO: 7241 - DNA, 287 bp, Zea mays
aactactggagcagtgaaaaagaaattgaaggagcggatggatgactttcagaccttgagagaagcaatcaggcaagagtatcgggaggttgttgaaagaagggtttttactgtaactggtaatcgtcctgatgaagagacaattgatgacttgatagagaccggaaaaagtgagcaaatattcagagatgctatccaacatcagggaagaggccagatactagacactgttgctgaaatacaggagcgacatgatgctgtaagggatctagagaggaagcttctgg

SEQ ID NO: 7242 - DNA, 287 bp, Zea mays
aggaccgggacggccggtacgagcgccgctactccgccgcgcccgtctgcaagtggctcacccccaacgaggacggcgtgtccatggccgccctcgcgctcatgaaccaggacaaggtcctcatggagagctggtactatctcaaggacgcggtgctggacggcggcatcccgttcaacaaggcgtacgggatgacggcgttcgagtaccacggcacggactcgcgcttcaaccgcgtgttcaacgagggcatgaagaaccactcggtgatcatcaccaagaagctg

SEQ ID NO: 7243 - DNA, 281 bp, Zea mays
caaaagattgacaaatttgatagaagaaaaaagagttgctgacaagattgtgtacggcggcaaggctgatgagaagcaactaaaaatttctcctacactattgttagatgttcccgaagattcagaaattatgacaggcgaaatatttgggcccttgcttcctattgtgacggtcgaaaagattgaggaaagcttcgacttgatcaatgccaagcctaagccactagccgcctaccttttcaccaagaataggaagctgcaagaggagtttgtggcgagcg

SEQ ID NO: 7244 - DNA, 283 bp, Zea mays
cctgtacacgcctccgccaccctaccaactactcaataaccctagctaaaccccacgccgccgcggcgacctcctccgccggcaggatggacagcctcaggggagccaagttgccgggcgtgccgaaggcgggagtgcgctcgtgaaggtggcgctgctcggcggcgcggggctctacgccgtcctcaacagcttctacaacgtcgagggcggacaccgcgccatcgtcttcaaccgcctcgaggggatcaaggacaaggtgtaccccgaacgaactcacctg

SEQ ID NO: 7245 - DNA, 285 bp, Zea mays
gccaccgccacctacgcaacaccagacgctccagcagtccagcactcggagctcgcgcgcccgacggcccaccatgatcatccccaagaagaaccgcaatgagatctgcaagtacctcttcaaggagggcgtgctgtatgccaagaaggactacaacctggcgaacacccacagattgatgtgcccaacctccaggtgatcaagctcatgcagagcttcaagtccaaggagtatgtcagagagaccttctcctggcagtactactactggtacctcaccaacgat

SEQ ID NO: 7246 - DNA, 282 bp, Zea mays
caacgggccgctggacacccaaatccagtggttcaggcagctgctcccctccgtgtgcgggaaggattgcaagaactacctgtccaagtccctgttcgtggtgggcgagttcggcggcaacgactacaacgcggcgctcttctcggggcggtccatggcggaggtgagagggtacgtgcccatggtggtgagcaagctcgtccgcggcctggaggcgatcgtgaggagcggaccgtggacgtggtggtgcccggggtgctccccatcggctgcttccccatc

SEQ ID NO: 7247 - DNA, 318 bp, Zea mays
cctgatcctcgttcctctccgccccgcttgcaccgcgcctccgcccccgtctcctgtgagatcagctccggcggcaccggatatgactacttcaaggcgtcttgctgacaggaagagtgcaaagttccagaagaacatcacaaagaggggttctgtgcctgagaccacggtgaaaaagagcaatgactaccctgttggacctatagttcttggattcttcatttttgtggtcattggatcatccttgttccagataatcaggacagcgacaagcggtgggctggcctgaatttactgagctaaaaccagaaatttatc

SEQ ID NO: 7248 - DNA, 315 bp, Zea mays
aaaccgctgggttgcacagagaatacaagatatgcttgttaacggcatcaagacttgggcaccagttctgccagtaaataggacagtggttgatttttcatcacctaatattgcaaaggaaatgcatgtgggacatttaaggtctacaattattggagatacattagcacgcatgtttgagttctcgaatgttgttgttctgcgcagaaaccatgtgggagattggggtacacagtttgggatgctaatagaatatctttttgagaaatttccaaattggcaggagataggttgccaggccattggggaccttca

SEQ ID NO: 7249 - DNA, 314 bp, Zea mays
cccacgcgtccggccacgccgccaaggggcccgggtacgccacgccgctggaggccatggagaagggccccagggagaagctcgtctacgtcacctgcgtctacaacggcactggaattaacaagccggattaccttgcgacggtggatttggatcccagctctcctacatactcccaggtgatccacaggctcccggtcacccacatcggcgacgagctgcatcactctggctggaactcctgcagctcctgccacggtgacccatcggccaagcgccgcttcctgatcctgccttccttgctgtcaggccgt

SEQ ID NO: 7250 - DNA, 315 bp, Zea mays
ccaacagaggctcacatctgctggatacaagccggacttgtcggaggcacctatggtcgccgacattgaccgcaccaaaggcgccaccctgcgtttgcacagcgaacggctagccatatcatttggcctactcaatgcaacacctggggcacccattcggatcctgaagaaccttagagtgtgcaaagactgccacaccatcagcaagctcatatcgaagctatacaatgttgaaatcattgtgagggatcggattcggtttcatcacttcaaggatggatcatgttcttgtaaagattactggtgatccttgaa

SEQ ID NO: 7251 - DNA, 311 bp, Zea mays
cacgagagagacgaatcttccgaatctctcggtggcgatggcgctctccgaccgctcccgcgagtcgctcctcccgagcttcctctacgcctcctcggcgcgctctttcgctgccacaggagccgccgcgcgcctccctgtctcctccccagcgcctgccacggctggagcaggaggcggcgtgccgttctcgatccaggcgcccaaggagaagatcgagatgtactcgccggccttctatgccgcctgcactgccggaggaatcgccagctgcgggctcacccacatggccgtcacgcctctcgacctcg

SEQ ID NO: 7252 - DNA, 314 bp, Zea mays
accacaccacacctcctcgcttgcactccgctcgtctgacatctcgtcccgtcctttcgtttcgaagcctcgcgagccccgacgatggccaccaccgcggtgtcggtcgacgagaagctcgataagcttcgcgccgaggtcgccaagctcgaccagatcagcgagaacgagaagtccgggttcatcagcctcgtgtcacggtacctcagtggggaggcggacagatcgagtggagcaagatccagacccctacggatgaggtggtggtgccctacgataccgtcgcgtcgcctcccgaagatctcgaggagacg

SEQ ID NO: 7253 - DNA, 314 bp, Zea mays
cccacgcgtccggagtttcagtacttgttcgattcgacaaatgatgtttccgtcctgccttgtggtcataccattcatgtaaagtgcctgaaagaaatggaagagcactgccagtttgcatgccccctttgctccaagtcggtttgtgacatgtcgaaggcatgggaaaggctcgacatggagctggcaactctgtctgactcctgtgatcacaaaatggtccgcatattatgcaacgactgcggggcaatatcagatgtgcagttccatttgattgcgcacaagtgccagaattgcaagtcatacaacacccg

SEQ ID NO: 7254 - DNA, 316 bp, Zea mays
gactctcctcagtaactatagtttttttgttccttgggaggatagaaaaaatatatccttggttttcttgaacaggtgtgcttctgaagagagatttcgttgaacaggatgaatgcattggcagcaaccagcaggaacttcaagcaggcagctaagctgctgggcctcgactccaagctggagaagagcttgctcattccattcagggagatcaaggttgaatgcacaatcccaaaagatgatggaactttggcatcctatgttggatttagggttcaacatgataatgctaggggacctatgaagggtggaatca

SEQ ID NO: 7255 - DNA, 317 bp, Zea mays
cgactactatactaccgccgcgctctgctcctgcaccagccgggtcagctgaactgagcatcatatcatggagggaggagccgttcccaagccatcggagaagagggtggccctcgtcacgggcgggaaccggggcatggggttcgagatatgccggcagctggcgtccagcggcctcaccgtcgtcctcaccgcgcggagcgagacgcggggcgccgaggcggcccgcgagcttcacggcttcggcctgcctgacgtcgtgtcccaccagctggacgtcacggagcccaccagcgctgctcgtctggctgatttcg

SEQ ID NO: 7256 - DNA, 312 bp, Zea mays
gctcgacatggacgtcctgtaccgcgccggcgagacacaccagggcgtcgccagctactgccctcgcttggtatcagtcggttctcgagggtctcttggctcgttaagttcctctggcactctaggttcgagcagtgcagctgcagatgagcccaacatcttcacatggtctggaaaggtaacaaaatcagtagcaaaacctcatgagcgaaacttgttcctacaaagtttatctgaagaagaacagaacccaagctctagcgatggccaaagcaatgctagtgttgaagataaggacctggtcgcaaatct

SEQ ID NO: 7257 - DNA, 308 bp, Zea mays
cggacgcgtgggtgaagatgttcagttctgcccttccagtgcgcaggagttttgtagtgtgggtgatgatgcttgtcttattctgtgggatgctcgaactggcactgccccagctgttaaggttgagaaagctcacagtggagatgttcattgtgttgattggaatccccttgatgttaactatatcttaactgggtctgccgataactctgtccgaatgtgggatcgtcggaatctgggttcaggaggagctggttctccaattcacaaatttgaaggccataaagctgctgttctttgtgttcagt

SEQ ID NO: 7258 - DNA, 308 bp, Zea mays
ctccgccgccgctcccgctccgccccagcgcatcgcccgccgccacagcgtaccgcgacctcatctatcaccttcagctttcaatcatggcggacgtcgatgtcgaaccggaggttgccgccggagctcccaagaagaggacgttccgcaagtacagctaccgcggcgtcgacctagatgcgcttctcgacatgtccactgacgacctcgtccagctcttccccgcgcgcgccaggagaaggttccagaggggtctgaagaggaagcccatggcgctcatcaagaaactgcgcaaggcgaaaaaggat

SEQ ID NO: 7259 - DNA, 306 bp, Zea mays
gatacagtcttctccatccatgcagatgcagaagatgggtctcctcgtaaaggaggaagttccttggccccacctttcccatctccatgtactttgcggactgcgcttctacgatatgctgatctactcaatccaccgaagaaggctgctttgcttgctttagcttctcatgcatctgatccagctgaagctgaacgacttaggttcttggcctctcctgctggaaaggatgagtattctcaatggataactgctagtcagaggagtcttcttgaagttatggctgcattcccttcagctaagcca

SEQ ID NO: 7260 - DNA, 308 bp, Zea mays
ctcatggagaacggcaagttcctcttatcagctaaaaggagccgcagaacaacctgcacgcagtatatcatctcgatggacgccgacaacatatcgagatctagcagcacgtacatcggaaagctgaggtaacagaatcgaaaacgcaatgcaatgcaacaagcgaacgtacgggaacttcatttgactacgtacgttggctattaattgagacgattccggccattcccaggtcaaacttcctgggcacgaagttcgtggtctcagacacgcagccgcccccatacagatacagcggggctgcaccc

SEQ ID NO: 7261 - DNA, 307 bp, Zea mays
cccacgcgtccgctcccgcctcctcaccgatgcggacgccggcgatgctccggtggggctcctcgctcgctgtcctgctcgccgtcgccgcgccggccgccgggctctacctccccggcgtcgccccgaccgacttcgcctcgggtcctccgcttccagtgaaggtgaataagttgacatctatcaagactcaactcccgtatacatattactcccttccattctgcaagccagatgccatagttgacagtgccgaaaatctcggggatgttcttcgtggcgatcgcattgagaactctccttatgg

SEQ ID NO: 7262 - DNA, 305 bp, Zea mays
cgcaccgaggacgacctcacgctggggcgggccttgttcccagaaactttaggctgctagaagaactagaacgtggtgagaagggcattggtgatggaactgtgagctatgggatggacgatgctgatgacatatttatgcggtcctggacaggaactatcattggtcctcccaacactgttcacgagggacgaatctatcagttaaagctgttttgtgatacagattatccagataaaccaccgactgtccgattccagactcggatcaatatgacatgtgtgaaccaagaaactggattggtt

SEQ ID NO: 7263 - DNA, 306 bp, Zea mays
gagcgagtgagaactggaatttgggttggagactgctttatctataacaactcatcgtggcgcctaaattattgtgttggtggtgaggtcactacaatgtatcatttggatcgccctatgtacttgttgggatatattgcgaaccaaagtcgagtttatcttattgacaaggagttgaatgtcattgggtacacattacttctgagtttgattgagtacaagacccttgtgatgcgtggggatttggatcatgcaaacaaaattttatcatccatacctaaggcgcaatataatagtgttgctcat

SEQ ID NO: 7264 - DNA, 309 bp, Zea mays
ggaaaccctagccgccatatctcacgatccactcgagcaccaagccgagggaaggtgaggagcgatggcgcgcggcgtggtgtcggatcgaaggcggcgcggtcgcgggcaagaagaaggggtcggtttccttcacgatcgactgcaccaagccagtggaggacaagatcatggaggtcgcctcgctcgagaagttcctgcaggagcgcatcaaggtcgccggcggcaaggctggcaacctcggcgactccgtcaccatctctcgcgagaagaccaaggtcaccgtcacctctgacggacccttctcca

SEQ ID NO: 7265 - DNA, 306 bp, Zea mays
cggacgcgtgggcgtgacgcgtgggtttgcaagccagtaggtcaccactcaaaagcttgtgaagcaggtgagatgggcaaggaggtggatgtgtccactctggaggccggcggcgtctgtgaccgtgactacgcggaccctccgccggcaccgctgatcgacatcgacgagctcggcaagtggtccctgtaccgcgccgtgatcgccgagttcgtggccacgctgctgttcctgtacatcacggtggccacggtgatcgggtacaagcaccagacggacgcgtcggcgtcggggcccgacgcggcg

SEQ ID NO: 7266 - DNA, 301 bp, Zea mays
tttgaagaggctcaatgcgcccaagcattggatgctggacaagcttggcggacttttgctcccaaaccatcttctggacctcacaagtctagggagtgcctgccactgatcctcatcatcaggaacaggctcaagtatgctcttacataccgtgaggtcatttccatcctgatgcaacgccatgtacttgttgatggcaaggtcaggacagacaagacctaccctgctgggttcatggatgtcatttccatccccaagaccaacgagaactacaggctgctgtatgacactaagggccgct

SEQ ID NO: 7267 - DNA, 300 bp, Zea mays
  unsure (1)..(300): unsure at all n locations
ggaagagcaaggtgcttaacagatgcactggccttcagtttctcattaccgacattatccgatgttatagccatggaggtcgaaccatcatcttcactgagacgaaggattctgcatcagagctttctggtttgattcctggatcccgtgccttgcatggagatgtagcgcaacgcagcgnngaagtatgtgaattcttcttcgatttaataacattggcaatcatttgattttcaggtaatactggtgttgctgtcatgctttatgagcccagatataagcacagtgtcagcagactag

SEQ ID NO: 7268 - DNA, 299 bp, Zea mays
gccagatccgtttgcgaaaccgaggctgaagaaattgatttcgacggccaggagaatactggcatcaattttgatgcctatgaagacatccctgttgagaccagtggccatgatgtgcctgcaccagtcaacacatttgcagagattgatttgggtgatgcattgaatgacaatatccggaggtgcaagtatgtgaaaccaacaccagtgcagcgttacgccatcccaatctccattgctgggcgggatctcatggcctgcgcacagactggatccggaaaaaccgccgcattctgttt

SEQ ID NO: 7269 - DNA, 301 bp, Zea mays
cgacggcgctcctggcagcaggaacaagatgtccaatagggccacacattggtgttatgcctgtcggcggccaattcgtctccgtgggcaggatatcgtatgccccaactgcaatgatggttttatccaggaaattagtgagatgggtggcatattgaacacttatgggctaattgaaccagactttgaagagcgtcgagctagaagattcggaatgatggatgccatgtcttcccttatgcggcaacggatggaagaaatgggaagagatggtttgttcgatattcgtggtagacaagga

SEQ ID NO: 7270 - DNA, 304 bp, Zea mays
ctgattatgcaaagaaaaacaatgttaatacttctgcactgacacaatctgaaatgcgagatatcattcttggagctgaaattgctccaccatcacagcagaggcaacagattgctgaaattgagaaacagtcaagagagactactcagttaactgctgtaaccacaaggacgacgaatgtgcacggagatgaactcattatcacaaccacaagtccatatgagcaacaagcattcgcatcgaagactgattggcgtgtcagagccatctctgccacaaacttgtatctacgtgtaaatcacat

SEQ ID NO: 7271 - DNA, 302 bp, Zea mays
cccacgcgtccgcccacgcgtccgccccatccttgactagctccgatctggtacgagatggccggcaagatgaaggagttagacggcgccaccctgccaagatcttcattggcgggctctccaaggatacaagcatgagtacattcaaagaacattttgggaagtatggggatataattgatgctgtcataatgaaggaccgctacacacaaaagcccagaggctttggctttattacttttgctgatcccactgttgttgacagagtgattgaggatgaacatgttatcaatggaaaaccg

SEQ ID NO: 7272 - DNA, 306 bp, Zea mays
ggggcgcttctttttaggtcgtgatgctaaaaaatgatcagcacgggtgcccttttgcaactcagctgttctgcatatctggatcaatatgcttttaactgcgcactcaaaagccaggccttgcgattgacaaagttttttgtttgaaatatcttgtctgcctatgttatttattgttttgtttctcaagatttagcactggcaggttcaggaagcatatttgagactctgcgactcggcaaaccactaatcgttgttgtaaatgaagatttgatggacaatcaccagagtgaattagcagaagaa

SEQ ID NO: 7273 - DNA, 348 bp, Zea mays
acgacctgttcgacaccggggactccatggaggagctggagaatctcgtcacgctgttcgacctgtgggacgcgcaccaggaggctggcttctactcggagcgggtggagatcgtcttccgcgccgtctacgacacgtgcaagcatctggtgggcaaggccgcggcggtgcagaaccgcggggtcatggaccacatcgccgacctttgggtggacgtcgtgagggccatgatgcccgaggcggagtggaggatgagcggccgggtgccgtccatggaggagtacctgccgatcggggaggtgtcgttcgcgatcggccccatcgtccccatggccgcctacctggttt

SEQ ID NO: 7274 - DNA, 326 bp, Zea mays
ggccggcctcgactccccgcgctgcgaggtcgtctgcggcaacttgctctgcatgccgttcccggacgcctccttcgacggcggctagtccatcgaggccacctgccacgcgcccaggctgcaggacgtgtacggcgaggtctaccgcgtgctcaagccggggggactctacgtctcctacgagtgggtcaccagcccgctgtaccgcgccgaggacccggaccacgtcgagtgcatccacggcatcgagcgcggcgacggctcccgggggctccgccggcaggacgaggtggcgtcgatcgccaaggaggtcggcttcgaggtgc

SEQ ID NO: 7275 - DNA, 346 bp, Zea mays
agccgccgccatgtcgaagcgaggcaggggaggttcggcggggaacaagttccgcatgtcgctgggtctgccagtggccgcgacggtgaactgcgcggacaacaccggcgccaagaacctctacatcatctccgtcaagggcatcaagggccgcctcaatcgcctcccgtccgcctgcgttggcgacatggtcatggccaccgtcaagaaggggaagcccgacctcaggaagaaggtgatgcccgccgtcatcgtccgccagcgcaagccgtggcgccgcaaggacggggtctacatgtacttcgaagataatgctggagtgattgtgaatcccaagggtgagatg

SEQ ID NO: 7276 - DNA, 343 bp, Zea mays
ctctgctttctccagtttcacttgagagctagctgagactgagagcaaaatggttcttggagcgttggcgagtgcagtcgcctcgatgagcctcctcatcgtctacggtgtcctgggcgctctgctcctgtggaaggccgcccggctgctggatcggctgtggtgggagccgcggcggctggagcgggcgctgcgcggcagggcccgcggggcacgtcgtaccgctttctcacgggcgacctcagggagtaccgccggtcaaaagaggaggcctggggcaggcccctgccgctgcggtgccacgacatcgccggccacgtcgagccgttcatccacggcgccg

SEQ ID NO: 7277 - DNA, 345 bp, Zea mays
cccaagcggccgcccaagcggccgggttgcctctggagaagtccgggcctatggatgatgatcttgataaaataaagaataacagccacacgagtgaaattgtagactcatgggaattatggaattcattcagattgctatgtgaccatagtagccaactatgtgtggcactcgatattttgagcactctgccatcaataaactcattagcaaggtggtttggagagcctgtataggctgctattctgcaaaccgaggcttttcttacaaatgcaaaaggatatccttgtttatcaaagcgccatcagagtctgctaactggattttttaaacattctgttcagg

SEQ ID NO: 7278 - DNA, 343 bp, Zea mays
cgagacggtggacgagacgcgtgggccgccattgctcaccgcacaagtgcacgctcagctcacacacgcagctaagtagctaacgccgtactgtagacaagacgaggctcgacatggccgaggaggagaagcagggcctgcagctgctggacttctgggtgagcccattcgggcagcgctgccgcatcgcgctggacgataagggcctggcctacgagtacctggagcaggacctgaggaacaagagcgagctgctcctccggggcaacccggtgcacaaggagatccccgtgctgctggacgacggccgccccgtcgtggagtccctcgtcatcgtgcagta

SEQ ID NO: 7279 - DNA, 340 bp, Zea mays
  unsure (1)..(340): unsure at all n locations
agcaaaccgaacgaacccaaccgaagcgagactgagcaaggcagaggcgtcgtgaccggcgatggagcggctgcagcggatctttggcgcctccggcatggggcagccgccgacggactcgccgctgctcgattcctccgagcaggtctacatctcctccctagcgcttctcaagatgctcaagcacgggagggctggggtgcccatggaggtcatgggcctcatgctcggcgagttcgttgacgactacaccgtcnaggtcgtcgacgtcttcgccatgccgcagagcgggactggtgtcagcgtcgaggccgtcgaccacgtcttccagacaaacatg

SEQ ID NO: 7280 - DNA, 345 bp, Zea mays
cccacgcgtccgaagaccatcaccctcgaggtcgagagcagcgacaccatcgacaatgtcaaggccaagatccaggacaaggaagggatcccgccggaccagcagcggctgatctttgccgggaagcagctggaggatggccgcacccttgcggactataacatccaaaaggagtctacgctccacctcgtgcttaggctccgcggtggaatcattgagccctctctgcaggcgctcgctcgcaagtacaaccaggacaagatgatctgccgcaaatgctatgcacgactgcaccctagggctgtcaactgccgcaagaagaagtgtggtcacagcaaccagctg

SEQ ID NO: 7281 - DNA, 344 bp, Zea mays
gtcgtgtcgccggcggaggtgggcgtccgtcctcccgttccaccagagctcactgcttcgctccacccaccggccaccaccccgtagttaagcaggagtggtacctggtggttttttgtttttcaaaaagaagacagaaatgtcttcctcgaggcctgcccactcttcaagttcatccagcaggactcgccagagctcccgggcaaggatattagcacaaacaacccttgatgctgaactcaatgcagagtacgaagaatctggtgattcctttgattactccaagttggttgaagcacagcggagtactccacctgagcagcaagggcgatcgggaaaggtca

SEQ ID NO: 7282 - DNA, 341 bp, Zea mays
acggaggcgaaggaggaggagcagcagcagcaggcggcgccgaggagcggcatcccactcagtgcttgcaaccatggctaggggattgaagaagcacttgaagaggctcaatgcgcccaagcattggatgctcgacaagcttggcggagcttttgctcccaagccatcttctggagctcacaagtccagggagtgccctcctctgaacctcatcatcaggaacaggctcaagtatgctctgaactaccgtgaggtcatttctatcctgatgcaacgccatgtacttgttgatggcaaggtcaggactgacaagacctaccctgctgggttcatggatgtca

SEQ ID NO: 7283 - DNA, 333 bp, Zea mays
cggacgcgtgggctaagctttcagactttggtctcgcaagaacaggtcctagtggagaccaaacccacgtgtcaactcgtgttatgggaacttatggatacgcggctccagaatatgtcatgactggccatctgacagcacgaaggatgtttatggctttggagtcgtgcttctagagatgattattggaagaagggctgtggacgatagccggccgagccgtgagcataacctagttgactgggcacggcccctcctcgtccataacaggaagctgttccggataatcgatccaagaatggaagggcagtactccaccaaggctgccaccga

SEQ ID NO: 7284 - DNA, 339 bp, Zea mays
cccacgcgtccgcccacgcgtccgccgcattccacgcgcactccgctgcctcactccgagactccgccgctgcttccaacttccgttgcgcacgagcgaaacatccggagctagcaagggaggaggaggaggaggcgatggcggggggcggggataaggtggactacgtcttcaaggtggtgctcatcggcgactccgctgtcggcaagtcgcagatccttgcgcgcttcgcccgcaacgagtttagcctcgactcgaaggccaccattggggtcgagttccagactcggacgctcgtcatcgaacacaagtccgtcaaggcgcagatctgggacaccg

SEQ ID NO: 7285 - DNA, 341 bp, Zea mays
tgcaccttcaaagggtgctctagagagtgttaggatccaaacagccatcaatgacgggatactcaatcttgttgacaagttctttgagatgcagagagatgacgcaataagggcactgggcatgtatagaagagcaatcgagcaggcagaacaactttcagaattttatgaagtgtgtaaaagtatacatattgtgcggggtgagagattcctaaaaatcgaacagccgcctgcatccttcttggcgactatggaggaatatgtgagcaatgctccccttgcttcaacagttcaaagaaatcaggctgtactggccatagaggacagcaaaaaatcagaag

SEQ ID NO: 7286 - DNA, 334 bp, Zea mays
cttcctatgaccagagtgtcgagctatttagggacaaatttggcgcaggagaaatttctactgttgttggagccagcgctgtttctggattctttgcctcagcatgcagtttgccctttgactatgtgaagacacagattcagaagatgcaacctgatgcgaatggcaagtacccatacacagggtctttggactgtgctgtgaagaccttcaagagcggtggcccattcaagttctacactggtttcccggtgtactgcgtcaggattgcaccccatgtcatgatgacctggatattcttgaatcagatccagaagtttgagaagaagatcgg

SEQ ID NO: 7287 - DNA, 332 bp, Zea mays
ctttcttcgagtgccaatgttggaaaaacacctttggcagctcccaagatcgacgcatctgatttcggtgcatttgtatctagcaccgaggaagcagccaaggaccctctcgatctttcttcgggtagcaaccttggaaagacaggccaagcacccgcggcagcctccaagcctagcgcaaagaaagacaattttcaggtcaagtccggcatatgggcagactcgctgagccggggattgattgatctgaacataactgcaccgaagaaggtgaacctagctgatattggcatcgtcggtggccttggcgatgggtccgatgagaaggccct

SEQ ID NO: 7288 - DNA, 334 bp, Zea mays
cccacgcgtccgagctatagccatcttcttctcttctctgaattccagtccaagggccggaataccgtcagagcagagggagtgggaggaagaggaaaaaaagatggtgaagctcgcatttggaagctttcgcgactctttgagcgccgcgtcgctcaaggcctatgtggccgagttcatcgccacgctgctcttcgtgttcgccggcgtcgggtccgccattgcctactcgcaattgacgaagggcggcgctctggaccccgccggcctggtggccatcgccatcgcccatgcgttcgcgctcttcgtcggcgtctccatggccgccaacatt

SEQ ID NO: 7289 - DNA, 332 bp, Zea mays
gctagctagccactctagctcccaagtggccaagtatactcgccagagtagagtgtagttgagcgtcgtccaaggatggcgtggacctcccgccgcatggtcgcgtccgcgctcgtcttcctgctgatgctgctcgccgcctcagagatggggacgacgagggtggcggaggcgaggcactgcacgtcgcagagccaccggttcgtcggcgcctgcatgagcaagagcaactgcgagaacgtctgcaggacggagggcttcccgtggggcgagtgcaggtggcacggcatagagcgcaagtgccactgcaagcggatctgctagtaattaac

SEQ ID NO: 7290 - DNA, 327 bp, Zea mays
ctattatatctagtgtgaagaagtacaactggggcgctctgtcatttgacatcaagctctgcagaacgaacaactcatctaaatccgtaatgcgtgctcctggagatacacaaggctctctaatcgcagatgctgtaatcgagcatgtggcgtctgtcctgtcactggatgccaacagcgtgagggaaaagaatttccacacctacggtactcttcagtcgttctaccctgacagcgcgggcgaacttctacgtacacgttgcattctatttttgataggctggtctcaacttcaagctacctggatcgagccgaatccataaagga

SEQ ID NO: 7291 - DNA, 330 bp, Zea mays
ctcacttctccaggtaaggaaagtgttcgtcctcatggcgccgccgcagccgaagtcgggcctcttcgtgggcatcaacaagggccatgtcgtcaccaagcgcgactgcctctgcgcccgtcccaccgcaaggggaaagcaacgaagagggtgtccatggtcaggggcctgatcagagaggttgctggctttgctccttatgagaagcgtatcaccgagcttctgaaggttggcaaggacaagcgcgctctgaagcttgccaagagaaagcttggaactcacaagagggcaaagaagaagagagaggagatgatgggcgtcctcaggaag

SEQ ID NO: 7292 - DNA, 329 bp, Zea mays
cccacgcgtccggggcaagccggtggagagcgtgcgcctcgtggatcgccagcttcgccatctgcccgaggcgttcgggaggatcctggggctccgtgtgctcgacgtctcccgcaaccagcttgaggttattccagatgctataggaggacttggtcatcttgaagagctttttcttactgccaatgatttggtatctctacctgataccattggactgctatccaatctgaagattttgaatgtatcaagtaataggcttagggcactgccagatagcatctccaagtgcaggtcgctagttgagcttaatgtgagctataatggtc

SEQ ID NO: 7293 - DNA, 334 bp, Zea mays
cgaggagcaagcaagtcgaagcatcaaatggcgcgtcaggagatcgagcacagccacctccccgtccgcgggatcaacctccacgtcgctcaggtcggcaaaggtgacctgggcacggtggtgttcctgcacggcttcccggagatatggtactcgtggcgccaccagatgcttgccgtggccgcggcggggtaccgcgccatcgcgccggactgccgcgggtacggcctgtcggaccagccgccggagaacgaggaggcgtcctgggtctgggatgacctcgtcgcggacgtgctcgccatcctcgacgcgctttccatcccaaaggcgttct

SEQ ID NO: 7294 - DNA, 316 bp, Zea mays
cggacgcgtgggtttcgatctcatttgaaatcaacccatcctcgtttcctccgtctagcagcctctcaccctcatggccaagatcaagatcgggatcaatcggtttggcaggatcggaaggctggtggccagggtggccctgcagagcgacgacgtcgagctcgtcgccgtgaacgaccccttcatcagcaccgattacatgacctacatgttcaagtatgacactgtgcacggacagtggaagcaccatgaggtcaaggtgaaggactccaagacccttctctttggtgagaaggaggttgctgtgtttggctgc

SEQ ID NO: 7295 - DNA, 311 bp, Zea mays
cccacgcgtccgctcgaaggcagcgaacgccgagccttcccttccctccaatcgatcacccgcttcgatccgctagctagctagcagcgcgatggcttccctcaccgtgtccacgaagaccgcggcggccggcggcaacaagcagcgcgagggtcccgaggtcatcacgggcgcggaagcctgcttcgcgcactccaagcagatgctccaggcggtgggcttcccgggcggcgtgatgccgctgcgggggcttgaggagttccgctgggtgcgccagaccgggttcgtgtggattcggcagaaggccccct

SEQ ID NO: 7296 - DNA, 346 bp, Zea mays
  unsure (1)..(346): unsure at all n locations
ctgnacgcgtgggtcactgatcacaccgtctcgtcggctcgtagggccgccggccgccagccgctgataggcatcgtggctcgagcgtcgttgcgtctggcgctgcttacgccaggacgacgatggaccactatagttctaggaggaatcacgcttggtgaggacatccagcctcttgtctgcgacaatggcactggaatggtcaaggctggttttgctggcgatgatgcaccaagggcggttttccctagcattgttggccgtcctcgccacactggtgtcatggtagggatgggacagaaggacgcatatgttggcgatgaggcacagtccaagagaggtattc

SEQ ID NO: 7297 - DNA, 301 bp, Zea mays
gatcaacacaatagctctccttgttttttttttcaaataaaaaagcacgagctcagcgccatggcgcccgccaaagcgcacagcacaagcactaaccagcagacattgctggatgcgcagtccagctctggcatcacgccttcggctacgtcaagtccatggcgctcaaggccgccctagacctcggcatccccgacgccatccaccagcacggcggctcagccaccctcccacagatagtcaccgagctggccacacttccaccgtccaagacaccgtgtctgcgacgccttatgcgcgt

SEQ ID NO: 7298 - DNA, 215 bp, Zea mays
ctcggccactccctagcacatcaaaccctagctccgcccagcccccaaccatgtcggcgatgatgcaaccggagattatcctgctcaaggagggcacggacacgtcgcagggggcgcctcaagtggtgagcaatatcaacgcgtgcacggcggttggcgacaccgtgcggaccacgctgggggctcgggggattgacaagctcatccacgacgac

SEQ ID NO: 7299 - DNA, 312 bp, Zea mays
aattagacaagaaggtaaagttgttggattgtcctggtgttgttatgctcaaatcttccaacagtggtgtgtctgtagcccttcgaaactgcaaaagggttgagaaaatagaagatccagtcgctcctgttaaggagatcctaagtatttgcccacatgagaagttgctgtctctgtacaaggttccaaactttggttcagttgatgattttcttcagaaagtagcaactgtacgtgggaaattgaaaaagggtggtgtagtggatgttgaagctgcagcgagaattgtgcttcatgactggaatgaaggta

SEQ ID NO: 7300 - DNA, 301 bp, Zea mays
cccaaagcttccggagaattcctcccttgccccgccgtcgcatcctcttcgaagttcgaatcgaatcgcgccgcgatcacccacctcatggcggacaaggagcctgtcgtggagcggccagatgcgggtgatgaggaggaggacgcctcagccgccgccgccgcgggggaggaggaggacacgggcgcccaggtggctcccatcgtgcggcttgaggaggtagccgtcaccaccggcgaggaggacgaggacgtcctgctcgacatgaaggcgaactgtaccgattcgacaaagacggtaa

SEQ ID NO: 7301 - DNA, 310 bp, Zea mays
cccacgcgtccggcacgccaccttatctctaaccggagatcaaagaagtagccgttaacgatggcttccgacgagctcgcaaaggccgtcgagcccaggaagaagggcaacgtcaagtatgcctccatatgtgccatcctggcctccatggcctctgtcatccttggctatgacattggggtgatgagtggagcggccatgtacatcaagaaggacctgaatatcacggacgtgcagctggaggtcctgatcgggatcctcagtctctactcgctgttcggatccttcgctggcgcgcggacgtccgaca

SEQ ID NO: 7302 - DNA, 308 bp, Zea mays
cggacgcgtggcacaaagcgcctagcaaaagcatacttcccgaagcactcttgcaatccactgagttctgtttgttgagacgcatagagctagctgctagcgtcgacaatgtcgctcgtgaggcgcacgaacgtgttcgaccccttctcgatggacctctgggatcccttcgacaccatgttccgctccatcgtcccgtcggcgacctccaccaactccgagactgccgccttcgccagcgcccgcatcgactggaaggagacgcccgaggcgcacgtcttcaaggccgacctccccggcgtcaagaa

SEQ ID NO: 7303 - DNA, 308 bp, Zea mays
cccacgcgtccgcgatgatgggtgggatagccgctgggtgaaatctgattggaagaagagccaaggacaagctggaaccttccgacacacagcgggaacctactctggagaccctgacgataaaggtatacaaacaactggggatgccaaacattttgctatatcagcaaaattcccacaatttagtaacaaggaccggacattggtgatccagtactctctaaagattgagcaagatattgaatgcggtggtgcttacatcaaacttatgtctggttatctcaaccagaagaaatttggtggcgaca

SEQ ID NO: 7304 - DNA, 299 bp, Zea mays
cgtgattccagtgccttataaggacgctgacacaactgccataaagggagcctgcgaatcaactgtttacacactcaatcaatctgggattcgagcggatcaggacacccgtgaaaattactctccaggttggaagtattctcactgggaaatgaaaggtgttccattgagaattgagattggtccaaaagatctggcaaacaaacaggtacgcattgtccgccgggacaacggtgcaaaggttgacattccggtgaccaatttggttgaagatgttaaagtgttattggatgagattc

SEQ ID NO: 7305 - DNA, 305 bp, Zea mays
cccacgcgtccgcgactacttgagacaaacaacttccctgaattcactggacgagtttgccctgctccttgtgaggggtcatgtgttcttgggattattgagaatccggtgtctatcaaaagtatagaatgtgcaatcatagacaaaggttttgaagagggatggatgattccacgacctccacttcaaagaacaggaaggaaggtggccattgttggcagtggaccatctggtttggctgctgcagatcaactaaataaaatgggccacttcgtaactgtgttcgaacgtgcagatcgaattgg

SEQ ID NO: 7306 - DNA, 304 bp, Zea mays
gacgaccgagcggagtctagactcgagagcaacctcgacctcccggatctctctcccacccacgcctcgtcggcgccgtcgtctgctgcagcgatggcctcccccgacctgctcttcaatctgcggaacctcttctacctgggcgcctaccaggcagccatcaacaacagcgacgtcccgggcctcgacgccgacgccgccgctgagcgcgacgccatcgtcttccgctcctacatcgccctcggctcctaccagctggtgatcagcgagatcgactcgtcagccgctacctcgctgcaggccg

SEQ ID NO: 7307 - DNA, 303 bp, Zea mays
aacaataccagaggatggttacacactaatagcgctttttggcataaaggatccagtccgtcccggtgtgaggtatgcagtgatgacctgcatggctgctggaattaaagttacaatggtgactggagacaacatcaatactgctaaagccattgccaaggaatgtgggatattaaccgaggatggaatcgcaatagaaggaagagagcttcacgataagagcacggatgaactgaaggagatcctgcctaaaattcaggtaatggcccggtccttgccgatggacaaatataaactggtgac

SEQ ID NO: 7308 - DNA, 302 bp, Zea mays
ggcgagctgtgcttcctgagaccccgatgccccgagccatactcgacctattgaccacatctacacgtgaggaaggctcaaggaaagtcaccacgtcaaatgggtaccaaggccatgacttaaggacggtcagcacatcatatgcatctcaagatggggacaactcatggaaggctaccatgtcatatgggttccaaagtggtgacggctcgacgaaggtcaccacatcatatccgtaccgagggcaggacttaaggatggtcagcacatcatatgtatctcaagatgaggacaactcatgg

SEQ ID NO: 7309 - DNA, 298 bp, Zea mays
caaaggcttttcaggcaagaccttcttgttgctagtctcttccgtaacttcttgcttgctgagagaatcatgcgatctgcaaactgttctccagtttcttatccgttgttacccccaacacatcaacaccatatgtgggatgcatgggacatggctgctgagatttgcctttccaagcttcctcagttaattgatgatccaaatgctgagtttcagccaagtcctttttttacggaacaactgacggcttttgaagtgtggcttgatcatggctctgaggacaagaaacctcctgaac

SEQ ID NO: 7310 - DNA, 301 bp, Zea mays
cccacgcgtccggcaattcgcgcttcgggctctggcgagcacccttaacgaggaagagctatcagatctgaaggatcagtttgatgcaattgatatcgataaaagtggatcgattagtatcgaggaaatgcgtcatgcccttgcaaaggatcttccctggagattgaagggtccccgtgtgctggagattattcaagcaattgacagcaacactgatgggctcgtggacttcaaggagtttgttgcggcaactctccatatccaccagatggcggagtcgactcagaaaggtggggcatac

SEQ ID NO: 7311 - DNA, 303 bp, Zea mays
cccacgcgtccggctccattctcagccgccgccaatcccttcccgtgctccgcaaccgctgagtgagaagaagagatggccggcaagggcgatggccccgctatcggcatcgatttcggcacgacgtactcctgcgtccgcgtgtggcaacacgaccgcgtcgagatcaatggcaacgaccagggtaaccggcacaacgccttgtacgtcgccttcaacgactccgagcgcctatcggagatgcggcaagaaacaggtcgccatgaaccccataacacggctttgatgcaagcgtctcatcgc

SEQ ID NO: 7312 - DNA, 318 bp, Zea mays
  unsure (1)..(318): unsure at all n locations
cggaccgtggnattgctttgtgatgttatttgttatcatagccggtagctacatcggcttccaaacaggatgggttggctacaaggttgctggcggtatttttcccttatggagcgaatggaatgcttgccgggtcagcaactgtcttcttcgcctacataggctttgattcagttgccagcacggctgaggaggtgaaaaacccacaacgagatctgccactgggaatcggaacagcattgtcgatttgctgttccttgtacatgttggtttcagttgttattgttggtctggtaccatactttgctatggacccag

SEQ ID NO: 7313 - DNA, 315 bp, Zea mays
caactcgccgtctgccttctgcgcctccatttcggcctctgtcccttgcaagttcaatctcacctccaaccatgggtaaagagaagtcccacatcaacattgtggttattggccatgtcgactctggcaagtcgaccaccacaggacaccttatctacaagcttggaggcattgacaagcgtgtgatcgagaggtttgagaaggaggctgctgaaatgaataagcggtccttcaagtacgcgtgggtgctcgacaagctcaaggctgagcgtgagagaggtatcaccattgatattgctctgtggaagtttgaga

SEQ ID NO: 7314 - DNA, 316 bp, Zea mays
tgcaaaaggagttaggaggataacagccgtgactgctggatgtgccacccaggctatggagttggcgtcatctatcgattctgatatcaataaagcatctcagttggagggagctttgttggaaaagaaaattgcttccatcaagagtgggctggatgcagctgctatccctgctgcgagaaaagctgatttgagaggcaaggtttcaaagttagaggacgaacttaggaaggcaaagaagaaaatgggggagcaaaatatacaaaaggctgtgaagtccgcaatggatgctgcagaagctgctctttcaggaaat

SEQ ID NO: 7315 - DNA, 310 bp, Zea mays
tccagcaactacaaaacagttgcctgacgactatcttgagaaagtaaagcaagttcatcagtctggcggttatggctccaaaggatatggttatgattggaaacgggatgaagcggagaagaatcttctccgtactcatacaactgctgtttccacgagaatgttatacaagcttgctcaggagaaaccttttactccaaagaggtattactccattgatcgtgttttccgcaatgaagctgttgaccggactcatcttgctgaattccaccagatagagggacttatctgtgattatggtttgacactt

SEQ ID NO: 7316 - DNA, 311 bp, Zea mays
agcagctctccggttttgcgttcactgccaatggctgggtgcagtcttatgggtcaaggtgcgtcaagcctccgatcatctacggtgacgtgagccgccccaaccccatgaccgttttctggtcgaagaggcacagagcatgacgtctcgcccaatgaaggggatgctgactggcccagtcacaatcctcaactggtccttcgtccggaatgaccagccgaggtttgagacttgctaccagatcgctcttgcgatcaagaaggaagtcgaggatcttgaggctggtggtattcaggttatccaaatcgacg

SEQ ID NO: 7317 - DNA, 315 bp, Zea mays
caagcagcgcctcaaggtgcctccggcgctcaaccagttcacccgcaccctcgacaagaacctcgctaccaacctgttcaagatgcttcttaagtaccggcccgaagacaaggctgccaagaaggagaggcttctgaagagggcccaggctgagaatgaaggaaaaactgttgaatccaagaaaccaattgttgtgaagtatggccttaaccatgtgacttacctcattgagcagaacaaggctcagctcgttgtcatcgctcatgatgtggatccgattgaactggttgtttggcttccagccctgtgcaggaa

SEQ ID NO: 7318 - DNA, 318 bp, Zea mays
caacttaacgccgaccggaggccggagagaccggctcagcctcgctccgccgccgccgggaccatgtccctggcggctatcttcgtcttcctcctcgtgtccgcgctgcagctgctcgaccgctacctcgacctcgccagaaagagcggaggacttagtgatgagcagatcaaagtgcggcttgaaatcaagcaacttctcaaggaggctgatcagttgtcaacgccgtccacatttgcacaagctgctaaactcaagcgcctggctgctgccaaggagaaggaactggcaaaaatgcaggaacatgaccttaaaggg

SEQ ID NO: 7319 - DNA, 303 bp, Zea mays
attttggaactgaaagaaatagaggctgaaatgactaacactgttgagtgggagcgcagacctgctcaagaaagagaggagcggctccgtgtatttcatcaatgggaaaatattgttcgatttgacatgaggctagccaatgaggatgttgggatgcttgcattcacctcggaacaaattccagcacctttccttctccctgaaatggtggaaagggtcgcgagcatgcttaattacttcctcttgcaacttgctggtccccagaggaaatctttgactgtaaaggatccagagaagtacgag

SEQ ID NO: 7320 - DNA, 311 bp, Zea mays
aaagtcttcgatttgttcctggtgttgctgctgctgtcccaagaaaaaggttgaaagaagtgagagggaaatcaacagagactctcggcgagaagacctcgagtctgccatttttaaccttcgcgaaattgacaactacgatgagtacgagaggtccatgctcatctctcagatgagcttcgagaagtcttttgggctgtcctcggtctttattgaatcgacccttatggagaatgggggcgtccctgaatctgcaaacccatctaccctaattaaagaagccattcatgtcattagctgtggatatgaag

SEQ ID NO: 7321 - DNA, 308 bp, Zea mays
caatggttaaccttgagatgtgcatgactggtctggacaagaagaaagcttgtgtctttttcaagactaatgctgatgggaacacaacatgtgccaaggaaatgacaaagctctctggcatctctgaaatcatccccgagatggagatctgcgattttgacttcgaaccctgtggctactccatgaatgcgatccatggctctgcattctccacaatccatgtgacgcccgaggacggtttcagctacgccagttacgaggttatgggcttggatgccactgctctgtcttatggtgaccttgtcaag

SEQ ID NO: 7322 - DNA, 307 bp, Zea mays
gggtcatcagtggtcacttgggatgggttcgatctattgcatttgatccagcgaatgaatggttctgcactggttctgccgataggacaataaagatatgggatcttgcatcaggaaccctgaagcttacactgactggtcatattgagcaaattcgtggacttgctgtcagccaacgtcacacttatttattttctgctggtgatgacaaacaagtaaaatgttgggatcttgaacaaaacaaggttattaggtcctaccatgggcatctgagtggtgtttactgcctagctctccatccaacaat

SEQ ID NO: 7323 - DNA, 301 bp, Zea mays
gttgctcaagagaagaaactggaagaactgaagaggcaacaagagcttcagaatcaacttgttgtccagcggacattacagtttagagatagaaagataaaattctttgagagacggaagattgagaggatgataaggcgactcgagaagcaacaacgttcaaatggtgacggtgtcaacaataatctgtcaaaattgcgagaagatcttgaatatgttagattcttccctaagaatgagaaatatgtctcgctgttcactggagggaacagtcaagatattggtcaagagaggaataaat

SEQ ID NO: 7324 - DNA, 312 bp, Zea mays
ccctccgagcctcagttcgcatccacgcgcgccgccgccgcctcgccggtcgacgctcaccgcgcaccatggcggaacagactgagaaggctttcctcaagcagccaaaggttttcctcagctcaaagaaatctggcaagggtaagaagcctggcaagggcggcaaccgattctggaagagcattggccttggcttcaagactcccagggaagcaatcgaagggacctacattgacaagaaatgcccattcactggaactgtttctatcagaggcagaattattgctgggacatgccacagtgctaagatga

SEQ ID NO: 7325 - DNA, 308 bp, Zea mays
gcggctgctgaagctggtgaagctgggcggcctcatcggctacgacaacacgctgtggaacggctccgtcgtgctccccgacgacgcgcccatgcgcaagtacatccgcttctaccgcgacttcgtgctcgtcctcaacaaggcgctcgccgccgacgaccgcgtcgagatctgccagctccccgtcggcgacggcgtcaccctctgccgccgcgtcaagtgaaaacatggcctggcctggcctgccccaccaccgccaccgacggcgcctgcgccgcatcctcattccaatcataatagacgacccg

SEQ ID NO: 7326 - DNA, 287 bp, Zea mays
tccactgtcatccatcgcctctagcgtccgggacctgcgacgggtctgcgcatcatgtacgccgacttctactccgccgtctacgccatggtcaagaaccccggcacctacgggttcagctcggtgtaccaggcgtgctgacggctcggggggcggcaagtacaactaccagaacagcgcgcggtgcggcatgtcgggcgcgtccgcgtgctccagcccggcgtcgcacctcagctgggacggcatccacctcaccgaggccgcctacatacagatcaccgacggct

SEQ ID NO: 7327 - DNA, 304 bp, Zea mays
ctctggagctgaggaaggctatctgcaaaaagcttgaggaggagaatggtctatcatactccgccgatcaggtgctagtaagcaatggagccaagcagtgcattacacaagcagtactcgctgtctgctcacctggcgatgaagttttgatacctgcaccatattgggtcagctaccctgagatggctagactggctggtgcaacgccagttattctccctacaagcatatcagacaattacctgctaaggccagagtcacttgcctcagtgatcaatgaaaattcaaggatcttgattctctg

SEQ ID NO: 7328 - DNA, 296 bp, Zea mays
ccgttccatttccccatctcccagatccaattcgcgagttctccctcctctgccgccatggcgctctctgtggagaagacctcgtctggacgggagtacaaggtcaaggatctctcgcaggcggacttcggccgcctcgagattgagctggccgaggtcgaaatgcccggcctcatggcgtgccgcgccgagttcggcccgtccaagcccttcgccggcgctaggatctcggggtctctccacatgaccatccagaccgccgtcctcatcgagaccctcaccgcgctcggcgccga

SEQ ID NO: 7329 - DNA, 303 bp, Zea mays
agctacaatcctaaaaccatctgcttcagctagccccaagtttagtcggccgatcattcactgaagtagtaatggcctccgtcaacagctggaccctcgagatcgcgtcgccggtggctccgcagcgcctgttccgcgccgccgtgatggactggcacaccctggcgcccaaggtcgcctcccacgtcgtcgccagcgcgcagctcgtggagggcgacggcggcgttggcagcgtcaggcagttcaacttcacctcagtcatgccgttcagcttcatgaaggagcgtctcgagttcctggacg

SEQ ID NO: 7330 - DNA, 320 bp, Zea mays
caagaagctcagaagtcagatcagaagccgccgaggggaggcgccgacgccgagtttttgctccatcccgcatccaccgccagaatgtttctcacgaggacggagtacgaccgcggggtgaacaccttctcgccggaggggcggctgttccaggtcgagtacgccatcgaggccatcaagttgggatccactgcgatcgggttgaaaacaaaggatggtgttgtccttgctgttgagaaacgtgtgacctcgccactgctggaaccaagcagtgtggaaaaaatcatggagattgatgagcacataggctgtgccatgag

SEQ ID NO: 7331 - DNA, 150 bp, Zea mays
gatttccgccgcaagccttggtcaaacattacttcgagtgcaaaagattttgtacaaaaattactagttaaggatccccgtgcaagactaactgctgcacaggcattatcacatgattgggtgagagaacgaggaaaggcatctgaaata

SEQ ID NO: 7332 - DNA, 303 bp, Zea mays
cccacgcgtccgcatctcccactccgcactgaatgcgcctgatggagagcagcaaaagatggaggaacccaccagcaccagagtggctgacaagaatctatgtgcaatatgtttggaactcctcagcacgagcatcagcagcgatgttgatagtggtgaggcggcagaatctacacagcgcagtgctcccactcattccacttcctatgcatcgcctccaacatccggcatggcaacgtcagctgccctatctgccgtgcacaatggtctgagctaccacgtgacctgaaggttccaccattg

SEQ ID NO: 7333 - DNA, 300 bp, Zea mays
ctgatcatcacgtgcgtgattcctctggtgggtgcgcagggttacgcccaggtgaagttcttgaagggattcagcgaagatgctaaggagatgtacgaggatgcaagccaagtggcgacagatgctgtcggcagtatcagaaccgtggcgtcgttctgcgcagagaaaagagtggtcgcagcgtacagcgacaagtgtgaggctctgaggaagcagggcatccgaagcggagtcgtcggagggctttgttacggcttctcgttcttgatgttggtcttcacgtatggcctttgcttctac

SEQ ID NO: 7334 - DNA, 270 bp, Zea mays
caacttaacgccgaccggaggccggagagaccggctcagcctcgctccgccgccgccgggaccatgtccctggcggctatcttcgtcttcctcctcgtgtccgcgctgcagctgctcgaccgctacctcgacctcgccagaaagagcggaggacttagtgatgatcagatcaaagtgcggcttgaaatcaagcaacttctcaaggaggctgatcagttgtcaacggcgtccacatttgcacaagctgctaaactccagcggctggctgct

SEQ ID NO: 7335 - DNA, 299 bp, Zea mays
attttggaactgaaagaaatagaggctgaaatgactaacactgttgagtgggagcgcagacctgctcaagaaagagaggagcggctccgtgtatttcatcaatgggaaaatattgttcgatttgacatgaggctagccaatgaggatgttgggatgcttgcattcacctcggaacaaattccagcacctttccttctccctgaaatggtggaaagggtcgcgagcatgcttaattacttcctcttgcaacttgctggtccccagaggaaatctttgactgtaaaggatccagagaagta

SEQ ID NO: 7336 - DNA, 298 bp, Zea mays
aaagtcttcgatttgttcctggtgttgctgctgctgtcccaagaaaaaggttgaaagaagtgagagggaaatcaacagagactctcggcgagaagacctcgagtctgccatttttaaccttcgcgaaattgacaactacgatgagtacgagaggtccatgctcatctctcagatgagcttcgagaagtcttttgggctgtcctcggtctttattgaatcgacccttatggagaatgggggcgtccctgaatctgcaaacccatctaccctaattaaagaagccattcatgtcattagc

SEQ ID NO: 7337 - DNA, 305 bp, Zea mays
cacttcaggtctgcagcccccaactacccccagcctcggaaggaaccttccagaagcgcaagactctaaaggccgtcgccttcccattcttcctcgccgcgggggtcgcctgagatcacataaacaatggtgaaggctgttgctgtgcttggtagcagcgatggtgtcaagggcaccatctttttcacccaagagggagatggccctaccgctgtcaccggaagtgtctctggcctcaagcctggcctccatgggttccatgtacatgcacttggtgacaccaccaatggatgcatgtcaactgg

SEQ ID NO: 7338 - DNA, 296 bp, Zea mays
ctgttctattctctgcgacaacccaggcatctcaatgccgggatcttcggcaacggctccgacggccacacgctcccgtccgaggtttcgcgtgcggccatgctcgtccgcatcaacaccctcctccagggctactccggcatccgcttcgagatcctcgaggccatcaccaagctcatcaacaccggcgtcagctcgtgcctgccgctgcggggcaccatcaccgcgtcgggcgacctcgtcccgctgtcctacatcgccggcctcatcacggggcgtcccaacgcgcatgccgt

SEQ ID NO: 7339 - DNA, 296 bp, Zea mays
caccagcccaccacccgacgccggaggccggaggaggaggcggcgatggcggggaagcacgggcgcaacggcttcgacgacgacaacgtcaaccctttcgcgggaggaagtgttccacctgccaccaattctcgtctctcacctctatcacatgaaccggctgatttctacaatgtggacattcctctcgactcatcaaaggatctgaagaaaaaggagaaagaactccaggctatggaggctgagctaaacaaaagagaacgggtgtgttggctttcagtctttctgctcctttt

SEQ ID NO: 7340 - DNA, 293 bp, Zea mays
cactacccggcgctcgcgcggctttctttcccaactccgacgaaggctagctacaccaccttgtgcgggctcgtctccatcgcccgccacccgctccgtcgtcgtcgtcaccgccgcgccgatcccgaatcgaatggggagcctggcgtccgagaggaaggtggtcgggtgggccgccagggacgccaccggacacctctccccctactcctacaccctcaggaacacaggccctgaagatgtggtggtgaacgtgctctactgcgggatctgccacacggacatccaccagg

SEQ ID NO: 7341 - DNA, 292 bp, Zea mays
cccgtcagcccctctcgtttttcatccgccttcgcctccaaccgcgtgcgctccacgcctcctccaggaaagcgagacttctgcataagaacaacaaatcaaaagcgtgatcagctcggtgccaacaaaacctcaacaaccaagtttcatgtctgatctcgacgtccagcttccatctgcctttgatccgtttgctgaggcaaatgctgaggactctggtgctggtcctggaacgaaggattatgtgcatgtgcgcatccagcagcgcaacggcagaaagagtctgactaca

SEQ ID NO: 7342 - DNA, 291 bp, Zea mays
cggacgcgtggagacgacttgtttcattgattcttgaagagatcgagcttcttttgcaccacaaggtcgaggatgtcttgcaactgcggatcaagctacggctgcggctcaagctgcaagtgcgggtaatatatatgataatatataagtgcaccgtgcatgattaatttctccagccttcttcttgtctagttaatttccatttatttattttttccattgcaaaacaaacaaacaaacagacaagaacaaagttaatttggatcgagtagttcaatccatttgcgcgct

SEQ ID NO: 7343 - DNA, 293 bp, Zea mays
tccaaacccaaatcaagccaccaccctctcctcctcctcagcggcgagcaccaccagcaacagcgagacacgatgaggccgatcttgatgaagggccacgagcgcccgctcacgttcctgcgctacaaccgcgacggggacctcctcttctcctgcgccaaggaccacacccccacggtctggtacgccgacaacggcgaccgcctcggcacctaccgcggccacaacggcgctgtctggacctgcgacgtctcccgcgactcggcgcgcctcatcaccggatccgccgacca

SEQ ID NO: 7344 - DNA, 304 bp, Zea mays
caatcacaacgaacaaaagctctcgatctcaccgacaccgaggaagaagagatcaatggcgtccgagcagggagtcgtgatcgcgtgccacagcaaggctgagtttgacgcccacatgaccaaggcccaggaagccggcaagctggtggtcatcgacttcactgccgcctggtgcggtccatgccgcgccatcgccccactgttcgtcgaacacgccaagaagttcactcaggtcgtcttcctgaaggtggacgtggacgagtgaaggaagtcaccgcggcctacgaggtcgaggcgatgcgac

SEQ ID NO: 7345 - DNA, 292 bp, Zea mays
ggtggcccaaccatggctgtcattgccctaaagtgcccagacattgaggttgtcgttgttgacatctccaagccccgcattgaggcatggaacagcgacaccctcccgatctacgagcccggtctcgatgatgttgtgaagcagtgcaggggcaggaacctcttcttcagcactgatgttgagaagcacgtcgctgaggctgacatcatcttcgtctcggtgaacacccccaccaagacccgtgggcttggagctggcaaggctgccgacctcacctactgggagagcgctg

SEQ ID NO: 7346 - DNA, 292 bp, Zea mays
agccgccctacctattccttctcccagccgtcgagctgcccaacccagagcaccagcagccctcaccttcttcctctcggccggtccttcaaacgagcccgctcgtcttggagccgccgccggtctcgttctggacgaacgttcaaggagattgcatttgtggatgctctaatggagtcgaaaggtggcaagaagtctagtagtagtagtagtaatttcatgtacgaagctccccttggctacaagatcgaggacgttcgcccagccggaagaatcaagaagttccagactg

SEQ ID NO: 7347 - DNA, 294 bp, Zea mays
cccacgcgtacgcccacgcgtccgcgagttcatagtgaaccagcaaataaaggacgagctgggtgtgtatgcacttgaaataaaactagaggatgcgaacgcataaatggtcttcgtgctgtgtttggtgaaatctaccctgatccagtaagagttgtatcagttggtcgcaaagttgaagatctgcttgcagatcctgatagcaaagagtggctatccatatcgactgaactatgtggaggtacacatatcacaaacacaagagatgctaaagcatttgcactcttatctgag

SEQ ID NO: 7348 - DNA, 294 bp, Zea mays
gtgacgacggcgacggcaacgactggggcgaccgtcgctgccgccctacttgccggttgctcggatcttcttcggcccgttagccgtcgacgagcaccaccagggcaaccagatacttcagtggcttcgcaaggatgtcctggtgcactattgagtctgatcctggtgtgttcactgagctgattcagcaaatgcaagtgaaaggtgtacaggtggaagagctttactctctcgatgtgggctctcttagtcaactgcggccagtatatgggctaatttttctcttcaagtgga

SEQ ID NO: 7349 - DNA, 294 bp, Zea mays
gggcacggaagcgctgtcgactggtggaccttcggcatcttcctgcatgagctgctgtacggcaagaccccgttcaaggggtcagggaaccgtgccaccctgttcaacgtggtaggccagcaactgaaatttccagagtcgccgtccacaagctactcgagcagagacctcatccgtgggctcttggtcaaggagccgcagagccgcctgggcgtgaagcggggagcgacagagataaagcagcatgccttcttcgagggtgtgaactgggctctcatccggtgcagcactcct

SEQ ID NO: 7350 - DNA, 363 bp, Zea mays
ctcctaatacgatcatataggaagcggagctgaggacggccgggaaaccgggtgtggccacgcggtcggcagaggcgcctcggtctccaacagggaacagcccagccgctgtcgccctcgttccgtagtacggcgccgccagatcgtcagtcaccatgatcatctccaagaagaaccgccgcgagatctgcaaatacctcttccatgagggggtcttgtacgccaagaaggactacaacctggccaagcaccccaagcttgatgtgcccaacttggaggtgattaagctcatgcagagcttcaagtcgaaggagtatgtgagggaaaccttctcatggcagtactactactggtacctcacca

SEQ ID NO: 7351 - DNA, 292 bp, Zea mays
cacgcgtccaaacatacagctagatagcctctgcatgcctacgtacagcatggccaaggccgagctgctcctcgccctcgtggcttcgctcgtcgtgctgccattctcctccctcgccgtgtaccaggacttctgcatcgccgacctatccgccgccgccacgccgggcggctacccgtgcaagcccccgaaagacgtgaccgccgacgacttccactacggcgggctcgccacccccggcacggcgctgaaacccttcaagatctccctgggctcggcggtcgtcaccacg

SEQ ID NO: 7352 - DNA, 289 bp, Zea mays
gtcgatccaaagatgcagatcttcgtcaagaccctcactggaaagactatcaccctcgaggtggagtcttctgacaccattgacaacgtcaaggccaagatccaggacaaggagggcatccccccggaccagcagcggctcatctttgctggcaagcagctcgaggacgggcgcacacttgccgactacaacatccagaaggagagcaccctccaccttgttctccgcctcaggggaggcatgcagatcttcgtcaagaccctcactggaaagactatcaccctcgagg

SEQ ID NO: 7353 - DNA, 288 bp, Zea mays
gagcctgagaagaaggaggacgggacgagggcgctcaggagggacatcccgatcccgcagcggtgcgcgctcaagctcaaagtccggcaactggggactggagatacccaaccaagatcacaaccgatacgtgtcgaagggctatctgatctctcactggttgacattgctgctggaggctggcattcaactgcactaactatagatggagaggtgtatgcttgggggagaggagagcacgggaggcttggatttggagatgataagagtagtcacatggtgccccta

SEQ ID NO: 7354 - DNA, 288 bp, Zea mays
aggaaagttccacttccttcctccaggataaatccatacaggatggtcattgtgctacgatagattgttctaagcatcttcttgcactaccggatcacaaatcctgtgcgtaatgcatacccactgtggcttctatctgttatatgtgagatctggtttgctctttcctggatattggatcagtttccaaagtggtttccaatcaaccgcgagacttaccttgatagactcgcattaaggtatgaccgggaaggtgagccatctcagttggctgctgttgacattttt

SEQ ID NO: 7355 - DNA, 288 bp, Zea mays
ggtgaaaagacaccctggcttatcgttctcatgcattctcccatgtacaacagcaacgaggcacattacatggagggtgagagtatgagggctgctttcgagaaatggtttgtgaagtacaaggtcgacttggtgtttgcagggcacgttcatgcttatgagagatcataccgcatttctaatgtcaactacaacataacgtcgggaaatcggtatccagtgccggacaaatctgctcccgtttacataacggtcggtgatggaggcaaccaggagggacttgcttca

SEQ ID NO: 7356 - DNA, 286 bp, Zea mays
gtcaaagattgacctcattgagaactatggaaatttagcattcaaccttgacttctacactgatgtccaagatctttcttatttgcaatatcatcttgagcaggatccccgctcagccaagtacaggaaactgactaaggagctctgtgatgtgattgatgattttggtttagtcaatttttcaactttggacatccaggacaaggaaagtgttggcaatcttgtgaagctgattgacaagagcaacggatatatattttcttctattgacagtagtgctgttgag

SEQ ID NO: 7357 - DNA, 293 bp, Zea mays
cgcacacacagcccggtccccgatctccgatcccctcgtcgatccaagatgcagatcttcgtcaagaccctcactggaaagactatcaccctcgaggtggagtcttctgacaccattgacaacgtcaaggccaagatccaggacaaggagggcattcccccggaccagcagcggctcatcttcgctggcaagcagctcgaggacgggcgcacacttgccgactacaacatccagaaggagagcaccctccaccttgttctccgcctcaggggaggcatgcagatcttcgtcaa

SEQ ID NO: 7358 - DNA, 285 bp, Zea mays
gatgctcccgctctacctcttcgccacccctatcctgcgcttcttccaccaggacgccgagattgccgcgctcgccggccgcctagcgctctacatgatcccgcagctcttcgcctacgccttcaacttccccatccagaagttcctgcaggcgcagagcaaggtgatggccatggcggtcgtgtcggtggcggcgctgctgctccacgtcgccatcagctggctcctcatggggcccatggggatggggatcgtcggcctggccgtcgcgctcaacgcgtcttg

SEQ ID NO: 7359 - DNA, 285 bp, Zea mays
ctccagctcctccaacatgccgcaccacctggaggttcattggttctcaattataaactcttgtgttactgtcctcctcctcacagggttccttgcaacaatcctcatgcgagtattgaagaatgattttgtcaagtatgcccatgatgaggaagcggctgatgaccaggaagagtctggatggaagtatattcatggtgacgtcttccggttcccaaagaataagtcgctattttccgctgctcttggcacaggaactcaattatttgcactcacaacctttat

SEQ ID NO: 7360 - DNA, 286 bp, Zea mays
gcagaataatgctgtgatagagtttgaagataggaagttggttcctctaccccctccagatcatttgagaaactatactcctggggagacaagaggaggtgttgatcgaagtgatgtaaaaccacttatcatcaatcagcctgagggtccaagttttcgaattaatggctattttgtggaatggcagaagtggaacttccgtattggcttcacccccaaagagggtttggttatctattctgttgcttatgttgatggtagccgtggacgtagacctatagcacat

SEQ ID NO: 7361 - DNA, 286 bp, Zea mays
ctagcatcgatccgccattgctcaccgcacaagtgcacgctcacctcacacacgcagctaagtagctaacgccgtaggagtaacaagataaggctcgacatggccgaggagaagaagcagggcctgcagctgctggacttctgggtgagcccattcgggcagctctgccgcatcgcgctggacgagaagggcctggcctacgagtacctggagcaggacctggggaaaaagagcgagctgctcctccgctccaacccggtgcacaagaagatccccgtgctgctgc

SEQ ID NO: 7362 - DNA, 284 bp, Zea mays
ggacctggcgcgagaactacgagctgggcctgccctgcatcgagaaggccggcgtcgcccacaagatcgacttccgcgagggccccgctctccccgtcctcgacgacctcatcgcggaggagaagaaccacgggtcgttcgacttcgtcttcgtggacgccgacaaggacaactacctcaactaccacgagcggctgctgaagctggtgaagctgggcggcctcatcggctacgacaacacgctgtggaacggctccgtcgtgctccccgacgacgcgcccatg

SEQ ID NO: 7363 - DNA, 283 bp, Zea mays
acctcttattcgcatccttggtgatcggtttccatggcaagttaagtcagctatcctatcaaccctgacaatcatcatcatgaaaggtggaattgcacttaagcccttccttccacaacttcaaactacatttgtaaaatgtctacaggataataataggtctgtccgggcgagggctgcagctgctttgggaaagcttagtgctctcagcacacgggtggatcctttagttagcgatcttctgtccatgttgcagtcaggagatgaatctgtcaaagaaagt

SEQ ID NO: 7364 - DNA, 333 bp, Zea mays
ctccgtcatgctgcgtgcggcggcggctgccgcgccatattcccggcgcgggtcgccgctgcgccggctgctgcggcggcggaggaacttaggtatccgctgctcagggttattgggacgctgaggggcagccgcggctcggtgctgctggggaggagggtgcgtttctgctccaactcctccgcgagcgactccgaagtggcggcggcagatgcggaggcgaatgccgaggatgcgaccgttgcggaggaggaggcgggcagcaatgcgtcttccgccatcgtgccgaccagcaccaatatcgacgactgcctctctgttatagcgttacct

SEQ ID NO: 7365 - DNA, 335 bp, Zea mays
ctcgagttctcctcaaccaaattcaaggtcacagcggcgaacctctcggctatcatgtctggccgcggcaagggcgggaagggtctgggcaagggcggcgccaagcgccaccgcaagtgctgcgcgacaacatccagggcatcaccaagccggcgattcgcaggttggcgaggaggggcggcgtcaagcgcatctccgggctcatctacgaggagacccgcggcgtgctcaagatcttcctcgagaacgtcatccgcgacgccgtcacctacaccgagcacgcccgccgcaagactgtcaccgccatggacgttgtctacgcgctcaagcgtcag

SEQ ID NO: 7366 - DNA, 331 bp, Zea mays
aggtctggctcggggagaacgccgaccactactacgtcctctccaggttcctcctcagcaggatgctcacagtcaccaagattcctaatcatgtcgccatcaagattgcccttgagctcaagaagctgcttgtcgacaacagcctgcttgatgtatcccagagtgatctagaggctaatctgttcaagcttatggaaaaacggggatacggagaggagtatataaatcgctataaaatgatgacaaggttccatcatcaacgggttccactagtaattttggtgtgtggaactgcctgtactggaaaatcaacaatcgctacacaacttgc

SEQ ID NO: 7367 - DNA, 325 bp, Zea mays
cggacgcgtgggccctctccctctcgtggccacgactgccgctgccgccctacgccaggtgtccaggtcatctccggcccattcgccggcgacgagcacccgactagatcgaccgagctatggacggcctgtggcatctgggggacgagctccgcgggcagcccaaggtggtggaggaccgccagtggtcgctcatgacgtccaagctggcagagatcaccaggtccaggggcgagaggacgaacgacctcgactacgccaggatgaacgccgcccccgacgccaagcggtggggcaaggcggcgtcctaccagcaccacgacga

SEQ ID NO: 7368 - DNA, 328 bp, Zea mays
cccacgcgtccgcactgacgttctcaataagctgaggcagaaacatgcatctggtgaaggtgctaattatggtgtagacatacacactggcggaattgctgattcctttgcaaactttgcttgggaacctgctgttgtaaagatcaatgctataaatgctgcaaccgaagcttcctgccttattcttagtgtggacgagacagtgaaaaacccaaagtcggagagcgcacaaggtgaagctgctgccggtgcgatggctggtcgcggtcgaggtgcaatgcgaggacgtggtggcaggggtatgcgcaggcgataaactgggtcacgt

SEQ ID NO: 7369 - DNA, 326 bp, Zea mays
cccacgcgtccgcccacgcgtccgcccacgcgtccgatcccgtcgcatcccatcccactaccacccatctcgtcgtccgccgattcgatccggttcttccaactcaggggctgtgatggcgacgaagaggagcgtgggcaccctcggcgaggcggatctgaaggggaagaaggtgttcgtgcgcgccgacctcaacgtccctctcgacgacgcccagaagatcaccgacgacacccgcatccgcgcctccgtccccaccatcaagttcctcctcgagaagggcgccaaggtcatcctcgccagccacctgggtcgtccaaaaggtg

SEQ ID NO: 7370 - DNA, 322 bp, Zea mays
ctctaagccaaagcaagttgctaggtcctttgaaccagcaactgaagcttcctcgtctcatcatcgagaccagtaagcaacatggcggctaatctcaagtgggctcctgttctagccctcgtcgtcgtcgttgctgccatggttggcaccacgagcgccggcaacatcgcagtgtactggggccagaacggcaacgaaggcagcctggcggacgcctgcaactccgggctctacgcctacgtcaacatcgcgttcctcacaaccttcggcaacggacagaccccagtcctcaacctcgccggacactgcgaccccggctctg

SEQ ID NO: 7371 - DNA, 336 bp, Zea mays
cggctacccacaggccgcagtgccccgcttgctattttccgccgccaacgttctccctcctccccgccccacctccgcttcctcctacgcgccacccacacgcctcgcgtccgcctccccgtctacacctccccattctccagcgtcccgcgccccgagaagcgctgcaggcctcaccttcccgtcctcctgccccaggaaccgcggttcaggaaggaaggaaggaggaaaggcaagtgcctgccggtgccggggctcagcagcgcgcgatggcgtacagggcggaggacgactacgactacctcttcaaggtcgttcttatcggcgactccggcg

SEQ ID NO: 7372 - DNA, 330 bp, Zea mays
gcggcagaatgcagtttggtctttttcttaagggtgctggactaaagttggaagatgctcttgcgttttggagggcggaattttctcaaaagattggttctgagcggtttgacaaggaatatgcctatgccatcagacataattatggaaaagaaggaaaacggacagattacactccatattcatgtcaaaagatcatttctgcaacacctggcgttggagatcaccatggatgtccgtttcgacattttggtgaagagaatttgcgggcagcactcaacaaaatgggcgttggtgggcatgcattggaagaggtaatggataaagtga

SEQ ID NO: 7373 - DNA, 322 bp, Zea mays
cctgggcgacccacgcgtccggagaatatactcatcttatcttgagctgaaccttgatgaggtggagcctagcatgtctggcccaaagaggcctcaacatcgtgtccctttgaaggaaatgaaatcagattggcatgcttgcctggacaacaaagttgggttcaagggttttgcagtgccaaaggagcagcaggataaggttgtcaaatttgactttcatgggcagccagcagaaatgaagcatggtagtgttgttatagcagcaataactagctgcacaaacacctcaaatcctagtgttatgcttggtgctggtcttgta

SEQ ID NO: 7374 - DNA, 325 bp, Zea mays
cgcggagtggatggcggcgcacggccggacctacaacgccgtcggcgaggaggagcggcggtaccaggtgttccgggacaacctccgctacatcgacgcgcacaacgccgccgccgacgcgggcgtccactccttccgcctcggcctcaaccgcttcgccgacctcaccaacgacgagtaccgcgccacctacctcggcgccaggaccaggccgcagagggagaggaagctcggcgccaggtaccacgccgccgacaacgaggacctgccggagtccgtcgactggagggccaagggcgccgtcgccgaggtcaaggaccagggc

SEQ ID NO: 7375 - DNA, 325 bp, Zea mays
gagaagcacgtcgctgaggctgacattatctttgtctcggtgaacacccccaccaagacccgtgggcttggagctggcaaggctgccgacctcacctactgggagagcgctgcccgcatgattgcggatgtctccaagtctgacaagattgttgttgagaagtccactgtccctgtcaagaccgctgaggctattgagaagatcttgacccacaacagcaagggcatcaactaccagatcctttccaacccagagttccttgcggagggcactgccattgaggacctgttcaagcctgacagagtgcttatcggtggccgggaga

SEQ ID NO: 7376 - DNA, 300 bp, Zea mays
cgcactacccggcgctcgcgcggctttctttcccaactccgacgaaggctagctacaccacctggtgcgggctcgtctccatcgcccgcctaccgctccgtcgtcgtcgtccccgacgcgccgatcccgaatcgaatggggagcctggcgtccgagaggaaggtggtcgggtgggccgccagggacgccaccggacacctctccccctactcctacaccctcaggaacacaggccctgaagatgtggtggtgaaggtgctctactgcgggatctgccacacggacatccaccaggcccag

SEQ ID NO: 7377 - DNA, 315 bp, Zea mays
cgcaggccactcctgcaagcaattcgttgtcccaagaagacattgaggccctcaccaagaggacacaagatggtgggacagaggtggttgaagcaaaggcgggaaaaggctctgcaacgttgtccatggcatatgctggtgctgtttttgcagatgcatgtttgaagggtctgaatggagttccagacattgtagagtgctcttttgtgcaatcaactgtgacagagttgccattctttgcctccaaagttcggctcggcaagaatggagtggaggaagtgcttggtctgggtgagctcacgagttcgagaagaa

SEQ ID NO: 7378 - DNA, 323 bp, Zea mays
ggtgcttccttgagcttcaggttgaaggtgaggaagcgtatcagactttctcccgtgtcattgagaatgccaatgtcatcatggcaacatatgaagataagctccttggtgatgtccaagtatacccagagaaggggacagttgctttttctgctggtctgcacggatgggccttcaccctcactaacttcgcaaagatgtatgcatctaagtttggagttgatgaaactaagatgatggagaggctatggggtgagaacttctttgaccctgccacaaagaagtggaccaccaagaacacaggttctcctacctgcaagaga

SEQ ID NO: 7379 - DNA, 321 bp, Zea mays
agaaaagctgggccttatccaagtggcaagccttatagagtcatcggcaaagaaggggactacagagctcaatctccggggtaagctggtggaccaagttgaatggctccctgtctcgcttgggaagttacaggatgtgactgagcttgatctatctgagaataggatcatggcactcccatcaacaattggtagccttagatacttgacaaagctcgacctccactcaaaccagctgatcaatctgcctgataccttcggggaactttccagcctgattgatcttgacttgcgtgcaaaccagctaaagtctcttcctac

SEQ ID NO: 7380 - DNA, 322 bp, Zea mays
cccacgcgtccggctagcagcacagcagcagccagagccatcccctctcctcgctacgcttcgcttcctcggcgccgattcctcctcctcctcctccaccctcgtccgtcccgttccggcgcgcgagctcgcccgagatggcgaacgcgagatcgggtgtcgctgtgaacgatgagtgcatgctgaagtttggcgagctgcagtcgaagaggctgcaccgcttcataactttcaagatggacgacaagttcaaggagatagttgtggaccaggtcggggatcgcgctaccagctacgatgacttcacaaacagcctccctga

SEQ ID NO: 7381 - DNA, 316 bp, Zea mays
atcgattggtttcgtaactggtgagggactgagggtctcggagtggattgatttgggattctgttcgaagatttgcagaggggggcaatggcgaccgcggggaaggtgatcaagtgcaaagctgcggtggcatgggaggccggcaagccactgtcgatcgaggaggtggaggtagcgcctccgcaggccatggaggtgcgcgtcaagatcctcttcacctcgctctgccacaccgacgtctacttctgggaggccaaggggcagactcccgtgttccctcggatctttggccacgaggctggaggtatcatagaga

SEQ ID NO: 7382 - DNA, 317 bp, Zea mays
agcgcgcatccagatctggctcttcgagcagaaggacctccggattgagggtcgcatcatcggattcgatgagtacatgaacttggtcctcgaagatgctgaggaaatcaacgtcaagaaaaacactaggaagacactgggccggatactcctcaaaggtgacaacataactttgatgatgaacagtggcaagtgaaagttcttatggcaggaacgatgtttggtgctcgcgttgagtatttctggcacgttgtactccatccattcagacttacatgtacctgctgttaatgacctgagtaaaattatgctagatg

SEQ ID NO: 7383 - DNA, 308 bp, Zea mays
ggcatctccaatctcctcgccccccacggacctgaaccgagaaccgttaccgccgccggagaagcgccgctcgctcaggaggacagccatggcgccggagccggacgatgatattatgaacgagaagaatccccgcccgctcgacgaggatgacatcgcgctcctcaaaacctatggactggggccgtattcgactagcattaagaaggtcgagaaggagatcaaggaaatggccaagaaaatcaacgacctctgtgggataaaggagtctgatacagggctggctccacctagccagtgggatttgg

SEQ ID NO: 7384 - DNA, 313 bp, Zea mays
cagcatttagaggctgtgatcagggcaaaaattccaagtattatagctatgattaacaaaacaattgatgaaatagaagcccagttggatcgacttggtaggccaattggaggtgacgctggggctcagttgtacacaatcttggatatgtgtcgggcatttgaccgtgtctttaaagagcacttagatggcgggcggccaggtggagatcggatttatggtgtctttgacaaccagttacctgcagcactgaaaaagcttccatttgaccggcatctttcaatgcaaaatgttcgcaaagttatttcagagg

SEQ ID NO: 7385 - DNA, 317 bp, Zea mays
gctgctttagctagctagcaagagagagagagagagagaaaaaatatggctccactcgtcgctactgccacgatgaaccacgctgtggcccatctgctaggacccaatcatgagagtttctcacggcaccatctttcttcctcgctgcagcaaaacagtaagcgaaggtgtaatcttagcttcaggccacgagctgctgagagtcagaatggaagccaaacgctgagcccctcggaagtccctaaaagagactggttcccctctgacttcatctttggtgccgccacttcagcgtaccaaattgaaggtggatggaa

SEQ ID NO: 7386 - DNA, 298 bp, Zea mays
agataccgtacgaaacatcaagctgctcagaagggtaaggtcggaatagtcctggacttcaactggtacgaggctcttacaaactcacctgatgaccaagcagcagcccaaagagccagggacttccacattggctggtttgttgatccattgataaacggacactatccacagataatgcaagatctcgtgaaggagaggctgcccaggttcactcctgagcaggctaaaccggtgaagggctcggcagactacatcggtatcaacgagtacacatccagctacatgaaggggcaga

SEQ ID NO: 7387 - DNA, 302 bp, Zea mays
cccacgcgtccgcccacgcgtccgcaccatggctccgatgaagctgtacggggcggtgatgtcgtggaacgtgacgaggtgcgcaacggcgctggaggaggctggctccgactacgagatcgtgcccatcaacttcgccaccgccgagcacaagagccccgagcacctcgtccgcaacccgtttggtcaggttccagctctgcaggatggagacctgtacctcttcgaatcacgagcaatctgcaagtacgctgctcgcaaaaacaagccagagctgttgagggaaggaaacctcgaggagg

SEQ ID NO: 7388 - DNA, 300 bp, Zea mays
gccacctctcctccggcatcgacgaggcgaaaccctagcgcccgagtccctctccctgctcccacaacccatggcggcggatatggcgtacgcgccgccgatgaaggctggcaaggccgggttcgaggctggcatgatggatccacagcacaggatccgcatcacgctctcctccaagagcgtcaagaacctcgagaaagtctgcggggatctggtgaagggcgccaagggtaaggagctcaaggtcaagggccccgtgcggatgcctaccaaggtgctccacatcaccaccaggaagtc

SEQ ID NO: 7389 - DNA, 297 bp, Zea mays
gcttggtggaaaagatgagtattcactagtggaagcattgaaacaaggaaaggttgagaaaccagttgttgcatgggtcagtgggacatgtgcacgtctattcaaatcagaagtgcagtttggtcatgctggtgccaagagtggtggtgagttggaatcagcacaagctaagaatcaggcactaagggaagctggtgcagttgtgcctacatcatatgaagctctagagagtgcaattaaggaggtatttgacaaactggttgaggaaggaaaaatttctcctgtgactgaaattac

SEQ ID NO: 7390 - DNA, 296 bp, Zea mays
aaacgcgtcgcatccgctccacaggatcctctgcgccaccgcaaccgtgtgaccgcccgttccgccggcgatcccgatccgccgacccgtcccagccccgctcgcagccatgtcgccgtcggagccgacgcgggaagagagcgtgtacatggccaagcttgcggacaggcggacggtacgaggagatggtcgagttcatggagcgcgtcgcgcgctacgccgggatgcccggcggcggggaggagctctcggtggaggagcgcaacctgctgtccgtcgcctacaagaacgtcatc

SEQ ID NO: 7391 - DNA, 132 bp, Zea mays
gattcaacaatcctcctccggatttcgcagtcagcggtggtgaaggtagcgggcgcggaggaagatggggctcgcgttcgggaagctcttcagccggctcttcgccaagaaggagatgcggattcttatggt

SEQ ID NO: 7392 - DNA, 103 bp, Zea mays
cccacgcgtccgctagcaagttcatgacggaaccagttagaatccttgtaaagcgtgatgagctgaccctggaggggatcaaacaattttttgttgctgttga

SEQ ID NO: 7393 - DNA, 112 bp, Zea mays
catacgtgtacattgtgatggagctatgtgagggcggtgaactattagatcggattttggcaaaaaagaatagccgctatagtgagaaagatgctgcagtggtagtccgcca

SEQ ID NO: 7394 - DNA, 299 bp, Zea mays
gtcaaaccctaagcagggagttgatttatccgctgcagccatgagtaagttgcagtctgagtctgtcaaggatgccatctcccagattgttggggatgccaaggagaagaataggaagttcactgagactgtggaacttcagattggtctgaagaattatgatccacagaaggacaagcgtttcagtggctctgttaagttgccccatatccctcgtcccaagatgaaggtgtgcatgcttggtgatgcccagcatgttgaggaggccgagaagatgggacttgactacatggatgttg

SEQ ID NO: 7395 - DNA, 296 bp, Zea mays
cactttgagggggctatctatttggcttgccagtggggtttgttgctgattccattggagcagcaattggtgcgactgctgcatttctgcttggcaggacaattgggaggtcttatgttctctccaaatgcaaagattaccctaagtttcaagcagtagctattgccatccaaagatctggcttcaagatcgtgttgctactaaggcttgtacctttacttccgttcaacatgttgaactacctgttatctgtcactcctgttggtgttggagaatacatgctggcttcttggttg

SEQ ID NO: 7396 - DNA, 298 bp, Zea mays
caagccttcttgattgctattattgagaatttttgcattgatgatgcaaaagaaataaagaaaatcgagaaagtaaccaaccatgatgtgaaagccgtcgagtactttctgaagcaaaggtgcagctccaatccagagattgctaaggtgtcggagttcttccattttggctgtacctctgaagatatcaacaatttgtcacatgcattggctccgaaagaggggggaaatagaggtatgttccctgccatgaatgacacatgcacagcattatgttccctggcgacacaaaattcag

SEQ ID NO: 7397 - DNA, 295 bp, Zea mays
ctccataacagacagatttatccacctatcaatgtcctgccatctctatctcgattgatgaagagtgctattggtgagggcatgacacgtagagaccattcggatgtgtctaatcagctttatgccaactacgcaattggaaaggatgttcaggccatgaaggcagtcgttggagaggaggcactctcgtctgaggatctgctttacttagagttccttgacaagtttgagaggaagtttgtgacacaaggagcatacgacacacggaacatcttccagtcactagatcttgcat

SEQ ID NO: 7398 - DNA, 296 bp, Zea mays
ctcccagcctctcttactctccgccgtcgccctgctcgcccgaagcagctgccggcaaaatggccccgaagagaggcggtagggcgccggtccccgccaagaagaaggcggtggtgacgaacccgctcttcgagaagaggccgaagcagtttgggatcggcggcgcccttccgcccaagaaggacctccaccgcttcgtcaagtggcccaaggtcgtgcgcatccagcgccagcgccgcatcctcaagcagcgcctcaaggtgcccccggcgctcaaccagttcacacgtaccctc

SEQ ID NO: 7399 - DNA, 294 bp, Zea mays
ccacgcgtgcgcccacgcgtccgcggcaaagcacttcctgatggccctgttgttatatctccagatggtctcttcccgtcactttacagagaagtcatcagaagagctccgcatgaattcaagatttcgtgtctagaggccatcaaagatttatttccacacgactcaaatccgttttatgctggatttggaaatagagacacagacgagcttagctacctcaaggttggtattcctatgggcaagatcttcataataaaccccaagggtgaagtcgcagtgaaccgacgggtc

SEQ ID NO: 7400 - DNA, 288 bp, Zea mays
cccacgcgtcgcaccgaagcgcactgagcaaggcggaggcggcgggaccggcgatggagcggctgcagcggatctttggcgcctccggcatggggcagccgccgacggactcgccgctgctcgactcctccgagcaggtctacatctcctccctcgcgcttctcaagatgctcaagcacgggagggccggcgtgcccatggaggtcatgggtctcatgctcggcgagttcgtcgatgactacaccgtcagggtcgtcgacgtcttcgccatgccgcagagcgggactg

SEQ ID NO: 7401 - DNA, 294 bp, Zea mays
cccacgcgtccgagaaaacgcactgcagcaccacttcctgcgctgctgctcatcacacaccgtagtactaacactccatcgccacaatggctcccaaggttgcgctcttccttgccctcagcctcctcttcgctgccgccgcgcatggctgcggaccctattgctccggcccagtcgtaccaaccccaccagtcgtgccgtcgcacagccacgggcgctgcccgatcgacgcgctgaaactcaaggtgtgcgccaacgtgctgggcctcgtcaaggtcggcctgccccaacacg

SEQ ID NO: 7402 - DNA, 296 bp, Zea mays
caacaaaaggagaaggaatatgcttaaagagttgattaaggtcattcaacaggagcaccatagctacaaggatcccgtaactgaatttctggaatgcttatatgttaactatgattttgatggtgctcaacagaaactcatagagtgtgagcaggttatactgaatgatccattcctgggaaagcgcattgaagagggaaattttgtcagtgtatcctttgagagatgagttccttgacaatgctaggctttttattttcgagacatactgccgtatccatcggtgcatcgatatc

SEQ ID NO: 7403 - DNA, 290 bp, Zea mays
cgcagaccctctgttattagttgtatacacgtactcgacgtcctgtgttggcgcacgtgcaatggagtgcgagaccggcctggtcgaccgccccctcaacagctcagcgccgcgcaccggcgaccccttgaagtggggcaaggcggcggagggtcttactgggagccacctggacgaggtgaagaggatggtggaggagtaccgcgtgccgctggtgaagatcgacggcgccgtgctcagcgtcgctaaggtggcagccgtcgccggccgtgtacaggtggcgctggacg

SEQ ID NO: 7404 - DNA, 292 bp, Zea mays
ccccagaccgaccaaaccggcagagccgggtggcggcgatggcgctgcgacgggcgctcctcagatcggcagagatctctttcgaacgcaaggctgcaattgagtacattcattctttatcaagggcacagcctgctcgttctctcaatggtgctggcctttgtcctgctagtagatcacttagcacccaggccgccactacgtcaagcacaccacaacctccgcctcccccaccccctccagagaagactcactttggtggcctcaaagacgaggatcgcattttcaccaa

SEQ ID NO: 7405 - DNA, 289 bp, Zea mays
agatcgcactacccggcgctcgcgcggctttctttcccaactccgacgaaggctagctacaccaccttgtgcgggctcgtctccatcgcccgccacccgctccgtcgtcgtcgtcaccgccgcgccgatcccgaatcgaatggggagcctggcgtccgagaggaaggtggtcgggtgggccgccagggacgccaccggacacctctccccctactcctacaccctcaggaacacaggccctgaagatgtggtggtgaaggtgctctactgcgggatctgccacacggac

SEQ ID NO: 7406 - DNA, 333 bp, Zea mays
gtcgcttccagccgccgccgcgtccgcctcgccaagcgcagagccgccgcagcacatcgctctcttgatctcagccatggcggaggtggagcagcaacaggacacgccgaagctcttcaaccgctggaccttcgatgatgtccaggtgaacgacatctcgctgaacgactacctcgctgtgaacgcgacgaagcacgcgatgtacctgccgcacaccgcggggcgctactccaagaagcggttccgcaaggcgcagtgcccgatcgttgagcgccttacaaactccctcatgatgcacgggcgcaacaacggcaagaaggtcatggctgtccg

SEQ ID NO: 7407 - DNA, 325 bp, Zea mays
ggaagaacaagaaggatatcactggcaaccccaaggctctccggaagctgaagaccgcttgtgagaaggcgaagaggactctgtcttccactgcccagaccacgattgagattgactcgctgtatgaaggcatcgacttctactccaccatcacccgtgccaggtttgaggagctcaacatggacctgttcaggaagtgcatggagcctgttgagaagtgcctgagggatgccaagatggacaagagcaccgtccatgacgttgtacatgttggtggctccactaggatcccagggtgcaacaactgctccaggacttcttcaac

SEQ ID NO: 7408 - DNA, 326 bp, Zea mays
cgctaatcaggctccagcttgatcttattcataattttttccagattaccacagttgatgaagcaaaggaattctacccgttatttggccttggggctaatattgctcttatcttttctgggcgtacattgaagtatttctcaaatttgcgcaggacattgggtcctggaattgatggctgggaagtatctttgaaaggaatgatgagcatagtggtactccttggacttgtcataacttccatctattggggagtgaacaagtttgttttgaatgatccttcacttccaaaggctgatcgtaagaagaaaaaggaaaagcctaaa

SEQ ID NO: 7409 - DNA, 325 bp, Zea mays
tttttgtaaaagccggagaggacgtatcggcaaagatcatgtcgttctcgcagcacgggacacgcgcggtctgcatcctttcagcaaacggcgccatatcaaatgtgacgcttcggcaatctgccacttcgggtggaacggtgacatacgagggtcgtttcgagatactgtctctgtccgggtcgtttcttctgtcagagaacggtggccagcgcagtcgaactggtgggctcagcgtttcgctagcaggccccgacggccgtgtcctgggtggctgtgttgccggactcctgacggctgcttcaccggtacagatcgtagtggg

SEQ ID NO: 7410 - DNA, 327 bp, Zea mays
aggacgtgaactccctgggcctcgtctcggccaggaagaccgccgaggcgatcgacatcctgaagctcatgtcgtccacctacatcgtggcgctgtgccaggccgtggacctgcgccacctcgaggagaacatcaaggcgtcggtgaagaacaccgtgacccaggtggccaagaaggtgctgaccatgaacccctcgggcgagctctccagcgcccgcttcagcgagaaggagctgatcagcgccatcgaccgcgaggccgtgttcacgtacgcggaggacgcggccagcggcagcctgccgctgatgcagaagctgcgcgccgtgc

SEQ ID NO: 7411 - DNA, 332 bp, Zea mays
cactccaccaagagcggagatgagctgacaagcctcaaggactatgtgactaggatgaaggagggccagaatgacatctactacatcactggcgagagcaagaaggccgtggagaactcccccttccttgagaagctgaagaagaagggctatgaagtcctgtacatggtggacgccatcgacgagtatgctattggccagctcaaggagttcgagggcaagaagctcgtctcggccaccaaggagggcctgaagctcgatgagagtgaggatgagaagaagcggaaggaggagcttaaggagaagttcgagggcctgtgcaaggtgatcaa

SEQ ID NO: 7412 - DNA, 327 bp, Zea mays
ggatcagactagcgagccaagccaccgacggccgacgtcgagcctccgcggccgagcctccgcctagcaccaactccgtcgtcgatcgtcctatgcgaccacgcccccgtccgccttccgtctcctgcctccactgagtcgcgggcgcgacatcggggaacgccaaggctgagcttcgcccatacgcctaccgccctgttatgccccgaaccgccgtgctgaggtccgcccaggccgggccaggagcttctcccggcagacccacccccgcccaacggagctccatgcctccgcccagggccattgtccgagctacgccccacgctc

SEQ ID NO: 7413 - DNA, 322 bp, Zea mays
aaaatgttggctgaggaaatgcaagcagttagtaaagggctggaaaaagttcaccttgagtatgatgcttcagaaagggatggtccagtatctgaaatttttcgtgagatactgaaagagttcaccgacaatgctggagctgatgtgcagtcgttatcttcattgttttctgaagtgggtaaaaaggctgatgcgttgattaagtattttggtgaggatcctgttcgctgcccctttgaacaagtaatctctaccctcttaacatttgtaacaacatttcgaaaagcacatgaggagaacctgaagcaagctgagcttgaga

SEQ ID NO: 7414 - DNA, 320 bp, Zea mays
agccaatgcgctacagttctccctgactcactgccatacacagaatcagcaattttaggatgtgcagtgtttaccgcgtatggtgccctgaggcatgctgctgaaatgcggcctggtgattcagtagctgtgatcggagttggaggggttgggtcaagctgtttacagatagcaaaagcctttggagcttcccaagtcattgcagtggatgtccttgatgagaagcttcagaacgctacaacacttggagcaacccacactgtaaatgcagcaaaagatgatgcagttgaaaggataaaggaaattactgatggtagggg

SEQ ID NO: 7415 - DNA, 322 bp, Zea mays
cccacgcgtccgatcttattggctcagggcaaagagtatgtctttgttgcaaactcagacaacttgggtgctatagtcgacatcaagatcctaaaccatctgatcaataaccagaacgagtactgcatggaggttactccaaagacgctggctgacgttaagggtggcactctcatctcttacgaaggaagagttcagcttttggagattgcccaagtacccgatgagcatgtgaatgaatttaaatcaatcgagaagtttaagatattcaacactaacaacttgtgggtgaaccttaaagctatcaagagactcgtagagg

SEQ ID NO: 7416 - DNA, 322 bp, Zea mays
agctgctttagctagctagcaagagagagagagagagagaaaaaatatggctccactcgtcgctactgccacgatgaaccacgctgtggcccatctgctaggacccaatcatgagagtttctcacggcaccatctttcttcctcgctgcagcaaaacagtaagcgaaggtgtaatcttagcttcaggccacgagctgctgagagtcagaatggaagccaaacgctgagcccctcggaagtccctaaaagagactggttcccctctgacttcatctttggtgccgccacttcagcgtaccaaattgaaggtggatggaacgag

SEQ ID NO: 7417 - DNA, 318 bp, Zea mays
caaactaggagaggtcgctgtggagaatgggcgaattgcttcacattctattgtcgagcttttggatatgatgctcgtttgattctggatttcactgatcacgtgtggacagaatgtttttcaaacttgtatggaagatggatgcacctagatccatgcgaaggagtctatgataatcccttactgtacgagaaagggtggaacaagaagttaaattatgttattgcgatttctaaagatggagtacgggacgtaacaaaacgctacaccagaaagtggcatgaggttctctctaggcgaataattacctccgaagaa

SEQ ID NO: 7418 - DNA, 311 bp, Zea mays
ctagatccgttcatcctggtggttttgtgaggtcgaaagcggcgagcgaattagaagatgctggacaagctgtgggacgacgtggtggccgggcctcgcccggagacgggcctcgagaagctccgcaaggccaccaccgcccgcccgctcgtcatcaacaaagacgcggacggcggacactacaagctggcgcagtcgacgccgtcgaccccgacgacgccggtgacgccgtcgtcgtcgacgacgccgcgcggcgccggcaacgtgtggcgcacgtcttcgacccggggagcaacctggccaccaagggc

SEQ ID NO: 7419 - DNA, 323 bp, Zea mays
gccatggccgcagccgccctcattcgccgcctccccgctgcccgggcccaggccccggcattcatggcggcgcgaccgatctccgactccacggcagcgttcaccatcgagacatctgtccctttcacctcccacctcgtcgacccaccctcgcgtgatgtcaccaccacccccgctgagctcgtcaccttcttccgcgacatgtccctcatgcgccgcatggagatcgcggccgactccctctacaaagccaagcttatccgtgggttctgccacctctacgacggccaggaggcgtcgccgtcggcatggaggccgccatc

SEQ ID NO: 7420 - DNA, 325 bp, Zea mays
ctacctgatttgtttaccccccgaaaatttgccgtctcctcgtctcgctcctctccctgcgcacccccagatccggcaccgcccgctcctcgatccccgcaccccacgcccgcatgccagggaccggcggggtcgcgcgccgggtaggaggaggagaagaggaagggcggtatggcggcgccgccggcgagggcccgggccgactacgactaccttatcaagctgctcctcattggagacagcggtgttggcaagagttgcctcctgttgcggttctctgatggttccttcactacaagctttattaccacaattggtattgact

SEQ ID NO: 7421 - DNA, 319 bp, Zea mays
gagcttgtgctgctactgctactataccagcgctactagcagcagccgccggccggctcgcgcaactaaggaagggtcgacatgacgatggggctccgcgtccgcgagtcctccgcgctgctggctctggccgtcgcgctcacctgctgctccgttgcagtggtggcctacgacccccttgacccgaacggcaacatcaccatcaagtgggacgtgatctcgtggacgcccgaagggtacgtggcgatggtgacgatgagcaactaccagatgtaccggcacatcatggcgcccgggtggacgttggggtggtcgtggg

SEQ ID NO: 7422 - DNA, 320 bp, Zea mays
cccacgcgtccgcgcttactccgaggagaacctcgacgacaagagcgagtttctcctcagctccaaccccgtgctcaagaaggtgcccgtgctcatccaccacggcaagcccgtctgcgagtcccagatcatcgtgcagtacgtcgacgaggctttccccgccgccgcacctaatttccttcaatccgacccctacgaccgcgccattgctcgcttctgggcctcctacgtcgacgacaagttctacagcgcgtggatacccgtgttcaggggcaggacggcggaggagatggcggaggcggcgaggcaggccgtcgcgg

SEQ ID NO: 7423 - DNA, 317 bp, Zea mays
ccggcagaggctgtacaaccagacaggcaacggcatggccgacagcacgctggacgtgtcctacgccgcgcggctgaggcagagctgcccccgctctggcgccgacagcaccctcttccccctggacgtcgtcgccccagccaagttcgacaacttctactacaagaacctcctggccggcaggggccttctcagctccgacgaggttctgttgaccaagagcgccgagacggcgtccctcgtcaaggcgtatgccgccgacgccggtctcttcttccgccactttgcgcagtccatggtcagtatgggcaacatct

SEQ ID NO: 7424 - DNA, 315 bp, Zea mays
agcgaagcgtcaacgatggcttccgctccgctgccggcggccatcgagcccgggaagaaaggcaacgtcaagttcgccttcgcctgcgccatcctcgcctcaatgacctccatccttctcggctatgatatcggagtgatgagcggcgcgtcgttgtacatcaagaaggacctgaaaatcagcgacgtgaagctggagatcctgatgggcatcctcaacgtgtactcgctcatcggctcgttcgcggcagggcggacgtccgactggatcgggcgccgctacaccatcgtgttcgcggcggtgatcttcttcgcg

SEQ ID NO: 7425 - DNA, 318 bp, Zea mays
cccacgcgtccgcccacgcgtccgggcttccgccagcgcccagctggaggtctcgctgttcgcttcacgatacgcccccccaaagcggatcaaaccctagatctcgtcttgtcggcccgttcctccgatcccatcctatccgatcctcatggattcctcctcgtccagcctcagccagcagcacgagttcgactacctcttcaagctactccttatcggcgactccggcgtcggcaagagcagcctcctcctccgcttcaccgccgactccttcgatgacctctaccctacgataggtgttgacttcaaggtgaagat

SEQ ID NO: 7426 - DNA, 310 bp, Zea mays
ctcggaaagcattgtgcaagaagctttagaccgtttgatggttgggaggacgactgtagttgttgcccaccgtctgtcgacgataagaaacgtgaacatgatcgctgtgatccaacaaggccaagttgttgagactgggacgcatgatgaactcattgcaaaaggaacctctggagcatatgcctcccttgttcgttttcaggaaacggcacggaacagggatcttggaggtgcatctagccgccagtcacggtcaattcacttgacaagctcactttccaccaaatctctcagcctcaggtctggaagt

SEQ ID NO: 7427 - DNA, 312 bp, Zea mays
agcggatgctgttcgtgggtgactcgctgaaccgggggcagtacgtgtccctcctctgcctcctgcaccgggccatccccgacggcgccaagtcgttcgagacggtggactcgctgagcggcttccgggggaagaactacgacggcaacaacggggtcgactgggcgccgcagctggtcgaggccaactccgacgacgccgtggtgcactccgccgacgaccgcctcatccgcggcgcgcccatggacaggcactacagcttctggaagggcgccgacgtcctcgtcttcaactcctacctctggtgggtcg

SEQ ID NO: 7428 - DNA, 313 bp, Zea mays
  unsure (1)..(313): unsure at all n locations
gcaccacttcctgcactcactgtgctagctgctcaaaccgtagtagtaacagtccatcaccaccaatggctcccaaggttgcgctcttccttgccctgagcctcctgtttgctgccaccgcgcatggctgcgaaccccaccgttctggcccaggcgtcccaaaggcgccagncgtgccgaccccgtcgtcgcacagccacgggcgcatcccgatcgacgcgctcaagctcaaggtgtgcgccaacgtgctaggcctcgtcaaggtcggcctaccccagtacgagcaatgctgcccgttgctggagggtctggt

SEQ ID NO: 7429 - DNA, 115 bp, Zea mays
gcggtggatcccgctggaggccaacccggacgtcctgaaccagttcatatgggggctgggagtccacgaggaggatgtgcagttctgcgacgtctacggccttgacgatgagcgg

SEQ ID NO: 7430 - DNA, 108 bp, Zea mays
cttggtattgatgttttcagaattgatcgagtaataagcacctttggcatgccaatgggaccttttcaactccaagatgtggctgggtatggagttgccttggcagta

SEQ ID NO: 7431 - DNA, 318 bp, Zea mays
cgcccgtccccgatctccgatcccctcgtcgatccaaagatgcagatcttcgtcaagaccctcactggaaagactatcaccctcgaggtggagtcttctgacaccattgacaacgtcaaggccaagatccaggacaaggagggcatccccccggaccagcagcggctcatctttgctggcaagcagctcgaggacgggcgcacacttgccgactacaacatccagaaggagagcaccctccaccttgttctccgcctcaggggaggcatgcagatcttcgtcaagaccctcactggaaagactatcaccctcgaggtg

SEQ ID NO: 7432 - DNA, 310 bp, Zea mays
ccctgacctcccccatacaccctcccagaaaagacccctcgaaaaacggcggcgctgcgacatggcggaggtcgaggctccagctactgcggtcgaggctccagctgctgcggtcgcgacgacgacccctgaggttgcgggcgcccagggcggaaacgctacggaagcgaagggtccgcacaagctttaccggcagtggaccttctggtacgacatccagacgaagaccaagtccggggctgcgtggggcacctccctcaaaaaggcctacaccttcgacaccgttgaggagttctggagcatgtatgat

SEQ ID NO: 7433 - DNA, 308 bp, Zea mays
aaacgaaaaaacccagcttatttctctaagctggtttcctctttcattgaaagatgtgcaacacgaagttctgtagaggagaccaatattgccatgctaactgaagatcaaaccaaccaattgctgtcttcattctggattcaggcaaatcaaacagataataccccttttaattatgaggctattggacattcatacagcctaacagttctttcttcccgccttaagaattcaagcaatggcaatatcattcagtttttccaattgccattatctcttcgaagtgttgctttaaccccgagtgaagt

SEQ ID NO: 7434 - DNA, 264 bp, Zea mays
cttccactctcccttgacctgtctccttcacctgctgattgctgtgccgctccgctccgctccggtggcatctgcatctgcatctccatccctcgatctgtcttctctcaggggggaataagcgtgacaatggaggctccacccgtggcgctgttcgacaccctcaaggcagccaaaccgttcttcttgttggctggtcccaacgtgattgaatcggaggagcacgtcctgaagatggccaaacacatcaaagcaattacgacc

SEQ ID NO: 7435 - DNA, 311 bp, Zea mays
tctcctcgcattttccttgcaaccgattgcctatccccctcccaaccaaagaccgatggcgcccaaggccgagaagaagcccgcggcgaagaagccggcggaggaggagcccgcggccgagaagacgaccgccgggaagaagccccaggcggagaagcggggccccgcggggaaatccgccggcaaggagggcggcgagggcaagcgtggcaagaagaagggcaagaagagcgtggagacgtacaagatctacatcttcaaggtgctgaagcaggtgcacccggacatcggcatctcctccaaggccatgt

SEQ ID NO: 7436 - DNA, 311 bp, Zea mays
cgcttccttccctagcgccgacgcccaccagacgagatggccccgaagaaggacaaggccccgccgccgtcgtcgaagccggccaagtccggtggtggcaagcaaaagaagaagaagtggagcaagggaaagctaaaggagaaggtaaacaacgcggtgctgttcgaccaggctacctacgacaagctgctctcggaggtgcccaagtacaagcaaatcaccccttccatcctctccgagcgtctgaggatcaacggctcccttgctcggagggccatcaaggacttgatggcgcgtggcctcattcggat

SEQ ID NO: 7437 - DNA, 307 bp, Zea mays
gttgggaaggacaagcttgtcgtatcaacttcctgctcgctcatgcacaccgctgtggatcttgtgaacgagactaagcttgacagcgagattaagtcttggcttgcttttgctgcccagaaggttgttgagggtgaagctcttgctaaggcattggccggtcaaaaggatgaggcttacttcgcagcaaatgctgctgctcaggcctcgaggaaatcctcaccccgtgtgaccaatgaagaagtccagaaggctgctgctgctctcaagggctctgaccaccgccgtgggaccaacgttagtgcta

SEQ ID NO: 7438 - DNA, 304 bp, Zea mays
cggacgcgtgggcgcgtccacaaccgctgtctccccgtcgccctccaccagccgcttcctccgccacgcctcgccggtgccccgcacccctgaccactccccttaccttcgggtccccggccggggcgtctttacgcgcccctcagggctccgcgtcgtcacgcaggcctacccggtcgccacacggattgcctccgtcggcgtctgggtcgatgcggggagccgcttcgagctccctggaaccaacggaaccgcacacttcctggagcacatggccttcaagggcacacggcgccggcccaac

SEQ ID NO: 7439 - DNA, 299 bp, Zea mays
acgggccgctggacacccaaatccagtggttcaggcagctgctcccctccgtgtgcgggaagggtacgtgtacgtcgatgcatgcataaacaccattaattacgcggcgttaactggcatgtattggtgccttggtggccgggcagcagattgcaagaactacctgtccaagtccctgttcgtggtgggcgagttcggcggcaacgactacaacgcggcgctcttctcggggcggtccatggcggaggtgagagggtacgtgcccatggtggtgagcaagctcgtccgcggcctggagg

SEQ ID NO: 7440 - DNA, 311 bp, Zea mays
tctcacctgtttcgctgctcgcccgatctcgcgctgccggcagcgatctgagatcgagcgaactaagctttttcatcgagatggtgcttgtactgcatgctaacagtggtaacaaaaatgcattcaaaacactaattgccgcagaatacagcggtgtcaaggttgagttggtgaaggactttcaaatgggtgtctccaacaaaactccagagttcctcaagatgaaccctattgggaagattcctgtcctggagactcctgatggtcctgtttttgagagcaatgcaattgcaagatatgttactcgcttg

SEQ ID NO: 7441 - DNA, 307 bp, Zea mays
ggaccgtggttcggctgacaatggggaaggggttcgcgtcgtacttggcgatgaagacggggtcggagggcggcgacggcgcggcggcggtggcggcgcacaggcgctcatcgacgcggacctgcggaacctcggcgtcgcgcgcgaaagctcgccaaccacgccttcgtcctcggcggcgggttggggttcggcacttctttcctcaagtggctggccttcctcgccgcagtgtatctcttgatattggactgcacgaactggaagaccaacatgctgacagctctcttggttccttacattttct

SEQ ID NO: 7442 - DNA, 310 bp, Zea mays
cgccgccgtcttctgcggttctgccgtttactcctccactttggcctcctcacttgcaagtttaatcttcgcctccagccatgggtaaggagaagtctcacatcaacattgtggttattgggcacgtcgactctggcaagtcgacaaccaccggccacctgatctacaagcttggaggcattgacaagcgtgtgatcgagaggtttgagaaggaggccgctgaaatgaacaagcggtcctttaagtatgcttgggtgcttgacaagctcaaggctgagcgtgaagagggtatcaccattgatattgctct

SEQ ID NO: 7443 - DNA, 308 bp, Zea mays
atccttcaagcgcaactgcctcctcctcgtcgtccggtcgtgagaagggatggcgggccgtggcaaggctatcggcgctggcgcgcgaagaaggcaacgtcgaggagctccaaggccggactccagttccccgtcggcaggattgctaggttcctcaaggcgggcaagtacgctgagcgcgtcggcgccggcgcccccgtgtacctcgccgccgtcctcgagtacctcgcggctgaggttctcgaacttgccgggaacgccgcgagggacaacaagaagacccgcattgtgccgcgccatatccagct

SEQ ID NO: 7444 - DNA, 304 bp, Zea mays
cggacgcgtggcgtgacgcgtgggcaagaatcgccgcgaaccgtgacggcgacagtgctcgttgccgtatcagtcctggcgaccctggcgcgcaccgacggcgccctctgcgacaagtccgacaatgcagccttgcttgccgtgaagtcggcgctgggcaacccaccggcgctctccggctggaactccaccgtggcctgctgctcctgggagggcatctcctgcaacgccaccaccggccgcgtcaccgacctgaccgtcttcgcgctcaacatctcggcgccggtcccggcctgcatcgcca

SEQ ID NO: 7445 - DNA, 305 bp, Zea mays
gctcatgatgagccaggcgatcaagtcggagacggagcgcattgagtacctcaagacggtgagcgactgctacacgcggacgatgaagctcctcgacgattccatggcggccaggaccacgtacgagcgttcgggcggaacgaggagcctcgtcgcccgggacatggacgactacgtcgtctacggcctcaacgcgtgcttgcagaacgtccgcaactgctgcgtgcgcctggacgccatcgacaagctgcgggcgcactacgacgccctcgccgacgccgtcgccgacccggccgccaacgtcg

SEQ ID NO: 7446 - DNA, 314 bp, Zea mays
cgcacacaccttttccgtttgcagtggtgcaggtcttttcggtcctcaggcttcatccctgtgcaagtgcagggataattgcttctgatctcccgaggctgcataacctgattcagaggcagagcaagggggcgtgagggagatgagggagatcatcagcatccatatcgggcaggcaggcatccaggtagggaattcttgctgggagctctactgcctctagcacggtatccagcctgacggcctcatgcccagtgacacctctgtcgggatcgcgagggatgcgttcaacacgttcttcagtgaaacgggcg

SEQ ID NO: 7447 - DNA, 317 bp, Zea mays
acctcctctgctctcccccacctcccggtccggcagcagagagcgggggtgcagagagatcgagatccggaggccgcgagtgggagcgccaccaccagcgactgcggcaatggcgggcacggtgacggtcccggggtcgtcgaccccctccacgccgctgctcaaggacgagctcgacatcgtgatcccgacgatccgcaacctcgacttcctggagatgtggcggcccttcttccagccctaccacctcatcatcgtgcaggacggcgacccgaccaagaccatcaaggtgcccgagggcttcgactacgagctct

SEQ ID NO: 7448 - DNA, 305 bp, Zea mays
agaggacactcctcctcagaactctcccttccctcttgtaggggccaaaagggtcagagatctaggaagaagagaactagtccccaagcctaacaagaaagcaagctcttctgcaactgttggcattcgccttaatttgtatccatatcccaatggcaggcctatctctgcaacacccctgggcattcactttcggcctcctaggcaacgtcatctccttcatgaccttcctggccccgataccgacgttctaccgcatctacaagagcaagtcgacggaaggcttccagtcggttccgtacgtg

SEQ ID NO: 7449 - DNA, 306 bp, Zea mays
gcaagccttgctaggattgcaaaaaataatggaaagacagttttgcattcagcagcaagaatgggtcatgtggaggtggtaactgctctattaaataaggatccagggcttggtttcagaacagataagaagggacaaacagctctacacatggcttcaaaaggcctggcttcaaaaggccagaatgcagaaattctgctcgagttgttgaagcctgatgtctcagttatccatgtagaagacggcaaggggaatagaccattgcatgttgcaactcggaagggaaacaccattatggttcagacc

SEQ ID NO: 7450 - DNA, 306 bp, Zea mays
ggcgaaagagtagcagcagcaggcggcgccgagtagcggctccccacctcgagcttgccaccatggctagaggattgaagaagcatttgaagaggctcaatgcgcccaagcattggatgctggacaagcttggcggagcttttgctcccaagccatcttctggacctcacaagtctagggagtgcctgccactgatcctcatcatcaggaacaggctcaagtatgctcttacataccgtgaggtcatttccatcctgatgcaacgccatgtacttgttgatggcaaggtcaggacagacaagacct

SEQ ID NO: 7451 - DNA, 305 bp, Zea mays
ccacgcgtccgcgtaccccgcctcccggttcaaccaaatccctctcgcctcatccccaccagcgcaaagccgccctatcgtcctgtcgtgagaagcaatggcgggcagtggcaaggcgattggcgctggtgccgcgaagaaggcaacgtcaaggagctccaaggctgggctgcagtttcccgtcggcaggatcgctcggttcctcaaggccggcaagtacgccgagcgcgtgggcgccggcgcccctgtctacctcgcagctgtcctcgagtacctcgccgctgaggtcctggagcttgctggga

SEQ ID NO: 7452 - DNA, 313 bp, Zea mays
actagcagcaaatggcgatctttgggcctatgagaagaagatcctggcaccacagttctttgtagaaaaaattaagggtatgatagggctaattgtggatgcaaccgttccactgttacaatcatgggagaatatgctcgatggcacaggaggtagtaaggagatctatgttgatggatacctgaggaacctttcagcggatgtgattgctagagcatgtttcgggagcgatttcgtagaaggaaaagacatattttgcaagctcatgcagctccaaaagctgatttctgaacaggatacacttgttggggtg

SEQ ID NO: 7453 - DNA, 297 bp, Zea mays
agaaggtcatcctcttcggcgtccccggcgccttcaccccgacctgcagcaaccagcatgtgccaggcttcatcacacaggctgagcagctcaaagccaagggtgtagacgagatcctgcttatcagcgttaacgaccccttcgtcatgaaggcgtgggcgaagacctaccccgagaacaagcacgtgaagttcctcgccgacggatctggagcgtacaccaaggcgctcgacctcgagctcgatctcacggacaaagggctgggcgtgcgctcgaagaggttcgctctcctggccg

SEQ ID NO: 7454 - DNA, 284 bp, Zea mays
cggacgcgtggggtttccccatctcccagatccaattcgcgagttctccctcctctgccgccatggcgctctctgtggagaagacctcgtctggacgggagtaccaggtcaaggatctctcgcaggcggacttcggccgcctcgagattgagctggccgaggtcgaaatgcccggcctcatggcgtgccgcgccgagttcggcccgtccaagcccttcgccggcgctaggatctcggggtctctccacatgaccatccagaccgccgtcctcatcgagaccctc

SEQ ID NO: 7455 - DNA, 297 bp, Zea mays
aaaccctctaatccatttcggcatttccaacgccttcgccctaccagccacgtcgtttcgaggccgatcgaccgagcagcagcagctggtggcaatggcggcggcggcggaggtcgtgctgctggacttctgggtgagccccttcgggcagcgctgccggatcgcgctggcggagaagggcgtggcctacgagtaccgcgagcaggacctcctggacaagggcgagctgctcctccgctccaaccccatccacaagaagatccccgtcctgctccacgccggcaggcccgtctgcga

(The sequence listing continues in the following parts.)

We claim:

1. A substantially purified nucleic acid molecule comprising nucleic acid sequence SEQ ID NO: 51419 or complement thereof or fragment of either.

2. A substantially purified first nucleic acid molecule, wherein the first nucleic acid molecule specifically hybridizes to a second nucleic acid molecule having a nucleic acid sequence SEQ ID NO: 51419 or complement thereof.

3. A substantially purified protein or fragment thereof encoded by a first nucleic acid molecule which specifically hybridizes to a second nucleic acid molecule, the second nucleic acid molecule having a nucleic acid sequence comprising a complement of SEQ ID NO: 51419.

4. A substantially purified protein or fragment thereof encoded by a first nucleic acid molecule according to claim 3, wherein said first nucleic acid molecule comprises a nucleic acid sequence SEQ ID NO: 51419.

5. A purified antibody or fragment thereof which is capable of specifically binding to a protein or fragment thereof, wherein the protein or fragment thereof is encoded by a nucleic acid molecule comprising a nucleic acid sequence SEQ ID NO: 51419

6. A transformed plant having a nucleic acid molecule which comprises: (A) an exogenous promoter region which functions in a plant cell to cause the production of a mRNA molecule; (B) a structural nucleic acid molecule comprising a nucleic acid sequence SEQ ID NO: 51419; and (C) a 3′ non-translated sequence that functions in the plant cell to cause termination of transcription and addition of polyadenylated ribonucleotides to a 3′ end of the mRNA molecule.

7. A transformed plant according to claim 6, wherein said plant is selected from the group consisting of maize and soybean.

8. A transformed plant having a nucleic acid molecule which comprises: (A) an exogenous promoter region which functions in a plant cell to cause the production of a mRNA molecule; which is linked to (B) a transcribed nucleic acid molecule with a transcribed strand and a non-transcribed strand, wherein the transcribed strand is complementary to a nucleic acid molecule comprising a nucleic acid sequence SEQ ID NO: 51419 or fragment thereof; which is linked to (C) a 3′ non-translated sequence that functions in plant cells to cause termination of transcription and addition of polyadenylated ribonucleotides to a 3′ end of the mRNA molecule.

9. A transformed plant according to claim 8, wherein said plant is selected from the group consisting of maize and soybean.

10. A method for determining a level or pattern of a protein in a plant cell or plant tissue under evaluation which comprises assaying the concentration of a molecule, whose concentration is dependent upon the expression of a gene, the gene specifically hybridizes to a nucleic acid molecule having a nucleic acid sequence comprising a complement of SEQ ID NO: 51419, in comparison to the concentration of that molecule present in a reference plant cell or a reference plant tissue with a known level or pattern of the protein, wherein the assayed concentration of the molecule is compared to the assayed concentration of the molecule in the reference plant cell or reference plant tissue with the known level or pattern of the protein.
